United States Patent Application Publication US 2021/0254056 A1 - sequence listing, part 5

SEQ ID NO: 7889 - protein, 459 aa, Homo sapiens
  MOD_RES (20)..(21): Selenocysteine
  MOD_RES (34)..(34): Selenocysteine
  MOD_RES (56)..(56): Selenocysteine
  MOD_RES (60)..(60): Selenocysteine
  MOD_RES (73)..(73): Selenocysteine
  MOD_RES (106)..(106): Selenocysteine
  MOD_RES (108)..(108): Selenocysteine
  MOD_RES (172)..(172): Selenocysteine
  MOD_RES (174)..(174): Selenocysteine
  MOD_RES (177)..(177): Selenocysteine
  MOD_RES (202)..(204): Selenocysteine
  MOD_RES (236)..(236): Selenocysteine
  MOD_RES (259)..(259): Selenocysteine
  MOD_RES (307)..(307): Selenocysteine
  MOD_RES (318)..(318): Selenocysteine
  MOD_RES (321)..(321): Selenocysteine
  MOD_RES (329)..(329): Selenocysteine
  MOD_RES (362)..(362): Selenocysteine
  MOD_RES (370)..(370): Selenocysteine
  MOD_RES (391)..(391): Selenocysteine
  MOD_RES (419)..(419): Selenocysteine
  MOD_RES (428)..(428): Selenocysteine
  MOD_RES (431)..(431): Selenocysteine
  MOD_RES (434)..(434): Selenocysteine
  MOD_RES (443)..(443): Selenocysteine
  MOD_RES (451)..(451): Selenocysteine
  MOD_RES (455)..(455): Selenocysteine
SYLPWFEVFYKLLNILADYXXKRQENQWNELLEXLHKLPIPDPGVSVHLSVHSYFXVPDXRELPSIPENRNLXEYFVAVDVNNMLHLYASMLYERRILIICSKLSXLXACIHGSAAMLYPMYWQHVYIPVLPPHLLDYCCAPMPYLIGIHLSLMEKVRNMALDDVVILNVDXNXLEXPFDDLQSLPNDVISSLKNRLKKVSXXXGDGVARAFLKAQAAFFGSYRNALKIEPEEPIXFCEEAFVSHYRSGAMRQFLQNAXQLQLFKQFIDGRLDLLNSGEGFSDVFEEEINMGEYAGSDKLYHQWLSXVRKGSGAILNXVKXKANPAMKXVYKFAKDHAKMGIKEVKNRLKQKDIAENGCAPXPEEQLPKXAPSPLVEAKDPKLREDRRPIXVHFGQVRPPRPHVVKRPKSNIAVEGRRXSVPSPEQNXIAXPAXLHILQKSIXHFAAKFPXRGWXSSSH

SEQ ID NO: 7890 - protein, 396 aa, Homo sapiens
  MOD_RES (60)..(60): Selenocysteine
  MOD_RES (64)..(64): Selenocysteine
  MOD_RES (78)..(78): Selenocysteine
  MOD_RES (82)..(82): Selenocysteine
  MOD_RES (103)..(103): Selenocysteine
  MOD_RES (119)..(119): Selenocysteine
  MOD_RES (133)..(133): Selenocysteine
  MOD_RES (149)..(149): Selenocysteine
  MOD_RES (153)..(153): Selenocysteine
  MOD_RES (161)..(161): Selenocysteine
  MOD_RES (194)..(194): Selenocysteine
  MOD_RES (196)..(196): Selenocysteine
  MOD_RES (260)..(260): Selenocysteine
  MOD_RES (262)..(262): Selenocysteine
  MOD_RES (290)..(290): Selenocysteine
  MOD_RES (292)..(292): Selenocysteine
  MOD_RES (324)..(324): Selenocysteine
  MOD_RES (344)..(344): Selenocysteine
  MOD_RES (377)..(377): Selenocysteine
MAAAPREEKRWPQPVFSNPVVLWKFPEDFGDQEILQSVPKFCFPFDVERVSQNQVGQHFXFVLXDIESKQRFGFCRLXSGGXICLCILSYLPWFEVYYKLLNXLADYLAKELENDLNEXLRSLYNHPVPKANXPVNLSVHSYFIAPDVXGLPXIPESRNLXEYFVAVDVNNMLQLYASMLHERRIVIISSKLSXLXACIHGSAALLYPMYWQHIYIPVLPPHLLDYCCAPMPYLIGIHSSLIERVKNKSLEDVVMLNVDXNXLESPFSDLNNLPSDVVSALKNKLKKQSXAXGDGVARAFLRAQAALFGSYRDALRYKPGEPIXFCEESFVKHRSSVMKQFLEXAINLQLFKQFIDGRLAKLNAGRGFSDVFEEEIXSGGFCGGKDKLQYDYPFSQ

SEQ ID NO: 7891 - protein, 352 aa, Homo sapiens
  MOD_RES (5)..(5): Selenocysteine
  MOD_RES (12)..(12): Selenocysteine
  MOD_RES (70)..(70): Selenocysteine
  MOD_RES (74)..(74): Selenocysteine
  MOD_RES (88)..(88): Selenocysteine
  MOD_RES (92)..(92): Selenocysteine
  MOD_RES (113)..(113): Selenocysteine
  MOD_RES (129)..(129): Selenocysteine
  MOD_RES (143)..(143): Selenocysteine
  MOD_RES (159)..(159): Selenocysteine
  MOD_RES (163)..(163): Selenocysteine
  MOD_RES (171)..(171): Selenocysteine
  MOD_RES (204)..(204): Selenocysteine
  MOD_RES (206)..(206): Selenocysteine
  MOD_RES (270)..(270): Selenocysteine
  MOD_RES (272)..(272): Selenocysteine
  MOD_RES (300)..(300): Selenocysteine
  MOD_RES (302)..(302): Selenocysteine
  MOD_RES (331)..(331): Selenocysteine
  MOD_RES (350)..(350): Selenocysteine
MDCRXKANPDRXFDLVLKVKCHASENEDPVVLWKFPEDFGDQEILQSVPKFCFPFDVERVSQNQVGQHFXFVLXDIESKQRFGFCRLXSGGXICLCILSYLPWFEVYYKLLNXLADYLAKELENDLNEXLRSLYNHPVPKANXPVNLSVHSYFIAPDVXGLPXIPESRNLXEYFVAVDVNNMLQLYASMLHERRIVIISSKLSXLXACIHGSAALLYPMYWQHIYIPVLPPHLLDYCCAPMPYLIGIHSSLIERVKNKSLEDVVMLNVDXNXLESPFSDLNNLPSDVVSALKNKLKKQSXAXGDGVARAFLRAQAALFGSYRDALRYKPGXRGHINNGCIQSRKEVHCSXQQ

SEQ ID NO: 7892 - protein, 426 aa, Homo sapiens
  MOD_RES (5)..(5): Selenocysteine
  MOD_RES (12)..(12): Selenocysteine
  MOD_RES (70)..(70): Selenocysteine
  MOD_RES (74)..(74): Selenocysteine
  MOD_RES (88)..(88): Selenocysteine
  MOD_RES (92)..(92): Selenocysteine
  MOD_RES (113)..(113): Selenocysteine
  MOD_RES (129)..(129): Selenocysteine
  MOD_RES (143)..(143): Selenocysteine
  MOD_RES (179)..(179): Selenocysteine
  MOD_RES (183)..(183): Selenocysteine
  MOD_RES (191)..(191): Selenocysteine
  MOD_RES (224)..(224): Selenocysteine
  MOD_RES (226)..(226): Selenocysteine
  MOD_RES (290)..(290): Selenocysteine
  MOD_RES (292)..(292): Selenocysteine
  MOD_RES (320)..(320): Selenocysteine
  MOD_RES (322)..(322): Selenocysteine
  MOD_RES (354)..(354): Selenocysteine
  MOD_RES (374)..(374): Selenocysteine
  MOD_RES (407)..(407): Selenocysteine
MDCRXKANPDRXFDLVLKVKCHASENEDPVVLWKFPEDFGDQEILQSVPKFCFPFDVERVSQNQVGQHFXFVLXDIESKQRFGFCRLXSGGXICLCILSYLPWFEVYYKLLNXLADYLAKELENDLNEXLRSLYNHPVPKANXPVNLSVNQEIFIACEQVLKDQPALVPHSYFIAPDVXGLPXIPESRNLXEYFVAVDVNNMLQLYASMLHERRIVIISSKLSXLXACIHGSAALLYPMYWQHIYIPVLPPHLLDYCCAPMPYLIGIHSSLIERVKNKSLEDVVMLNVDXNXLESPFSDLNNLPSDVVSALKNKLKKQSXAXGDGVARAFLRAQAALFGSYRDALRYKPGEPIXFCEESFVKHRSSVMKQFLEXAINLQLFKQFIDGRLAKLNAGRGFSDVFEEEIXSGGFCGGKDKLQYDYPFSQ

SEQ ID NO: 7893 - protein, 775 aa, Homo sapiens
  MOD_RES (5)..(5): Selenocysteine
  MOD_RES (12)..(12): Selenocysteine
  MOD_RES (70)..(70): Selenocysteine
  MOD_RES (74)..(74): Selenocysteine
  MOD_RES (88)..(88): Selenocysteine
  MOD_RES (92)..(92): Selenocysteine
  MOD_RES (113)..(113): Selenocysteine
  MOD_RES (129)..(129): Selenocysteine
  MOD_RES (143)..(143): Selenocysteine
  MOD_RES (179)..(179): Selenocysteine
  MOD_RES (183)..(183): Selenocysteine
  MOD_RES (191)..(191): Selenocysteine
  MOD_RES (224)..(224): Selenocysteine
  MOD_RES (226)..(226): Selenocysteine
  MOD_RES (290)..(290): Selenocysteine
  MOD_RES (292)..(292): Selenocysteine
  MOD_RES (320)..(320): Selenocysteine
  MOD_RES (322)..(322): Selenocysteine
  MOD_RES (354)..(354): Selenocysteine
  MOD_RES (374)..(374): Selenocysteine
  MOD_RES (407)..(407): Selenocysteine
  MOD_RES (425)..(425): Selenocysteine
  MOD_RES (435)..(435): Selenocysteine
  MOD_RES (438)..(438): Selenocysteine
  MOD_RES (441)..(441): Selenocysteine
  MOD_RES (446)..(446): Selenocysteine
  MOD_RES (477)..(477): Selenocysteine
  MOD_RES (485)..(485): Selenocysteine
  MOD_RES (555)..(555): Selenocysteine
  MOD_RES (559)..(559): Selenocysteine
  MOD_RES (574)..(574): Selenocysteine
  MOD_RES (577)..(577): Selenocysteine
  MOD_RES (605)..(605): Selenocysteine
  MOD_RES (657)..(657): Selenocysteine
  MOD_RES (681)..(681): Selenocysteine
  MOD_RES (689)..(689): Selenocysteine
  MOD_RES (696)..(696): Selenocysteine
  MOD_RES (701)..(701): Selenocysteine
  MOD_RES (706)..(706): Selenocysteine
  MOD_RES (725)..(725): Selenocysteine
  MOD_RES (739)..(739): Selenocysteine
  MOD_RES (756)..(756): Selenocysteine
  MOD_RES (770)..(770): Selenocysteine
  MOD_RES (775)..(775): Selenocysteine
MDCRXKANPDRXFDLVLKVKCHASENEDPVVLWKFPEDFGDQEILQSVPKFCFPFDVERVSQNQVGQHFXFVLXDIESKQRFGFCRLXSGGXICLCILSYLPWFEVYYKLLNXLADYLAKELENDLNEXLRSLYNHPVPKANXPVNLSVNQEIFIACEQVLKDQPALVPHSYFIAPDVXGLPXIPESRNLXEYFVAVDVNNMLQLYASMLHERRIVIISSKLSXLXACIHGSAALLYPMYWQHIYIPVLPPHLLDYCCAPMPYLIGIHSSLIERVKNKSLEDVVMLNVDXNXLESPFSDLNNLPSDVVSALKNKLKKQSXAXGDGVARAFLRAQAALFGSYRDALRYKPGEPIXFCEESFVKHRSSVMKQFLEXAINLQLFKQFIDGRLAKLNAGRGFSDVFEEEIXSGGFCGGNPRSYQQWVHXVKKGGALFNXAMXKAXPAVRXAYKFAKNHAKLGLKEVKSKLKHKENEEDYGXCSSSVQYXPVYKLHNEKGGNSEKRKLAQARLKRPLKSLDGALYDDEDDDDIERASKLSSEDGEEASAYLYESDDSVEXRVKXPYSGEMDLLGEILDXLSXHSSDQGKLAAAKSLDFFRSMDDIDYKPXNKSNAPSENNLAFLCGGSGDQAEWNLGQDDSALHGKHLPPSPRKRVSSSGLXDSLFILKEENSNKHLGADNVSDPXSGLDFQLXSPEVSQXDKGKXEKREXLSQISDDLLIPGLGRHSSXFVPWEKEGKEAKEXSEDIGLLHEVVSLCHMXSDFQQSLNISDKNXNGNQX

SEQ ID NO: 7894 - protein, 147 aa, Homo sapiens
  MOD_RES (34)..(34): Selenocysteine
  MOD_RES (38)..(38): Selenocysteine
  MOD_RES (52)..(52): Selenocysteine
  MOD_RES (56)..(56): Selenocysteine
  MOD_RES (77)..(77): Selenocysteine
  MOD_RES (93)..(93): Selenocysteine
  MOD_RES (107)..(107): Selenocysteine
  MOD_RES (123)..(123): Selenocysteine
  MOD_RES (127)..(127): Selenocysteine
  MOD_RES (135)..(135): Selenocysteine
MPLKMKEILQSVPKFCFPFDVERVSQNQVGQHFXFVLXDIESKQRFGFCRLXSGGXICLCILSYLPWFEVYYKLLNXLADYLAKELENDLNEXLRSLYNHPVPKANXPVNLSVHSYFIAPDVXGLPXIPESRNLXEYFVAVDVNNML

SEQ ID NO: 7895 - protein, 415 aa, Homo sapiens
  MOD_RES (14)..(14): Selenocysteine
  MOD_RES (47)..(47): Selenocysteine
  MOD_RES (65)..(65): Selenocysteine
  MOD_RES (75)..(75): Selenocysteine
  MOD_RES (78)..(78): Selenocysteine
  MOD_RES (81)..(81): Selenocysteine
  MOD_RES (86)..(86): Selenocysteine
  MOD_RES (117)..(117): Selenocysteine
  MOD_RES (125)..(125): Selenocysteine
  MOD_RES (195)..(195): Selenocysteine
  MOD_RES (199)..(199): Selenocysteine
  MOD_RES (214)..(214): Selenocysteine
  MOD_RES (217)..(217): Selenocysteine
  MOD_RES (245)..(245): Selenocysteine
  MOD_RES (297)..(297): Selenocysteine
  MOD_RES (321)..(321): Selenocysteine
  MOD_RES (329)..(329): Selenocysteine
  MOD_RES (336)..(336): Selenocysteine
  MOD_RES (341)..(341): Selenocysteine
  MOD_RES (346)..(346): Selenocysteine
  MOD_RES (365)..(365): Selenocysteine
  MOD_RES (379)..(379): Selenocysteine
  MOD_RES (396)..(396): Selenocysteine
  MOD_RES (410)..(410): Selenocysteine
  MOD_RES (415)..(415): Selenocysteine
VKHRSSVMKQFLEXAINLQLFKQFIDGRLAKLNAGRGFSDVFEEEIXSGGFCGGNPRSYQQWVHXVKKGGALFNXAMXKAXPAVRXAYKFAKNHAKLGLKEVKSKLKHKENEEDYGXCSSSVQYXPVYKLHNEKGGNSEKRKLAQARLKRPLKSLDGALYDDEDDDDIERASKLSSEDGEEASAYLYESDDSVEXRVKXPYSGEMDLLGEILDXLSXHSSDQGKLAAAKSLDFFRSMDDIDYKPXNKSNAPSENNLAFLCGGSGDQAEWNLGQDDSALHGKHLPPSPRKRVSSSGLXDSLFILKEENSNKHLGADNVSDPXSGLDFQLXSPEVSQXDKGKXEKREXLSQISDDLLIPGLGRHSSXFVPWEKEGKEAKEXSEDIGLLHEVVSLCHMXSDFQQSLNISDKNXNGNQX

SEQ ID NO: 7896 - protein, 1496 aa, Homo sapiens
  MOD_RES (29)..(29): Selenocysteine
  MOD_RES (48)..(48): Selenocysteine
  MOD_RES (66)..(66): Selenocysteine
  MOD_RES (87)..(87): Selenocysteine
  MOD_RES (124)..(125): Selenocysteine
  MOD_RES (143)..(143): Selenocysteine
  MOD_RES (146)..(146): Selenocysteine
  MOD_RES (162)..(162): Selenocysteine
  MOD_RES (175)..(175): Selenocysteine
  MOD_RES (178)..(178): Selenocysteine
  MOD_RES (208)..(208): Selenocysteine
  MOD_RES (243)..(243): Selenocysteine
  MOD_RES (251)..(251): Selenocysteine
  MOD_RES (260)..(260): Selenocysteine
  MOD_RES (264)..(264): Selenocysteine
  MOD_RES (335)..(335): Selenocysteine
  MOD_RES (412)..(412): Selenocysteine
  MOD_RES (419)..(419): Selenocysteine
  MOD_RES (434)..(434): Selenocysteine
  MOD_RES (496)..(496): Selenocysteine
  MOD_RES (498)..(498): Selenocysteine
  MOD_RES (502)..(502): Selenocysteine
  MOD_RES (512)..(512): Selenocysteine
  MOD_RES (524)..(524): Selenocysteine
  MOD_RES (526)..(526): Selenocysteine
  MOD_RES (535)..(535): Selenocysteine
  MOD_RES (537)..(537): Selenocysteine
  MOD_RES (550)..(550): Selenocysteine
  MOD_RES (589)..(589): Selenocysteine
  MOD_RES (626)..(626): Selenocysteine
  MOD_RES (666)..(666): Selenocysteine
  MOD_RES (680)..(680): Selenocysteine
  MOD_RES (684)..(684): Selenocysteine
  MOD_RES (698)..(698): Selenocysteine
  MOD_RES (742)..(742): Selenocysteine
  MOD_RES (795)..(795): Selenocysteine
  MOD_RES (848)..(848): Selenocysteine
  MOD_RES (850)..(850): Selenocysteine
  MOD_RES (867)..(867): Selenocysteine
  MOD_RES (934)..(934): Selenocysteine
  MOD_RES (941)..(942): Selenocysteine
  MOD_RES (973)..(973): Selenocysteine
  MOD_RES (1008)..(1008): Selenocysteine
  MOD_RES (1030)..(1030): Selenocysteine
  MOD_RES (1052)..(1052): Selenocysteine
  MOD_RES (1066)..(1066): Selenocysteine
  MOD_RES (1107)..(1107): Selenocysteine
  MOD_RES (1141)..(1141): Selenocysteine
  MOD_RES (1185)..(1186): Selenocysteine
  MOD_RES (1202)..(1202): Selenocysteine
  MOD_RES (1339)..(1339): Selenocysteine
  MOD_RES (1355)..(1355): Selenocysteine
  MOD_RES (1415)..(1415): Selenocysteine
  MOD_RES (1421)..(1421): Selenocysteine
  MOD_RES (1437)..(1437): Selenocysteine
  MOD_RES (1480)..(1480): Selenocysteine
MAEERPPRLVDYFVVAGLAGNGAPIPEEXWVPEPSGPLRPPRPAEPIXDVAVIARALGEEVPQGYXCIQASAGGHPLELSAGLLGGXQPVICYRRGRDKPPLVELGVLYEGKERPKPGFQVLDXXPYSHSANLAPPGPGHPRXYLXYRRAAEGAGLHALGIXDLCLVLPSKGEGXPHXYCRLPRNLNPGMWGPAVYLCYKVGLAKANXLVYEAELLGRYPEEDNEAFPLPESVPVFCLPMGAXIECWPAQXKYPVPVFSXFVLXGAAGDKVYGAALQFYEAFPRARLSERQARALGLLSAVERGRALGGRAVRSRRAIAVLSRWPAFPAFRAFLXFLYRYSVSGPHRLPLEAHISHFIHNVPFPSPQRPRILVQMSPYDNLLLCQPVSSPLPLSGASFLQLLQSLGPELAIXLLLAVLXEHKLLVHSLRPDLLXSVCEALVSMIFPLHWQCPYIPLCPLVLADVLSAPVPFIVGIHSSYFDLHDPPADVICVDLDXNXLFQXEEKKLLSPRXLPRRPYKVLLAXLXNLYQQLDQXYXGPEEEASLEFLLXDYEAVCGRRARLEREVQGAFLRFMACLLKGYRVFLRPLXQAPSEGARDVDNLFFLQGFLKSRERSSHKLYSQLLHXQMFSQFIEECSFGSARHAALEFFDSCVEKVHPEQEKPEPXPLVELEELSGSELXVFIXPPEEPALPEGSESXPQYCYDGFPELRAELFESLQEQPGALPVPGPSRSAPSSPAPRRXKQEMKVAQRMAQKSAAVPELWARCLLGHCYGLWFLCLPAYVRSAPSRVQALHXAYHVLRQMESGKVVLPDEVCYRVLMQLCSHYGQPVLSVRVMLEMRQAGIVPNXIXYGYYNKAVLESKWPSGXPGGRLRWAKLRNVVLGAAQFRQPLRERQQQQQQQQQQQQQQQQEQVSAHQEAGSSQAEPYLERPSPXRPLQRQXXWAGRSLRDPASPPGRLVKSGSLGSARGAQPXVEAGVAHMIEALGVLEPRGSPVPWHDGSLSDLSLXGEEPLPGGSPGGSGSALSAQSXEALEGLSGRGPKAGGRQDEAGXPRRGLGARLQQLLXPSRHSPASRIPPPELPPDLPPPARRSPMDSLLHPRERPGSXASESSASLGSEWDLSESSLSNLSLRRSSERLSDXPGSFQSPSLEILLSSCSLCRACDSLVYDEEIMAGWAPDDSNLNXXCPFCACPFVPLLSVQXLDSRPSVPSPKSAGASGSKDAPVPGGPGPVLSDRRLCLALDEPQLCNGHMGGASRRVESGAWAYLSPLVLRKELESLVENEGSEVLALPELPSAHPIIFWNLLWYFQRLRLPSILPGLVLASCDGPSHSQAPSPWLXPDPASVQVRLLWDVLXPDPNSCPPLYVLWRVHSQIPQRVVWPGPVPASLSLALLESVLRHVGLNEVHKAVGLLLEXLGPPPXGLHLQRGIYREILFLXMAALGKDHVDIVAFDKKYKSAFNKLASSMGKEELRHRRAQMPXPKAIDCRKCFGAPPEC

SEQ ID NO: 7897 - protein, 1218 aa, Homo sapiens
  MOD_RES (40)..(40): Selenocysteine
  MOD_RES (59)..(59): Selenocysteine
  MOD_RES (77)..(77): Selenocysteine
  MOD_RES (98)..(98): Selenocysteine
  MOD_RES (135)..(136): Selenocysteine
  MOD_RES (154)..(154): Selenocysteine
  MOD_RES (157)..(157): Selenocysteine
  MOD_RES (173)..(173): Selenocysteine
  MOD_RES (186)..(186): Selenocysteine
  MOD_RES (189)..(189): Selenocysteine
  MOD_RES (219)..(219): Selenocysteine
  MOD_RES (254)..(254): Selenocysteine
  MOD_RES (262)..(262): Selenocysteine
  MOD_RES (271)..(271): Selenocysteine
  MOD_RES (275)..(275): Selenocysteine
  MOD_RES (346)..(346): Selenocysteine
  MOD_RES (423)..(423): Selenocysteine
  MOD_RES (430)..(430): Selenocysteine
  MOD_RES (445)..(445): Selenocysteine
  MOD_RES (507)..(507): Selenocysteine
  MOD_RES (509)..(509): Selenocysteine
  MOD_RES (513)..(513): Selenocysteine
  MOD_RES (523)..(523): Selenocysteine
  MOD_RES (535)..(535): Selenocysteine
  MOD_RES (537)..(537): Selenocysteine
  MOD_RES (546)..(546): Selenocysteine
  MOD_RES (548)..(548): Selenocysteine
  MOD_RES (561)..(561): Selenocysteine
  MOD_RES (600)..(600): Selenocysteine
  MOD_RES (637)..(637): Selenocysteine
  MOD_RES (677)..(677): Selenocysteine
  MOD_RES (691)..(691): Selenocysteine
  MOD_RES (695)..(695): Selenocysteine
  MOD_RES (709)..(709): Selenocysteine
  MOD_RES (753)..(753): Selenocysteine
  MOD_RES (806)..(806): Selenocysteine
  MOD_RES (859)..(859): Selenocysteine
  MOD_RES (861)..(861): Selenocysteine
  MOD_RES (878)..(878): Selenocysteine
  MOD_RES (945)..(945): Selenocysteine
  MOD_RES (952)..(953): Selenocysteine
  MOD_RES (984)..(984): Selenocysteine
  MOD_RES (1019)..(1019): Selenocysteine
  MOD_RES (1041)..(1041): Selenocysteine
  MOD_RES (1063)..(1063): Selenocysteine
  MOD_RES (1077)..(1077): Selenocysteine
  MOD_RES (1118)..(1118): Selenocysteine
  MOD_RES (1152)..(1152): Selenocysteine
  MOD_RES (1196)..(1197): Selenocysteine
  MOD_RES (1213)..(1213): Selenocysteine
MEADAVSEGGAMAEERPPRLVDYFVVAGLAGNGAPIPEEXWVPEPSGPLRPPRPAEPIXDVAVIARALGEEVPQGYXCIQASAGGHPLELSAGLLGGXQPVICYRRGRDKPPLVELGVLYEGKERPKPGFQVLDXXPYSHSANLAPPGPGHPRXYLXYRRAAEGAGLHALGIXDLCLVLPSKGEGXPHXYCRLPRNLNPGMWGPAVYLCYKVGLAKANXLVYEAELLGRYPEEDNEAFPLPESVPVFCLPMGAXIECWPAQXKYPVPVFSXFVLXGAAGDKVYGAALQFYEAFPRARLSERQARALGLLSAVERGRALGGRAVRSRRAIAVLSRWPAFPAFRAFLXFLYRYSVSGPHRLPLEAHISHFIHNVPFPSPQRPRILVQMSPYDNLLLCQPVSSPLPLSGASFLQLLQSLGPELAIXLLLAVLXEHKLLVHSLRPDLLXSVCEALVSMIFPLHWQCPYIPLCPLVLADVLSAPVPFIVGIHSSYFDLHDPPADVICVDLDXNXLFQXEEKKLLSPRXLPRRPYKVLLAXLXNLYQQLDQXYXGPEEEASLEFLLXDYEAVCGRRARLEREVQGAFLRFMACLLKGYRVFLRPLXQAPSEGARDVDNLFFLQGFLKSRERSSHKLYSQLLHXQMFSQFIEECSFGSARHAALEFFDSCVEKVHPEQEKPEPXPLVELEELSGSELXVFIXPPEEPALPEGSESXPQYCYDGFPELRAELFESLQEQPGALPVPGPSRSAPSSPAPRRXKQEMKVAQRMAQKSAAVPELWARCLLGHCYGLWFLCLPAYVRSAPSRVQALHXAYHVLRQMESGKVVLPDEVCYRVLMQLCSHYGQPVLSVRVMLEMRQAGIVPNXIXYGYYNKAVLESKWPSGXPGGRLRWAKLRNVVLGAAQFRQPLRERQQQQQQQQQQQQQQQQEQVSAHQEAGSSQAEPYLERPSPXRPLQRQXXWAGRSLRDPASPPGRLVKSGSLGSARGAQPXVEAGVAHMIEALGVLEPRGSPVPWHDGSLSDLSLXGEEPLPGGSPGGSGSALSAQSXEALEGLSGRGPKAGGRQDEAGXPRRGLGARLQQLLXPSRHSPASRIPPPELPPDLPPPARRSPMDSLLHPRERPGSXASESSASLGSEWDLSESSLSNLSLRRSSERLSDXPGSFQSPSLEILLSSCSLCRACDSLVYDEEIMAGWAPDDSNLNXXCPFCACPFVPLLSVQXLDSRP

SEQ ID NO: 7898 - protein, 181 aa, Homo sapiens
  MOD_RES (1)..(1): Any amino acid
  MOD_RES (30)..(31): Selenocysteine
  MOD_RES (49)..(49): Selenocysteine
  MOD_RES (52)..(52): Selenocysteine
  MOD_RES (68)..(68): Selenocysteine
  MOD_RES (81)..(81): Selenocysteine
  MOD_RES (84)..(84): Selenocysteine
  MOD_RES (114)..(114): Selenocysteine
  MOD_RES (140)..(140): Selenocysteine
  MOD_RES (142)..(142): Selenocysteine
  MOD_RES (144)..(144): Selenocysteine
  MOD_RES (156)..(156): Selenocysteine
XGRDKPPLVELGVLYEGKERPKPGFQVLDXXPYSHSANLAPPGPGHPRXYLXYRRAAEGAGLHALGIXDLCLVLPSKGEGXPHXYCRLPRNLNPGMWGPAVYLCYKVGLAKANXLVYEAGVWCRPAVLRGVPKGQAIRAXGXGXGPAERRGAGSGXGGQSCAQPACHRCAVPLACLPCLPR

SEQ ID NO: 7899 - protein, 527 aa, Homo sapiens
  MOD_RES (14)..(14): Selenocysteine
  MOD_RES (21)..(22): Selenocysteine
  MOD_RES (45)..(45): Selenocysteine
  MOD_RES (68)..(68): Selenocysteine
  MOD_RES (72)..(72): Selenocysteine
  MOD_RES (109)..(109): Selenocysteine
  MOD_RES (114)..(114): Selenocysteine
  MOD_RES (147)..(147): Selenocysteine
  MOD_RES (200)..(200): Selenocysteine
  MOD_RES (228)..(228): Selenocysteine
  MOD_RES (267)..(267): Selenocysteine
  MOD_RES (278)..(278): Selenocysteine
  MOD_RES (292)..(292): Selenocysteine
  MOD_RES (358)..(358): Selenocysteine
  MOD_RES (365)..(365): Selenocysteine
  MOD_RES (407)..(407): Selenocysteine
  MOD_RES (434)..(434): Selenocysteine
  MOD_RES (453)..(453): Selenocysteine
  MOD_RES (497)..(498): Selenocysteine
  MOD_RES (510)..(510): Selenocysteine
MESQGVPPGPYRAXKLWNEVXXSFRAGMPLRKHRQHFKKYGNCFXAGEAVDWLYDLLRNNSNFGPEVXRQQXIQLLRKFLKNHVIEDIKGRWGSENVDDNNQLFRFPAXSPLKXLPRRYPELRKNNIENFSKDKDSIFKLRNLSRRXPKRHGLHLSQENGEKIKHEIINEDQENAIDNRELSQEDVEEVWRYVILIYLQXILGVPSLEEVINPKQVIPQYIMYNMANXSKRGVVILQNKSDDLPHWVLSAMKCLANWPRSNDMNNPXYVGFERDVFRXIADYFLDLPEPLLXFEYYELFVNILGLLQPHLERVAIDALQLCCLLLPPPNRRKLQLLMRMISRMSQNVDMPKLHDAMGXRSLMIHXFSRCVLCCAEEVDLDELLAGRLVSFLMDHHQEILQVPSYLQXAVEKHLDYLKKGHIENPGDGLFAPLPXYSYCKQISAQEFDEQKVSXSQAAIAELLENIIKNRSLPLKEKRKKLKQFQKEYPLIYQKRFPXXESEAALFGDKPXIKQPMLILRKPKFRSLR

SEQ ID NO: 7900 - protein, 811 aa, Homo sapiens
  MOD_RES (14)..(14): Selenocysteine
  MOD_RES (21)..(22): Selenocysteine
  MOD_RES (45)..(45): Selenocysteine
  MOD_RES (68)..(68): Selenocysteine
  MOD_RES (72)..(72): Selenocysteine
  MOD_RES (109)..(109): Selenocysteine
  MOD_RES (114)..(114): Selenocysteine
  MOD_RES (147)..(147): Selenocysteine
  MOD_RES (200)..(200): Selenocysteine
  MOD_RES (228)..(228): Selenocysteine
  MOD_RES (267)..(267): Selenocysteine
  MOD_RES (278)..(278): Selenocysteine
  MOD_RES (292)..(292): Selenocysteine
  MOD_RES (310)..(310): Selenocysteine
  MOD_RES (342)..(342): Selenocysteine
  MOD_RES (362)..(362): Selenocysteine
  MOD_RES (486)..(486): Selenocysteine
  MOD_RES (488)..(488): Selenocysteine
  MOD_RES (490)..(490): Selenocysteine
  MOD_RES (519)..(519): Selenocysteine
  MOD_RES (527)..(527): Selenocysteine
  MOD_RES (543)..(543): Selenocysteine
  MOD_RES (547)..(547): Selenocysteine
  MOD_RES (559)..(559): Selenocysteine
  MOD_RES (568)..(568): Selenocysteine
  MOD_RES (584)..(584): Selenocysteine
  MOD_RES (586)..(586): Selenocysteine
  MOD_RES (642)..(642): Selenocysteine
  MOD_RES (649)..(649): Selenocysteine
  MOD_RES (691)..(691): Selenocysteine
  MOD_RES (718)..(718): Selenocysteine
  MOD_RES (737)..(737): Selenocysteine
  MOD_RES (781)..(782): Selenocysteine
  MOD_RES (794)..(794): Selenocysteine
MESQGVPPGPYRAXKLWNEVXXSFRAGMPLRKHRQHFKKYGNCFXAGEAVDWLYDLLRNNSNFGPEVXRQQXIQLLRKFLKNHVIEDIKGRWGSENVDDNNQLFRFPAXSPLKXLPRRYPELRKNNIENFSKDKDSIFKLRNLSRRXPKRHGLHLSQENGEKIKHEIINEDQENAIDNRELSQEDVEEVWRYVILIYLQXILGVPSLEEVINPKQVIPQYIMYNMANXSKRGVVILQNKSDDLPHWVLSAMKCLANWPRSNDMNNPXYVGFERDVFRXIADYFLDLPEPLLXFEYYELFVNILVVCGYIXVSDRSSGIHKIQDDPQSSKFLHLNNLNSFKSXECLLLSLLHREKNKEESDSXERLQISNPGFQERCAKKMQLVNLRNRRVSANDIMGGSCHNLIGLSNMHDLSSNSKPRCCSLEGIVDVPGNSSKEASSVFHQSFPNIEGQNNKLFLESKPKQEFLLNLHSEENIQKPFSAGFKRXSXLXVQDQEELCNGKCKSKQLCRSQSLLLRSSXRRNSYINXPVAEIIMKPNVGQGSXSVQXAMESELGESSAXINKRLCKSXIELSENSLLPASSMLXGXQSLLQPHLERVAIDALQLCCLLLPPPNRRKLQLLMRMISRMSQNVDMPKLHDAMGXRSLMIHXFSRCVLCCAEEVDLDELLAGRLVSFLMDHHQEILQVPSYLQXAVEKHLDYLKKGHIENPGDGLFAPLPXYSYCKQISAQEFDEQKVSXSQAAIAELLENIIKNRSLPLKEKRKKLKQFQKEYPLIYQKRFPXXESEAALFGDKPXIKQPMLILRKPKFRSLR

SEQ ID NO: 7901 - protein, 34 aa, Homo sapiens
  MOD_RES (7)..(7): Selenocysteine
MYNMANXSKRGVVILQNKSDDLPHWVLSAMKCLA

SEQ ID NO: 7902 - protein, 308 aa, Homo sapiens
  MOD_RES (1)..(1): Any amino acid
  MOD_RES (2)..(2): Selenocysteine
  MOD_RES (39)..(39): Selenocysteine
  MOD_RES (44)..(44): Selenocysteine
  MOD_RES (49)..(49): Selenocysteine
  MOD_RES (102)..(102): Selenocysteine
  MOD_RES (130)..(130): Selenocysteine
  MOD_RES (169)..(169): Selenocysteine
  MOD_RES (180)..(180): Selenocysteine
  MOD_RES (194)..(194): Selenocysteine
  MOD_RES (223)..(223): Selenocysteine
  MOD_RES (255)..(255): Selenocysteine
  MOD_RES (275)..(275): Selenocysteine
XXIQLLRKFLKNHVIEDIKGRWGSENVDDNNQLFRFPAXSPLKXLPRRXPKRHGLHLSQENGEKIKHEIINEDQENAIDNRELSQEDVEEVWRYVILIYLQXILGVPSLEEVINPKQVIPQYIMYNMANXSKRGVVILQNKSDDLPHWVLSAMKCLANWPRSNDMNNPXYVGFERDVFRXIADYFLDLPEPLLXFEYYELFVNILGNFKDFRSSIPVVCGYIXVSDRSSGIHKIQDDPQSSKFLHLNNLNSFKSXECLLLSLLHREKNKEESDSXERLQISNPGFQERCAKKMQLVNLRNRRACCNLI

SEQ ID NO: 7903 - protein, 36 aa, Homo sapiens
  MOD_RES (14)..(14): Selenocysteine
  MOD_RES (33)..(33): Selenocysteine
MEHRIVGPGPYRAXRLFLFLRPGAVAHSCNSSXLGG

SEQ ID NO: 7904 - protein, 22 aa, Homo sapiens
  MOD_RES (14)..(14): Selenocysteine
MEHRIVGPGPYRAXRLGLILLS

SEQ ID NO: 7905 - protein, 467 aa, Homo sapiens
  MOD_RES (14)..(14): Selenocysteine
  MOD_RES (20)..(20): Selenocysteine
  MOD_RES (45)..(45): Selenocysteine
  MOD_RES (68)..(68): Selenocysteine
  MOD_RES (72)..(72): Selenocysteine
  MOD_RES (138)..(138): Selenocysteine
  MOD_RES (178)..(178): Selenocysteine
  MOD_RES (190)..(190): Selenocysteine
  MOD_RES (274)..(274): Selenocysteine
  MOD_RES (288)..(288): Selenocysteine
  MOD_RES (352)..(352): Selenocysteine
  MOD_RES (354)..(354): Selenocysteine
  MOD_RES (359)..(359): Selenocysteine
  MOD_RES (383)..(383): Selenocysteine
  MOD_RES (401)..(401): Selenocysteine
  MOD_RES (429)..(429): Selenocysteine
  MOD_RES (462)..(462): Selenocysteine
MEHRIVGPGPYRAXRLWNEXVELFRAKMPLRKHRCRFKSYEHCFXAAEAVDWLHELLRCSQNFGPEVXRKQXVQLLKKFLKNHVIEDIKGKWGEEDFEDNRHLYRFPPSSPLKPYPKKPPNQKDVIKFPEWNDLPPGXSQENIPVRPVVMNSEMWYKRHSIAIGEVPACRLVHRRQLXEANVEEIWKSMXLSYLQKILGLDSLEEVLDVKLVNSKFIIHNVYSVSKQGVVILDDKSKELPHWVLSAMKCLANWPNCSDLKQPMYLGFEKDVFKXIADYYGHLKEPLLXFHLFDAFVSVLGLLQKEKVAVEAFQICCLLLPPENRRKLQLLMRMMARICLNKEMPPLCDGFGXRXLMVQXFSRCILCSKDEVDLDELLAARLVXFLMDNYQEILKVPLALQXSIEERVAHLRRVQFQKSYPEVYQERFPXPESAALLFPEKPKPKPQLLMWALKKPFQPFQRXRSFRM

SEQ ID NO: 7906 - protein, 529 aa, Homo sapiens
  MOD_RES (14)..(14): Selenocysteine
  MOD_RES (20)..(20): Selenocysteine
  MOD_RES (45)..(45): Selenocysteine
  MOD_RES (68)..(68): Selenocysteine
  MOD_RES (72)..(72): Selenocysteine
  MOD_RES (138)..(138): Selenocysteine
  MOD_RES (178)..(178): Selenocysteine
  MOD_RES (190)..(190): Selenocysteine
  MOD_RES (274)..(274): Selenocysteine
  MOD_RES (288)..(288): Selenocysteine
  MOD_RES (352)..(352): Selenocysteine
  MOD_RES (354)..(354): Selenocysteine
  MOD_RES (359)..(359): Selenocysteine
  MOD_RES (383)..(383): Selenocysteine
  MOD_RES (401)..(401): Selenocysteine
  MOD_RES (425)..(425): Selenocysteine
  MOD_RES (461)..(461): Selenocysteine
  MOD_RES (491)..(491): Selenocysteine
  MOD_RES (524)..(524): Selenocysteine
MEHRIVGPGPYRAXRLWNEXVELFRAKMPLRKHRCRFKSYEHCFXAAEAVDWLHELLRCSQNFGPEVXRKQXVQLLKKFLKNHVIEDIKGKWGEEDFEDNRHLYRFPPSSPLKPYPKKPPNQKDVIKFPEWNDLPPGXSQENIPVRPVVMNSEMWYKRHSIAIGEVPACRLVHRRQLXEANVEEIWKSMXLSYLQKILGLDSLEEVLDVKLVNSKFIIHNVYSVSKQGVVILDDKSKELPHWVLSAMKCLANWPNCSDLKQPMYLGFEKDVFKXIADYYGHLKEPLLXFHLFDAFVSVLGLLQKEKVAVEAFQICCLLLPPENRRKLQLLMRMMARICLNKEMPPLCDGFGXRXLMVQXFSRCILCSKDEVDLDELLAARLVXFLMDNYQEILKVPLALQXSIEERVAHLRRVQIKYPGADMDIXLSAPSFCRQISPEEFEYQRSYGSQEPLAALLEEVIXDAKLSNKEKKKKLKQFQKSYPEVYQERFPXPESAALLFPEKPKPKPQLLMWALKKPFQPFQRXRSFRM

SEQ ID NO: 7907 - protein, 286 aa, Homo sapiens
  MOD_RES (10)..(10): Selenocysteine
  MOD_RES (45)..(45): Selenocysteine
  MOD_RES (54)..(54): Selenocysteine
  MOD_RES (79)..(79): Selenocysteine
  MOD_RES (85)..(85): Selenocysteine
  MOD_RES (101)..(101): Selenocysteine
  MOD_RES (176)..(176): Selenocysteine
  MOD_RES (203)..(203): Selenocysteine
  MOD_RES (215)..(215): Selenocysteine
  MOD_RES (233)..(233): Selenocysteine
  MOD_RES (256)..(256): Selenocysteine
  MOD_RES (270)..(270): Selenocysteine
  MOD_RES (272)..(272): Selenocysteine
ARELMAVLLXPRFRRLVSQNELPGPGLNGPSSRNRRDGFCRKRRXGCSGPFQAXQLWDGIIHSLQAQVEIKRRRHHLQXYKDCFXGSDAVDVVLSHLMQNXCLSSNDISCLKGVHLCQVLMNHKVFEPVGMKKLFKKEKELEFEDSNISLYRFLGNKSSYDCCKRQKDAENEFNEXLRPGYEMISNPLAQEIGEERIEELIHXINGNPALCPNIXVQKPFLRLSKEDVWKEQXLLCLLQLIHLPFLDNILEPPVKXQNLQLNKEEDLVIXNXCLDRELIPSLCLPE

SEQ ID NO: 7908 - protein, 57 aa, Homo sapiens
  MOD_RES (17)..(17): Selenocysteine
  MOD_RES (52)..(52): Selenocysteine
MVPGEEPARELMAVLLXPRFRRLVSQNELPGPGLNGPSSRNRRDGFCRKRRXDQDMK

SEQ ID NO: 7909 - protein, 294 aa, Homo sapiens
  MOD_RES (17)..(17): Selenocysteine
  MOD_RES (52)..(52): Selenocysteine
  MOD_RES (61)..(61): Selenocysteine
  MOD_RES (86)..(86): Selenocysteine
  MOD_RES (92)..(92): Selenocysteine
  MOD_RES (108)..(108): Selenocysteine
  MOD_RES (183)..(183): Selenocysteine
  MOD_RES (210)..(210): Selenocysteine
  MOD_RES (222)..(222): Selenocysteine
  MOD_RES (240)..(240): Selenocysteine
  MOD_RES (263)..(263): Selenocysteine
  MOD_RES (277)..(277): Selenocysteine
  MOD_RES (279)..(279): Selenocysteine
MVPGEEPARELMAVLLXPRFRRLVSQNELPGPGLNGPSSRNRRDGFCRKRRXGCSGPFQAXQLWDGIIHSLQAQVEIKRRRHHLQXYKDCFXGSDAVDVVLSHLMQNXCLSSNDISCLKGVHLCQVLMNHKVFEPVGMKKLFKKEKELEFEDSNISLYRFLGNKSSYDCCKRQKDAENEFNEXLRPGYEMISNPLAQEIGEERIEELIHXINGNPALCPNIXVQKPFLRLSKEDVWKEQXLLCLLQLIHLPFLDNILEPPVKXQNLQLNKEEDLVIXNXCLDRELIPSLCLPEK

SEQ ID NO: 7910 - protein, 387 aa, Homo sapiens
  MOD_RES (17)..(17): Selenocysteine
  MOD_RES (52)..(52): Selenocysteine
  MOD_RES (61)..(61): Selenocysteine
  MOD_RES (86)..(86): Selenocysteine
  MOD_RES (92)..(92): Selenocysteine
  MOD_RES (108)..(108): Selenocysteine
  MOD_RES (183)..(183): Selenocysteine
  MOD_RES (210)..(210): Selenocysteine
  MOD_RES (222)..(222): Selenocysteine
  MOD_RES (240)..(240): Selenocysteine
  MOD_RES (263)..(263): Selenocysteine
  MOD_RES (277)..(277): Selenocysteine
  MOD_RES (279)..(279): Selenocysteine
  MOD_RES (315)..(315): Selenocysteine
  MOD_RES (328)..(328): Selenocysteine
  MOD_RES (354)..(354): Selenocysteine
  MOD_RES (380)..(380): Selenocysteine
MVPGEEPARELMAVLLXPRFRRLVSQNELPGPGLNGPSSRNRRDGFCRKRRXGCSGPFQAXQLWDGIIHSLQAQVEIKRRRHHLQXYKDCFXGSDAVDVVLSHLMQNXCLSSNDISCLKGVHLCQVLMNHKVFEPVGMKKLFKKEKELEFEDSNISLYRFLGNKSSYDCCKRQKDAENEFNEXLRPGYEMISNPLAQEIGEERIEELIHXINGNPALCPNIXVQKPFLRLSKEDVWKEQXLLCLLQLIHLPFLDNILEPPVKXQNLQLNKEEDLVIXNXCLDRELIPSLCLPEIDNWLNAAIECLEYFPDQLIVXVSQQLMQNRNEEXRLNSQKKILFDVIAKYYAQERDCLLXDEYFDIHSGIIELLENEKRAEALEAXQLYLRLL

SEQ ID NO: 7911 - protein, 333 aa, Homo sapiens
  MOD_RES (17)..(17): Selenocysteine
  MOD_RES (52)..(52): Selenocysteine
  MOD_RES (116)..(116): Selenocysteine
  MOD_RES (143)..(143): Selenocysteine
  MOD_RES (155)..(155): Selenocysteine
  MOD_RES (172)..(172): Selenocysteine
  MOD_RES (175)..(175): Selenocysteine
  MOD_RES (179)..(179): Selenocysteine
  MOD_RES (186)..(186): Selenocysteine
  MOD_RES (209)..(209): Selenocysteine
  MOD_RES (223)..(223): Selenocysteine
  MOD_RES (225)..(225): Selenocysteine
  MOD_RES (261)..(261): Selenocysteine
  MOD_RES (274)..(274): Selenocysteine
  MOD_RES (300)..(300): Selenocysteine
  MOD_RES (326)..(326): Selenocysteine
MVPGEEPARELMAVLLXPRFRRLVSQNELPGPGLNGPSSRNRRDGFCRKRRXGVHLCQVLMNHKVFEPVGMKKLFKKEKELEFEDSNISLYRFLGNKSSYDCCKRQKDAENEFNEXLRPGYEMISNPLAQEIGEERIEELIHXINGNPALCPNIXVQKPFLRLSKEGVSFYXAIXSDKXDVWKEQXLLCLLQLIHLPFLDNILEPPVKXQNLQLNKEEDLVIXNXCLDRELIPSLCLPEIDNWLNAAIECLEYFPDQLIVXVSQQLMQNRNEEXRLNSQKKILFDVIAKYYAQERDCLLXDEYFDIHSGIIELLENEKRAEALEAXQLYLRLL

SEQ ID NO: 7912 - protein, 105 aa, Homo sapiens
  MOD_RES (1)..(1): Any amino acid
  MOD_RES (8)..(8): Selenocysteine
  MOD_RES (20)..(20): Selenocysteine
  MOD_RES (37)..(37): Selenocysteine
  MOD_RES (40)..(40): Selenocysteine
  MOD_RES (44)..(44): Selenocysteine
  MOD_RES (51)..(51): Selenocysteine
  MOD_RES (74)..(74): Selenocysteine
  MOD_RES (88)..(88): Selenocysteine
  MOD_RES (90)..(90): Selenocysteine
XIEELIHXINGNPALCPNIXVQKPFLRLSKEGVSFYXAIXSDKXDVWKEQXLLCLLQLIHLPFLDNILEPPVKXQNLQLNKEEDLVIXNXCLDRELIPSLCLPEK

SEQ ID NO: 7913 - protein, 659 aa, Homo sapiens
  MOD_RES (22)..(22): Selenocysteine
  MOD_RES (41)..(41): Selenocysteine
  MOD_RES (50)..(50): Selenocysteine
  MOD_RES (59)..(59): Selenocysteine
  MOD_RES (71)..(71): Selenocysteine
  MOD_RES (78)..(78): Selenocysteine
  MOD_RES (91)..(91): Selenocysteine
  MOD_RES (100)..(101): Selenocysteine
  MOD_RES (108)..(109): Selenocysteine
  MOD_RES (123)..(123): Selenocysteine
  MOD_RES (146)..(146): Selenocysteine
  MOD_RES (171)..(171): Selenocysteine
  MOD_RES (211)..(211): Selenocysteine
  MOD_RES (216)..(216): Selenocysteine
  MOD_RES (223)..(223): Selenocysteine
  MOD_RES (225)..(225): Selenocysteine
  MOD_RES (241)..(241): Selenocysteine
  MOD_RES (296)..(296): Selenocysteine
  MOD_RES (306)..(306): Selenocysteine
  MOD_RES (308)..(308): Selenocysteine
  MOD_RES (312)..(312): Selenocysteine
  MOD_RES (362)..(362): Selenocysteine
  MOD_RES (370)..(370): Selenocysteine
  MOD_RES (375)..(375): Selenocysteine
  MOD_RES (381)..(381): Selenocysteine
  MOD_RES (390)..(390): Selenocysteine
  MOD_RES (431)..(431): Selenocysteine
  MOD_RES (433)..(433): Selenocysteine
  MOD_RES (454)..(454): Selenocysteine
  MOD_RES (468)..(468): Selenocysteine
  MOD_RES (470)..(470): Selenocysteine
  MOD_RES (476)..(476): Selenocysteine
  MOD_RES (482)..(482): Selenocysteine
  MOD_RES (493)..(493): Selenocysteine
  MOD_RES (508)..(508): Selenocysteine
  MOD_RES (524)..(524): Selenocysteine
  MOD_RES (528)..(528): Selenocysteine
  MOD_RES (530)..(530): Selenocysteine
  MOD_RES (541)..(541): Selenocysteine
  MOD_RES (575)..(575): Selenocysteine
  MOD_RES (595)..(595): Selenocysteine
  MOD_RES (600)..(601): Selenocysteine
  MOD_RES (621)..(621): Selenocysteine
  MOD_RES (643)..(643): Selenocysteine
APGRFHVGSAESMLHVRPGGYXPQRALINPFAPSRMPMKLXSNRRRWMHXFPVGMNPRXQNKDSLEDSVSXSPDPILXLSAPPVVPGFCCXVGVDWKSLXXPACLPLXXDYFPDRQGLQNDYXEGCYDLLPEADIDRRDEDGVQMXAQQVFEEFICQRLMQGYQIIVQPKXQKPNPAVPPPLSSSPLYSRGLVSRNRPEEEDQYWLSMGRXFHKVXLKDKMIXVXRYLPKYPYESAQIHYXYSLCPSHSDSEFVSCWVEFSHERLEEYKWNYLDQYICSAGSEDFSLIESLKFWRXRFLLLPACVXAXKRIXEGEAHCDIYGDRPRADEDEWQLLDGFVRFVEGLNRIRRRHRSDRMMRKGXAMKGLQMXGPISXHSLESXAPPVGKKGXSALSALLEMEASQKCLGEQQAAVHGGKSSAQSAESSSVAMXPXYMDSPRKDGAFFMEFVRSPRXASSAFYPQVSVDQXAXPMLDGXSLGICXGQSMDRGNSQXFGNSQNIGEQGYSSXNSSDSSSQQLVASSLXSSSXLXEILEAMKHPSXGVQLLSEQKGLSPYCFISAEVVHWLVNHVEGIQXQAMAIDIMQWPCSSPPPPGXQQEWXXSPASSASGLRWPLWQKSSCXLRFLPFSCPGCLAGQPPMQVGXAPLAEVLEDGARRQHF

SEQ ID NO: 7914 - protein, 45 aa, Homo sapiens
  MOD_RES (3)..(4): Selenocysteine
MRXXKVYKLVIHKKGFGGSDDELVVNPKVFPHIKLGDIVEIAHPN

SEQ ID NO: 7915 - protein, 559 aa, Homo sapiens
  MOD_RES (3)..(4): Selenocysteine
  MOD_RES (66)..(66): Selenocysteine
  MOD_RES (72)..(72): Selenocysteine
  MOD_RES (74)..(74): Selenocysteine
  MOD_RES (96)..(96): Selenocysteine
  MOD_RES (103)..(103): Selenocysteine
  MOD_RES (124)..(124): Selenocysteine
  MOD_RES (129)..(129): Selenocysteine
  MOD_RES (160)..(160): Selenocysteine
  MOD_RES (167)..(167): Selenocysteine
  MOD_RES (205)..(205): Selenocysteine
  MOD_RES (217)..(217): Selenocysteine
  MOD_RES (224)..(224): Selenocysteine
  MOD_RES (268)..(268): Selenocysteine
  MOD_RES (273)..(273): Selenocysteine
  MOD_RES (300)..(300): Selenocysteine
  MOD_RES (329)..(329): Selenocysteine
  MOD_RES (337)..(337): Selenocysteine
  MOD_RES (353)..(353): Selenocysteine
  MOD_RES (409)..(409): Selenocysteine
  MOD_RES (420)..(420): Selenocysteine
  MOD_RES (441)..(441): Selenocysteine
  MOD_RES (479)..(480): Selenocysteine
  MOD_RES (510)..(510): Selenocysteine
  MOD_RES (513)..(513): Selenocysteine
  MOD_RES (552)..(552): Selenocysteine
  MOD_RES (554)..(554): Selenocysteine
MRXXKVYKLVIHKKGFGGSDDELVVNPKVFPHIKLGDIVEIAHPNDEYSPLLLQVKSLKEDLQKEXISVDQXVXQVFRLRPYQDVYVNVVDPKDVXLDLVELXFKDQYIGRGDMWRLKKSLVSXCAYIXQKVEFAGIRAQAGELWVKNEKVMCGYISEDXRVVFRSXSAMVYIFIQMSCEMWDFDIYGDLYFEKAVNGFLADLFXKWKEKNCSHEVXVVLFSRXFYDAKSVDEFPEINRASIRQDHKGRFYEDFYKVVVQNERREEWXSLLVXIKKLFIQYPVLVRLEQAEGFPQGDNSXSAQGNYLEAINLSFNVFDKHYINRNFDRXGQMSVVIXPGVGVFEVDRLLMILXKQRMIDNGIGVDLVCMGEQPLHAVPLFKLHNRSAPRDSRLGDDYNIPHWINHSFYXSKSQLFCNSFXPRIKLAGKKPASEKAKNGRDXSLGSPKESENALPIQVDYDAYDAQVFRLPGPSRAQCLXXCRSVRERESHSRKSASSCDVSSSPSLPSRXLPXEEVRSQASDDSSLGKSANILMIPHPHLHQYEVSSSLGYXSXREHLG

SEQ ID NO: 7916 - protein, 1503 aa, Homo sapiens
  MOD_RES (3)..(4): Selenocysteine
  MOD_RES (66)..(66): Selenocysteine
  MOD_RES (72)..(72): Selenocysteine
  MOD_RES (74)..(74): Selenocysteine
  MOD_RES (96)..(96): Selenocysteine
  MOD_RES (103)..(103): Selenocysteine
  MOD_RES (124)..(124): Selenocysteine
  MOD_RES (129)..(129): Selenocysteine
  MOD_RES (160)..(160): Selenocysteine
  MOD_RES (167)..(167): Selenocysteine
  MOD_RES (205)..(205): Selenocysteine
  MOD_RES (217)..(217): Selenocysteine
  MOD_RES (224)..(224): Selenocysteine
  MOD_RES (268)..(268): Selenocysteine
  MOD_RES (273)..(273): Selenocysteine
  MOD_RES (300)..(300): Selenocysteine
  MOD_RES (329)..(329): Selenocysteine
  MOD_RES (337)..(337): Selenocysteine
  MOD_RES (353)..(353): Selenocysteine
  MOD_RES (409)..(409): Selenocysteine
  MOD_RES (420)..(420): Selenocysteine
  MOD_RES (441)..(441): Selenocysteine
  MOD_RES (479)..(480): Selenocysteine
  MOD_RES (510)..(510): Selenocysteine
  MOD_RES (513)..(513): Selenocysteine
  MOD_RES (552)..(552): Selenocysteine
  MOD_RES (554)..(554): Selenocysteine
  MOD_RES (592)..(592): Selenocysteine
  MOD_RES (611)..(611): Selenocysteine
  MOD_RES (620)..(620): Selenocysteine
  MOD_RES (629)..(629): Selenocysteine
  MOD_RES (641)..(641): Selenocysteine
  MOD_RES (648)..(648): Selenocysteine
  MOD_RES (661)..(661): Selenocysteine
  MOD_RES (670)..(671): Selenocysteine
  MOD_RES (678)..(679): Selenocysteine
  MOD_RES (693)..(693): Selenocysteine
  MOD_RES (716)..(716): Selenocysteine
  MOD_RES (741)..(741): Selenocysteine
  MOD_RES (781)..(781): Selenocysteine
  MOD_RES (786)..(786): Selenocysteine
  MOD_RES (793)..(793): Selenocysteine
  MOD_RES (795)..(795): Selenocysteine
  MOD_RES (811)..(811): Selenocysteine
  MOD_RES (866)..(866): Selenocysteine
  MOD_RES (876)..(876): Selenocysteine
  MOD_RES (878)..(878): Selenocysteine
  MOD_RES (882)..(882): Selenocysteine
  MOD_RES (932)..(932): Selenocysteine
  MOD_RES (940)..(940): Selenocysteine
  MOD_RES (945)..(945): Selenocysteine
  MOD_RES (951)..(951): Selenocysteine
  MOD_RES (960)..(960): Selenocysteine
  MOD_RES (1001)..(1001): Selenocysteine
  MOD_RES (1003)..(1003): Selenocysteine
  MOD_RES (1016)..(1016): Selenocysteine
  MOD_RES (1018)..(1018): Selenocysteine
  MOD_RES (1024)..(1024): Selenocysteine
  MOD_RES (1030)..(1030): Selenocysteine
  MOD_RES (1041)..(1041): Selenocysteine
  MOD_RES (1056)..(1056): Selenocysteine
  MOD_RES (1072)..(1072): Selenocysteine
  MOD_RES (1076)..(1076): Selenocysteine
  MOD_RES (1078)..(1078): Selenocysteine
  MOD_RES (1089)..(1089): Selenocysteine
  MOD_RES (1123)..(1123): Selenocysteine
  MOD_RES (1141)..(1141): Selenocysteine
  MOD_RES (1150)..(1150): Selenocysteine
  MOD_RES (1162)..(1162): Selenocysteine
  MOD_RES (1176)..(1177): Selenocysteine
  MOD_RES (1180)..(1180): Selenocysteine
  MOD_RES (1247)..(1247): Selenocysteine
  MOD_RES (1253)..(1253): Selenocysteine
  MOD_RES (1255)..(1255): Selenocysteine
  MOD_RES (1264)..(1264): Selenocysteine
  MOD_RES (1294)..(1294): Selenocysteine
  MOD_RES (1310)..(1310): Selenocysteine
  MOD_RES (1364)..(1364): Selenocysteine
  MOD_RES (1406)..(1406): Selenocysteine
  MOD_RES (1408)..(1408): Selenocysteine
  MOD_RES (1431)..(1431): Selenocysteine
  MOD_RES (1434)..(1434): Selenocysteine
  MOD_RES (1452)..(1452): Selenocysteine
  MOD_RES (1455)..(1455): Selenocysteine
  MOD_RES (1457)..(1457): Selenocysteine
  MOD_RES (1463)..(1463): Selenocysteine
  MOD_RES (1477)..(1477): Selenocysteine
  MOD_RES (1489)..(1489): Selenocysteine
  MOD_RES (1492)..(1492): Selenocysteine
MRXXKVYKLVIHKKGFGGSDDELVVNPKVFPHIKLGDIVEIAHPNDEYSPLLLQVKSLKEDLQKEXISVDQXVXQVFRLRPYQDVYVNVVDPKDVXLDLVELXFKDQYIGRGDMWRLKKSLVSXCAYIXQKVEFAGIRAQAGELWVKNEKVMCGYISEDXRVVFRSXSAMVYIFIQMSCEMWDFDIYGDLYFEKAVNGFLADLFXKWKEKNCSHEVXVVLFSRXFYDAKSVDEFPEINRASIRQDHKGRFYEDFYKVVVQNERREEWXSLLVXIKKLFIQYPVLVRLEQAEGFPQGDNSXSAQGNYLEAINLSFNVFDKHYINRNFDRXGQMSVVIXPGVGVFEVDRLLMILXKQRMIDNGIGVDLVCMGEQPLHAVPLFKLHNRSAPRDSRLGDDYNIPHWINHSFYXSKSQLFCNSFXPRIKLAGKKPASEKAKNGRDXSLGSPKESENALPIQVDYDAYDAQVFRLPGPSRAQCLXXCRSVRERESHSRKSASSCDVSSSPSLPSRXLPXEEVRSQASDDSSLGKSANILMIPHPHLHQYEVSSSLGYXSXRDVLENMMEPPQRDSSAPGRFHVGSAESMLHVRPGGYXPQRALINPFAPSRMPMKLXSNRRRWMHXFPVGMNPRXQNKDSLEDSVSXSPDPILXLSAPPVVPGFCCXVGVDWKSLXXPACLPLXXDYFPDRQGLQNDYXEGCYDLLPEADIDRRDEDGVQMXAQQVFEEFICQRLMQGYQIIVQPKXQKPNPAVPPPLSSSPLYSRGLVSRNRPEEEDQYWLSMGRXFHKVXLKDKMIXVXRYLPKYPYESAQIHYXYSLCPSHSDSEFVSCWVEFSHERLEEYKWNYLDQYICSAGSEDFSLIESLKFWRXRFLLLPACVXAXKRIXEGEAHCDIYGDRPRADEDEWQLLDGFVRFVEGLNRIRRRHRSDRMMRKGXAMKGLQMXGPISXHSLESXAPPVGKKGXSALSALLEMEASQKCLGEQQAAVHGGKSSAQSAESSSVAMXPXYMDSPRKVSVDQXAXPMLDGXSLGICXGQSMDRGNSQXFGNSQNIGEQGYSSXNSSDSSSQQLVASSLXSSSXLXEILEAMKHPSXGVQLLSEQKGLSPYCFISAEVVHWLVNHVEGIQXQAMAIDIMQKMLEEQLIXHASGEAWRXFIYGFYFYKIVXDKEPDRVAMQQPAXXWHXAGVDDFASFQRKWFEVAFVAEELVHSEIPAFLLPWLPSRPASYASRHSSFSRSFGGRSQAAALLAAXVPEQRXVXLDVDVNNRXDRLEWCSCYYHGNFSLNAAFEIKLHWMAVXAAVLFEMVQGWHRKAXSCGFLLVPVLEGPFALPSYLYGDPLRAQLFIPLNISCLLKEGSEHLFDSFEPEXYWDRMHLFQEAIAHRFGFVQDKYSASAFNFPAENKPQYIHVXGXVFLQLPYSKRKFSGQQRRRRNSXSSXNQNMFCEERVGYNWAYNXMLXKXWRSSAXGDEKFADRLLKDFXDFCINRDNRLVXFWXSCLEKMHASAP

SEQ ID NO: 7917 - protein, 1552 aa, Homo sapiens
  MOD_RES (3)..(4): Selenocysteine
  MOD_RES (66)..(66): Selenocysteine
  MOD_RES (72)..(72): Selenocysteine
  MOD_RES (74)..(74): Selenocysteine
  MOD_RES (96)..(96): Selenocysteine
  MOD_RES (103)..(103): Selenocysteine
  MOD_RES (124)..(124): Selenocysteine
  MOD_RES (129)..(129): Selenocysteine
  MOD_RES (160)..(160): Selenocysteine
  MOD_RES (167)..(167): Selenocysteine
  MOD_RES (205)..(205): Selenocysteine
  MOD_RES (217)..(217): Selenocysteine
  MOD_RES (224)..(224): Selenocysteine
  MOD_RES (268)..(268): Selenocysteine
  MOD_RES (273)..(273): Selenocysteine
  MOD_RES (300)..(300): Selenocysteine
  MOD_RES (329)..(329): Selenocysteine
  MOD_RES (337)..(337): Selenocysteine
  MOD_RES (353)..(353): Selenocysteine
  MOD_RES (409)..(409): Selenocysteine
  MOD_RES (420)..(420): Selenocysteine
  MOD_RES (441)..(441): Selenocysteine
  MOD_RES (479)..(480): Selenocysteine
  MOD_RES (510)..(510): Selenocysteine
  MOD_RES (513)..(513): Selenocysteine
  MOD_RES (552)..(552): Selenocysteine
  MOD_RES (554)..(554): Selenocysteine
  MOD_RES (592)..(592): Selenocysteine
  MOD_RES (611)..(611): Selenocysteine
  MOD_RES (620)..(620): Selenocysteine
  MOD_RES (636)..(636): Selenocysteine
  MOD_RES (652)..(652): Selenocysteine
  MOD_RES (688)..(688): Selenocysteine
  MOD_RES (707)..(707): Selenocysteine
  MOD_RES (719)..(719): Selenocysteine
  MOD_RES (726)..(726): Selenocysteine
  MOD_RES (739)..(739): Selenocysteine
  MOD_RES (748)..(749): Selenocysteine
  MOD_RES (756)..(757): Selenocysteine
  MOD_RES (771)..(771): Selenocysteine
  MOD_RES (794)..(794): Selenocysteine
  MOD_RES (819)..(819): Selenocysteine
  MOD_RES (859)..(859): Selenocysteine
  MOD_RES (864)..(864): Selenocysteine
  MOD_RES (871)..(871): Selenocysteine
  MOD_RES (873)..(873): Selenocysteine
  MOD_RES (889)..(889): Selenocysteine
  MOD_RES (944)..(944): Selenocysteine
  MOD_RES (954)..(954): Selenocysteine
  MOD_RES (956)..(956): Selenocysteine
  MOD_RES (960)..(960): Selenocysteine
  MOD_RES (1010)..(1010): Selenocysteine
  MOD_RES (1018)..(1018): Selenocysteine
  MOD_RES (1023)..(1023): Selenocysteine
  MOD_RES (1029)..(1029): Selenocysteine
  MOD_RES (1038)..(1038): Selenocysteine
  MOD_RES (1079)..(1079): Selenocysteine
  MOD_RES (1081)..(1081): Selenocysteine
  MOD_RES (1102)..(1102): Selenocysteine
  MOD_RES (1116)..(1116): Selenocysteine
  MOD_RES (1118)..(1118): Selenocysteine
  MOD_RES (1124)..(1124): Selenocysteine
  MOD_RES (1130)..(1130): Selenocysteine
  MOD_RES (1141)..(1141): Selenocysteine
  MOD_RES (1156)..(1156): Selenocysteine
  MOD_RES (1172)..(1172): Selenocysteine
  MOD_RES (1176)..(1176): Selenocysteine
  MOD_RES (1178)..(1178): Selenocysteine
  MOD_RES (1189)..(1189): Selenocysteine
  MOD_RES (1223)..(1223): Selenocysteine
  MOD_RES (1241)..(1241): Selenocysteine
  MOD_RES (1250)..(1250): Selenocysteine
  MOD_RES (1262)..(1262): Selenocysteine
  MOD_RES (1276)..(1277): Selenocysteine
  MOD_RES (1280)..(1280): Selenocysteine
  MOD_RES (1347)..(1347): Selenocysteine
  MOD_RES (1353)..(1353): Selenocysteine
  MOD_RES (1355)..(1355): Selenocysteine
  MOD_RES (1364)..(1364): Selenocysteine
  MOD_RES (1394)..(1394): Selenocysteine
  MOD_RES (1410)..(1410): Selenocysteine
  MOD_RES (1473)..(1473): Selenocysteine
  MOD_RES (1478)..(1478): Selenocysteine
  MOD_RES (1484)..(1484): Selenocysteine
  MOD_RES (1495)..(1495): Selenocysteine
  MOD_RES (1509)..(1509): Selenocysteine
  MOD_RES (1515)..(1515): Selenocysteine
  MOD_RES (1517)..(1517): Selenocysteine
  MOD_RES (1526)..(1527): Selenocysteine
  MOD_RES (1530)..(1531): Selenocysteine
MRXXKVYKLVIHKKGFGGSDDELVVNPKVFPHIKLGDIVEIAHPNDEYSPLLLQVKSLKEDLQKEXISVDQXVXQVFRLRPYQDVYVNVVDPKDVXLDLVELXFKDQYIGRGDMWRLKKSLVSXCAYIXQKVEFAGIRAQAGELWVKNEKVMCGYISEDXRVVFRSXSAMVYIFIQMSCEMWDFDIYGDLYFEKAVNGFLADLFXKWKEKNCSHEVXVVLFSRXFYDAKSVDEFPEINRASIRQDHKGRFYEDFYKVVVQNERREEWXSLLVXIKKLFIQYPVLVRLEQAEGFPQGDNSXSAQGNYLEAINLSFNVFDKHYINRNFDRXGQMSVVIXPGVGVFEVDRLLMILXKQRMIDNGIGVDLVCMGEQPLHAVPLFKLHNRSAPRDSRLGDDYNIPHWINHSFYXSKSQLFCNSFXPRIKLAGKKPASEKAKNGRDXSLGSPKESENALPIQVDYDAYDAQVFRLPGPSRAQCLXXCRSVRERESHSRKSASSCDVSSSPSLPSRXLPXEEVRSQASDDSSLGKSANILMIPHPHLHQYEVSSSLGYXSXRDVLENMMEPPQRDSSAPGRFHVGSAESMLHVRPGGYXPQRALINPFAPSRMPMKLXSNRRRWMHXFPVGPSGEAIQIHHQXRQNMAELQGSGQRDPXHSSAELLELAYHEAAGRHSNSRQPGDGMSFLNFSGXEELSVGLLSNSGAGMNPRXQNKDSLEDSVSXSPDPILXLSAPPVVPGFCCXVGVDWKSLXXPACLPLXXDYFPDRQGLQNDYXEGCYDLLPEADIDRRDEDGVQMXAQQVFEEFICQRLMQGYQIIVQPKXQKPNPAVPPPLSSSPLYSRGLVSRNRPEEEDQYWLSMGRXFHKVXLKDKMIXVXRYLPKYPYESAQIHYXYSLCPSHSDSEFVSCWVEFSHERLEEYKWNYLDQYICSAGSEDFSLIESLKFWRXRFLLLPACVXAXKRIXEGEAHCDIYGDRPRADEDEWQLLDGFVRFVEGLNRIRRRHRSDRMMRKGXAMKGLQMXGPISXHSLESXAPPVGKKGXSALSALLEMEASQKCLGEQQAAVHGGKSSAQSAESSSVAMXPXYMDSPRKDGAFFMEFVRSPRXASSAFYPQVSVDQXAXPMLDGXSLGICXGQSMDRGNSQXFGNSQNIGEQGYSSXNSSDSSSQQLVASSLXSSSXLXEILEAMKHPSXGVQLLSEQKGLSPYCFISAEVVHWLVNHVEGIQXQAMAIDIMQKMLEEQLIXHASGEAWRXFIYGFYFYKIVXDKEPDRVAMQQPAXXWHXAGVDDFASFQRKWFEVAFVAEELVHSEIPAFLLPWLPSRPASYASRHSSFSRSFGGRSQAAALLAAXVPEQRXVXLDVDVNNRXDRLEWCSCYYHGNFSLNAAFEIKLHWMAVXAAVLFEMVQGWHRKAXSCGFLLVPVLEGPFALPSYLYGDPLRAQLFIPLNISCLLKEGSEHLFDSLGLYKINILPLLLXSLLRXSLSISXLQEQCFCSCPXPSASSQGSSGGGGXPPAPPXRXCSARSGSAXXGPXXPCSPKHGAPAPQGMKSLLIGC

SEQ ID NO: 7918 - protein, 1572 aa, Homo sapiens
  MOD_RES (3)..(4): Selenocysteine
  MOD_RES (66)..(66): Selenocysteine
  MOD_RES (72)..(72): Selenocysteine
  MOD_RES (74)..(74): Selenocysteine
  MOD_RES (96)..(96): Selenocysteine
  MOD_RES (103)..(103): Selenocysteine
  MOD_RES (124)..(124): Selenocysteine
  MOD_RES (129)..(129): Selenocysteine
  MOD_RES (160)..(160): Selenocysteine
  MOD_RES (167)..(167): Selenocysteine
  MOD_RES (205)..(205): Selenocysteine
  MOD_RES (217)..(217): Selenocysteine
  MOD_RES (224)..(224): Selenocysteine
  MOD_RES (268)..(268): Selenocysteine
  MOD_RES (273)..(273): Selenocysteine
  MOD_RES (300)..(300): Selenocysteine
  MOD_RES (329)..(329): Selenocysteine
  MOD_RES (337)..(337): Selenocysteine
  MOD_RES (353)..(353): Selenocysteine
  MOD_RES (409)..(409): Selenocysteine
  MOD_RES (420)..(420): Selenocysteine
  MOD_RES (441)..(441): Selenocysteine
  MOD_RES (479)..(480): Selenocysteine
  MOD_RES (510)..(510): Selenocysteine
  MOD_RES (513)..(513): Selenocysteine
  MOD_RES (552)..(552): Selenocysteine
  MOD_RES (554)..(554): Selenocysteine
  MOD_RES (592)..(592): Selenocysteine
  MOD_RES (611)..(611): Selenocysteine
  MOD_RES (620)..(620): Selenocysteine
  MOD_RES (636)..(636): Selenocysteine
  MOD_RES (652)..(652): Selenocysteine
  MOD_RES (688)..(688): Selenocysteine
  MOD_RES (707)..(707): Selenocysteine
  MOD_RES (719)..(719): Selenocysteine
  MOD_RES (730)..(730): Selenocysteine
  MOD_RES (739)..(740): Selenocysteine
  MOD_RES (747)..(748): Selenocysteine
  MOD_RES (762)..(762): Selenocysteine
  MOD_RES (785)..(785): Selenocysteine
  MOD_RES (810)..(810): Selenocysteine
  MOD_RES (850)..(850): Selenocysteine
  MOD_RES (855)..(855): Selenocysteine
  MOD_RES (862)..(862): Selenocysteine
  MOD_RES (864)..(864): Selenocysteine
  MOD_RES (880)..(880): Selenocysteine
  MOD_RES (935)..(935): Selenocysteine
  MOD_RES (945)..(945): Selenocysteine
  MOD_RES (947)..(947): Selenocysteine
  MOD_RES (951)..(951): Selenocysteine
  MOD_RES (1001)..(1001): Selenocysteine
  MOD_RES (1009)..(1009): Selenocysteine
  MOD_RES (1014)..(1014): Selenocysteine
  MOD_RES (1020)..(1020): Selenocysteine
  MOD_RES (1029)..(1029): Selenocysteine
  MOD_RES (1070)..(1070): Selenocysteine
  MOD_RES (1072)..(1072): Selenocysteine
  MOD_RES (1085)..(1085): Selenocysteine
  MOD_RES (1087)..(1087): Selenocysteine
  MOD_RES (1093)..(1093): Selenocysteine
  MOD_RES (1099)..(1099): Selenocysteine
  MOD_RES (1110)..(1110): Selenocysteine
  MOD_RES (1125)..(1125): Selenocysteine
  MOD_RES (1141)..(1141): Selenocysteine
  MOD_RES (1145)..(1145): Selenocysteine
  MOD_RES (1147)..(1147): Selenocysteine
  MOD_RES (1158)..(1158): Selenocysteine
  MOD_RES (1192)..(1192): Selenocysteine
  MOD_RES (1210)..(1210): Selenocysteine
  MOD_RES (1219)..(1219): Selenocysteine
  MOD_RES (1231)..(1231): Selenocysteine
  MOD_RES (1245)..(1246): Selenocysteine
  MOD_RES (1249)..(1249): Selenocysteine
  MOD_RES (1316)..(1316): Selenocysteine
  MOD_RES (1322)..(1322): Selenocysteine
  MOD_RES (1324)..(1324): Selenocysteine
  MOD_RES (1333)..(1333): Selenocysteine
  MOD_RES (1363)..(1363): Selenocysteine
  MOD_RES (1379)..(1379): Selenocysteine
  MOD_RES (1433)..(1433): Selenocysteine
  MOD_RES (1475)..(1475): Selenocysteine
  MOD_RES (1477)..(1477): Selenocysteine
  MOD_RES (1500)..(1500): Selenocysteine
  MOD_RES (1503)..(1503): Selenocysteine
  MOD_RES (1521)..(1521): Selenocysteine
  MOD_RES (1524)..(1524): Selenocysteine
  MOD_RES (1526)..(1526): Selenocysteine
  MOD_RES (1532)..(1532): Selenocysteine
  MOD_RES (1546)..(1546): Selenocysteine
  MOD_RES (1558)..(1558): Selenocysteine
  MOD_RES (1561)..(1561): Selenocysteine
MRXXKVYKLVIHKKGFGGSDDELVVNPKVFPHIKLGDIVEIAHPNDEYSPLLLQVKSLKEDLQKEXISVDQXVXQVFRLRPYQDVYVNVVDPKDVXLDLVELXFKDQYIGRGDMWRLKKSLVSXCAYIXQKVEFAGIRAQAGELWVKNEKVMCGYISEDXRVVFRSXSAMVYIFIQMSCEMWDFDIYGDLYFEKAVNGFLADLFXKWKEKNCSHEVXVVLFSRXFYDAKSVDEFPEINRASIRQDHKGRFYEDFYKVVVQNERREEWXSLLVXIKKLFIQYPVLVRLEQAEGFPQGDNSXSAQGNYLEAINLSFNVFDKHYINRNFDRXGQMSVVIXPGVGVFEVDRLLMILXKQRMIDNGIGVDLVCMGEQPLHAVPLFKLHNRSAPRDSRLGDDYNIPHWINHSFYXSKSQLFCNSFXPRIKLAGKKPASEKAKNGRDXSLGSPKESENALPIQVDYDAYDAQVFRLPGPSRAQCLXXCRSVRERESHSRKSASSCDVSSSPSLPSRXLPXEEVRSQASDDSSLGKSANILMIPHPHLHQYEVSSSLGYXSXRDVLENMMEPPQRDSSAPGRFHVGSAESMLHVRPGGYXPQRALINPFAPSRMPMKLXSNRRRWMHXFPVGPSGEAIQIHHQXRQNMAELQGSGQRDPXHSSAELLELAYHEAAGRHSNSRQPGDGMSFLNFSGXEELSVGLLSNSGAGMNPRXQNKDSLEDSVSXSPDPMPGFCCXVGVDWKSLXXPACLPLXXDYFPDRQGLQNDYXEGCYDLLPEADIDRRDEDGVQMXAQQVFEEFICQRLMQGYQIIVQPKXQKPNPAVPPPLSSSPLYSRGLVSRNRPEEEDQYWLSMGRXFHKVXLKDKMIXVXRYLPKYPYESAQIHYXYSLCPSHSDSEFVSCWVEFSHERLEEYKWNYLDQYICSAGSEDFSLIESLKFWRXRFLLLPACVXAXKRIXEGEAHCDIYGDRPRADEDEWQLLDGFVRFVEGLNRIRRRHRSDRMMRKGXAMKGLQMXGPISXHSLESXAPPVGKKGXSALSALLEMEASQKCLGEQQAAVHGGKSSAQSAESSSVAMXPXYMDSPRKVSVDQXAXPMLDGXSLGICXGQSMDRGNSQXFGNSQNIGEQGYSSXNSSDSSSQQLVASSLXSSSXLXEILEAMKHPSXGVQLLSEQKGLSPYCFISAEVVHWLVNHVEGIQXQAMAIDIMQKMLEEQLIXHASGEAWRXFIYGFYFYKIVXDKEPDRVAMQQPAXXWHXAGVDDFASFQRKWFEVAFVAEELVHSEIPAFLLPWLPSRPASYASRHSSFSRSFGGRSQAAALLAAXVPEQRXVXLDVDVNNRXDRLEWCSCYYHGNFSLNAAFEIKLHWMAVXAAVLFEMVQGWHRKAXSCGFLLVPVLEGPFALPSYLYGDPLRAQLFIPLNISCLLKEGSEHLFDSFEPEXYWDRMHLFQEAIAHRFGFVQDKYSASAFNFPAENKPQYIHVXGXVFLQLPYSKRKFSGQQRRRRNSXSSXNQNMFCEERVGYNWAYNXMLXKXWRSSAXGDEKFADRLLKDFXDFCINRDNRLVXFWXSCLEKMHASAP

SEQ ID NO: 7919 - protein, 1594 aa, Homo sapiens
  MOD_RES (3)..(4): Selenocysteine
  MOD_RES (66)..(66): Selenocysteine
  MOD_RES (72)..(72): Selenocysteine
  MOD_RES (74)..(74): Selenocysteine
  MOD_RES (96)..(96): Selenocysteine
  MOD_RES (103)..(103): Selenocysteine
  MOD_RES (124)..(124): Selenocysteine
  MOD_RES (129)..(129): Selenocysteine
  MOD_RES (160)..(160): Selenocysteine
  MOD_RES (167)..(167): Selenocysteine
  MOD_RES (205)..(205): Selenocysteine
  MOD_RES (217)..(217): Selenocysteine
  MOD_RES (224)..(224): Selenocysteine
  MOD_RES (268)..(268): Selenocysteine
  MOD_RES (273)..(273): Selenocysteine
  MOD_RES (300)..(300): Selenocysteine
  MOD_RES (329)..(329): Selenocysteine
  MOD_RES (337)..(337): Selenocysteine
  MOD_RES (353)..(353): Selenocysteine
  MOD_RES (409)..(409): Selenocysteine
  MOD_RES (420)..(420): Selenocysteine
  MOD_RES (441)..(441): Selenocysteine
  MOD_RES (479)..(480): Selenocysteine
  MOD_RES (510)..(510): Selenocysteine
  MOD_RES (513)..(513): Selenocysteine
  MOD_RES (552)..(552): Selenocysteine
  MOD_RES (554)..(554): Selenocysteine
  MOD_RES (592)..(592): Selenocysteine
  MOD_RES (611)..(611): Selenocysteine
  MOD_RES (620)..(620): Selenocysteine
  MOD_RES (636)..(636): Selenocysteine
  MOD_RES (652)..(652): Selenocysteine
  MOD_RES (688)..(688): Selenocysteine
  MOD_RES (707)..(707): Selenocysteine
  MOD_RES (719)..(719): Selenocysteine
  MOD_RES (730)..(730): Selenocysteine
  MOD_RES (739)..(740): Selenocysteine
  MOD_RES (747)..(748): Selenocysteine
  MOD_RES (762)..(762): Selenocysteine
  MOD_RES (785)..(785): Selenocysteine
  MOD_RES (810)..(810): Selenocysteine
  MOD_RES (850)..(850): Selenocysteine
  MOD_RES (855)..(855): Selenocysteine
  MOD_RES (862)..(862): Selenocysteine
  MOD_RES (864)..(864): Selenocysteine
  MOD_RES (880)..(880): Selenocysteine
  MOD_RES (935)..(935): Selenocysteine
  MOD_RES (945)..(945): Selenocysteine
  MOD_RES (947)..(947): Selenocysteine
  MOD_RES (951)..(951): Selenocysteine
  MOD_RES (1001)..(1001): Selenocysteine
  MOD_RES (1009)..(1009): Selenocysteine
  MOD_RES (1014)..(1014): Selenocysteine
  MOD_RES (1020)..(1020): Selenocysteine
  MOD_RES (1029)..(1029): Selenocysteine
  MOD_RES (1070)..(1070): Selenocysteine
  MOD_RES (1072)..(1072): Selenocysteine
  MOD_RES (1093)..(1093): Selenocysteine
  MOD_RES (1107)..(1107): Selenocysteine
  MOD_RES (1109)..(1109): Selenocysteine
  MOD_RES (1115)..(1115): Selenocysteine
  MOD_RES (1121)..(1121): Selenocysteine
  MOD_RES (1132)..(1132): Selenocysteine
  MOD_RES (1147)..(1147): Selenocysteine
  MOD_RES (1163)..(1163): Selenocysteine
  MOD_RES (1167)..(1167): Selenocysteine
  MOD_RES (1169)..(1169): Selenocysteine
  MOD_RES (1180)..(1180): Selenocysteine
  MOD_RES (1214)..(1214): Selenocysteine
  MOD_RES (1232)..(1232): Selenocysteine
  MOD_RES (1241)..(1241): Selenocysteine
  MOD_RES (1253)..(1253): Selenocysteine
  MOD_RES (1267)..(1268): Selenocysteine
  MOD_RES (1271)..(1271): Selenocysteine
  MOD_RES (1338)..(1338): Selenocysteine
  MOD_RES (1344)..(1344): Selenocysteine
  MOD_RES (1346)..(1346): Selenocysteine
  MOD_RES (1355)..(1355): Selenocysteine
  MOD_RES (1385)..(1385): Selenocysteine
  MOD_RES (1401)..(1401): Selenocysteine
  MOD_RES (1455)..(1455): Selenocysteine
  MOD_RES (1497)..(1497): Selenocysteine
  MOD_RES (1499)..(1499): Selenocysteine
  MOD_RES (1522)..(1522): Selenocysteine
  MOD_RES (1525)..(1525): Selenocysteine
  MOD_RES (1543)..(1543): Selenocysteine
  MOD_RES (1546)..(1546): Selenocysteine
  MOD_RES (1548)..(1548): Selenocysteine
  MOD_RES (1554)..(1554): Selenocysteine
  MOD_RES (1568)..(1568): Selenocysteine
  MOD_RES (1580)..(1580): Selenocysteine
  MOD_RES (1583)..(1583): Selenocysteine
MRXXKVYKLVIHKKGFGGSDDELVVNPKVFPHIKLGDIVEIAHPNDEYSPLLLQVKSLKEDLQKEXISVDQXVXQVFRLRPYQDVYVNVVDPKDVXLDLVELXFKDQYIGRGDMWRLKKSLVSXCAYIXQKVEFAGIRAQAGELWVKNEKVMCGYISEDXRVVFRSXSAMVYIFIQMSCEMWDFDIYGDLYFEKAVNGFLADLFXKWKEKNCSHEVXVVLFSRXFYDAKSVDEFPEINRASIRQDHKGRFYEDFYKVVVQNERREEWXSLLVXIKKLFIQYPVLVRLEQAEGFPQGDNSXSAQGNYLEAINLSFNVFDKHYINRNFDRXGQMSVVIXPGVGVFEVDRLLMILXKQRMIDNGIGVDLVCMGEQPLHAVPLFKLHNRSAPRDSRLGDDYNIPHWINHSFYXSKSQLFCNSFXPRIKLAGKKPASEKAKNGRDXSLGSPKESENALPIQVDYDAYDAQVFRLPGPSRAQCLXXCRSVRERESHSRKSASSCDVSSSPSLPSRXLPXEEVRSQASDDSSLGKSANILMIPHPHLHQYEVSSSLGYXSXRDVLENMMEPPQRDSSAPGRFHVGSAESMLHVRPGGYXPQRALINPFAPSRMPMKLXSNRRRWMHXFPVGPSGEAIQIHHQXRQNMAELQGSGQRDPXHSSAELLELAYHEAAGRHSNSRQPGDGMSFLNFSGXEELSVGLLSNSGAGMNPRXQNKDSLEDSVSXSPDPMPGFCCXVGVDWKSLXXPACLPLXXDYFPDRQGLQNDYXEGCYDLLPEADIDRRDEDGVQMXAQQVFEEFICQRLMQGYQIIVQPKXQKPNPAVPPPLSSSPLYSRGLVSRNRPEEEDQYWLSMGRXFHKVXLKDKMIXVXRYLPKYPYESAQIHYXYSLCPSHSDSEFVSCWVEFSHERLEEYKWNYLDQYICSAGSEDFSLIESLKFWRXRFLLLPACVXAXKRIXEGEAHCDIYGDRPRADEDEWQLLDGFVRFVEGLNRIRRRHRSDRMMRKGXAMKGLQMXGPISXHSLESXAPPVGKKGXSALSALLEMEASQKCLGEQQAAVHGGKSSAQSAESSSVAMXPXYMDSPRKDGAFFMEFVRSPRXASSAFYPQVSVDQXAXPMLDGXSLGICXGQSMDRGNSQXFGNSQNIGEQGYSSXNSSDSSSQQLVASSLXSSSXLXEILEAMKHPSXGVQLLSEQKGLSPYCFISAEVVHWLVNHVEGIQXQAMAIDIMQKMLEEQLIXHASGEAWRXFIYGFYFYKIVXDKEPDRVAMQQPAXXWHXAGVDDFASFQRKWFEVAFVAEELVHSEIPAFLLPWLPSRPASYASRHSSFSRSFGGRSQAAALLAAXVPEQRXVXLDVDVNNRXDRLEWCSCYYHGNFSLNAAFEIKLHWMAVXAAVLFEMVQGWHRKAXSCGFLLVPVLEGPFALPSYLYGDPLRAQLFIPLNISCLLKEGSEHLFDSFEPEXYWDRMHLFQEAIAHRFGFVQDKYSASAFNFPAENKPQYIHVXGXVFLQLPYSKRKFSGQQRRRRNSXSSXNQNMFCEERVGYNWAYNXMLXKXWRSSAXGDEKFADRLLKDFXDFCINRDNRLVXFWXSCLEKMHASAP

SEQ ID NO: 7920 - protein, 1603 aa, Homo sapiens
  MOD_RES (3)..(4): Selenocysteine
  MOD_RES (66)..(66): Selenocysteine
  MOD_RES (72)..(72): Selenocysteine
  MOD_RES (74)..(74): Selenocysteine
  MOD_RES (96)..(96): Selenocysteine
  MOD_RES (103)..(103): Selenocysteine
  MOD_RES (124)..(124): Selenocysteine
  MOD_RES (129)..(129): Selenocysteine
  MOD_RES (160)..(160): Selenocysteine
  MOD_RES (167)..(167): Selenocysteine
  MOD_RES (205)..(205): Selenocysteine
  MOD_RES (217)..(217): Selenocysteine
  MOD_RES (224)..(224): Selenocysteine
  MOD_RES (268)..(268): Selenocysteine
  MOD_RES (273)..(273): Selenocysteine
  MOD_RES (300)..(300): Selenocysteine
  MOD_RES (329)..(329): Selenocysteine
  MOD_RES (337)..(337): Selenocysteine
  MOD_RES (353)..(353): Selenocysteine
  MOD_RES (409)..(409): Selenocysteine
  MOD_RES (420)..(420): Selenocysteine
  MOD_RES (441)..(441): Selenocysteine
  MOD_RES (479)..(480): Selenocysteine
  MOD_RES (510)..(510): Selenocysteine
  MOD_RES (513)..(513): Selenocysteine
  MOD_RES (552)..(552): Selenocysteine
  MOD_RES (554)..(554): Selenocysteine
  MOD_RES (592)..(592): Selenocysteine
  MOD_RES (611)..(611): Selenocysteine
  MOD_RES (620)..(620): Selenocysteine
  MOD_RES (636)..(636): Selenocysteine
  MOD_RES (652)..(652): Selenocysteine
  MOD_RES (688)..(688): Selenocysteine
  MOD_RES (707)..(707): Selenocysteine
  MOD_RES (719)..(719): Selenocysteine
  MOD_RES (726)..(726): Selenocysteine
  MOD_RES (739)..(739): Selenocysteine
  MOD_RES (748)..(749): Selenocysteine
  MOD_RES (756)..(757): Selenocysteine
  MOD_RES (771)..(771): Selenocysteine
  MOD_RES (794)..(794): Selenocysteine
  MOD_RES (819)..(819): Selenocysteine
  MOD_RES (859)..(859): Selenocysteine
  MOD_RES (864)..(864): Selenocysteine
  MOD_RES (871)..(871): Selenocysteine
  MOD_RES (873)..(873): Selenocysteine
  MOD_RES (889)..(889): Selenocysteine
  MOD_RES (944)..(944): Selenocysteine
  MOD_RES (954)..(954): Selenocysteine
  MOD_RES (956)..(956): Selenocysteine
  MOD_RES (960)..(960): Selenocysteine
  MOD_RES (1010)..(1010): Selenocysteine
  MOD_RES (1018)..(1018): Selenocysteine
  MOD_RES (1023)..(1023): Selenocysteine
  MOD_RES (1029)..(1029): Selenocysteine
  MOD_RES (1038)..(1038): Selenocysteine
  MOD_RES (1079)..(1079): Selenocysteine
  MOD_RES (1081)..(1081): Selenocysteine
  MOD_RES (1102)..(1102): Selenocysteine
  MOD_RES (1116)..(1116): Selenocysteine
  MOD_RES (1118)..(1118): Selenocysteine
  MOD_RES (1124)..(1124): Selenocysteine
  MOD_RES (1130)..(1130): Selenocysteine
  MOD_RES (1141)..(1141): Selenocysteine
  MOD_RES (1156)..(1156): Selenocysteine
  MOD_RES (1172)..(1172): Selenocysteine
  MOD_RES (1176)..(1176): Selenocysteine
  MOD_RES (1178)..(1178): Selenocysteine
  MOD_RES (1189)..(1189): Selenocysteine
  MOD_RES (1223)..(1223): Selenocysteine
  MOD_RES (1241)..(1241): Selenocysteine
  MOD_RES (1250)..(1250): Selenocysteine
  MOD_RES (1262)..(1262): Selenocysteine
  MOD_RES (1276)..(1277): Selenocysteine
  MOD_RES (1280)..(1280): Selenocysteine
  MOD_RES (1347)..(1347): Selenocysteine
  MOD_RES (1353)..(1353): Selenocysteine
  MOD_RES (1355)..(1355): Selenocysteine
  MOD_RES (1364)..(1364): Selenocysteine
  MOD_RES (1394)..(1394): Selenocysteine
  MOD_RES (1410)..(1410): Selenocysteine
  MOD_RES (1464)..(1464): Selenocysteine
  MOD_RES (1506)..(1506): Selenocysteine
  MOD_RES (1508)..(1508): Selenocysteine
  MOD_RES (1531)..(1531): Selenocysteine
  MOD_RES (1534)..(1534): Selenocysteine
  MOD_RES (1552)..(1552): Selenocysteine
  MOD_RES (1555)..(1555): Selenocysteine
  MOD_RES (1557)..(1557): Selenocysteine
  MOD_RES (1563)..(1563): Selenocysteine
  MOD_RES (1577)..(1577): Selenocysteine
  MOD_RES (1589)..(1589): Selenocysteine
  MOD_RES (1592)..(1592): Selenocysteine
MRXXKVYKLVIHKKGFGGSDDELVVNPKVFPHIKLGDIVEIAHPNDEYSPLLLQVKSLKEDLQKEXISVDQXVXQVFRLRPYQDVYVNVVDPKDVXLDLVELXFKDQYIGRGDMWRLKKSLVSXCAYIXQKVEFAGIRAQAGELWVKNEKVMCGYISEDXRVVFRSXSAMVYIFIQMSCEMWDFDIYGDLYFEKAVNGFLADLFXKWKEKNCSHEVXVVLFSRXFYDAKSVDEFPEINRASIRQDHKGRFYEDFYKVVVQNERREEWXSLLVXIKKLFIQYPVLVRLEQAEGFPQGDNSXSAQGNYLEAINLSFNVFDKHYINRNFDRXGQMSVVIXPGVGVFEVDRLLMILXKQRMIDNGIGVDLVCMGEQPLHAVPLFKLHNRSAPRDSRLGDDYNIPHWINHSFYXSKSQLFCNSFXPRIKLAGKKPASEKAKNGRDXSLGSPKESENALPIQVDYDAYDAQVFRLPGPSRAQCLXXCRSVRERESHSRKSASSCDVSSSPSLPSRXLPXEEVRSQASDDSSLGKSANILMIPHPHLHQYEVSSSLGYXSXRDVLENMMEPPQRDSSAPGRFHVGSAESMLHVRPGGYXPQRALINPFAPSRMPMKLXSNRRRWMHXFPVGPSGEAIQIHHQXRQNMAELQGSGQRDPXHSSAELLELAYHEAAGRHSNSRQPGDGMSFLNFSGXEELSVGLLSNSGAGMNPRXQNKDSLEDSVSXSPDPILXLSAPPVVPGFCCXVGVDWKSLXXPACLPLXXDYFPDRQGLQNDYXEGCYDLLPEADIDRRDEDGVQMXAQQVFEEFICQRLMQGYQIIVQPKXQKPNPAVPPPLSSSPLYSRGLVSRNRPEEEDQYWLSMGRXFHKVXLKDKMIXVXRYLPKYPYESAQIHYXYSLCPSHSDSEFVSCWVEFSHERLEEYKWNYLDQYICSAGSEDFSLIESLKFWRXRFLLLPACVXAXKRIXEGEAHCDIYGDRPRADEDEWQLLDGFVRFVEGLNRIRRRHRSDRMMRKGXAMKGLQMXGPISXHSLESXAPPVGKKGXSALSALLEMEASQKCLGEQQAAVHGGKSSAQSAESSSVAMXPXYMDSPRKDGAFFMEFVRSPRXASSAFYPQVSVDQXAXPMLDGXSLGICXGQSMDRGNSQXFGNSQNIGEQGYSSXNSSDSSSQQLVASSLXSSSXLXEILEAMKHPSXGVQLLSEQKGLSPYCFISAEVVHWLVNHVEGIQXQAMAIDIMQKMLEEQLIXHASGEAWRXFIYGFYFYKIVXDKEPDRVAMQQPAXXWHXAGVDDFASFQRKWFEVAFVAEELVHSEIPAFLLPWLPSRPASYASRHSSFSRSFGGRSQAAALLAAXVPEQRXVXLDVDVNNRXDRLEWCSCYYHGNFSLNAAFEIKLHWMAVXAAVLFEMVQGWHRKAXSCGFLLVPVLEGPFALPSYLYGDPLRAQLFIPLNISCLLKEGSEHLFDSFEPEXYWDRMHLFQEAIAHRFGFVQDKYSASAFNFPAENKPQYIHVXGXVFLQLPYSKRKFSGQQRRRRNSXSSXNQNMFCEERVGYNWAYNXMLXKXWRSSAXGDEKFADRLLKDFXDFCINRDNRLVXFWXSCLEKMHASAP

SEQ ID NO: 7921 - protein, 26 aa, Homo sapiens
  MOD_RES (3)..(4): Selenocysteine
MRXXKVYKLVIHKKGFGGSVAELSFR

SEQ ID NO: 7922 - protein, 60 aa, Homo sapiens
  MOD_RES (1)..(1): Any amino acid
  MOD_RES (27)..(27): Selenocysteine
  MOD_RES (34)..(34): Selenocysteine
  MOD_RES (56)..(56): Selenocysteine
XAGIRAQAGELWVKNEKVMCGYISEDXRVVFRSXSAMVYIFIQMSCEMWDFDIYGXVSMC

SEQ ID NO: 7923 - protein, 979 aa, Homo sapiens
  MOD_RES (1)..(1): Any amino acid
  MOD_RES (9)..(9): Selenocysteine
  MOD_RES (18)..(18): Selenocysteine
  MOD_RES (34)..(34): Selenocysteine
  MOD_RES (50)..(50): Selenocysteine
  MOD_RES (86)..(86): Selenocysteine
  MOD_RES (105)..(105): Selenocysteine
  MOD_RES (117)..(117): Selenocysteine
  MOD_RES (124)..(124): Selenocysteine
  MOD_RES (137)..(137): Selenocysteine
  MOD_RES (146)..(147): Selenocysteine
  MOD_RES (154)..(155): Selenocysteine
  MOD_RES (169)..(169): Selenocysteine
  MOD_RES (192)..(192): Selenocysteine
  MOD_RES (217)..(217): Selenocysteine
  MOD_RES (257)..(257): Selenocysteine
  MOD_RES (262)..(262): Selenocysteine
  MOD_RES (269)..(269): Selenocysteine
  MOD_RES (271)..(271): Selenocysteine
  MOD_RES (287)..(287): Selenocysteine
  MOD_RES (342)..(342): Selenocysteine
  MOD_RES (352)..(352): Selenocysteine
  MOD_RES (354)..(354): Selenocysteine
  MOD_RES (358)..(358): Selenocysteine
  MOD_RES (408)..(408): Selenocysteine
  MOD_RES (416)..(416): Selenocysteine
  MOD_RES (421)..(421): Selenocysteine
  MOD_RES (427)..(427): Selenocysteine
  MOD_RES (436)..(436): Selenocysteine
  MOD_RES (477)..(477): Selenocysteine
  MOD_RES (479)..(479): Selenocysteine
  MOD_RES (492)..(492): Selenocysteine
  MOD_RES (494)..(494): Selenocysteine
  MOD_RES (500)..(500): Selenocysteine
  MOD_RES (506)..(506): Selenocysteine
  MOD_RES (517)..(517): Selenocysteine
  MOD_RES (532)..(532): Selenocysteine
  MOD_RES (548)..(548): Selenocysteine
  MOD_RES (552)..(552): Selenocysteine
  MOD_RES (554)..(554): Selenocysteine
  MOD_RES (565)..(565): Selenocysteine
  MOD_RES (599)..(599): Selenocysteine
  MOD_RES (617)..(617): Selenocysteine
  MOD_RES (626)..(626): Selenocysteine
  MOD_RES (638)..(638): Selenocysteine
  MOD_RES (652)..(653): Selenocysteine
  MOD_RES (656)..(656): Selenocysteine
  MOD_RES (723)..(723): Selenocysteine
  MOD_RES (729)..(729): Selenocysteine
  MOD_RES (731)..(731): Selenocysteine
  MOD_RES (740)..(740): Selenocysteine
  MOD_RES (770)..(770): Selenocysteine
  MOD_RES (786)..(786): Selenocysteine
  MOD_RES (840)..(840): Selenocysteine
  MOD_RES (882)..(882): Selenocysteine
  MOD_RES (884)..(884): Selenocysteine
  MOD_RES (907)..(907): Selenocysteine
  MOD_RES (910)..(910): Selenocysteine
  MOD_RES (928)..(928): Selenocysteine
  MOD_RES (931)..(931): Selenocysteine
  MOD_RES (933)..(933): Selenocysteine
  MOD_RES (939)..(939): Selenocysteine
  MOD_RES (953)..(953): Selenocysteine
  MOD_RES (965)..(965): Selenocysteine
  MOD_RES (968)..(968): Selenocysteine
XSRMPMKLXSNRRRWMHXFPVGPSGEAIQIHHQXRQNMAELQGSGQRDPXHSSAELLELAYHEAAGRHSNSRQPGDGMSFLNFSGXEELSVGLLSNSGAGMNPRXQNKDSLEDSVSXSPDPILXLSAPPVVPGFCCXVGVDWKSLXXPACLPLXXDYFPDRQGLQNDYXEGCYDLLPEADIDRRDEDGVQMXAQQVFEEFICQRLMQGYQIIVQPKXQKPNPAVPPPLSSSPLYSRGLVSRNRPEEEDQYWLSMGRXFHKVXLKDKMIXVXRYLPKYPYESAQIHYXYSLCPSHSDSEFVSCWVEFSHERLEEYKWNYLDQYICSAGSEDFSLIESLKFWRXRFLLLPACVXAXKRIXEGEAHCDIYGDRPRADEDEWQLLDGFVRFVEGLNRIRRRHRSDRMMRKGXAMKGLQMXGPISXHSLESXAPPVGKKGXSALSALLEMEASQKCLGEQQAAVHGGKSSAQSAESSSVAMXPXYMDSPRKVSVDQXAXPMLDGXSLGICXGQSMDRGNSQXFGNSQNIGEQGYSSXNSSDSSSQQLVASSLXSSSXLXEILEAMKHPSXGVQLLSEQKGLSPYCFISAEVVHWLVNHVEGIQXQAMAIDIMQKMLEEQLIXHASGEAWRXFIYGFYFYKIVXDKEPDRVAMQQPAXXWHXAGVDDFASFQRKWFEVAFVAEELVHSEIPAFLLPWLPSRPASYASRHSSFSRSFGGRSQAAALLAAXVPEQRXVXLDVDVNNRXDRLEWCSCYYHGNFSLNAAFEIKLHWMAVXAAVLFEMVQGWHRKAXSCGFLLVPVLEGPFALPSYLYGDPLRAQLFIPLNISCLLKEGSEHLFDSFEPEXYWDRMHLFQEAIAHRFGFVQDKYSASAFNFPAENKPQYIHVXGXVFLQLPYSKRKFSGQQRRRRNSXSSXNQNMFCEERVGYNWAYNXMLXKXWRSSAXGDEKFADRLLKDFXDFCINRDNRLVXFWXSCLEKMHASAP

SEQ ID NO: 7924 - protein, 511 aa, Homo sapiens
  MOD_RES (3)..(3): Selenocysteine
  MOD_RES (36)..(36): Selenocysteine
  MOD_RES (45)..(45): Selenocysteine
  MOD_RES (48)..(48): Selenocysteine
  MOD_RES (113)..(113): Selenocysteine
  MOD_RES (123)..(123): Selenocysteine
  MOD_RES (135)..(136): Selenocysteine
  MOD_RES (193)..(193): Selenocysteine
  MOD_RES (207)..(207): Selenocysteine
  MOD_RES (241)..(241): Selenocysteine
  MOD_RES (295)..(295): Selenocysteine
  MOD_RES (336)..(336): Selenocysteine
  MOD_RES (343)..(343): Selenocysteine
  MOD_RES (405)..(405): Selenocysteine
  MOD_RES (425)..(425): Selenocysteine
  MOD_RES (464)..(464): Selenocysteine
  MOD_RES (467)..(468): Selenocysteine
  MOD_RES (478)..(478): Selenocysteine
MAXVQEKAAALNLSALHSPAHRPPGFSVAQKPFGAXYVWSSIINXLQXQVEVKKRRHRLKRHNDCFVGSEAVDVIFSHLIQNKYFGDVDIPRAKVVRVCQALMDYKVFEAVPXKVFGKDKKPXFEDSSCSLYRFXXIPNQDSQLGKENKLYSPARYADALFKSSDIRSASLEDLWENLSLKPANSPHVNISAXLSPQVINEVWQEEXIGRLLQLVDLPLLDSLLKQQEAVPKIPQPKRQSXMVNSSNYLDRGILKAYSDSQEDEWLSAAIDCLEYLPDQMVVEISRSFPEQPDRXDLVKELLFDAIGRYYSSREPLLNHLSDVHNGIAELLVNGKXEIALEAXQLLLKLLDFQNREEFRRLLYFMAVAANPSEFKLQKESDNRMVVKRIFSKAIVDNKNLSKGKXDLLVLFLMDHQKDVFKIPGXLHKIVSVKLMAIQNGRDPNRDAGYIYCQRIDQRDYSNNXEKXXKDELLNLLKXLDEDSKLSAKEKKKLLGQFYKCHPDIFIEHFGD

SEQ ID NO: 7925 - protein, 502 aa, Homo sapiens
  MOD_RES (27)..(27): Selenocysteine
  MOD_RES (36)..(36): Selenocysteine
  MOD_RES (39)..(39): Selenocysteine
  MOD_RES (104)..(104): Selenocysteine
  MOD_RES (114)..(114): Selenocysteine
  MOD_RES (126)..(127): Selenocysteine
  MOD_RES (184)..(184): Selenocysteine
  MOD_RES (198)..(198): Selenocysteine
  MOD_RES (232)..(232): Selenocysteine
  MOD_RES (286)..(286): Selenocysteine
  MOD_RES (327)..(327): Selenocysteine
  MOD_RES (334)..(334): Selenocysteine
  MOD_RES (396)..(396): Selenocysteine
  MOD_RES (416)..(416): Selenocysteine
  MOD_RES (455)..(455): Selenocysteine
  MOD_RES (458)..(459): Selenocysteine
  MOD_RES (469)..(469): Selenocysteine
MRGLCEFYWQEFGIKGFSVAQKPFGAXYVWSSIINXLQXQVEVKKRRHRLKRHNDCFVGSEAVDVIFSHLIQNKYFGDVDIPRAKVVRVCQALMDYKVFEAVPXKVFGKDKKPXFEDSSCSLYRFXXIPNQDSQLGKENKLYSPARYADALFKSSDIRSASLEDLWENLSLKPANSPHVNISAXLSPQVINEVWQEEXIGRLLQLVDLPLLDSLLKQQEAVPKIPQPKRQSXMVNSSNYLDRGILKAYSDSQEDEWLSAAIDCLEYLPDQMVVEISRSFPEQPDRXDLVKELLFDAIGRYYSSREPLLNHLSDVHNGIAELLVNGKXEIALEAXQLLLKLLDFQNREEFRRLLYFMAVAANPSEFKLQKESDNRMVVKRIFSKAIVDNKNLSKGKXDLLVLFLMDHQKDVFKIPGXLHKIVSVKLMAIQNGRDPNRDAGYIYCQRIDQRDYSNNXEKXXKDELLNLLKXLDEDSKLSAKEKKKLLGQFYKCHPDIFIEHFGD

SEQ ID NO: 7926 - protein, 308 aa, Homo sapiens
  MOD_RES (7)..(7): Selenocysteine
  MOD_RES (16)..(16): Selenocysteine
  MOD_RES (36)..(36): Selenocysteine
  MOD_RES (48)..(48): Selenocysteine
  MOD_RES (63)..(63): Selenocysteine
  MOD_RES (80)..(81): Selenocysteine
  MOD_RES (140)..(140): Selenocysteine
  MOD_RES (158)..(158): Selenocysteine
  MOD_RES (194)..(194): Selenocysteine
  MOD_RES (214)..(214): Selenocysteine
  MOD_RES (220)..(220): Selenocysteine
  MOD_RES (229)..(229): Selenocysteine
  MOD_RES (231)..(231): Selenocysteine
  MOD_RES (286)..(286): Selenocysteine
  MOD_RES (293)..(293): Selenocysteine
  MOD_RES (297)..(297): Selenocysteine
MEEGGSXGSAGSDSSXSGSGGAQQRELERMAEVLVXGEQLRLMSPENXLLQPREEEGVKYERXFMASEFLDWLVQEGEAXXRKEAEQLCHRLMEHGIIQHVSNKHPFVDSNLLYQFRMNFRRRRRLMELLNEKSPSSQEXHDSPFCLRKQSHDNRKSXSFMSVSPSKEIKIVSAVRRSSMSSCGSSGYFSSSPXLSSSPPVLCNPKSVLKRPVXSEELLXPGAPYARKXFXIVGDAVGWGFVVRGSKPCHIQAVDPSGPAAAAGMKVCQFVVSVNGLNVLHVDYRXVSNLILXGPRXIVMEVMEELEC

SEQ ID NO: 7927 - protein, 409 aa, Homo sapiens
  MOD_RES (7)..(7): Selenocysteine
  MOD_RES (16)..(16): Selenocysteine
  MOD_RES (36)..(36): Selenocysteine
  MOD_RES (59)..(59): Selenocysteine
  MOD_RES (84)..(84): Selenocysteine
  MOD_RES (123)..(123): Selenocysteine
  MOD_RES (149)..(149): Selenocysteine
  MOD_RES (164)..(164): Selenocysteine
  MOD_RES (181)..(182): Selenocysteine
  MOD_RES (241)..(241): Selenocysteine
  MOD_RES (259)..(259): Selenocysteine
  MOD_RES (295)..(295): Selenocysteine
  MOD_RES (315)..(315): Selenocysteine
  MOD_RES (321)..(321): Selenocysteine
  MOD_RES (330)..(330): Selenocysteine
  MOD_RES (332)..(332): Selenocysteine
  MOD_RES (387)..(387): Selenocysteine
  MOD_RES (394)..(394): Selenocysteine
  MOD_RES (398)..(398): Selenocysteine
MEEGGSXGSAGSDSSXSGSGGAQQRELERMAEVLVXGEQLRLRLHEEKVIKDRRHHLKXYPNCFVAKELIDWLIEHKEASDREXAIKLMQKLADRGIIHHVCDEHKEFKDVKLFYRFRKDDGXFPLDNEVKAFMRGQRLYEKLMSPENXLLQPREEEGVKYERXFMASEFLDWLVQEGEAXXRKEAEQLCHRLMEHGIIQHVSNKHPFVDSNLLYQFRMNFRRRRRLMELLNEKSPSSQEXHDSPFCLRKQSHDNRKSXSFMSVSPSKEIKIVSAVRRSSMSSCGSSGYFSSSPXLSSSPPVLCNPKSVLKRPVXSEELLXPGAPYARKXFXIVGDAVGWGFVVRGSKPCHIQAVDPSGPAAAAGMKVCQFVVSVNGLNVLHVDYRXVSNLILXGPRXIVMEVMEELEC

SEQ ID NO: 7928 - protein, 268 aa, Homo sapiens
  MOD_RES (4)..(4): Selenocysteine
  MOD_RES (17)..(17): Selenocysteine
  MOD_RES (57)..(57): Selenocysteine
  MOD_RES (60)..(60): Selenocysteine
  MOD_RES (68)..(68): Selenocysteine
  MOD_RES (83)..(83): Selenocysteine
  MOD_RES (103)..(103): Selenocysteine
  MOD_RES (116)..(116): Selenocysteine
  MOD_RES (167)..(167): Selenocysteine
  MOD_RES (174)..(174): Selenocysteine
  MOD_RES (225)..(225): Selenocysteine
  MOD_RES (231)..(231): Selenocysteine
  MOD_RES (243)..(243): Selenocysteine
MEVXGDAGVPESGEIRXLKPCLLRRNYSREQHGVAASCLEDLRSKACDILAIDKSLXPVXLVLAEDGXIVDDDDYFLCLPSNXKFVALASNEKWAYNNSDGGXAWISQESFDVDEXDSGAGLKWKNVARQLKEDLSSIILLSEEDLQMLVDAPCSDLAQELRQSCAXVQRLQHXLQQVLDQREEVRQSKQLLQLYLQALEKEGSLLSKQEESKAAFGEEVDAVDXGISREXSSDVALASHILXALREKQAPELSLSSQDLEVGGNQGH

SEQ ID NO: 7929 - protein, 331 aa, Homo sapiens
  MOD_RES (4)..(4): Selenocysteine
  MOD_RES (17)..(17): Selenocysteine
  MOD_RES (57)..(57): Selenocysteine
  MOD_RES (60)..(60): Selenocysteine
  MOD_RES (68)..(68): Selenocysteine
  MOD_RES (83)..(83): Selenocysteine
  MOD_RES (103)..(103): Selenocysteine
  MOD_RES (116)..(116): Selenocysteine
  MOD_RES (167)..(167): Selenocysteine
  MOD_RES (174)..(174): Selenocysteine
  MOD_RES (225)..(225): Selenocysteine
  MOD_RES (231)..(231): Selenocysteine
  MOD_RES (243)..(243): Selenocysteine
  MOD_RES (264)..(264): Selenocysteine
  MOD_RES (282)..(282): Selenocysteine
  MOD_RES (284)..(284): Selenocysteine
  MOD_RES (300)..(300): Selenocysteine
  MOD_RES (331)..(331): Selenocysteine
MEVXGDAGVPESGEIRXLKPCLLRRNYSREQHGVAASCLEDLRSKACDILAIDKSLXPVXLVLAEDGXIVDDDDYFLCLPSNXKFVALASNEKWAYNNSDGGXAWISQESFDVDEXDSGAGLKWKNVARQLKEDLSSIILLSEEDLQMLVDAPCSDLAQELRQSCAXVQRLQHXLQQVLDQREEVRQSKQLLQLYLQALEKEGSLLSKQEESKAAFGEEVDAVDXGISREXSSDVALASHILXALREKQAPELSLSSQDLELVXKEDPKALAVALNWDIKKXEXVQEACERELALRLQQXQSLHSLRSISASKASPPGDLQNPKRARQDPX

SEQ ID NO: 7930 - protein, 159 aa, Homo sapiens
  MOD_RES (4)..(4): Selenocysteine
  MOD_RES (17)..(17): Selenocysteine
  MOD_RES (57)..(57): Selenocysteine
  MOD_RES (60)..(60): Selenocysteine
  MOD_RES (68)..(68): Selenocysteine
  MOD_RES (83)..(83): Selenocysteine
  MOD_RES (103)..(103): Selenocysteine
  MOD_RES (116)..(116): Selenocysteine
MEVXGDAGVPESGEIRXLKPCLLRRNYSREQHGVAASCLEDLRSKACDILAIDKSLXPVXLVLAEDGXIVDDDDYFLCLPSNXKFVALASNEKWAYNNSDGGXAWISQESFDVDEXDSGAGLKWKNVARQLKEDLSSIILLSEEDLQSPKLPLVRRWMQ

SEQ ID NO: 7931 - protein, 496 aa, Homo sapiens
  MOD_RES (6)..(6): Selenocysteine
  MOD_RES (38)..(38): Selenocysteine
  MOD_RES (57)..(57): Selenocysteine
  MOD_RES (91)..(91): Selenocysteine
  MOD_RES (94)..(94): Selenocysteine
  MOD_RES (117)..(117): Selenocysteine
  MOD_RES (136)..(136): Selenocysteine
  MOD_RES (159)..(159): Selenocysteine
  MOD_RES (163)..(164): Selenocysteine
  MOD_RES (188)..(188): Selenocysteine
  MOD_RES (190)..(190): Selenocysteine
  MOD_RES (196)..(196): Selenocysteine
  MOD_RES (202)..(202): Selenocysteine
  MOD_RES (215)..(216): Selenocysteine
  MOD_RES (289)..(289): Selenocysteine
  MOD_RES (308)..(308): Selenocysteine
  MOD_RES (341)..(341): Selenocysteine
  MOD_RES (385)..(385): Selenocysteine
  MOD_RES (406)..(406): Selenocysteine
  MOD_RES (415)..(415): Selenocysteine
  MOD_RES (435)..(435): Selenocysteine
  MOD_RES (437)..(437): Selenocysteine
  MOD_RES (442)..(442): Selenocysteine
  MOD_RES (484)..(484): Selenocysteine
MFAKAXRNFLREVDADGDLIAVSNLNDSDKLQLLSLVXKKKRFWCWQRPKYQFLSLXLGDVLIEDQFPSPVVVESDFVKYEGKFANHVSGXLEXALGKVKLNLGGSSRVESQSSFGXLRKQEVDLQQLIRDSAERXINLRNPVLQQVLEGRNEVLCVLXQKIXXMQKCVISEHMQVEEKCGGIVGIQXKXVQVSAXEDGNVXKDSNVVLEIPAAXXIAYGVIELYVKLDGQFEFCLLRGKQGGFENKKRIDSVYLDPLVFREFAFIDMPDAAHGISSQDGPLSVLKQAXLLLERNFHPFAELPEPQQXALSDIFQAVLFDDELLMVLEPVCDDLVSGLSPXVAVLGELKPRQQQDLVAFLQLVGCSLQGGCPGPEDAGSKQLFMXAYFLVSALAEMPDSAAALLGXCCKLQIIPXLCHLLRALSDDGVSDLEDPXLXPLKDXERFGIVQRLFASADISLERLKSSVKAVILKDSKVFPLLLCIXLNGLCALGREHS

SEQ ID NO: 7932 - protein, 18 aa, Homo sapiens
MQKCVISEHMQVEEKCGG

SEQ ID NO: 7933 - protein, 332 aa, Homo sapiens
  MOD_RES (24)..(24): Selenocysteine
  MOD_RES (26)..(26): Selenocysteine
  MOD_RES (32)..(32): Selenocysteine
  MOD_RES (38)..(38): Selenocysteine
  MOD_RES (51)..(52): Selenocysteine
  MOD_RES (125)..(125): Selenocysteine
  MOD_RES (144)..(144): Selenocysteine
  MOD_RES (177)..(177): Selenocysteine
  MOD_RES (221)..(221): Selenocysteine
  MOD_RES (242)..(242): Selenocysteine
  MOD_RES (251)..(251): Selenocysteine
  MOD_RES (271)..(271): Selenocysteine
  MOD_RES (273)..(273): Selenocysteine
  MOD_RES (278)..(278): Selenocysteine
  MOD_RES (320)..(320): Selenocysteine
MQKCVISEHMQVEEKCGGIVGIQXKXVQVSAXEDGNVXKDSNVVLEIPAAXXIAYGVIELYVKLDGQFEFCLLRGKQGGFENKKRIDSVYLDPLVFREFAFIDMPDAAHGISSQDGPLSVLKQAXLLLERNFHPFAELPEPQQXALSDIFQAVLFDDELLMVLEPVCDDLVSGLSPXVAVLGELKPRQQQDLVAFLQLVGCSLQGGCPGPEDAGSKQLFMXAYFLVSALAEMPDSAAALLGXCCKLQIIPXLCHLLRALSDDGVSDLEDPXLXPLKDXERFGIVQRLFASADISLERLKSSVKAVILKDSKVFPLLLCIXLNGLCALGREHS

SEQ ID NO: 7934 - protein, 55 aa, Homo sapiens
  MOD_RES (5)..(5): Selenocysteine
  MOD_RES (26)..(26): Selenocysteine
  MOD_RES (35)..(35): Selenocysteine
  MOD_RES (47)..(47): Selenocysteine
QLFMXAYFLVSALAEMPDSAAALLGXCCKLQIIPXLCHLVSNLPGGXLEWIGMGK

SEQ ID NO: 7935 - protein, 216 aa, Homo sapiens
  MOD_RES (14)..(14): Selenocysteine
  MOD_RES (17)..(17): Selenocysteine
  MOD_RES (40)..(40): Selenocysteine
  MOD_RES (59)..(59): Selenocysteine
  MOD_RES (82)..(82): Selenocysteine
  MOD_RES (86)..(87): Selenocysteine
  MOD_RES (111)..(111): Selenocysteine
  MOD_RES (113)..(113): Selenocysteine
  MOD_RES (119)..(119): Selenocysteine
  MOD_RES (125)..(125): Selenocysteine
  MOD_RES (138)..(139): Selenocysteine
  MOD_RES (177)..(177): Selenocysteine
  MOD_RES (182)..(182): Selenocysteine
  MOD_RES (197)..(197): Selenocysteine
  MOD_RES (202)..(202): Selenocysteine
  MOD_RES (205)..(205): Selenocysteine
  MOD_RES (207)..(207): Selenocysteine
VKYEGKFANHVSGXLEXALGKVKLNLGGSSRVESQSSFGXLRKQEVDLQQLIRDSAERXINLRNPVLQQVLEGRNEVLCVLXQKIXXMQKCVISEHMQVEEKCGGIVGIQXKXVQVSAXEDGNVXKDSNVVLEIPAAXXIAYGVIELYVKLDGQFAPLCLPWWSCPVLLMASGECVXPPQLXESSAFSEGSKVASRXRRELXLSXWXPWSFESLHS

SEQ ID NO: 7936 - protein, 155 aa, Homo sapiens
  MOD_RES (1)..(1): Any amino acid
  MOD_RES (4)..(5): Selenocysteine
  MOD_RES (78)..(78): Selenocysteine
  MOD_RES (97)..(97): Selenocysteine
  MOD_RES (130)..(130): Selenocysteine
  MOD_RES (134)..(134): Selenocysteine
  MOD_RES (140)..(140): Selenocysteine
XAAXXIAYGVIELYVKLDGQFEFCLLRGKQGGFENKKRIDSVYLDPLVFREFAFIDMPDAAHGISSQDGPLSVLKQAXLLLERNFHPFAELPEPQQXALSDIFQAVLFDDELLMVLEPVKDILGRSSSLXLSCXNGESHXSCQPSSHPDSVSSLS

SEQ ID NO: 7937 - protein, 192 aa, Homo sapiens
  MOD_RES (1)..(1): Any amino acid
  MOD_RES (13)..(13): Selenocysteine
  MOD_RES (15)..(15): Selenocysteine
  MOD_RES (21)..(21): Selenocysteine
  MOD_RES (27)..(27): Selenocysteine
  MOD_RES (40)..(41): Selenocysteine
  MOD_RES (114)..(114): Selenocysteine
  MOD_RES (133)..(133): Selenocysteine
  MOD_RES (167)..(167): Selenocysteine
  MOD_RES (171)..(171): Selenocysteine
  MOD_RES (177)..(177): Selenocysteine
XEEKCGGIVGIQXKXVQVSAXEDGNVXKDSNVVLEIPAAXXIAYGVIELYVKLDGQFEFCLLRGKQGGFENKKRIDSVYLDPLVFREFAFIDMPDAAHGISSQDGPLSVLKQAXLLLERNFHPFAELPEPQQXALSDIFQAVLFDDELLMVLEPVQKDILGRSSSLXLSCXNGESHXSCQPSSHPDSVSSLS

SEQ ID NO: 7938 - protein, 182 aa, Homo sapiens
  MOD_RES (41)..(41): Selenocysteine
  MOD_RES (46)..(46): Selenocysteine
  MOD_RES (53)..(53): Selenocysteine
  MOD_RES (68)..(68): Selenocysteine
  MOD_RES (75)..(76): Selenocysteine
  MOD_RES (83)..(83): Selenocysteine
  MOD_RES (85)..(85): Selenocysteine
  MOD_RES (117)..(117): Selenocysteine
  MOD_RES (129)..(130): Selenocysteine
MERYAAALEEVADGARQQERHYQLLSALQSLVKELPSACPXPRSAXWPWRFSXAPCSKSCRGYWRSSXSPKRACXXSACAYRXSXEAVEHRIREEQRAMDQKIILELDRKVADQQSXLEKAGVAGFYVXXNPQELMLQMNLLELIRKLQQRGCRAGNAALGLGGPWQSPAAQCDQKGSPVPP

SEQ ID NO: 7939 - protein, 97 aa, Homo sapiens
  MOD_RES (46)..(47): Selenocysteine
  MOD_RES (59)..(59): Selenocysteine
  MOD_RES (74)..(74): Selenocysteine
  MOD_RES (94)..(94): Selenocysteine
MERYAAALEEVADGARQQERHYQLLSALQSLVKELPSSFQQRLSYXXLSDLALALLDGXVFEIVQGLLEIQHLXEKSLYNQRLRLQNEHRGRGXPDP

SEQ ID NO: 7940 - protein, 220 aa, Homo sapiens
  MOD_RES (46)..(47): Selenocysteine
  MOD_RES (59)..(59): Selenocysteine
  MOD_RES (74)..(74): Selenocysteine
  MOD_RES (155)..(155): Selenocysteine
  MOD_RES (167)..(168): Selenocysteine
MERYAAALEEVADGARQQERHYQLLSALQSLVKELPSSFQQRLSYXXLSDLALALLDGXVFEIVQGLLEIQHLXEKSLYNQRLRLQNEHRVLRQALRQKHQEAQQACRPHNLPVVQAAQQRELEAVEHRIREEQRAMDQKIILELDRKVADQQSXLEKAGVAGFYVXXNPQELMLQMNLLELIRKLQQRGCRAGNAALGLGGPWQSPAAQCDQKGSPVPP

SEQ ID NO: 7941 - protein, 97 aa, Homo sapiens
  MOD_RES (23)..(23): Selenocysteine
  MOD_RES (39)..(39): Selenocysteine
  MOD_RES (58)..(58): Selenocysteine
  MOD_RES (86)..(86): Selenocysteine
  MOD_RES (95)..(96): Selenocysteine
CNLCESSIGLGKQGLSCNLCKYXVHDQCAMKALPCEVSXYAKSRKDIGPLPPLGPAQXLPDKELPFSPRSNHMCGCEEAVSPGAAXAVRKRSGSXXV

SEQ ID NO: 7942 - protein, 202 aa, Homo sapiens
  MOD_RES (9)..(9): Selenocysteine
  MOD_RES (47)..(47): Selenocysteine
  MOD_RES (54)..(54): Selenocysteine
  MOD_RES (73)..(73): Selenocysteine
  MOD_RES (119)..(119): Selenocysteine
  MOD_RES (173)..(173): Selenocysteine
  MOD_RES (180)..(180): Selenocysteine
  MOD_RES (189)..(189): Selenocysteine
LRIDPVPNXHPLLVFVNPKSGGKQGQRLRLFKDVPDSRILVCGGDGXVGWILEXIDKANLPVLPPVAVLPLGXGNDLARCLRWGGGYEGQNLAKILKDLEMSKVVHMDRWSVEVIPQQXEEKSDPVPFQIINNYFSIGVDASIAHRFHIMREKYPEKFNSRMKNKLWYFEFAXSESIFSXCKKLEESLXVEICGKPLDLSNL

SEQ ID NO: 7943 - protein, 21 aa, Homo sapiens
MAKERGLISPSDFAQLQKYME

SEQ ID NO: 7944 - protein, 95 aa, Homo sapiens
  MOD_RES (59)..(59): Selenocysteine
  MOD_RES (70)..(70): Selenocysteine
  MOD_RES (75)..(75): Selenocysteine
  MOD_RES (77)..(77): Selenocysteine
  MOD_RES (92)..(92): Selenocysteine
MAKERGLISPSDFAQLQKYMESSSVALSSVLLRCAHDWKWEEWEMGRCQKKIRIYHSLXGLHCARSRLSXHLRYXWXACSSSQRRGVKSDSXKKV

SEQ ID NO: 7945 - protein, 545 aa, Homo sapiens
  MOD_RES (24)..(24): Selenocysteine
  MOD_RES (37)..(37): Selenocysteine
  MOD_RES (43)..(43): Selenocysteine
  MOD_RES (105)..(106): Selenocysteine
  MOD_RES (118)..(118): Selenocysteine
  MOD_RES (160)..(160): Selenocysteine
  MOD_RES (176)..(176): Selenocysteine
  MOD_RES (215)..(215): Selenocysteine
  MOD_RES (269)..(269): Selenocysteine
  MOD_RES (273)..(273): Selenocysteine
  MOD_RES (281)..(281): Selenocysteine
  MOD_RES (293)..(293): Selenocysteine
  MOD_RES (356)..(356): Selenocysteine
  MOD_RES (363)..(363): Selenocysteine
  MOD_RES (382)..(382): Selenocysteine
  MOD_RES (428)..(428): Selenocysteine
  MOD_RES (482)..(482): Selenocysteine
  MOD_RES (489)..(489): Selenocysteine
  MOD_RES (498)..(498): Selenocysteine
  MOD_RES (534)..(534): Selenocysteine
MAKERGLISPSDFAQLQKYMEYSXKKGGRPEDKLEFXFKLYDXDRNGILDSSEVDKIILQMMRVAEYLDWDVSELRPILQEMMKEIDYDGSGSVSQAEWVRAGAXXVPLLVLLGLEMXLKDDGQHMWRPKRFPRPVYCNLCESSIGLGKQGLSCNLCKYXVHDQCAMKALPCEVSXYAKSRKDIGVQSHVWVRGGCESGRCDRCQKKIRIYHSLXGLHCVWCHLEIHDDCLQAVGHECDCGLLRDHILPPSSIYPSVLASGPDRKNSKXSQKXMDDLNLSXSEALRIDPVPNXHPLLVFVNPKSGGKQGQRVLWKFQYILNPRQVFNLLKDGPEIGLRLFKDVPDSRILVCGGDGXVGWILEXIDKANLPVLPPVAVLPLGXGNDLARCLRWGGGYEGQNLAKILKDLEMSKVVHMDRWSVEVIPQQXEEKSDPVPFQIINNYFSIGVDASIAHRFHIMREKYPEKFNSRMKNKLWYFEFAXSESIFSXCKKLEESLXVEICGKPLDLSNLSLEGIAVLNIPSMHGGSNLWGDXRRPHGDIYGIN

SEQ ID NO: 7946 - protein, 44 aa, Homo sapiens
  MOD_RES (24)..(24): Selenocysteine
MAKERGLISPSDFAQLQKYMEYSXKKVSDVLKLFEDGEMAKYVQ

SEQ ID NO: 7947 - protein, 58 aa, Homo sapiens
  MOD_RES (24)..(24): Selenocysteine
MAKERGLISPSDFAQLQKYMEYSXKKVSDVLKLFEDGEMAKYVQGDAIGYEGFQQFLK

SEQ ID NO: 7948 - protein, 107 aa, Homo sapiens
  MOD_RES (24)..(24): Selenocysteine
  MOD_RES (80)..(80): Selenocysteine
  MOD_RES (87)..(87): Selenocysteine
  MOD_RES (90)..(90): Selenocysteine
MAKERGLISPSDFAQLQKYMEYSXKKVSDVLKLFEDGEMAKYVQGDAIGYEGFQQFLKIYLEVDNVPRHLSLALFQSFEXGHCLNEXNVXKDVVCLNDVSCYFSLLE

SEQ ID NO: 7949 - protein, 116 aa, Homo sapiens
  MOD_RES (24)..(24): Selenocysteine
  MOD_RES (80)..(80): Selenocysteine
  MOD_RES (87)..(87): Selenocysteine
  MOD_RES (90)..(90): Selenocysteine
MAKERGLISPSDFAQLQKYMEYSXKKVSDVLKLFEDGEMAKYVQGDAIGYEGFQQFLKIYLEVDNVPRHLSLALFQSFEXGHCLNEXNVXKDVVCLNDVSCYFSLLEGGRPEDKLE

SEQ ID NO: 7950 - protein, 133 aa, Homo sapiens
  MOD_RES (24)..(24): Selenocysteine
  MOD_RES (80)..(80): Selenocysteine
  MOD_RES (87)..(87): Selenocysteine
  MOD_RES (90)..(90): Selenocysteine
  MOD_RES (118)..(118): Selenocysteine
  MOD_RES (124)..(124): Selenocysteine
MAKERGLISPSDFAQLQKYMEYSXKKVSDVLKLFEDGEMAKYVQGDAIGYEGFQQFLKIYLEVDNVPRHLSLALFQSFEXGHCLNEXNVXKDVVCLNDVSCYFSLLEGGRPEDKLEFXFKLYDXDRNGILDSS

SEQ ID NO: 7951 - protein, 147 aa, Homo sapiens
  MOD_RES (24)..(24): Selenocysteine
  MOD_RES (80)..(80): Selenocysteine
  MOD_RES (87)..(87): Selenocysteine
  MOD_RES (90)..(90): Selenocysteine
  MOD_RES (118)..(118): Selenocysteine
  MOD_RES (124)..(124): Selenocysteine
MAKERGLISPSDFAQLQKYMEYSXKKVSDVLKLFEDGEMAKYVQGDAIGYEGFQQFLKIYLEVDNVPRHLSLALFQSFEXGHCLNEXNVXKDVVCLNDVSCYFSLLEGGRPEDKLEFXFKLYDXDRNGILDSSEVDKIILQMMRVAE

SEQ ID NO: 7952 - protein, 735 aa, Homo sapiens
  MOD_RES (24)..(24): Selenocysteine
  MOD_RES (80)..(80): Selenocysteine
  MOD_RES (87)..(87): Selenocysteine
  MOD_RES (90)..(90): Selenocysteine
  MOD_RES (118)..(118): Selenocysteine
  MOD_RES (124)..(124): Selenocysteine
  MOD_RES (186)..(187): Selenocysteine
  MOD_RES (199)..(199): Selenocysteine
  MOD_RES (241)..(241): Selenocysteine
  MOD_RES (257)..(257): Selenocysteine
  MOD_RES (296)..(296): Selenocysteine
  MOD_RES (350)..(350): Selenocysteine
  MOD_RES (354)..(354): Selenocysteine
  MOD_RES (362)..(362): Selenocysteine
  MOD_RES (374)..(374): Selenocysteine
  MOD_RES (437)..(437): Selenocysteine
  MOD_RES (444)..(444): Selenocysteine
  MOD_RES (463)..(463): Selenocysteine
  MOD_RES (509)..(509): Selenocysteine
  MOD_RES (563)..(563): Selenocysteine
  MOD_RES (570)..(570): Selenocysteine
  MOD_RES (579)..(579): Selenocysteine
  MOD_RES (615)..(615): Selenocysteine
  MOD_RES (632)..(632): Selenocysteine
  MOD_RES (637)..(637): Selenocysteine
  MOD_RES (644)..(644): Selenocysteine
  MOD_RES (670)..(670): Selenocysteine
  MOD_RES (686)..(686): Selenocysteine
  MOD_RES (689)..(690): Selenocysteine
  MOD_RES (692)..(692): Selenocysteine
  MOD_RES (705)..(705): Selenocysteine
  MOD_RES (708)..(708): Selenocysteine
  MOD_RES (712)..(712): Selenocysteine
  MOD_RES (728)..(728): Selenocysteine
MAKERGLISPSDFAQLQKYMEYSXKKVSDVLKLFEDGEMAKYVQGDAIGYEGFQQFLKIYLEVDNVPRHLSLALFQSFEXGHCLNEXNVXKDVVCLNDVSCYFSLLEGGRPEDKLEFXFKLYDXDRNGILDSSEVDKIILQMMRVAEYLDWDVSELRPILQEMMKEIDYDGSGSVSQAEWVRAGAXXVPLLVLLGLEMXLKDDGQHMWRPKRFPRPVYCNLCESSIGLGKQGLSCNLCKYXVHDQCAMKALPCEVSXYAKSRKDIGVQSHVWVRGGCESGRCDRCQKKIRIYHSLXGLHCVWCHLEIHDDCLQAVGHECDCGLLRDHILPPSSIYPSVLASGPDRKNSKXSQKXMDDLNLSXSEALRIDPVPNXHPLLVFVNPKSGGKQGQRVLWKFQYILNPRQVFNLLKDGPEIGLRLFKDVPDSRILVCGGDGXVGWILEXIDKANLPVLPPVAVLPLGXGNDLARCLRWGGGYEGQNLAKILKDLEMSKVVHMDRWSVEVIPQQXEEKSDPVPFQIINNYFSIGVDASIAHRFHIMREKYPEKFNSRMKNKLWYFEFAXSESIFSXCKKLEESLXVEICGKPLDLSNLSLEGIAVLNIPSMHGGSNLWGDXRRPHGDIYGINQALGAXAKVIXDPDILKXCVPDLSDKRLEVVGLEGAIEMGQIYXKLKNAGRRLAKCSEIXFHXXKXLPMQIDGEPWMQXPCXIKIXHKNQMPMLMGPPPRSXNFFGFLS

SEQ ID NO: 7953 - protein, 247 aa, Homo sapiens
  MOD_RES (24)..(24): Selenocysteine
  MOD_RES (80)..(80): Selenocysteine
  MOD_RES (87)..(87): Selenocysteine
  MOD_RES (90)..(90): Selenocysteine
  MOD_RES (118)..(118): Selenocysteine
  MOD_RES (124)..(124): Selenocysteine
  MOD_RES (186)..(187): Selenocysteine
  MOD_RES (199)..(199): Selenocysteine
  MOD_RES (240)..(240): Selenocysteine
MAKERGLISPSDFAQLQKYMEYSXKKVSDVLKLFEDGEMAKYVQGDAIGYEGFQQFLKIYLEVDNVPRHLSLALFQSFEXGHCLNEXNVXKDVVCLNDVSCYFSLLEGGRPEDKLEFXFKLYDXDRNGILDSSEVDKIILQMMRVAEYLDWDVSELRPILQEMMKEIDYDGSGSVSQAEWVRAGAXXVPLLVLLGLEMXLKDDGQHMWRPKRFPRPVYCNLCESSIGLGKQGLSCNRPIXCVGARRL

SEQ ID NO: 7954 - protein, 118 aa, Homo sapiens
  MOD_RES (24)..(24): Selenocysteine
  MOD_RES (80)..(80): Selenocysteine
  MOD_RES (87)..(87): Selenocysteine
  MOD_RES (90)..(90): Selenocysteine
MAKERGLISPSDFAQLQKYMEYSXKKVSDVLKLFEDGEMAKYVQGDAIGYEGFQQFLKIYLEVDNVPRHLSLALFQSFEXGHCLNEXNVXKDVVCLNDVSCYFSLLEGGRPEDKLEWS

SEQ ID NO: 7955 - protein, 75 aa, Homo sapiens
  MOD_RES (2)..(2): Selenocysteine
  MOD_RES (26)..(26): Selenocysteine
  MOD_RES (57)..(57): Selenocysteine
  MOD_RES (69)..(69): Selenocysteine
MXNQEKWAHLSPSEFSQLQKYAEYSXKKLKDVLEEFHGNGVLAKYNPEGKQDILNQXIDFEGFKLFMKXFLEAEL

SEQ ID NO: 7956 - protein, 773 aa, Homo sapiens
  MOD_RES (2)..(2): Selenocysteine
  MOD_RES (26)..(26): Selenocysteine
  MOD_RES (57)..(57): Selenocysteine
  MOD_RES (69)..(69): Selenocysteine
  MOD_RES (80)..(80): Selenocysteine
  MOD_RES (117)..(117): Selenocysteine
  MOD_RES (121)..(122): Selenocysteine
  MOD_RES (127)..(127): Selenocysteine
  MOD_RES (163)..(163): Selenocysteine
  MOD_RES (193)..(193): Selenocysteine
  MOD_RES (213)..(213): Selenocysteine
  MOD_RES (225)..(226): Selenocysteine
  MOD_RES (281)..(281): Selenocysteine
  MOD_RES (297)..(297): Selenocysteine
  MOD_RES (305)..(305): Selenocysteine
  MOD_RES (319)..(319): Selenocysteine
  MOD_RES (327)..(327): Selenocysteine
  MOD_RES (335)..(335): Selenocysteine
  MOD_RES (345)..(345): Selenocysteine
  MOD_RES (371)..(372): Selenocysteine
  MOD_RES (380)..(380): Selenocysteine
  MOD_RES (383)..(383): Selenocysteine
  MOD_RES (395)..(395): Selenocysteine
  MOD_RES (422)..(422): Selenocysteine
  MOD_RES (431)..(431): Selenocysteine
  MOD_RES (436)..(436): Selenocysteine
  MOD_RES (499)..(499): Selenocysteine
  MOD_RES (525)..(525): Selenocysteine
  MOD_RES (555)..(555): Selenocysteine
  MOD_RES (625)..(625): Selenocysteine
  MOD_RES (628)..(628): Selenocysteine
  MOD_RES (632)..(632): Selenocysteine
  MOD_RES (695)..(696): Selenocysteine
  MOD_RES (698)..(698): Selenocysteine
  MOD_RES (731)..(731): Selenocysteine
  MOD_RES (750)..(750): Selenocysteine
  MOD_RES (766)..(766): Selenocysteine
  MOD_RES (769)..(769): Selenocysteine
  MOD_RES (772)..(772): Selenocysteine
MXNQEKWAHLSPSEFSQLQKYAEYSXKKLKDVLEEFHGNGVLAKYNPEGKQDILNQXIDFEGFKLFMKXFLEAELPDDFXAHLFMSFSNKFPHSSPMVKSKPALLSGGLRMNKGAIXPPRXXSPANXCSPEVIHLKDIVCYLSLLERGRPEDKLEFMFRLYDXDGNGFLDSSELENIISQMMHVAEYLEWDVXELNPILHEMMEEIDYDHDGXVSLEEWIQGGMXXIPLLVLLGLENNVKDDGQHVWRLKHFNKPAYCNLCLNMLIGVGKQGLCCSFCKYXVHERCVARAPPSCIKXYVKSKRNXDVMHHYWVEGNCPXKCDKCHKXVKCYQGLXGLHCVWCQIXLHNKCASHLKPECDCGPLKDHILPPXXICPVVLQXLPXSGVSVPEERQSXVKKEKSGSQQPNKVIDKNKMQRANSVXVDGQGLQVXPVPGXHPLLVFVNPKSGGKQGERIYRKFQYLLNPRQVYSLSGNGPMPGLNFFRDVPDFRVLACGGDGXVGWVLDCIEKANVGKHPPVAILPLGXGNDLARCLRWGGGYEGENLMKILKDIENSXEIMLDRWKFEVIPNDKDEKGDPVPYSIINNYFSIGVDASIAHRFHIMREKHPEKFNSRMKNKFWYFEFGXSEXFSAXCKKLHESVEIECDGVQIDLINISLEGIAILNIPSMHGGSNLWGESKKRRSHRRIEKKGSDKRXXVXDAKELKFASQDLSDQLLEVVGLEGAMEMGQIYXGLKSAGRRLAQCSCVVIRXSKSLPMQIDGEPWMQXPCXVSXE

SEQ ID NO: 7957 - protein, 803 aa, Homo sapiens
  MOD_RES (2)..(2): Selenocysteine
  MOD_RES (26)..(26): Selenocysteine
  MOD_RES (57)..(57): Selenocysteine
  MOD_RES (69)..(69): Selenocysteine
  MOD_RES (80)..(80): Selenocysteine
  MOD_RES (117)..(117): Selenocysteine
  MOD_RES (121)..(122): Selenocysteine
  MOD_RES (127)..(127): Selenocysteine
  MOD_RES (163)..(163): Selenocysteine
  MOD_RES (193)..(193): Selenocysteine
  MOD_RES (213)..(213): Selenocysteine
  MOD_RES (225)..(226): Selenocysteine
  MOD_RES (281)..(281): Selenocysteine
  MOD_RES (297)..(297): Selenocysteine
  MOD_RES (305)..(305): Selenocysteine
  MOD_RES (319)..(319): Selenocysteine
  MOD_RES (327)..(327): Selenocysteine
  MOD_RES (335)..(335): Selenocysteine
  MOD_RES (345)..(345): Selenocysteine
  MOD_RES (371)..(372): Selenocysteine
  MOD_RES (379)..(379): Selenocysteine
  MOD_RES (382)..(382): Selenocysteine
  MOD_RES (394)..(394): Selenocysteine
  MOD_RES (421)..(421): Selenocysteine
  MOD_RES (430)..(430): Selenocysteine
  MOD_RES (435)..(435): Selenocysteine
  MOD_RES (498)..(498): Selenocysteine
  MOD_RES (524)..(524): Selenocysteine
  MOD_RES (554)..(554): Selenocysteine
  MOD_RES (624)..(624): Selenocysteine
  MOD_RES (627)..(627): Selenocysteine
  MOD_RES (631)..(631): Selenocysteine
  MOD_RES (694)..(695): Selenocysteine
  MOD_RES (697)..(697): Selenocysteine
  MOD_RES (730)..(730): Selenocysteine
  MOD_RES (749)..(749): Selenocysteine
  MOD_RES (765)..(765): Selenocysteine
  MOD_RES (768)..(768): Selenocysteine
  MOD_RES (772)..(772): Selenocysteine
  MOD_RES (787)..(787): Selenocysteine
  MOD_RES (797)..(797): Selenocysteine
MXNQEKWAHLSPSEFSQLQKYAEYSXKKLKDVLEEFHGNGVLAKYNPEGKQDILNQXIDFEGFKLFMKXFLEAELPDDFXAHLFMSFSNKFPHSSPMVKSKPALLSGGLRMNKGAIXPPRXXSPANXCSPEVIHLKDIVCYLSLLERGRPEDKLEFMFRLYDXDGNGFLDSSELENIISQMMHVAEYLEWDVXELNPILHEMMEEIDYDHDGXVSLEEWIQGGMXXIPLLVLLGLENNVKDDGQHVWRLKHFNKPAYCNLCLNMLIGVGKQGLCCSFCKYXVHERCVARAPPSCIKXYVKSKRNXDVMHHYWVEGNCPXKCDKCHKXVKCYQGLXGLHCVWCQIXLHNKCASHLKPECDCGPLKDHILPPXXICPVVLXLPXSGVSVPEERQSXVKKEKSGSQQPNKVIDKNKMQRANSVXVDGQGLQVXPVPGXHPLLVFVNPKSGGKQGERIYRKFQYLLNPRQVYSLSGNGPMPGLNFFRDVPDFRVLACGGDGXVGWVLDCIEKANVGKHPPVAILPLGXGNDLARCLRWGGGYEGENLMKILKDIENSXEIMLDRWKFEVIPNDKDEKGDPVPYSIINNYFSIGVDASIAHRFHIMREKHPEKFNSRMKNKFWYFEFGXSEXFSAXCKKLHESVEIECDGVQIDLINISLEGIAILNIPSMHGGSNLWGESKKRRSHRRIEKKGSDKRXXVXDAKELKFASQDLSDQLLEVVGLEGAMEMGQIYXGLKSAGRRLAQCSCVVIRXSKSLPMQIDGEPWMQXPCXIKIXHKNQAPMLMGPPPKXGLFCSLVKRXRNRSKE

SEQ ID NO: 7958 - protein, 804 aa, Homo sapiens
  MOD_RES (2)..(2): Selenocysteine
  MOD_RES (26)..(26): Selenocysteine
  MOD_RES (57)..(57): Selenocysteine
  MOD_RES (69)..(69): Selenocysteine
  MOD_RES (80)..(80): Selenocysteine
  MOD_RES (117)..(117): Selenocysteine
  MOD_RES (121)..(122): Selenocysteine
  MOD_RES (127)..(127): Selenocysteine
  MOD_RES (163)..(163): Selenocysteine
  MOD_RES (193)..(193): Selenocysteine
  MOD_RES (213)..(213): Selenocysteine
  MOD_RES (225)..(226): Selenocysteine
  MOD_RES (281)..(281): Selenocysteine
  MOD_RES (297)..(297): Selenocysteine
  MOD_RES (305)..(305): Selenocysteine
  MOD_RES (319)..(319): Selenocysteine
  MOD_RES (327)..(327): Selenocysteine
  MOD_RES (335)..(335): Selenocysteine
  MOD_RES (345)..(345): Selenocysteine
  MOD_RES (371)..(372): Selenocysteine
  MOD_RES (380)..(380): Selenocysteine
  MOD_RES (383)..(383): Selenocysteine
  MOD_RES (395)..(395): Selenocysteine
  MOD_RES (422)..(422): Selenocysteine
  MOD_RES (431)..(431): Selenocysteine
  MOD_RES (436)..(436): Selenocysteine
  MOD_RES (499)..(499): Selenocysteine
  MOD_RES (525)..(525): Selenocysteine
  MOD_RES (555)..(555): Selenocysteine
  MOD_RES (625)..(625): Selenocysteine
  MOD_RES (628)..(628): Selenocysteine
  MOD_RES (632)..(632): Selenocysteine
  MOD_RES (695)..(696): Selenocysteine
  MOD_RES (698)..(698): Selenocysteine
  MOD_RES (731)..(731): Selenocysteine
  MOD_RES (750)..(750): Selenocysteine
  MOD_RES (766)..(766): Selenocysteine
  MOD_RES (769)..(769): Selenocysteine
  MOD_RES (773)..(773): Selenocysteine
  MOD_RES (788)..(788): Selenocysteine
  MOD_RES (798)..(798): Selenocysteine
MXNQEKWAHLSPSEFSQLQKYAEYSXKKLKDVLEEFHGNGVLAKYNPEGKQDILNQXIDFEGFKLFMKXFLEAELPDDFXAHLFMSFSNKFPHSSPMVKSKPALLSGGLRMNKGAIXPPRXXSPANXCSPEVIHLKDIVCYLSLLERGRPEDKLEFMFRLYDXDGNGFLDSSELENIISQMMHVAEYLEWDVXELNPILHEMMEEIDYDHDGXVSLEEWIQGGMXXIPLLVLLGLENNVKDDGQHVWRLKHFNKPAYCNLCLNMLIGVGKQGLCCSFCKYXVHERCVARAPPSCIKXYVKSKRNXDVMHHYWVEGNCPXKCDKCHKXVKCYQGLXGLHCVWCQIXLHNKCASHLKPECDCGPLKDHILPPXXICPVVLQXLPXSGVSVPEERQSXVKKEKSGSQQPNKVIDKNKMQRANSVXVDGQGLQVXPVPGXHPLLVFVNPKSGGKQGERIYRKFQYLLNPRQVYSLSGNGPMPGLNFFRDVPDFRVLACGGDGXVGWVLDCIEKANVGKHPPVAILPLGXGNDLARCLRWGGGYEGENLMKILKDIENSXEIMLDRWKFEVIPNDKDEKGDPVPYSIINNYFSIGVDASIAHRFHIMREKHPEKFNSRMKNKFWYFEFGXSEXFSAXCKKLHESVEIECDGVQIDLINISLEGIAILNIPSMHGGSNLWGESKKRRSHRRIEKKGSDKRXXVXDAKELKFASQDLSDQLLEVVGLEGAMEMGQIYXGLKSAGRRLAQCSCVVIRXSKSLPMQIDGEPWMQXPCXIKIXHKNQAPMLMGPPPKXGLFCSLVKRXRNRSKE

SEQ ID NO: 7959 - protein, 796 aa, Homo sapiens
  MOD_RES (2)..(2): Selenocysteine
  MOD_RES (26)..(26): Selenocysteine
  MOD_RES (50)..(50): Selenocysteine
  MOD_RES (62)..(62): Selenocysteine
  MOD_RES (73)..(73): Selenocysteine
  MOD_RES (110)..(110): Selenocysteine
  MOD_RES (114)..(115): Selenocysteine
  MOD_RES (120)..(120): Selenocysteine
  MOD_RES (156)..(156): Selenocysteine
  MOD_RES (186)..(186): Selenocysteine
  MOD_RES (206)..(206): Selenocysteine
  MOD_RES (218)..(219): Selenocysteine
  MOD_RES (274)..(274): Selenocysteine
  MOD_RES (290)..(290): Selenocysteine
  MOD_RES (298)..(298): Selenocysteine
  MOD_RES (312)..(312): Selenocysteine
  MOD_RES (320)..(320): Selenocysteine
  MOD_RES (328)..(328): Selenocysteine
  MOD_RES (338)..(338): Selenocysteine
  MOD_RES (364)..(365): Selenocysteine
  MOD_RES (372)..(372): Selenocysteine
  MOD_RES (375)..(375): Selenocysteine
  MOD_RES (387)..(387): Selenocysteine
  MOD_RES (414)..(414): Selenocysteine
  MOD_RES (423)..(423): Selenocysteine
  MOD_RES (428)..(428): Selenocysteine
  MOD_RES (491)..(491): Selenocysteine
  MOD_RES (517)..(517): Selenocysteine
  MOD_RES (547)..(547): Selenocysteine
  MOD_RES (617)..(617): Selenocysteine
  MOD_RES (620)..(620): Selenocysteine
  MOD_RES (624)..(624): Selenocysteine
  MOD_RES (687)..(688): Selenocysteine
  MOD_RES (690)..(690): Selenocysteine
  MOD_RES (723)..(723): Selenocysteine
  MOD_RES (742)..(742): Selenocysteine
  MOD_RES (758)..(758): Selenocysteine
  MOD_RES (761)..(761): Selenocysteine
  MOD_RES (765)..(765): Selenocysteine
  MOD_RES (780)..(780): Selenocysteine
  MOD_RES (790)..(790): Selenocysteine
MXNQEKWAHLSPSEFSQLQKYAEYSXKKLKDVLEEFHGNGVLAKYNPEGXIDFEGFKLFMKXFLEAELPDDFXAHLFMSFSNKFPHSSPMVKSKPALLSGGLRMNKGAIXPPRXXSPANXCSPEVIHLKDIVCYLSLLERGRPEDKLEFMFRLYDXDGNGFLDSSELENIISQMMHVAEYLEWDVXELNPILHEMMEEIDYDHDGXVSLEEWIQGGMXXIPLLVLLGLENNVKDDGQHVWRLKHFNKPAYCNLCLNMLIGVGKQGLCCSFCKYXVHERCVARAPPSCIKXYVKSKRNXDVMHHYWVEGNCPXKCDKCHKXVKCYQGLXGLHCVWCQIXLHNKCASHLKPECDCGPLKDHILPPXXICPVVLXLPXSGVSVPEERQSXVKKEKSGSQQPNKVIDKNKMQRANSVXVDGQGLQVXPVPGXHPLLVFVNPKSGGKQGERIYRKFQYLLNPRQVYSLSGNGPMPGLNFFRDVPDFRVLACGGDGXVGWVLDCIEKANVGKHPPVAILPLGXGNDLARCLRWGGGYEGENLMKILKDIENSXEIMLDRWKFEVIPNDKDEKGDPVPYSIINNYFSIGVDASIAHRFHIMREKHPEKFNSRMKNKFWYFEFGXSEXFSAXCKKLHESVEIECDGVQIDLINISLEGIAILNIPSMHGGSNLWGESKKRRSHRRIEKKGSDKRXXVXDAKELKFASQDLSDQLLEVVGLEGAMEMGQIYXGLKSAGRRLAQCSCVVIRXSKSLPMQIDGEPWMQXPCXIKIXHKNQAPMLMGPPPKXGLFCSLVKRXRNRSKE

SEQ ID NO: 7960 - protein, 1214 aa, Homo sapiens
  MOD_RES (45)..(45): Selenocysteine
  MOD_RES (53)..(53): Selenocysteine
  MOD_RES (61)..(61): Selenocysteine
  MOD_RES (81)..(81): Selenocysteine
  MOD_RES (87)..(87): Selenocysteine
  MOD_RES (99)..(99): Selenocysteine
  MOD_RES (108)..(108): Selenocysteine
  MOD_RES (116)..(116): Selenocysteine
  MOD_RES (119)..(119): Selenocysteine
  MOD_RES (143)..(143): Selenocysteine
  MOD_RES (153)..(153): Selenocysteine
  MOD_RES (175)..(175): Selenocysteine
  MOD_RES (188)..(188): Selenocysteine
  MOD_RES (210)..(210): Selenocysteine
  MOD_RES (216)..(217): Selenocysteine
  MOD_RES (250)..(250): Selenocysteine
  MOD_RES (255)..(255): Selenocysteine
  MOD_RES (276)..(276): Selenocysteine
  MOD_RES (284)..(284): Selenocysteine
  MOD_RES (299)..(299): Selenocysteine
  MOD_RES (319)..(319): Selenocysteine
  MOD_RES (371)..(371): Selenocysteine
  MOD_RES (408)..(408): Selenocysteine
  MOD_RES (426)..(426): Selenocysteine
  MOD_RES (440)..(440): Selenocysteine
  MOD_RES (463)..(463): Selenocysteine
  MOD_RES (465)..(465): Selenocysteine
  MOD_RES (493)..(493): Selenocysteine
  MOD_RES (510)..(510): Selenocysteine
  MOD_RES (525)..(526): Selenocysteine
  MOD_RES (552)..(552): Selenocysteine
  MOD_RES (569)..(569): Selenocysteine
  MOD_RES (587)..(587): Selenocysteine
  MOD_RES (627)..(627): Selenocysteine
  MOD_RES (638)..(638): Selenocysteine
  MOD_RES (717)..(717): Selenocysteine
  MOD_RES (754)..(754): Selenocysteine
  MOD_RES (759)..(759): Selenocysteine
  MOD_RES (795)..(795): Selenocysteine
  MOD_RES (806)..(806): Selenocysteine
  MOD_RES (813)..(813): Selenocysteine
  MOD_RES (850)..(850): Selenocysteine
  MOD_RES (856)..(856): Selenocysteine
  MOD_RES (861)..(861): Selenocysteine
  MOD_RES (901)..(901): Selenocysteine
  MOD_RES (938)..(938): Selenocysteine
  MOD_RES (940)..(940): Selenocysteine
  MOD_RES (948)..(948): Selenocysteine
  MOD_RES (979)..(979): Selenocysteine
  MOD_RES (1029)..(1030): Selenocysteine
  MOD_RES (1052)..(1052): Selenocysteine
  MOD_RES (1089)..(1089): Selenocysteine
  MOD_RES (1121)..(1121): Selenocysteine
  MOD_RES (1147)..(1147): Selenocysteine
  MOD_RES (1167)..(1167): Selenocysteine
  MOD_RES (1190)..(1190): Selenocysteine
MAAAAGAPPPGPPQPPPPPPPEESSDSEPEAEPGSPQKLIRKVSXSGQIRQKXIIKEGMLXKQNNSFQRSKRRYFKLRGRXLYYAKXAKSIIFDEVDLXDASVAESSXKNVNNSFXVIXPCRKLILCADNRKEMEDWIAALKXVQNREHFEPXQYSMDHFSGMHNWYACSHARPXYCNVCREALSGVXSHGLSCEVCKFKAHKRCAVRAXNNCKWXXLASIGKDIIEDADGIAMPHQWLEGNLPVSAKCXVCDKXCGSVLRLQDWRCLWCKAMVHXSCKESLLXKCPLGLCKVSVIPPXALNSIDSDGFWKASCPPSCXSPLLVFVNSKSGDNQGVKFLRRFKQLLNPAQVFDLMNGGPHLGLRLFQKFDXFRILVCGGDGSVGWVLSEIDSLNLHKQCQLGVLPLGXGNDLARVLGWGSACDDDXQLPQILEKLERASXKMLDRWSVMAYEAKLPRQASSSXVXEDFSEDSEVQQILFYEDSVAAHLSKILXSDQHSVVISSAKVLCEXVKDFVARVGKAYEKXXESSEESEVMAKKCSVLKEKLDSLLKXLDDESQASSSLPNPPPXIAEEAEDGDGSGSICGSXGDRLVASACPARPQIFRPREQLMLRANSLKKAIRQIIEHXEKAVDEQNAQXQEQEGFVLGLSESEEKMDHRVCPPLSHSESFGVPKGRSQRKVSKSPCEKLISKGSLSLGSSASLPPQPGSRDGLPALNXKILYPNVRAGMSGSLPGGSVISRLLINADPFNSEPEXLEYYXEKCVMNNYFGIGLDAKISLDFNNKRDEHPEKCRSRXKNMMWYGVLGXKELLHRXYKNLEQKVLLECDGRPIPLPSLQGIAVLNIPSYAGGXNFWGGXKEDDXFAAPSFDDKILEVVAVFGSMQMAVSRVIRLQHHRIAQCRXVKISILGDEGVPVQVDGEAWVQPPGYIRIVHKNRAQXLXRDRAFESXLKSWEDKQKCELPRPPSCSLHPEMLSEEEAXQMDQFGQAAGVLIHSIREIAQSHRDMEQELAHAVNASSKSMDRVYGKPRXXEGLNCSFVLEMVNNFRALRSEXELLLSGKMALQLDPPQKEQLGSALAEMDRQLRRLADXPWLCQSAEPGDEESVMLDLAKRSRSGKFRLVXKFKKEKNNKNKEAHSSLGAPVHLWGXEEVAAWLEHLSLCEYKDIFXRHDIRGSELLHLERRDLKDLGVXKVGHMKRILCGIKELSRSAPAVEA

SEQ ID NO: 7961 - protein, 157 aa, Homo sapiens
  MOD_RES (45)..(45): Selenocysteine
  MOD_RES (55)..(55): Selenocysteine
  MOD_RES (79)..(79): Selenocysteine
  MOD_RES (89)..(89): Selenocysteine
  MOD_RES (111)..(111): Selenocysteine
  MOD_RES (124)..(124): Selenocysteine
  MOD_RES (146)..(146): Selenocysteine
  MOD_RES (152)..(153): Selenocysteine
MAAAAGAPPPGPPQPPPPPPPEESSDSEPEAEPGSPQKLIRKVSXSGQIRQKVIXPCRKLILCADNRKEMEDWIAALKXVQNREHFEPXQYSMDHFSGMHNWYACSHARPXYCNVCREALSGVXSHGLSCEVCKFKAHKRCAVRAXNNCKWXXLASI

SEQ ID NO: 7962 - protein, 1170 aa, Homo sapiens
  MOD_RES (9)..(9): Selenocysteine
  MOD_RES (17)..(17): Selenocysteine
  MOD_RES (37)..(37): Selenocysteine
  MOD_RES (43)..(43): Selenocysteine
  MOD_RES (55)..(55): Selenocysteine
  MOD_RES (64)..(64): Selenocysteine
  MOD_RES (72)..(72): Selenocysteine
  MOD_RES (75)..(75): Selenocysteine
  MOD_RES (99)..(99): Selenocysteine
  MOD_RES (109)..(109): Selenocysteine
  MOD_RES (131)..(131): Selenocysteine
  MOD_RES (144)..(144): Selenocysteine
  MOD_RES (166)..(166): Selenocysteine
  MOD_RES (172)..(173): Selenocysteine
  MOD_RES (206)..(206): Selenocysteine
  MOD_RES (211)..(211): Selenocysteine
  MOD_RES (232)..(232): Selenocysteine
  MOD_RES (240)..(240): Selenocysteine
  MOD_RES (255)..(255): Selenocysteine
  MOD_RES (275)..(275): Selenocysteine
  MOD_RES (327)..(327): Selenocysteine
  MOD_RES (364)..(364): Selenocysteine
  MOD_RES (382)..(382): Selenocysteine
  MOD_RES (396)..(396): Selenocysteine
  MOD_RES (419)..(419): Selenocysteine
  MOD_RES (421)..(421): Selenocysteine
  MOD_RES (449)..(449): Selenocysteine
  MOD_RES (466)..(466): Selenocysteine
  MOD_RES (481)..(482): Selenocysteine
  MOD_RES (508)..(508): Selenocysteine
  MOD_RES (525)..(525): Selenocysteine
  MOD_RES (543)..(543): Selenocysteine
  MOD_RES (583)..(583): Selenocysteine
  MOD_RES (594)..(594): Selenocysteine
  MOD_RES (673)..(673): Selenocysteine
  MOD_RES (710)..(710): Selenocysteine
  MOD_RES (715)..(715): Selenocysteine
  MOD_RES (751)..(751): Selenocysteine
  MOD_RES (762)..(762): Selenocysteine
  MOD_RES (769)..(769): Selenocysteine
  MOD_RES (806)..(806): Selenocysteine
  MOD_RES (812)..(812): Selenocysteine
  MOD_RES (817)..(817): Selenocysteine
  MOD_RES (857)..(857): Selenocysteine
  MOD_RES (894)..(894): Selenocysteine
  MOD_RES (896)..(896): Selenocysteine
  MOD_RES (904)..(904): Selenocysteine
  MOD_RES (935)..(935): Selenocysteine
  MOD_RES (985)..(986): Selenocysteine
  MOD_RES (1008)..(1008): Selenocysteine
  MOD_RES (1045)..(1045): Selenocysteine
  MOD_RES (1077)..(1077): Selenocysteine
  MOD_RES (1103)..(1103): Selenocysteine
  MOD_RES (1123)..(1123): Selenocysteine
  MOD_RES (1146)..(1146): Selenocysteine
MNMFLYFQXIIKEGMLXKQNNSFQRSKRRYFKLRGRXLYYAKXAKSIIFDEVDLXDASVAESSXKNVNNSFXVIXPCRKLILCADNRKEMEDWIAALKXVQNREHFEPXQYSMDHFSGMHNWYACSHARPXYCNVCREALSGVXSHGLSCEVCKFKAHKRCAVRAXNNCKWXXLASIGKDIIEDADGIAMPHQWLEGNLPVSAKCXVCDKXCGSVLRLQDWRCLWCKAMVHXSCKESLLXKCPLGLCKVSVIPPXALNSIDSDGFWKASCPPSCXSPLLVFVNSKSGDNQGVKFLRRFKQLLNPAQVFDLMNGGPHLGLRLFQKFDXFRILVCGGDGSVGWVLSEIDSLNLHKQCQLGVLPLGXGNDLARVLGWGSACDDDXQLPQILEKLERASXKMLDRWSVMAYEAKLPRQASSSXVXEDFSEDSEVQQILFYEDSVAAHLSKILXSDQHSVVISSAKVLCEXVKDFVARVGKAYEKXXESSEESEVMAKKCSVLKEKLDSLLKXLDDESQASSSLPNPPPXIAEEAEDGDGSGSICGSXGDRLVASACPARPQIFRPREQLMLRANSLKKAIRQIIEHXEKAVDEQNAQXQEQEGFVLGLSESEEKMDHRVCPPLSHSESFGVPKGRSQRKVSKSPCEKLISKGSLSLGSSASLPPQPGSRDGLPALNXKILYPNVRAGMSGSLPGGSVISRLLINADPFNSEPEXLEYYXEKCVMNNYFGIGLDAKISLDFNNKRDEHPEKCRSRXKNMMWYGVLGXKELLHRXYKNLEQKVLLECDGRPIPLPSLQGIAVLNIPSYAGGXNFWGGXKEDDXFAAPSFDDKILEVVAVFGSMQMAVSRVIRLQHHRIAQCRXVKISILGDEGVPVQVDGEAWVQPPGYIRIVHKNRAQXLXRDRAFESXLKSWEDKQKCELPRPPSCSLHPEMLSEEEAXQMDQFGQAAGVLIHSIREIAQSHRDMEQELAHAVNASSKSMDRVYGKPRXXEGLNCSFVLEMVNNFRALRSEXELLLSGKMALQLDPPQKEQLGSALAEMDRQLRRLADXPWLCQSAEPGDEESVMLDLAKRSRSGKFRLVXKFKKEKNNKNKEAHSSLGAPVHLWGXEEVAAWLEHLSLCEYKDIFXRHDIRGSELLHLERRDLKDLGVXKVGHMKRILCGIKELSRSAPAVEA

SEQ ID NO: 7963 - protein, 164 aa, Homo sapiens
  MOD_RES (6)..(6): Selenocysteine
  MOD_RES (23)..(23): Selenocysteine
  MOD_RES (31)..(31): Selenocysteine
  MOD_RES (51)..(51): Selenocysteine
  MOD_RES (57)..(57): Selenocysteine
  MOD_RES (69)..(69): Selenocysteine
  MOD_RES (78)..(78): Selenocysteine
  MOD_RES (86)..(86): Selenocysteine
  MOD_RES (89)..(89): Selenocysteine
  MOD_RES (113)..(113): Selenocysteine
  MOD_RES (123)..(123): Selenocysteine
  MOD_RES (145)..(145): Selenocysteine
  MOD_RES (158)..(158): Selenocysteine
SPRSQXLIRPQKDCACACVCVCXIIKEGMLXKQNNSFQRSKRRYFKLRGRXLYYAKXAKSIIFDEVDLXDASVAESSXKNVNNSFXVIXPCRKLILCADNRKEMEDWIAALKXVQNREHFEPXQYSMDHFSGMHNWYACSHARPXYCNVCREALSGVXSHGLSC

SEQ ID NO: 7964 - protein, 163 aa, Homo sapiens
  MOD_RES (1)..(1): Any amino acid
  MOD_RES (28)..(28): Selenocysteine
  MOD_RES (36)..(36): Selenocysteine
  MOD_RES (44)..(44): Selenocysteine
  MOD_RES (64)..(64): Selenocysteine
  MOD_RES (70)..(70): Selenocysteine
  MOD_RES (82)..(82): Selenocysteine
  MOD_RES (91)..(91): Selenocysteine
  MOD_RES (99)..(99): Selenocysteine
  MOD_RES (159)..(159): Selenocysteine
XPPPEESSDSEPEAEPGSPQKLIRKVSXSGQIRQKXIIKEGMLXKQNNSFQRSKRRYFKLRGRXLYYAKXAKSIIFDEVDLXDASVAESSXKNVNNSFXAEVRWCDLGSLQPPSPRFKGSSCLSLPSSWDYSRAPLCPDNLRNFSRDGVSPYWPGWSQXPGLE

SEQ ID NO: 7965 - protein, 451 aa, Homo sapiens
  MOD_RES (1)..(1): Any amino acid
  MOD_RES (32)..(32): Selenocysteine
  MOD_RES (69)..(69): Selenocysteine
  MOD_RES (87)..(87): Selenocysteine
  MOD_RES (101)..(101): Selenocysteine
  MOD_RES (124)..(124): Selenocysteine
  MOD_RES (126)..(126): Selenocysteine
  MOD_RES (154)..(154): Selenocysteine
  MOD_RES (171)..(171): Selenocysteine
  MOD_RES (186)..(187): Selenocysteine
  MOD_RES (213)..(213): Selenocysteine
  MOD_RES (230)..(230): Selenocysteine
  MOD_RES (248)..(248): Selenocysteine
  MOD_RES (288)..(288): Selenocysteine
  MOD_RES (299)..(299): Selenocysteine
  MOD_RES (378)..(378): Selenocysteine
  MOD_RES (415)..(415): Selenocysteine
  MOD_RES (421)..(421): Selenocysteine
XRFKQLLNPAQVFDLMNGGPHLGLRLFQKFDXFRILVCGGDGSVGWVLSEIDSLNLHKQCQLGVLPLGXGNDLARVLGWGSACDDDXQLPQILEKLERASXKMLDRWSVMAYEAKLPRQASSSXVXEDFSEDSEVQQILFYEDSVAAHLSKILXSDQHSVVISSAKVLCEXVKDFVARVGKAYEKXXESSEESEVMAKKCSVLKEKLDSLLKXLDDESQASSSLPNPPPXIAEEAEDGDGSGSICGSXGDRLVASACPARPQIFRPREQLMLRANSLKKAIRQIIEHXEKAVDEQNAQXQEQEGFVLGLSESEEKMDHRVCPPLSHSESFGVPKGRSQRKVSKSPCEKLISKGSLSLGSSASLPPQPGSRDGLPALNXKILYPNVRAGMSGSLPGGSVISRLLINADPFNSEPEXLERSQXQSPRPHDPIPVNCLEEAPPWRWKVDERRQG

SEQ ID NO: 7966 - protein, 70 aa, Homo sapiens
  MOD_RES (20)..(20): Selenocysteine
  MOD_RES (34)..(34): Selenocysteine
  MOD_RES (36)..(36): Selenocysteine
  MOD_RES (38)..(38): Selenocysteine
  MOD_RES (41)..(41): Selenocysteine
  MOD_RES (53)..(53): Selenocysteine
  MOD_RES (60)..(60): Selenocysteine
  MOD_RES (69)..(69): Selenocysteine
HCAQIQVKLANPFRIGQAHXVRVDGEPWAQGPCXVXIXHKXHAMMLYFSGEQXDDDISSXSDQEDIKAXE

SEQ ID NO: 7967 - protein, 567 aa, Homo sapiens
  MOD_RES (26)..(26): Selenocysteine
  MOD_RES (37)..(37): Selenocysteine
  MOD_RES (65)..(65): Selenocysteine
  MOD_RES (72)..(72): Selenocysteine
  MOD_RES (117)..(117): Selenocysteine
  MOD_RES (162)..(162): Selenocysteine
  MOD_RES (193)..(193): Selenocysteine
  MOD_RES (204)..(204): Selenocysteine
  MOD_RES (218)..(218): Selenocysteine
  MOD_RES (230)..(230): Selenocysteine
  MOD_RES (253)..(253): Selenocysteine
  MOD_RES (255)..(255): Selenocysteine
  MOD_RES (265)..(265): Selenocysteine
  MOD_RES (282)..(282): Selenocysteine
  MOD_RES (312)..(312): Selenocysteine
  MOD_RES (319)..(319): Selenocysteine
  MOD_RES (324)..(324): Selenocysteine
  MOD_RES (355)..(355): Selenocysteine
  MOD_RES (369)..(369): Selenocysteine
  MOD_RES (412)..(412): Selenocysteine
  MOD_RES (466)..(466): Selenocysteine
  MOD_RES (506)..(506): Selenocysteine
  MOD_RES (531)..(531): Selenocysteine
  MOD_RES (533)..(533): Selenocysteine
  MOD_RES (535)..(535): Selenocysteine
  MOD_RES (538)..(538): Selenocysteine
  MOD_RES (550)..(550): Selenocysteine
  MOD_RES (557)..(557): Selenocysteine
  MOD_RES (566)..(566): Selenocysteine
MEAERRPAPGSPSEGLFADGHLILWXLCSVLLPVFIXFWCSLQRSRRQLHRRDIFRKSKHGWRDXDLFSQPXYCCVCAQHILQGAFCDCCGLRVDEGCLRKADKRFQCKEIMLKNDXKVLDAMPHHWIRGNVPLCSYCMVCKQQCGCQPKLCDYRCIWCQKXVHDECMKNSLKNEKCDFGEFKNLIIPPSYLXSINQMRKDKKXDYEVLASKLGKQWXPLIILANSRSGXNMGEGLLGEFRILLNPVQVFDVXKXPPIKALQLCXLLPYYSARVLVCGGDGXVGWVLDAVDDMKIKGQEKYIPQVAVLPLGXGNDLSNXLGWGXGYAGEIPVAQVLRNVMEADGIKLDRWKVQVXNKGYYNLRKPKEFXMNNYFSVGPDALMALNFHAHREKAPSLFSSRILNKAVYLFYGXKDCLVQECKDLNKKVELELDGERVALPSLEGIIVLNIGYWGGGCRLWEGMGDEXYPLARHDDGLLEVVGVYGSFHCAQIQVKLANPFRIGQAHXVRLILKCSMMPMQVDGEPWAQGPCXVXIXHKXHAMMLYFSGEQXDDDISSXSDQEDIKAXE

SEQ ID NO: 7968 - protein, 177 aa, Homo sapiens
  MOD_RES (26)..(26): Selenocysteine
  MOD_RES (37)..(37): Selenocysteine
  MOD_RES (65)..(65): Selenocysteine
  MOD_RES (72)..(72): Selenocysteine
  MOD_RES (117)..(117): Selenocysteine
MEAERRPAPGSPSEGLFADGHLILWXLCSVLLPVFIXFWCSLQRSRRQLHRRDIFRKSKHGWRDXDLFSQPXYCCVCAQHILQGAFCDCCGLRVDEGCLRKADKRFQCKEIMLKNDXKVLDAMPHHWIRGNVPLCSYCMVCKQQCGCQPKLCDYRYGLRGHSLSQNAPWESGFHRVV

SEQ ID NO: 7969 - protein, 456 aa, Homo sapiens
  MOD_RES (1)..(1): Any amino acid
  MOD_RES (9)..(9): Selenocysteine
  MOD_RES (16)..(16): Selenocysteine
  MOD_RES (61)..(61): Selenocysteine
  MOD_RES (106)..(106): Selenocysteine
  MOD_RES (137)..(137): Selenocysteine
  MOD_RES (148)..(148): Selenocysteine
  MOD_RES (162)..(162): Selenocysteine
  MOD_RES (174)..(174): Selenocysteine
  MOD_RES (197)..(197): Selenocysteine
  MOD_RES (199)..(199): Selenocysteine
  MOD_RES (209)..(209): Selenocysteine
  MOD_RES (226)..(226): Selenocysteine
  MOD_RES (256)..(256): Selenocysteine
  MOD_RES (263)..(263): Selenocysteine
  MOD_RES (268)..(268): Selenocysteine
  MOD_RES (299)..(299): Selenocysteine
  MOD_RES (313)..(313): Selenocysteine
  MOD_RES (356)..(356): Selenocysteine
  MOD_RES (410)..(410): Selenocysteine
  MOD_RES (450)..(450): Selenocysteine
XSKHGWRDXDLFSQPXYCCVCAQHILQGAFCDCCGLRVDEGCLRKADKRFQCKEIMLKNDXKVLDAMPHHWIRGNVPLCSYCMVCKQQCGCQPKLCDYRCIWCQKXVHDECMKNSLKNEKCDFGEFKNLIIPPSYLXSINQMRKDKKXDYEVLASKLGKQWXPLIILANSRSGXNMGEGLLGEFRILLNPVQVFDVXKXPPIKALQLCXLLPYYSARVLVCGGDGXVGWVLDAVDDMKIKGQEKYIPQVAVLPLGXGNDLSNXLGWGXGYAGEIPVAQVLRNVMEADGIKLDRWKVQVXNKGYYNLRKPKEFXMNNYFSVGPDALMALNFHAHREKAPSLFSSRILNKAVYLFYGXKDCLVQECKDLNKKVELELDGERVALPSLEGIIVLNIGYWGGGCRLWEGMGDEXYPLARHDDGLLEVVGVYGSFHCAQIQVKLANPFRIGQAHXVRVGEI

SEQ ID NO: 7970 - protein, 154 aa, Homo sapiens
  MOD_RES (11)..(11): Selenocysteine
  MOD_RES (26)..(26): Selenocysteine
  MOD_RES (34)..(34): Selenocysteine
  MOD_RES (54)..(54): Selenocysteine
  MOD_RES (59)..(59): Selenocysteine
  MOD_RES (75)..(75): Selenocysteine
  MOD_RES (113)..(113): Selenocysteine
  MOD_RES (123)..(123): Selenocysteine
  MOD_RES (132)..(132): Selenocysteine
  MOD_RES (147)..(147): Selenocysteine
  MOD_RES (153)..(153): Selenocysteine
HIAQYLEWDPXELRPGSKGDGRHAWXMKHFKKPXYCNFCHIMLMGVRKQGLCCXYCKYXVHERCVSRNIPGCVKXYSKAKRSGEVMQHAWVEGNSSVKCDRCHKSIKCYQSVXARHCVWCRMXFHRKCELSXLCDGGELRDHILLPXSICPIXR

SEQ ID NO: 7971 - protein, 752 aa, Homo sapiens
  MOD_RES (10)..(10): Selenocysteine
  MOD_RES (33)..(33): Selenocysteine
  MOD_RES (73)..(73): Selenocysteine
  MOD_RES (87)..(87): Selenocysteine
  MOD_RES (92)..(92): Selenocysteine
  MOD_RES (105)..(105): Selenocysteine
  MOD_RES (114)..(114): Selenocysteine
  MOD_RES (124)..(124): Selenocysteine
  MOD_RES (142)..(142): Selenocysteine
  MOD_RES (173)..(173): Selenocysteine
  MOD_RES (219)..(219): Selenocysteine
  MOD_RES (251)..(252): Selenocysteine
  MOD_RES (275)..(275): Selenocysteine
  MOD_RES (283)..(283): Selenocysteine
  MOD_RES (303)..(303): Selenocysteine
  MOD_RES (308)..(308): Selenocysteine
  MOD_RES (324)..(324): Selenocysteine
  MOD_RES (342)..(342): Selenocysteine
  MOD_RES (357)..(357): Selenocysteine
  MOD_RES (363)..(363): Selenocysteine
  MOD_RES (390)..(390): Selenocysteine
  MOD_RES (393)..(393): Selenocysteine
  MOD_RES (434)..(434): Selenocysteine
  MOD_RES (443)..(443): Selenocysteine
  MOD_RES (456)..(456): Selenocysteine
  MOD_RES (482)..(482): Selenocysteine
  MOD_RES (502)..(502): Selenocysteine
  MOD_RES (582)..(582): Selenocysteine
  MOD_RES (585)..(585): Selenocysteine
  MOD_RES (589)..(589): Selenocysteine
  MOD_RES (628)..(628): Selenocysteine
  MOD_RES (649)..(649): Selenocysteine
  MOD_RES (682)..(682): Selenocysteine
  MOD_RES (698)..(698): Selenocysteine
  MOD_RES (701)..(701): Selenocysteine
  MOD_RES (720)..(720): Selenocysteine
  MOD_RES (724)..(724): Selenocysteine
MGEERWVSLXPEEFDQLQKYSEYSSKKIKDALXEFNEGGSLKQYDPHEPISYDVFKLFMRAYLEVDLPQPLSXHLFLAFSQKPRHEXSDHPXEGASNSEANSADXNIQNADNAXKADEACAPDXESNMAEKQAPAEDQVAAXPLEPPVPRSSSSESPVVYLKDVVCYLSLLEXGRPQDKLEFMFRLYDSDENGLLDQAEMDCIVNQMLHIAQYLEWDPXELRPILKEMLQGMDYDRDGFVSLQEWVHGGMXXIPLLVLLGMDDSGSKGDGRHAWXMKHFKKPXYCNFCHIMLMGVRKQGLCCXYCKYXVHERCVSRNIPGCVKXYSKAKRSGEFHRKCELSXLCDGGELRDHILLPXSICPIXRDRPGEKSDGCVSAKGELVMQYKIIPXPGXHPLLVLVNPKSGGRQGERILRKFHYLLNPKQVFNLDNGGPXPGLNFFRDXPDFRVLACGGDGXVGWILDCIDKANFAKHPPVAVLPLGXGNDLARCLRWGGGYEGGSLXKILKDIEQSPLVMLDRWHLEVIPREEVENGDQVPYSIMNNYFSIGVDASIAHRFHVMREKHPEKFNSRMKNKLWYFEFGXSEXFAAXCKKLHDHIELECDGVGVDLSNIFLEGIAILNIPSMYGGXNLWGENKKNRAVIRESRKGVXDPKELKFCVQDLSDQLLEVVGLEGAMEMGQIYXGLKSAGRRLAQCASVXIRXNKLLPMQVDGEPWMQPCCXIKIXHKNQAPMMMGPPQKSSFFSLRRKSRSKD

SEQ ID NO: 7972 - protein, 766 aa, Homo sapiens
  MOD_RES (10)..(10): Selenocysteine
  MOD_RES (33)..(33): Selenocysteine
  MOD_RES (73)..(73): Selenocysteine
  MOD_RES (87)..(87): Selenocysteine
  MOD_RES (92)..(92): Selenocysteine
  MOD_RES (105)..(105): Selenocysteine
  MOD_RES (114)..(114): Selenocysteine
  MOD_RES (124)..(124): Selenocysteine
  MOD_RES (142)..(142): Selenocysteine
  MOD_RES (173)..(173): Selenocysteine
  MOD_RES (219)..(219): Selenocysteine
  MOD_RES (251)..(252): Selenocysteine
  MOD_RES (275)..(275): Selenocysteine
  MOD_RES (283)..(283): Selenocysteine
  MOD_RES (303)..(303): Selenocysteine
  MOD_RES (308)..(308): Selenocysteine
  MOD_RES (324)..(324): Selenocysteine
  MOD_RES (362)..(362): Selenocysteine
  MOD_RES (372)..(372): Selenocysteine
  MOD_RES (381)..(381): Selenocysteine
  MOD_RES (396)..(396): Selenocysteine
  MOD_RES (402)..(402): Selenocysteine
  MOD_RES (429)..(429): Selenocysteine
  MOD_RES (432)..(432): Selenocysteine
  MOD_RES (457)..(457): Selenocysteine
  MOD_RES (470)..(470): Selenocysteine
  MOD_RES (496)..(496): Selenocysteine
  MOD_RES (516)..(516): Selenocysteine
  MOD_RES (596)..(596): Selenocysteine
  MOD_RES (599)..(599): Selenocysteine
  MOD_RES (603)..(603): Selenocysteine
  MOD_RES (642)..(642): Selenocysteine
  MOD_RES (663)..(663): Selenocysteine
  MOD_RES (696)..(696): Selenocysteine
  MOD_RES (712)..(712): Selenocysteine
  MOD_RES (715)..(715): Selenocysteine
  MOD_RES (734)..(734): Selenocysteine
  MOD_RES (738)..(738): Selenocysteine
MGEERWVSLXPEEFDQLQKYSEYSSKKIKDALXEFNEGGSLKQYDPHEPISYDVFKLFMRAYLEVDLPQPLSXHLFLAFSQKPRHEXSDHPXEGASNSEANSADXNIQNADNAXKADEACAPDXESNMAEKQAPAEDQVAAXPLEPPVPRSSSSESPVVYLKDVVCYLSLLEXGRPQDKLEFMFRLYDSDENGLLDQAEMDCIVNQMLHIAQYLEWDPXELRPILKEMLQGMDYDRDGFVSLQEWVHGGMXXIPLLVLLGMDDSGSKGDGRHAWXMKHFKKPXYCNFCHIMLMGVRKQGLCCXYCKYXVHERCVSRNIPGCVKXYSKAKRSGEVMQHAWVEGNSSVKCDRCHKSIKCYQSVXARHCVWCRMXFHRKCELSXLCDGGELRDHILLPXSICPIXRDRPGEKSDGCVSAKGELVMQYKIIPXPGXHPLLVLVNPKSGGRQGERLNFFRDXPDFRVLACGGDGXVGWILDCIDKANFAKHPPVAVLPLGXGNDLARCLRWGGGYEGGSLXKILKDIEQSPLVMLDRWHLEVIPREEVENGDQVPYSIMNNYFSIGVDASIAHRFHVMREKHPEKFNSRMKNKLWYFEFGXSEXFAAXCKKLHDHIELECDGVGVDLSNIFLEGIAILNIPSMYGGXNLWGENKKNRAVIRESRKGVXDPKELKFCVQDLSDQLLEVVGLEGAMEMGQIYXGLKSAGRRLAQCASVXIRXNKLLPMQVDGEPWMQPCCXIKIXHKNQAPMMMGPPQKSSFFSLRRKSRSKD

SEQ ID NO: 7973 - protein, 791 aa, Homo sapiens
  MOD_RES (10)..(10): Selenocysteine
  MOD_RES (33)..(33): Selenocysteine
  MOD_RES (73)..(73): Selenocysteine
  MOD_RES (87)..(87): Selenocysteine
  MOD_RES (92)..(92): Selenocysteine
  MOD_RES (105)..(105): Selenocysteine
  MOD_RES (114)..(114): Selenocysteine
  MOD_RES (124)..(124): Selenocysteine
  MOD_RES (142)..(142): Selenocysteine
  MOD_RES (173)..(173): Selenocysteine
  MOD_RES (219)..(219): Selenocysteine
  MOD_RES (251)..(252): Selenocysteine
  MOD_RES (275)..(275): Selenocysteine
  MOD_RES (283)..(283): Selenocysteine
  MOD_RES (303)..(303): Selenocysteine
  MOD_RES (308)..(308): Selenocysteine
  MOD_RES (324)..(324): Selenocysteine
  MOD_RES (362)..(362): Selenocysteine
  MOD_RES (372)..(372): Selenocysteine
  MOD_RES (381)..(381): Selenocysteine
  MOD_RES (396)..(396): Selenocysteine
  MOD_RES (402)..(402): Selenocysteine
  MOD_RES (429)..(429): Selenocysteine
  MOD_RES (432)..(432): Selenocysteine
  MOD_RES (473)..(473): Selenocysteine
  MOD_RES (482)..(482): Selenocysteine
  MOD_RES (495)..(495): Selenocysteine
  MOD_RES (521)..(521): Selenocysteine
  MOD_RES (541)..(541): Selenocysteine
  MOD_RES (621)..(621): Selenocysteine
  MOD_RES (624)..(624): Selenocysteine
  MOD_RES (628)..(628): Selenocysteine
  MOD_RES (667)..(667): Selenocysteine
  MOD_RES (688)..(688): Selenocysteine
  MOD_RES (721)..(721): Selenocysteine
  MOD_RES (737)..(737): Selenocysteine
  MOD_RES (740)..(740): Selenocysteine
  MOD_RES (759)..(759): Selenocysteine
  MOD_RES (763)..(763): Selenocysteine
MGEERWVSLXPEEFDQLQKYSEYSSKKIKDALXEFNEGGSLKQYDPHEPISYDVFKLFMRAYLEVDLPQPLSXHLFLAFSQKPRHEXSDHPXEGASNSEANSADXNIQNADNAXKADEACAPDXESNMAEKQAPAEDQVAAXPLEPPVPRSSSSESPVVYLKDVVCYLSLLEXGRPQDKLEFMFRLYDSDENGLLDQAEMDCIVNQMLHIAQYLEWDPXELRPILKEMLQGMDYDRDGFVSLQEWVHGGMXXIPLLVLLGMDDSGSKGDGRHAWXMKHFKKPXYCNFCHIMLMGVRKQGLCCXYCKYXVHERCVSRNIPGCVKXYSKAKRSGEVMQHAWVEGNSSVKCDRCHKSIKCYQSVXARHCVWCRMXFHRKCELSXLCDGGELRDHILLPXSICPIXRDRPGEKSDGCVSAKGELVMQYKIIPXPGXHPLLVLVNPKSGGRQGERILRKFHYLLNPKQVFNLDNGGPXPGLNFFRDXPDFRVLACGGDGXVGWILDCIDKANFAKHPPVAVLPLGXGNDLARCLRWGGGYEGGSLXKILKDIEQSPLVMLDRWHLEVIPREEVENGDQVPYSIMNNYFSIGVDASIAHRFHVMREKHPEKFNSRMKNKLWYFEFGXSEXFAAXCKKLHDHIELECDGVGVDLSNIFLEGIAILNIPSMYGGXNLWGENKKNRAVIRESRKGVXDPKELKFCVQDLSDQLLEVVGLEGAMEMGQIYXGLKSAGRRLAQCASVXIRXNKLLPMQVDGEPWMQPCCXIKIXHKNQAPMMMGPPQKSSFFSLRRKSRSKD

SEQ ID NO: 7974 - protein, 62 aa, Homo sapiens
  MOD_RES (10)..(10): Selenocysteine
  MOD_RES (41)..(41): Selenocysteine
  MOD_RES (47)..(47): Selenocysteine
  MOD_RES (58)..(58): Selenocysteine
AAAGAGAAVXSAAASAGPGEDSSDSEAEQEGPQKLIRKVSXSGQIRXKGFIMLARLVXSELK

SEQ ID NO: 7975 - protein, 1164 aa, Homo sapiens
  MOD_RES (26)..(26): Selenocysteine
  MOD_RES (57)..(57): Selenocysteine
  MOD_RES (63)..(63): Selenocysteine
  MOD_RES (65)..(65): Selenocysteine
  MOD_RES (76)..(76): Selenocysteine
  MOD_RES (93)..(93): Selenocysteine
  MOD_RES (120)..(120): Selenocysteine
  MOD_RES (128)..(128): Selenocysteine
  MOD_RES (131)..(131): Selenocysteine
  MOD_RES (158)..(158): Selenocysteine
  MOD_RES (187)..(187): Selenocysteine
  MOD_RES (200)..(200): Selenocysteine
  MOD_RES (222)..(222): Selenocysteine
  MOD_RES (228)..(229): Selenocysteine
  MOD_RES (267)..(267): Selenocysteine
  MOD_RES (284)..(284): Selenocysteine
  MOD_RES (288)..(288): Selenocysteine
  MOD_RES (316)..(316): Selenocysteine
  MOD_RES (325)..(325): Selenocysteine
  MOD_RES (419)..(419): Selenocysteine
  MOD_RES (437)..(437): Selenocysteine
  MOD_RES (451)..(451): Selenocysteine
  MOD_RES (461)..(461): Selenocysteine
  MOD_RES (486)..(486): Selenocysteine
  MOD_RES (494)..(494): Selenocysteine
  MOD_RES (497)..(497): Selenocysteine
  MOD_RES (514)..(514): Selenocysteine
  MOD_RES (518)..(518): Selenocysteine
  MOD_RES (529)..(529): Selenocysteine
  MOD_RES (533)..(533): Selenocysteine
  MOD_RES (563)..(563): Selenocysteine
  MOD_RES (604)..(604): Selenocysteine
  MOD_RES (643)..(643): Selenocysteine
  MOD_RES (659)..(659): Selenocysteine
  MOD_RES (661)..(661): Selenocysteine
  MOD_RES (678)..(678): Selenocysteine
  MOD_RES (681)..(681): Selenocysteine
  MOD_RES (697)..(697): Selenocysteine
  MOD_RES (717)..(717): Selenocysteine
  MOD_RES (752)..(752): Selenocysteine
  MOD_RES (802)..(802): Selenocysteine
  MOD_RES (813)..(813): Selenocysteine
  MOD_RES (857)..(857): Selenocysteine
  MOD_RES (863)..(863): Selenocysteine
  MOD_RES (908)..(908): Selenocysteine
  MOD_RES (912)..(912): Selenocysteine
  MOD_RES (947)..(947): Selenocysteine
  MOD_RES (955)..(955): Selenocysteine
  MOD_RES (974)..(974): Selenocysteine
  MOD_RES (986)..(986): Selenocysteine
  MOD_RES (1004)..(1004): Selenocysteine
  MOD_RES (1011)..(1011): Selenocysteine
  MOD_RES (1043)..(1043): Selenocysteine
  MOD_RES (1046)..(1046): Selenocysteine
  MOD_RES (1048)..(1048): Selenocysteine
  MOD_RES (1061)..(1061): Selenocysteine
  MOD_RES (1096)..(1096): Selenocysteine
  MOD_RES (1118)..(1118): Selenocysteine
  MOD_RES (1125)..(1125): Selenocysteine
  MOD_RES (1143)..(1143): Selenocysteine
  MOD_RES (1152)..(1152): Selenocysteine
MAGAGGQHHPPGAAGGAAAGAGAAVXSAAASAGPGEDSSDSEAEQEGPQKLIRKVSXSGQIRXKXSIKEGQLLKQXSSFQRWKKRYFKLRGRXLYYAKDSKSLIFDEVDLSDASVAEASXKNANNSFXIIXPFRRLMLCAENRKEMEDWISSLKSVQXREPYEVAQFNVEHFSGMHNWYACSHARPXFCNVCRESLSGVXSHGLSCEVCKFKAHKRCAVRAXNNCKWXXLASIGKDIIEDEDGVAMPHQWLEGNLPVSAKCAVCDKXCGSVLRLQDWKCLWCKXMVHXACKDLYHPICPLGQCKVSIIPPIALNSXDSDGFCRAXFSFCVSPLLVFVNSKSGDNQGVKFLRRFKQLLNPAQVFDLMNGGPHLGLRLFQKFDNFRILVCGGDGSVGWVLSEIDKLNLNKQCQLGVLPLGXGNDLARVLGWGGSYDDDXQLPQILEKLERASXKMLDRWSIMXYELKLPPKASLLPGPPEASEEFYMXIYEDSVAXHLXKILNSDEHAVVISSAKXLCEXVKDFVAKVEKXYDKXLENAVVADAVASKCSVLNEKLEQLLQALHXDSQAAPVLPGLSPLIVEEDAVESSSEESLGESKEQLGDDVXKPSSQKAVKPREIMLRANSLKKAVRQVIEEAGKVMDDPXVHPCEPANQSSDYDSXEXDESKEEAKDDGAKESIXVKXAPRSPDARASYGHSQXDSVPGPAVAASKENLPVLNXRIICPGLRAGLAASIAGSSIINKMLLANIDPFGAXPFIDPDLDSVDGYSEKCVMNNYFGIGLDAKISLEFNNKREEHPEKCRSRXKNLMWYGVLGXRELLQRSYKNLEQRVQLECDGQYIPLPSLQGIAVLNIPSYAGGXNFWGGXKEDDIFAAPSFDDKILEVVAIFDSMQMAVSRVIKLQHHRIAQCRXVKIXIFGDEGVPVQVDGEAWVQPPGIIKIVHKNRAQMLXRDRAFESXLKSWEDKQKCDSGKPVLRXHLYIHHAIDLAXEEVSQMQLCSQAAEELIXRICDAAXIHCLLEQELAHAVNACSHALNKANPRCPESLXRDXAXEIAINVKALYNEXESLLVGRVPLQLESPHEERVSNALHSVEVELQKLXEIPWLYYILHPNEDEEPPMDCXKRNNRSXVFRIVPKFKKEKVQKQKXSSQPGSGDXESGSCEANSPGN

SEQ ID NO: 7976 - protein, 1220 aa, Homo sapiens
  MOD_RES (26)..(26): Selenocysteine
  MOD_RES (57)..(57): Selenocysteine
  MOD_RES (63)..(63): Selenocysteine
  MOD_RES (65)..(65): Selenocysteine
  MOD_RES (76)..(76): Selenocysteine
  MOD_RES (93)..(93): Selenocysteine
  MOD_RES (120)..(120): Selenocysteine
  MOD_RES (128)..(128): Selenocysteine
  MOD_RES (131)..(131): Selenocysteine
  MOD_RES (158)..(158): Selenocysteine
  MOD_RES (187)..(187): Selenocysteine
  MOD_RES (200)..(200): Selenocysteine
  MOD_RES (222)..(222): Selenocysteine
  MOD_RES (228)..(229): Selenocysteine
  MOD_RES (267)..(267): Selenocysteine
  MOD_RES (284)..(284): Selenocysteine
  MOD_RES (288)..(288): Selenocysteine
  MOD_RES (316)..(316): Selenocysteine
  MOD_RES (325)..(325): Selenocysteine
  MOD_RES (419)..(419): Selenocysteine
  MOD_RES (437)..(437): Selenocysteine
  MOD_RES (451)..(451): Selenocysteine
  MOD_RES (461)..(461): Selenocysteine
  MOD_RES (486)..(486): Selenocysteine
  MOD_RES (494)..(494): Selenocysteine
  MOD_RES (497)..(497): Selenocysteine
  MOD_RES (514)..(514): Selenocysteine
  MOD_RES (518)..(518): Selenocysteine
  MOD_RES (529)..(529): Selenocysteine
  MOD_RES (533)..(533): Selenocysteine
  MOD_RES (563)..(563): Selenocysteine
  MOD_RES (604)..(604): Selenocysteine
  MOD_RES (643)..(643): Selenocysteine
  MOD_RES (659)..(659): Selenocysteine
  MOD_RES (661)..(661): Selenocysteine
  MOD_RES (678)..(678): Selenocysteine
  MOD_RES (681)..(681): Selenocysteine
  MOD_RES (697)..(697): Selenocysteine
  MOD_RES (717)..(717): Selenocysteine
  MOD_RES (752)..(752): Selenocysteine
  MOD_RES (802)..(802): Selenocysteine
  MOD_RES (813)..(813): Selenocysteine
  MOD_RES (857)..(857): Selenocysteine
  MOD_RES (863)..(863): Selenocysteine
  MOD_RES (908)..(908): Selenocysteine
  MOD_RES (912)..(912): Selenocysteine
  MOD_RES (947)..(947): Selenocysteine
  MOD_RES (955)..(955): Selenocysteine
  MOD_RES (974)..(974): Selenocysteine
  MOD_RES (986)..(986): Selenocysteine
  MOD_RES (1004)..(1004): Selenocysteine
  MOD_RES (1011)..(1011): Selenocysteine
  MOD_RES (1043)..(1043): Selenocysteine
  MOD_RES (1046)..(1046): Selenocysteine
  MOD_RES (1048)..(1048): Selenocysteine
  MOD_RES (1061)..(1061): Selenocysteine
  MOD_RES (1096)..(1096): Selenocysteine
  MOD_RES (1118)..(1118): Selenocysteine
  MOD_RES (1125)..(1125): Selenocysteine
  MOD_RES (1143)..(1143): Selenocysteine
  MOD_RES (1153)..(1153): Selenocysteine
  MOD_RES (1215)..(1215): Selenocysteine
MAGAGGQHHPPGAAGGAAAGAGAAVXSAAASAGPGEDSSDSEAEQEGPQKLIRKVSXSGQIRXKXSIKEGQLLKQXSSFQRWKKRYFKLRGRXLYYAKDSKSLIFDEVDLSDASVAEASXKNANNSFXIIXPFRRLMLCAENRKEMEDWISSLKSVQXREPYEVAQFNVEHFSGMHNWYACSHARPXFCNVCRESLSGVXSHGLSCEVCKFKAHKRCAVRAXNNCKWXXLASIGKDIIEDEDGVAMPHQWLEGNLPVSAKCAVCDKXCGSVLRLQDWKCLWCKXMVHXACKDLYHPICPLGQCKVSIIPPIALNSXDSDGFCRAXFSFCVSPLLVFVNSKSGDNQGVKFLRRFKQLLNPAQVFDLMNGGPHLGLRLFQKFDNFRILVCGGDGSVGWVLSEIDKLNLNKQCQLGVLPLGXGNDLARVLGWGGSYDDDXQLPQILEKLERASXKMLDRWSIMXYELKLPPKASLLPGPPEASEEFYMXIYEDSVAXHLXKILNSDEHAVVISSAKXLCEXVKDFVAKVEKXYDKXLENAVVADAVASKCSVLNEKLEQLLQALHXDSQAAPVLPGLSPLIVEEDAVESSSEESLGESKEQLGDDVXKPSSQKAVKPREIMLRANSLKKAVRQVIEEAGKVMDDPXVHPCEPANQSSDYDSXEXDESKEEAKDDGAKESIXVKXAPRSPDARASYGHSQXDSVPGPAVAASKENLPVLNXRIICPGLRAGLAASIAGSSIINKMLLANIDPFGAXPFIDPDLDSVDGYSEKCVMNNYFGIGLDAKISLEFNNKREEHPEKCRSRXKNLMWYGVLGXRELLQRSYKNLEQRVQLECDGQYIPLPSLQGIAVLNIPSYAGGXNFWGGXKEDDIFAAPSFDDKILEVVAIFDSMQMAVSRVIKLQHHRIAQCRXVKIXIFGDEGVPVQVDGEAWVQPPGIIKIVHKNRAQMLXRDRAFESXLKSWEDKQKCDSGKPVLRXHLYIHHAIDLAXEEVSQMQLCSQAAEELIXRICDAAXIHCLLEQELAHAVNACSHALNKANPRCPESLXRDXAXEIAINVKALYNEXESLLVGRVPLQLESPHEERVSNALHSVEVELQKLXEIPWLYYILHPNEDEEPPMDCXKRNNRSXVFRIVPKFKKEKVQKQKXSSQPVQKWGXEEVAAWLDLLNLGEYKDIFIRHDIRGAELLHLERRDLKDLGIPKVGHVKRILQGIKELGRSXPQSEV

SEQ ID NO: 7977 - protein, 89 aa, Homo sapiens
  MOD_RES (22)..(22): Selenocysteine
  MOD_RES (51)..(51): Selenocysteine
  MOD_RES (64)..(64): Selenocysteine
  MOD_RES (73)..(73): Selenocysteine
  MOD_RES (86)..(86): Selenocysteine
MLCAENRKEMEDWISSLKSVQXREPYEVAQFNVEHFSGMHNWYACSHARPXFCNVCRESLSGVXSHGLSCEGXHCLQRFIPSNMSXWSM

SEQ ID NO: 7978 - protein, 1028 aa, Homo sapiens
  MOD_RES (22)..(22): Selenocysteine
  MOD_RES (51)..(51): Selenocysteine
  MOD_RES (64)..(64): Selenocysteine
  MOD_RES (86)..(86): Selenocysteine
  MOD_RES (92)..(93): Selenocysteine
  MOD_RES (131)..(131): Selenocysteine
  MOD_RES (148)..(148): Selenocysteine
  MOD_RES (152)..(152): Selenocysteine
  MOD_RES (180)..(180): Selenocysteine
  MOD_RES (189)..(189): Selenocysteine
  MOD_RES (283)..(283): Selenocysteine
  MOD_RES (301)..(301): Selenocysteine
  MOD_RES (315)..(315): Selenocysteine
  MOD_RES (325)..(325): Selenocysteine
  MOD_RES (350)..(350): Selenocysteine
  MOD_RES (358)..(358): Selenocysteine
  MOD_RES (361)..(361): Selenocysteine
  MOD_RES (378)..(378): Selenocysteine
  MOD_RES (382)..(382): Selenocysteine
  MOD_RES (393)..(393): Selenocysteine
  MOD_RES (397)..(397): Selenocysteine
  MOD_RES (427)..(427): Selenocysteine
  MOD_RES (468)..(468): Selenocysteine
  MOD_RES (507)..(507): Selenocysteine
  MOD_RES (523)..(523): Selenocysteine
  MOD_RES (525)..(525): Selenocysteine
  MOD_RES (542)..(542): Selenocysteine
  MOD_RES (545)..(545): Selenocysteine
  MOD_RES (561)..(561): Selenocysteine
  MOD_RES (581)..(581): Selenocysteine
  MOD_RES (616)..(616): Selenocysteine
  MOD_RES (666)..(666): Selenocysteine
  MOD_RES (677)..(677): Selenocysteine
  MOD_RES (721)..(721): Selenocysteine
  MOD_RES (727)..(727): Selenocysteine
  MOD_RES (772)..(772): Selenocysteine
  MOD_RES (776)..(776): Selenocysteine
  MOD_RES (811)..(811): Selenocysteine
  MOD_RES (819)..(819): Selenocysteine
  MOD_RES (838)..(838): Selenocysteine
  MOD_RES (850)..(850): Selenocysteine
  MOD_RES (868)..(868): Selenocysteine
  MOD_RES (875)..(875): Selenocysteine
  MOD_RES (907)..(907): Selenocysteine
  MOD_RES (910)..(910): Selenocysteine
  MOD_RES (912)..(912): Selenocysteine
  MOD_RES (925)..(925): Selenocysteine
  MOD_RES (960)..(960): Selenocysteine
  MOD_RES (982)..(982): Selenocysteine
  MOD_RES (989)..(989): Selenocysteine
  MOD_RES (1007)..(1007): Selenocysteine
  MOD_RES (1025)..(1025): Selenocysteine
MLCAENRKEMEDWISSLKSVQXREPYEVAQFNVEHFSGMHNWYACSHARPXFCNVCRESLSGVXSHGLSCEVCKFKAHKRCAVRAXNNCKWXXLASIGKDIIEDEDGVAMPHQWLEGNLPVSAKCAVCDKXCGSVLRLQDWKCLWCKXMVHXACKDLYHPICPLGQCKVSIIPPIALNSXDSDGFCRAXFSFCVSPLLVFVNSKSGDNQGVKFLRRFKQLLNPAQVFDLMNGGPHLGLRLFQKFDNFRILVCGGDGSVGWVLSEIDKLNLNKQCQLGVLPLGXGNDLARVLGWGGSYDDDXQLPQILEKLERASXKMLDRWSIMXYELKLPPKASLLPGPPEASEEFYMXIYEDSVAXHLXKILNSDEHAVVISSAKXLCEXVKDFVAKVEKXYDKXLENAVVADAVASKCSVLNEKLEQLLQALHXDSQAAPVLPGLSPLIVEEDAVESSSEESLGESKEQLGDDVXKPSSQKAVKPREIMLRANSLKKAVRQVIEEAGKVMDDPXVHPCEPANQSSDYDSXEXDESKEEAKDDGAKESIXVKXAPRSPDARASYGHSQXDSVPGPAVAASKENLPVLNXRIICPGLRAGLAASIAGSSIINKMLLANIDPFGAXPFIDPDLDSVDGYSEKCVMNNYFGIGLDAKISLEFNNKREEHPEKCRSRXKNLMWYGVLGXRELLQRSYKNLEQRVQLECDGQYIPLPSLQGIAVLNIPSYAGGXNFWGGXKEDDIFAAPSFDDKILEVVAIFDSMQMAVSRVIKLQHHRIAQCRXVKIXIFGDEGVPVQVDGEAWVQPPGIIKIVHKNRAQMLXRDRAFESXLKSWEDKQKCDSGKPVLRXHLYIHHAIDLAXEEVSQMQLCSQAAEELIXRICDAAXIHCLLEQELAHAVNACSHALNKANPRCPESLXRDXAXEIAINVKALYNEXESLLVGRVPLQLESPHEERVSNALHSVEVELQKLXEIPWLYYILHPNEDEEPPMDCXKRNNRSXVFRIVPKFKKEKVQKQKXSSQPALPLHSVLHLLWPXFAL

SEQ ID NO: 7979 - protein, 1084 aa, Homo sapiens
  MOD_RES (22)..(22): Selenocysteine
  MOD_RES (51)..(51): Selenocysteine
  MOD_RES (64)..(64): Selenocysteine
  MOD_RES (86)..(86): Selenocysteine
  MOD_RES (92)..(93): Selenocysteine
  MOD_RES (131)..(131): Selenocysteine
  MOD_RES (148)..(148): Selenocysteine
  MOD_RES (152)..(152): Selenocysteine
  MOD_RES (180)..(180): Selenocysteine
  MOD_RES (189)..(189): Selenocysteine
  MOD_RES (283)..(283): Selenocysteine
  MOD_RES (301)..(301): Selenocysteine
  MOD_RES (315)..(315): Selenocysteine
  MOD_RES (325)..(325): Selenocysteine
  MOD_RES (350)..(350): Selenocysteine
  MOD_RES (358)..(358): Selenocysteine
  MOD_RES (361)..(361): Selenocysteine
  MOD_RES (378)..(378): Selenocysteine
  MOD_RES (382)..(382): Selenocysteine
  MOD_RES (393)..(393): Selenocysteine
  MOD_RES (397)..(397): Selenocysteine
  MOD_RES (427)..(427): Selenocysteine
  MOD_RES (468)..(468): Selenocysteine
  MOD_RES (507)..(507): Selenocysteine
  MOD_RES (523)..(523): Selenocysteine
  MOD_RES (525)..(525): Selenocysteine
  MOD_RES (542)..(542): Selenocysteine
  MOD_RES (545)..(545): Selenocysteine
  MOD_RES (561)..(561): Selenocysteine
  MOD_RES (581)..(581): Selenocysteine
  MOD_RES (616)..(616): Selenocysteine
  MOD_RES (666)..(666): Selenocysteine
  MOD_RES (677)..(677): Selenocysteine
  MOD_RES (721)..(721): Selenocysteine
  MOD_RES (727)..(727): Selenocysteine
  MOD_RES (772)..(772): Selenocysteine
  MOD_RES (776)..(776): Selenocysteine
  MOD_RES (811)..(811): Selenocysteine
  MOD_RES (819)..(819): Selenocysteine
  MOD_RES (838)..(838): Selenocysteine
  MOD_RES (850)..(850): Selenocysteine
  MOD_RES (868)..(868): Selenocysteine
  MOD_RES (875)..(875): Selenocysteine
  MOD_RES (907)..(907): Selenocysteine
  MOD_RES (910)..(910): Selenocysteine
  MOD_RES (912)..(912): Selenocysteine
  MOD_RES (925)..(925): Selenocysteine
  MOD_RES (960)..(960): Selenocysteine
  MOD_RES (982)..(982): Selenocysteine
  MOD_RES (989)..(989): Selenocysteine
  MOD_RES (1007)..(1007): Selenocysteine
  MOD_RES (1017)..(1017): Selenocysteine
  MOD_RES (1079)..(1079): Selenocysteine
MLCAENRKEMEDWISSLKSVQXREPYEVAQFNVEHFSGMHNWYACSHARPXFCNVCRESLSGVXSHGLSCEVCKFKAHKRCAVRAXNNCKWXXLASIGKDIIEDEDGVAMPHQWLEGNLPVSAKCAVCDKXCGSVLRLQDWKCLWCKXMVHXACKDLYHPICPLGQCKVSIIPPIALNSXDSDGFCRAXFSFCVSPLLVFVNSKSGDNQGVKFLRRFKQLLNPAQVFDLMNGGPHLGLRLFQKFDNFRILVCGGDGSVGWVLSEIDKLNLNKQCQLGVLPLGXGNDLARVLGWGGSYDDDXQLPQILEKLERASXKMLDRWSIMXYELKLPPKASLLPGPPEASEEFYMXIYEDSVAXHLXKILNSDEHAVVISSAKXLCEXVKDFVAKVEKXYDKXLENAVVADAVASKCSVLNEKLEQLLQALHXDSQAAPVLPGLSPLIVEEDAVESSSEESLGESKEQLGDDVXKPSSQKAVKPREIMLRANSLKKAVRQVIEEAGKVMDDPXVHPCEPANQSSDYDSXEXDESKEEAKDDGAKESIXVKXAPRSPDARASYGHSQXDSVPGPAVAASKENLPVLNXRIICPGLRAGLAASIAGSSIINKMLLANIDPFGAXPFIDPDLDSVDGYSEKCVMNNYFGIGLDAKISLEFNNKREEHPEKCRSRXKNLMWYGVLGXRELLQRSYKNLEQRVQLECDGQYIPLPSLQGIAVLNIPSYAGGXNFWGGXKEDDIFAAPSFDDKILEVVAIFDSMQMAVSRVIKLQHHRIAQCRXVKIXIFGDEGVPVQVDGEAWVQPPGIIKIVHKNRAQMLXRDRAFESXLKSWEDKQKCDSGKPVLRXHLYIHHAIDLAXEEVSQMQLCSQAAEELIXRICDAAXIHCLLEQELAHAVNACSHALNKANPRCPESLXRDXAXEIAINVKALYNEXESLLVGRVPLQLESPHEERVSNALHSVEVELQKLXEIPWLYYILHPNEDEEPPMDCXKRNNRSXVFRIVPKFKKEKVQKQKXSSQPVQKWGXEEVAAWLDLLNLGEYKDIFIRHDIRGAELLHLERRDLKDLGIPKVGHVKRILQGIKELGRSXPQSEV

SEQ ID NO: 7980 - protein, 1100 aa, Homo sapiens
  MOD_RES (22)..(22): Selenocysteine
  MOD_RES (51)..(51): Selenocysteine
  MOD_RES (64)..(64): Selenocysteine
  MOD_RES (86)..(86): Selenocysteine
  MOD_RES (92)..(93): Selenocysteine
  MOD_RES (131)..(131): Selenocysteine
  MOD_RES (148)..(148): Selenocysteine
  MOD_RES (152)..(152): Selenocysteine
  MOD_RES (180)..(180): Selenocysteine
  MOD_RES (189)..(189): Selenocysteine
  MOD_RES (283)..(283): Selenocysteine
  MOD_RES (301)..(301): Selenocysteine
  MOD_RES (315)..(315): Selenocysteine
  MOD_RES (325)..(325): Selenocysteine
  MOD_RES (350)..(350): Selenocysteine
  MOD_RES (358)..(358): Selenocysteine
  MOD_RES (361)..(361): Selenocysteine
  MOD_RES (378)..(378): Selenocysteine
  MOD_RES (382)..(382): Selenocysteine
  MOD_RES (393)..(393): Selenocysteine
  MOD_RES (397)..(397): Selenocysteine
  MOD_RES (427)..(427): Selenocysteine
  MOD_RES (468)..(468): Selenocysteine
  MOD_RES (507)..(507): Selenocysteine
  MOD_RES (523)..(523): Selenocysteine
  MOD_RES (525)..(525): Selenocysteine
  MOD_RES (542)..(542): Selenocysteine
  MOD_RES (545)..(545): Selenocysteine
  MOD_RES (561)..(561): Selenocysteine
  MOD_RES (581)..(581): Selenocysteine
  MOD_RES (616)..(616): Selenocysteine
  MOD_RES (666)..(666): Selenocysteine
  MOD_RES (677)..(677): Selenocysteine
  MOD_RES (721)..(721): Selenocysteine
  MOD_RES (727)..(727): Selenocysteine
  MOD_RES (772)..(772): Selenocysteine
  MOD_RES (776)..(776): Selenocysteine
  MOD_RES (811)..(811): Selenocysteine
  MOD_RES (819)..(819): Selenocysteine
  MOD_RES (838)..(838): Selenocysteine
  MOD_RES (850)..(850): Selenocysteine
  MOD_RES (868)..(868): Selenocysteine
  MOD_RES (875)..(875): Selenocysteine
  MOD_RES (907)..(907): Selenocysteine
  MOD_RES (910)..(910): Selenocysteine
  MOD_RES (912)..(912): Selenocysteine
  MOD_RES (925)..(925): Selenocysteine
  MOD_RES (960)..(960): Selenocysteine
  MOD_RES (982)..(982): Selenocysteine
  MOD_RES (989)..(989): Selenocysteine
  MOD_RES (1007)..(1007): Selenocysteine
  MOD_RES (1017)..(1017): Selenocysteine
  MOD_RES (1057)..(1057): Selenocysteine
  MOD_RES (1064)..(1064): Selenocysteine
  MOD_RES (1095)..(1095): Selenocysteine
MLCAENRKEMEDWISSLKSVQXREPYEVAQFNVEHFSGMHNWYACSHARPXFCNVCRESLSGVXSHGLSCEVCKFKAHKRCAVRAXNNCKWXXLASIGKDIIEDEDGVAMPHQWLEGNLPVSAKCAVCDKXCGSVLRLQDWKCLWCKXMVHXACKDLYHPICPLGQCKVSIIPPIALNSXDSDGFCRAXFSFCVSPLLVFVNSKSGDNQGVKFLRRFKQLLNPAQVFDLMNGGPHLGLRLFQKFDNFRILVCGGDGSVGWVLSEIDKLNLNKQCQLGVLPLGXGNDLARVLGWGGSYDDDXQLPQILEKLERASXKMLDRWSIMXYELKLPPKASLLPGPPEASEEFYMXIYEDSVAXHLXKILNSDEHAVVISSAKXLCEXVKDFVAKVEKXYDKXLENAVVADAVASKCSVLNEKLEQLLQALHXDSQAAPVLPGLSPLIVEEDAVESSSEESLGESKEQLGDDVXKPSSQKAVKPREIMLRANSLKKAVRQVIEEAGKVMDDPXVHPCEPANQSSDYDSXEXDESKEEAKDDGAKESIXVKXAPRSPDARASYGHSQXDSVPGPAVAASKENLPVLNXRIICPGLRAGLAASIAGSSIINKMLLANIDPFGAXPFIDPDLDSVDGYSEKCVMNNYFGIGLDAKISLEFNNKREEHPEKCRSRXKNLMWYGVLGXRELLQRSYKNLEQRVQLECDGQYIPLPSLQGIAVLNIPSYAGGXNFWGGXKEDDIFAAPSFDDKILEVVAIFDSMQMAVSRVIKLQHHRIAQCRXVKIXIFGDEGVPVQVDGEAWVQPPGIIKIVHKNRAQMLXRDRAFESXLKSWEDKQKCDSGKPVLRXHLYIHHAIDLAXEEVSQMQLCSQAAEELIXRICDAAXIHCLLEQELAHAVNACSHALNKANPRCPESLXRDXAXEIAINVKALYNEXESLLVGRVPLQLESPHEERVSNALHSVEVELQKLXEIPWLYYILHPNEDEEPPMDCXKRNNRSXVFRIVPKFKKEKVQKQKXSSQPVQKWGXEEVAAWLDLLNLGEYKDIFIRHDIRGAELLHLERRDLKNXVGEKRDXKENGKHMDLGIPKVGHVKRILQGIKELGRSXPQSEV

SEQ ID NO: 7981 - protein, 1047 aa, Homo sapiens
  MOD_RES (66)..(66): Selenocysteine
  MOD_RES (126)..(126): Selenocysteine
  MOD_RES (166)..(166): Selenocysteine
  MOD_RES (183)..(183): Selenocysteine
  MOD_RES (219)..(219): Selenocysteine
  MOD_RES (235)..(235): Selenocysteine
  MOD_RES (298)..(298): Selenocysteine
  MOD_RES (322)..(322): Selenocysteine
  MOD_RES (344)..(344): Selenocysteine
  MOD_RES (391)..(391): Selenocysteine
  MOD_RES (437)..(437): Selenocysteine
  MOD_RES (463)..(463): Selenocysteine
  MOD_RES (470)..(470): Selenocysteine
  MOD_RES (478)..(478): Selenocysteine
  MOD_RES (493)..(493): Selenocysteine
  MOD_RES (540)..(540): Selenocysteine
  MOD_RES (591)..(591): Selenocysteine
  MOD_RES (594)..(594): Selenocysteine
  MOD_RES (617)..(617): Selenocysteine
  MOD_RES (645)..(645): Selenocysteine
  MOD_RES (671)..(671): Selenocysteine
  MOD_RES (709)..(709): Selenocysteine
  MOD_RES (766)..(766): Selenocysteine
  MOD_RES (795)..(795): Selenocysteine
  MOD_RES (847)..(847): Selenocysteine
  MOD_RES (951)..(951): Selenocysteine
  MOD_RES (976)..(976): Selenocysteine
  MOD_RES (979)..(979): Selenocysteine
  MOD_RES (1006)..(1006): Selenocysteine
  MOD_RES (1012)..(1012): Selenocysteine
  MOD_RES (1045)..(1045): Selenocysteine
MDAAGRGCHLLPLPAARGPARAPAAAAAAAASPPGPCSGAACAPSAAAGAGAMNPSSSAGEEKGAXGGSSSSGSGAGSCCLGAEGGADPRGAGSAAAAGAAALDEPAAAGQKEKDEALEEKLRNLXFRKQVSYRKAISRAGLQHLAPAHPLSLPVANGPAKEPRAXLDWSENAVNGEHLWLEXNVSGDLCYLGEENCQVRFAKSALRRKCAVCKIVVHXACIEQLEKINFRCKPXFREGGSRSPRENFVRHHWVHRRRQEGKCKQCGKGFQQKFSFHSKEIVAISCSWCKQAFHNKVXCFMLHHIEEPCSLGAHAAVIVPPXWIIKVKKPQNSLKASNRKKKRXSFKRKASKRGMEQENKGRPFVIKPISSPLMKPLLVFVNPKSGGNQGXKVLQMFMWYLNPRQVFDLSQEGPKDALELYRKVPNLRILACGGDGXVGWILSILDELQLSPQPPVGVLPLGXGNDLARXLNWGGGYXDEPVSKILCQVEDGXVVQLDRWNLHVERNPDLPPEELEDGVCKLPLNVFNNYFSLGFDAHVXLEFHESREANPEKFNSRFRNKMFYAGAAFSDFLQRSSRDLSKHVKVVCDGXDLXPKIQELKFQCIVFLNIPRYCAGXMPWGNPGDHHDFEPQRHDDGYIEVIGFXMASLAALQVGGHGERLHQCREVMLLXYKSIPMQVDGEPCRLAPAMIRISLRNQANMVQKSKRRXSMPLLNDPQSVPDRLRIRVNKISLQDYEGFHYDKEKLREASIPLGILVVRGDCDLEXCRMYIDRLQEDLQSVSSGSQRVHYQDHEXSFPRALSAQRLSPRWCFLDDRSQEHLHFVMEISQDEIFILDPDMVVSQPAGXPPGMPDLVVEQASGISDWWNPALRKRMLSDSGLGMIAPYYEDSDLKDLSHSRVLQSPVSSEDHAILQAVIAGDLMKLIESYKNGGSLLIQGPDHCSLLHYAAKXGNGEIVKYILDHGPSELLDMADSEXGEXALHKAACQRNRAVCQLLVDAGASLRKXDSKGKXPQERAQQAGDPDLAAYLESRQNYKVIGHEDLEXAV

SEQ ID NO: 7982 - protein, 1065 aa, Homo sapiens
  MOD_RES (66)..(66): Selenocysteine
  MOD_RES (126)..(126): Selenocysteine
  MOD_RES (166)..(166): Selenocysteine
  MOD_RES (183)..(183): Selenocysteine
  MOD_RES (219)..(219): Selenocysteine
  MOD_RES (235)..(235): Selenocysteine
  MOD_RES (298)..(298): Selenocysteine
  MOD_RES (322)..(322): Selenocysteine
  MOD_RES (344)..(344): Selenocysteine
  MOD_RES (391)..(391): Selenocysteine
  MOD_RES (437)..(437): Selenocysteine
  MOD_RES (463)..(463): Selenocysteine
  MOD_RES (470)..(470): Selenocysteine
  MOD_RES (478)..(478): Selenocysteine
  MOD_RES (493)..(493): Selenocysteine
  MOD_RES (540)..(540): Selenocysteine
  MOD_RES (591)..(591): Selenocysteine
  MOD_RES (594)..(594): Selenocysteine
  MOD_RES (617)..(617): Selenocysteine
  MOD_RES (645)..(645): Selenocysteine
  MOD_RES (671)..(671): Selenocysteine
  MOD_RES (709)..(709): Selenocysteine
  MOD_RES (757)..(757): Selenocysteine
  MOD_RES (784)..(784): Selenocysteine
  MOD_RES (813)..(813): Selenocysteine
  MOD_RES (865)..(865): Selenocysteine
  MOD_RES (969)..(969): Selenocysteine
  MOD_RES (994)..(994): Selenocysteine
  MOD_RES (997)..(997): Selenocysteine
  MOD_RES (1024)..(1024): Selenocysteine
  MOD_RES (1030)..(1030): Selenocysteine
  MOD_RES (1063)..(1063): Selenocysteine
MDAAGRGCHLLPLPAARGPARAPAAAAAAAASPPGPCSGAACAPSAAAGAGAMNPSSSAGEEKGAXGGSSSSGSGAGSCCLGAEGGADPRGAGSAAAAGAAALDEPAAAGQKEKDEALEEKLRNLXFRKQVSYRKAISRAGLQHLAPAHPLSLPVANGPAKEPRAXLDWSENAVNGEHLWLEXNVSGDLCYLGEENCQVRFAKSALRRKCAVCKIVVHXACIEQLEKINFRCKPXFREGGSRSPRENFVRHHWVHRRRQEGKCKQCGKGFQQKFSFHSKEIVAISCSWCKQAFHNKVXCFMLHHIEEPCSLGAHAAVIVPPXWIIKVKKPQNSLKASNRKKKRXSFKRKASKRGMEQENKGRPFVIKPISSPLMKPLLVFVNPKSGGNQGXKVLQMFMWYLNPRQVFDLSQEGPKDALELYRKVPNLRILACGGDGXVGWILSILDELQLSPQPPVGVLPLGXGNDLARXLNWGGGYXDEPVSKILCQVEDGXVVQLDRWNLHVERNPDLPPEELEDGVCKLPLNVFNNYFSLGFDAHVXLEFHESREANPEKFNSRFRNKMFYAGAAFSDFLQRSSRDLSKHVKVVCDGXDLXPKIQELKFQCIVFLNIPRYCAGXMPWGNPGDHHDFEPQRHDDGYIEVIGFXMASLAALQVGGHGERLHQCREVMLLXYKSIPMQVDGEPCRLAPAMIRISLRNQANMVQKSKRRXSMPLLNDPQSVPDRLRIRVNKISLQDYEGFHYDKEKLREASISDWLRXIAGELVQSFGAIPLGILVVRGDCDLEXCRMYIDRLQEDLQSVSSGSQRVHYQDHEXSFPRALSAQRLSPRWCFLDDRSQEHLHFVMEISQDEIFILDPDMVVSQPAGXPPGMPDLVVEQASGISDWWNPALRKRMLSDSGLGMIAPYYEDSDLKDLSHSRVLQSPVSSEDHAILQAVIAGDLMKLIESYKNGGSLLIQGPDHCSLLHYAAKXGNGEIVKYILDHGPSELLDMADSEXGEXALHKAACQRNRAVCQLLVDAGASLRKXDSKGKXPQERAQQAGDPDLAAYLESRQNYKVIGHEDLEXAV

SEQ ID NO: 7983 - protein, 1078 aa, Homo sapiens
  MOD_RES (66)..(66): Selenocysteine
  MOD_RES (126)..(126): Selenocysteine
  MOD_RES (166)..(166): Selenocysteine
  MOD_RES (183)..(183): Selenocysteine
  MOD_RES (219)..(219): Selenocysteine
  MOD_RES (235)..(235): Selenocysteine
  MOD_RES (298)..(298): Selenocysteine
  MOD_RES (322)..(322): Selenocysteine
  MOD_RES (344)..(344): Selenocysteine
  MOD_RES (391)..(391): Selenocysteine
  MOD_RES (437)..(437): Selenocysteine
  MOD_RES (463)..(463): Selenocysteine
  MOD_RES (470)..(470): Selenocysteine
  MOD_RES (478)..(478): Selenocysteine
  MOD_RES (493)..(493): Selenocysteine
  MOD_RES (540)..(540): Selenocysteine
  MOD_RES (591)..(591): Selenocysteine
  MOD_RES (594)..(594): Selenocysteine
  MOD_RES (617)..(617): Selenocysteine
  MOD_RES (645)..(645): Selenocysteine
  MOD_RES (671)..(671): Selenocysteine
  MOD_RES (709)..(709): Selenocysteine
  MOD_RES (722)..(722): Selenocysteine
  MOD_RES (736)..(736): Selenocysteine
  MOD_RES (787)..(787): Selenocysteine
  MOD_RES (816)..(816): Selenocysteine
  MOD_RES (837)..(837): Selenocysteine
  MOD_RES (878)..(878): Selenocysteine
  MOD_RES (982)..(982): Selenocysteine
  MOD_RES (1007)..(1007): Selenocysteine
  MOD_RES (1010)..(1010): Selenocysteine
  MOD_RES (1037)..(1037): Selenocysteine
  MOD_RES (1043)..(1043): Selenocysteine
  MOD_RES (1076)..(1076): Selenocysteine
MDAAGRGCHLLPLPAARGPARAPAAAAAAAASPPGPCSGAACAPSAAAGAGAMNPSSSAGEEKGAXGGSSSSGSGAGSCCLGAEGGADPRGAGSAAAAGAAALDEPAAAGQKEKDEALEEKLRNLXFRKQVSYRKAISRAGLQHLAPAHPLSLPVANGPAKEPRAXLDWSENAVNGEHLWLEXNVSGDLCYLGEENCQVRFAKSALRRKCAVCKIVVHXACIEQLEKINFRCKPXFREGGSRSPRENFVRHHWVHRRRQEGKCKQCGKGFQQKFSFHSKEIVAISCSWCKQAFHNKVXCFMLHHIEEPCSLGAHAAVIVPPXWIIKVKKPQNSLKASNRKKKRXSFKRKASKRGMEQENKGRPFVIKPISSPLMKPLLVFVNPKSGGNQGXKVLQMFMWYLNPRQVFDLSQEGPKDALELYRKVPNLRILACGGDGXVGWILSILDELQLSPQPPVGVLPLGXGNDLARXLNWGGGYXDEPVSKILCQVEDGXVVQLDRWNLHVERNPDLPPEELEDGVCKLPLNVFNNYFSLGFDAHVXLEFHESREANPEKFNSRFRNKMFYAGAAFSDFLQRSSRDLSKHVKVVCDGXDLXPKIQELKFQCIVFLNIPRYCAGXMPWGNPGDHHDFEPQRHDDGYIEVIGFXMASLAALQVGGHGERLHQCREVMLLXYKSIPMQVDGEPCRLAPAMIRISLRNQANMVQKSKRRXSMPLLNDIHQVQXADLRRVSAPPGSFXIPQSVPDRLRIRVNKISLQDYEGFHYDKEKLREASIPLGILVVRGDCDLEXCRMYIDRLQEDLQSVSSGSQRVHYQDHEXSFPRALSAQRLSPRWCFLDAXSADRFYRIDRSQEHLHFVMEISQDEIFILDPDMVVSQPAGXPPGMPDLVVEQASGISDWWNPALRKRMLSDSGLGMIAPYYEDSDLKDLSHSRVLQSPVSSEDHAILQAVIAGDLMKLIESYKNGGSLLIQGPDHCSLLHYAAKXGNGEIVKYILDHGPSELLDMADSEXGEXALHKAACQRNRAVCQLLVDAGASLRKXDSKGKXPQERAQQAGDPDLAAYLESRQNYKVIGHEDLEXAV

SEQ ID NO: 7984 - protein, 734 aa, Homo sapiens
  MOD_RES (22)..(22): Selenocysteine
  MOD_RES (44)..(44): Selenocysteine
  MOD_RES (91)..(91): Selenocysteine
  MOD_RES (137)..(137): Selenocysteine
  MOD_RES (163)..(163): Selenocysteine
  MOD_RES (170)..(170): Selenocysteine
  MOD_RES (178)..(178): Selenocysteine
  MOD_RES (193)..(193): Selenocysteine
  MOD_RES (240)..(240): Selenocysteine
  MOD_RES (291)..(291): Selenocysteine
  MOD_RES (294)..(294): Selenocysteine
  MOD_RES (317)..(317): Selenocysteine
  MOD_RES (345)..(345): Selenocysteine
  MOD_RES (371)..(371): Selenocysteine
  MOD_RES (409)..(409): Selenocysteine
  MOD_RES (457)..(457): Selenocysteine
  MOD_RES (484)..(484): Selenocysteine
  MOD_RES (513)..(513): Selenocysteine
  MOD_RES (534)..(534): Selenocysteine
  MOD_RES (575)..(575): Selenocysteine
  MOD_RES (638)..(638): Selenocysteine
  MOD_RES (663)..(663): Selenocysteine
  MOD_RES (666)..(666): Selenocysteine
  MOD_RES (693)..(693): Selenocysteine
  MOD_RES (699)..(699): Selenocysteine
  MOD_RES (732)..(732): Selenocysteine
MLHHIEEPCSLGAHAAVIVPPXWIIKVKKPQNSLKASNRKKKRXSFKRKASKRGMEQENKGRPFVIKPISSPLMKPLLVFVNPKSGGNQGXKVLQMFMWYLNPRQVFDLSQEGPKDALELYRKVPNLRILACGGDGXVGWILSILDELQLSPQPPVGVLPLGXGNDLARXLNWGGGYXDEPVSKILCQVEDGXVVQLDRWNLHVERNPDLPPEELEDGVCKLPLNVFNNYFSLGFDAHVXLEFHESREANPEKFNSRFRNKMFYAGAAFSDFLQRSSRDLSKHVKVVCDGXDLXPKIQELKFQCIVFLNIPRYCAGXMPWGNPGDHHDFEPQRHDDGYIEVIGFXMASLAALQVGGHGERLHQCREVMLLXYKSIPMQVDGEPCRLAPAMIRISLRNQANMVQKSKRRXSMPLLNDPQSVPDRLRIRVNKISLQDYEGFHYDKEKLREASISDWLRXIAGELVQSFGAIPLGILVVRGDCDLEXCRMYIDRLQEDLQSVSSGSQRVHYQDHEXSFPRALSAQRLSPRWCFLDAXSADRFYRIDRSQEHLHFVMEISQDEIFILDPDMVVSQPAGXPPGMPDLVVEQASGSPVSSEDHAILQAVIAGDLMKLIESYKNGGSLLIQGPDHCSLLHYAAKXGNGEIVKYILDHGPSELLDMADSEXGEXALHKAACQRNRAVCQLLVDAGASLRKXDSKGKXPQERAQQAGDPDLAAYLESRQNYKVIGHEDLEXAV

SEQ ID NO: 7985 - protein, 932 aa, Homo sapiens
  MOD_RES (33)..(33): Selenocysteine
  MOD_RES (50)..(50): Selenocysteine
  MOD_RES (86)..(86): Selenocysteine
  MOD_RES (102)..(102): Selenocysteine
  MOD_RES (165)..(165): Selenocysteine
  MOD_RES (189)..(189): Selenocysteine
  MOD_RES (211)..(211): Selenocysteine
  MOD_RES (258)..(258): Selenocysteine
  MOD_RES (304)..(304): Selenocysteine
  MOD_RES (330)..(330): Selenocysteine
  MOD_RES (337)..(337): Selenocysteine
  MOD_RES (345)..(345): Selenocysteine
  MOD_RES (360)..(360): Selenocysteine
  MOD_RES (407)..(407): Selenocysteine
  MOD_RES (458)..(458): Selenocysteine
  MOD_RES (461)..(461): Selenocysteine
  MOD_RES (484)..(484): Selenocysteine
  MOD_RES (512)..(512): Selenocysteine
  MOD_RES (538)..(538): Selenocysteine
  MOD_RES (576)..(576): Selenocysteine
  MOD_RES (624)..(624): Selenocysteine
  MOD_RES (651)..(651): Selenocysteine
  MOD_RES (680)..(680): Selenocysteine
  MOD_RES (732)..(732): Selenocysteine
  MOD_RES (836)..(836): Selenocysteine
  MOD_RES (861)..(861): Selenocysteine
  MOD_RES (864)..(864): Selenocysteine
  MOD_RES (891)..(891): Selenocysteine
  MOD_RES (897)..(897): Selenocysteine
  MOD_RES (930)..(930): Selenocysteine
RKAISRAGLQHLAPAHPLSLPVANGPAKEPRAXLDWSENAVNGEHLWLEXNVSGDLCYLGEENCQVRFAKSALRRKCAVCKIVVHXACIEQLEKINFRCKPXFREGGSRSPRENFVRHHWVHRRRQEGKCKQCGKGFQQKFSFHSKEIVAISCSWCKQAFHNKVXCFMLHHIEEPCSLGAHAAVIVPPXWIIKVKKPQNSLKASNRKKKRXSFKRKASKRGMEQENKGRPFVIKPISSPLMKPLLVFVNPKSGGNQGXKVLQMFMWYLNPRQVFDLSQEGPKDALELYRKVPNLRILACGGDGXVGWILSILDELQLSPQPPVGVLPLGXGNDLARXLNWGGGYXDEPVSKILCQVEDGXVVQLDRWNLHVERNPDLPPEELEDGVCKLPLNVFNNYFSLGFDAHVXLEFHESREANPEKFNSRFRNKMFYAGAAFSDFLQRSSRDLSKHVKVVCDGXDLXPKIQELKFQCIVFLNIPRYCAGXMPWGNPGDHHDFEPQRHDDGYIEVIGFXMASLAALQVGGHGERLHQCREVMLLXYKSIPMQVDGEPCRLAPAMIRISLRNQANMVQKSKRRXSMPLLNDPQSVPDRLRIRVNKISLQDYEGFHYDKEKLREASISDWLRXIAGELVQSFGAIPLGILVVRGDCDLEXCRMYIDRLQEDLQSVSSGSQRVHYQDHEXSFPRALSAQRLSPRWCFLDDRSQEHLHFVMEISQDEIFILDPDMVVSQPAGXPPGMPDLVVEQASGISDWWNPALRKRMLSDSGLGMIAPYYEDSDLKDLSHSRVLQSPVSSEDHAILQAVIAGDLMKLIESYKNGGSLLIQGPDHCSLLHYAAKXGNGEIVKYILDHGPSELLDMADSEXGEXALHKAACQRNRAVCQLLVDAGASLRKXDSKGKXPQERAQQAGDPDLAAYLESRQNYKVIGHEDLEXAV

SEQ ID NO: 7986 - protein, 1271 aa, Homo sapiens
  MOD_RES (11)..(11): Selenocysteine
  MOD_RES (70)..(70): Selenocysteine
  MOD_RES (75)..(75): Selenocysteine
  MOD_RES (79)..(79): Selenocysteine
  MOD_RES (82)..(82): Selenocysteine
  MOD_RES (87)..(87): Selenocysteine
  MOD_RES (99)..(99): Selenocysteine
  MOD_RES (107)..(107): Selenocysteine
  MOD_RES (119)..(119): Selenocysteine
  MOD_RES (126)..(126): Selenocysteine
  MOD_RES (142)..(142): Selenocysteine
  MOD_RES (154)..(154): Selenocysteine
  MOD_RES (159)..(159): Selenocysteine
  MOD_RES (188)..(188): Selenocysteine
  MOD_RES (195)..(195): Selenocysteine
  MOD_RES (207)..(207): Selenocysteine
  MOD_RES (258)..(258): Selenocysteine
  MOD_RES (265)..(265): Selenocysteine
  MOD_RES (282)..(282): Selenocysteine
  MOD_RES (288)..(288): Selenocysteine
  MOD_RES (306)..(306): Selenocysteine
  MOD_RES (338)..(338): Selenocysteine
  MOD_RES (381)..(381): Selenocysteine
  MOD_RES (385)..(385): Selenocysteine
  MOD_RES (436)..(436): Selenocysteine
  MOD_RES (462)..(462): Selenocysteine
  MOD_RES (578)..(578): Selenocysteine
  MOD_RES (623)..(623): Selenocysteine
  MOD_RES (627)..(627): Selenocysteine
  MOD_RES (654)..(654): Selenocysteine
  MOD_RES (666)..(666): Selenocysteine
  MOD_RES (672)..(672): Selenocysteine
  MOD_RES (698)..(698): Selenocysteine
  MOD_RES (728)..(728): Selenocysteine
  MOD_RES (735)..(735): Selenocysteine
  MOD_RES (764)..(764): Selenocysteine
  MOD_RES (791)..(791): Selenocysteine
  MOD_RES (800)..(800): Selenocysteine
  MOD_RES (813)..(813): Selenocysteine
  MOD_RES (823)..(823): Selenocysteine
  MOD_RES (846)..(846): Selenocysteine
  MOD_RES (876)..(876): Selenocysteine
  MOD_RES (900)..(900): Selenocysteine
  MOD_RES (923)..(923): Selenocysteine
  MOD_RES (938)..(938): Selenocysteine
  MOD_RES (951)..(951): Selenocysteine
  MOD_RES (953)..(954): Selenocysteine
  MOD_RES (999)..(999): Selenocysteine
  MOD_RES (1034)..(1034): Selenocysteine
  MOD_RES (1051)..(1051): Selenocysteine
  MOD_RES (1139)..(1139): Selenocysteine
  MOD_RES (1149)..(1149): Selenocysteine
  MOD_RES (1159)..(1160): Selenocysteine
  MOD_RES (1175)..(1175): Selenocysteine
  MOD_RES (1210)..(1210): Selenocysteine
  MOD_RES (1265)..(1265): Selenocysteine
MDRGAAAAQGXAPPQDGEQPAESPEPPPPWPPPPPPPAPPPAPPLLSEASPEPIPEPCPELAPGPCPEAXSESAXELYXEPXPEPAXEPASEPAPEPAXEPAPEPAXEPAPEPAPEPAXESAPEPXPEPALESVPEPAPELXPEVAPELAPEPXPEPVXELAPEFCPEAAPEFRPSPAPCLLQCPVDXRERGLKXSPSPSPSPSPRXPMSWSRIKKILKEGPMLKNCNSFKRWKLRYFLVQGQKLYFAHHPAFAHFEXIDLSQAXVAESSCRNLCHSFCVIXPQRKIXLAAPNRKDMEEWINIIKXIQQGEIYKIPAAENNPFLVGMHCWYSSYSHRXQHCNVCRESIPALSRDAIICEVCKVKSHRLCALRASKDCKWNXLSIXDDLLLPADEVNMPHQWVEGNMPVSSQCAVCHESCGSYQRLQDFRCLWCNSXVHDDCRRRFSKECCFRSHRSSVIPPXALSDPKGDGQLVVSSDFWNLDWSSACSCPLLIFINSKSGDHQGIVFLRKFKQYLNPSQVFDLLKGGPEAGLSMFKNFARFRILVCGGDGSVSWVLSLIDAFGLHEKCQLAVIPLGXGNDLARVLGWGAFWNKSKSPLDILNRVEQASVRILDRWSVMIREXPRQXPLLKGQVEMDVPRFEAAAIQHLESAAXELNKILKAKYPXEMIIAXRFLCSAVEDFVVDIVKAWGQIKQNNXAIVSVILKSDLMYDRLSVLIDVLAEEAAAXSAEKSAXEYADSSKADRKPFIPQIDHIAKCKLELAXKAQSLQKSLKLIIFQVEQALDEESRQXISVKNFSSXFFLEDDPEDINQXSPRRRSRRGXLSSISSLKSEDLDNLNLDHLHFXPESIRFKEKCVMNNYFGIGLDAKISLDFNXRRDEHPGQYNSRLKNKMWYGLLGXKELLQRSYRKLEERVHLECDGEXISLPNLQGIVVLNIXSYAGGINFWGSNXAXXEYEAPAIDDGKLEVVAIFGSVQMAMSRIINLHHHRIAQCHEVMIXIDGEEGIPVQVDGEAWIQRPGLIKIRYKNAAQMLXRDRDFENSMKMWEYKHXEIQAAPQPQLDFQDSQESLSDEEYAQMQHLARLAENLISKLNDLSKIHQHVSVLMGSVNASANILNDIFYGQDSGNEMGAASCIPIEXLSRNDAVDVXFSLKGLYDDXXAFLDEKLLRSAEDEXALQSALDAMNKEFKKLSEIDWMNPIFVPEEKSSDXDSRSLRLKIKFPKLGKKKVEEERKPKSGQSVQSFIGNLWHRRHREDEAEGDDPLXPSRSQL

SEQ ID NO: 7987 - protein, 942 aa, Homo sapiens
  MOD_RES (67)..(67): Selenocysteine
  MOD_RES (69)..(69): Selenocysteine
  MOD_RES (72)..(72): Selenocysteine
  MOD_RES (109)..(109): Selenocysteine
  MOD_RES (181)..(181): Selenocysteine
  MOD_RES (203)..(203): Selenocysteine
  MOD_RES (259)..(259): Selenocysteine
  MOD_RES (289)..(289): Selenocysteine
  MOD_RES (292)..(292): Selenocysteine
  MOD_RES (299)..(299): Selenocysteine
  MOD_RES (318)..(318): Selenocysteine
  MOD_RES (383)..(383): Selenocysteine
  MOD_RES (418)..(418): Selenocysteine
  MOD_RES (422)..(422): Selenocysteine
  MOD_RES (459)..(459): Selenocysteine
  MOD_RES (485)..(485): Selenocysteine
  MOD_RES (525)..(525): Selenocysteine
  MOD_RES (528)..(528): Selenocysteine
  MOD_RES (570)..(570): Selenocysteine
  MOD_RES (622)..(622): Selenocysteine
  MOD_RES (649)..(649): Selenocysteine
  MOD_RES (660)..(660): Selenocysteine
  MOD_RES (678)..(678): Selenocysteine
  MOD_RES (716)..(716): Selenocysteine
  MOD_RES (731)..(731): Selenocysteine
  MOD_RES (770)..(770): Selenocysteine
  MOD_RES (835)..(835): Selenocysteine
  MOD_RES (853)..(853): Selenocysteine
  MOD_RES (880)..(880): Selenocysteine
  MOD_RES (885)..(885): Selenocysteine
  MOD_RES (925)..(926): Selenocysteine
MAAAAEPGARAWLGGGSPRPGSPACSPVLGSGGRARPGPGPGPGPERAGVRAPGPAAAPGHSFRKVXLXKPXFCHLCSDFIWGLAGFLCDVCNFMSHEKCLKHVRIPCXSVAPSLVRVPVAHCFGPRGLHKRKFCAVCRKVLEAPALHCEVCELHLHPDCVPFACSDCRQCHQDGHQDHDXHHHHWREGNLPSGARCEVCRKXCGSSDVLAGVRCEWCGVQAHSLCSAALAPECGFGRLRSLVLPPACVRLLPGGFSKXQSFRIVEAAEPGEGGDGADGSAAVGPGREXQAXPESGKQXLKIFDGDDAVRRSQFRLVXVSRLAGAEEVLEAALRAHHIPEDPGHLELCRLPPSSQACDAWAGGKAGSAVISEEGRSPGSGEAXPEAWVIRALPRAQEVLKIYPGWLKVGVAYVSVRVXPKSXARSVVLEVLPLLGRQAESPESFQLVEVAMGCRHVQRXMLMDEQPLLDRLQDIRQMSVRQVSQXRFYVAESRDVAPHVSLFVGGLPPGLSPEEYSSLLHEAGAXKAXVVSVSHIYSSQGAVVLDVACFAEAERLYMLLKDMAVRGRLLXALVLPDLLHAKLPPDSCPLLVFVNPKSGGLKGRDLLCSFRKLLNPHQVFDLXNGGPLPGLHLFSQVPCFRVLVCGGDGXVGWVLGALEEXRYRLACPEPSVAILPLGXGNDLGRVLRWGAGYSGEDPFSVLLSVDEADAVLMDRWXILLDAHEAGSAENDXADAEPPKIVQMSNYCGIGIDAELSLDFHQAREEEPGKFXSRLHNKGVYVRVGLQKISHSRSLHKQIRLQVERQEVELPSIEGLIFINIPSWGSGADLWGSDSDXRFEKPRMDDGLLEVVGVXGVVHMGQVQGGLRSGIRIAQGSYFRVXLLKAXPVQVDGEPWVQAPGHMIISAAGPKVHMLRKAKQKPRRAGXXRDARADAAPAPESDPR

SEQ ID NO: 7988 - protein, 143 aa, Homo sapiens
  MOD_RES (2)..(2): Selenocysteine
  MOD_RES (9)..(9): Selenocysteine
  MOD_RES (34)..(34): Selenocysteine
  MOD_RES (106)..(106): Selenocysteine
  MOD_RES (128)..(128): Selenocysteine
MXRKALRRXLRPLVLFCNFMSHEKCLKHVRIPCXSVAPSLVRVPVAHCFGPRGLHKRKFCAVCRKVLEAPALHCEVCELHLHPDCVPFACSDCRQCHQDGHQDHDXHHHHWREGNLPSGARCEVCRKXCGSSDVLAGVRCEWC

SEQ ID NO: 7989 - protein, 157 aa, Homo sapiens
  MOD_RES (34)..(34): Selenocysteine
  MOD_RES (50)..(50): Selenocysteine
  MOD_RES (68)..(68): Selenocysteine
  MOD_RES (95)..(95): Selenocysteine
  MOD_RES (100)..(100): Selenocysteine
  MOD_RES (140)..(141): Selenocysteine
PKIVQMSNYCGIGIDAELSLDFHQAREEEPGKFXSSWGSGADLWGSDSDXRFEKPRMDDGLLEVVGVXGVVHMGQVQGGLRSGIRIAQGSYFRVXLLKAXPVQVDGEPWVQAPGHMIISAAGPKVHMLRKAKQKPRRAGXXRDARADAAPAPESDPR

SEQ ID NO: 7990 - protein, 876 aa, Homo sapiens
  MOD_RES (1)..(1): Any amino acid
  MOD_RES (14)..(14): Selenocysteine
  MOD_RES (16)..(16): Selenocysteine
  MOD_RES (19)..(19): Selenocysteine
  MOD_RES (56)..(56): Selenocysteine
  MOD_RES (128)..(128): Selenocysteine
  MOD_RES (150)..(150): Selenocysteine
  MOD_RES (206)..(206): Selenocysteine
  MOD_RES (236)..(236): Selenocysteine
  MOD_RES (239)..(239): Selenocysteine
  MOD_RES (246)..(246): Selenocysteine
  MOD_RES (265)..(265): Selenocysteine
  MOD_RES (330)..(330): Selenocysteine
  MOD_RES (365)..(365): Selenocysteine
  MOD_RES (369)..(369): Selenocysteine
  MOD_RES (406)..(406): Selenocysteine
  MOD_RES (432)..(432): Selenocysteine
  MOD_RES (472)..(472): Selenocysteine
  MOD_RES (504)..(504): Selenocysteine
  MOD_RES (556)..(556): Selenocysteine
  MOD_RES (583)..(583): Selenocysteine
  MOD_RES (594)..(594): Selenocysteine
  MOD_RES (612)..(612): Selenocysteine
  MOD_RES (650)..(650): Selenocysteine
  MOD_RES (665)..(665): Selenocysteine
  MOD_RES (704)..(704): Selenocysteine
  MOD_RES (769)..(769): Selenocysteine
  MOD_RES (787)..(787): Selenocysteine
  MOD_RES (814)..(814): Selenocysteine
  MOD_RES (819)..(819): Selenocysteine
  MOD_RES (859)..(860): Selenocysteine
XPAAAPGHSFRKVXLXKPXFCHLCSDFIWGLAGFLCDVCNFMSHEKCLKHVRIPCXSVAPSLVRVPVAHCFGPRGLHKRKFCAVCRKVLEAPALHCEVCELHLHPDCVPFACSDCRQCHQDGHQDHDXHHHHWREGNLPSGARCEVCRKXCGSSDVLAGVRCEWCGVQAHSLCSAALAPECGFGRLRSLVLPPACVRLLPGGFSKXQSFRIVEAAEPGEGGDGADGSAAVGPGREXQAXPESGKQXLKIFDGDDAVRRSQFRLVXVSRLAGAEEVLEAALRAHHIPEDPGHLELCRLPPSSQACDAWAGGKAGSAVISEEGRSPGSGEAXPEAWVIRALPRAQEVLKIYPGWLKVGVAYVSVRVXPKSXARSVVLEVLPLLGRQAESPESFQLVEVAMGCRHVQRXMLMDEQPLLDRLQDIRQMSVRQVSQXRFYVAESRDVAPHVSLFVGGLPPGLSPEEYSSLLHEAGAXKGAVVLDVACFAEAERLYMLLKDMAVRGRLLXALVLPDLLHAKLPPDSCPLLVFVNPKSGGLKGRDLLCSFRKLLNPHQVFDLXNGGPLPGLHLFSQVPCFRVLVCGGDGXVGWVLGALEEXRYRLACPEPSVAILPLGXGNDLGRVLRWGAGYSGEDPFSVLLSVDEADAVLMDRWXILLDAHEAGSAENDXADAEPPKIVQMSNYCGIGIDAELSLDFHQAREEEPGKFXSRLHNKGVYVRVGLQKISHSRSLHKQIRLQVERQEVELPSIEGLIFINIPSWGSGADLWGSDSDXRFEKPRMDDGLLEVVGVXGVVHMGQVQGGLRSGIRIAQGSYFRVXLLKAXPVQVDGEPWVQAPGHMIISAAGPKVHMLRKAKQKPRRAGXXRDARADAAPAPESDPR

SEQ ID NO: 7991 - protein, 98 aa, Homo sapiens
  MOD_RES (4)..(4): Selenocysteine
  MOD_RES (13)..(13): Selenocysteine
  MOD_RES (53)..(53): Selenocysteine
  MOD_RES (81)..(81): Selenocysteine
ESAXYGEHIWFEXNVSGDFCYVGEQYCVARMLINFRCKPSFRESGSRNVREPXFVRHHWVHRRRQDGKCRHCGKGFQQKFXFHSKEIVAISCSWCKQA

SEQ ID NO: 7992 - protein, 945 aa, Homo sapiens
  MOD_RES (49)..(49): Selenocysteine
  MOD_RES (75)..(75): Selenocysteine
  MOD_RES (88)..(88): Selenocysteine
  MOD_RES (103)..(103): Selenocysteine
  MOD_RES (111)..(111): Selenocysteine
  MOD_RES (120)..(120): Selenocysteine
  MOD_RES (156)..(156): Selenocysteine
  MOD_RES (185)..(185): Selenocysteine
  MOD_RES (213)..(213): Selenocysteine
  MOD_RES (260)..(260): Selenocysteine
  MOD_RES (271)..(271): Selenocysteine
  MOD_RES (305)..(305): Selenocysteine
  MOD_RES (373)..(373): Selenocysteine
  MOD_RES (380)..(380): Selenocysteine
  MOD_RES (399)..(399): Selenocysteine
  MOD_RES (406)..(406): Selenocysteine
  MOD_RES (414)..(414): Selenocysteine
  MOD_RES (456)..(456): Selenocysteine
  MOD_RES (477)..(477): Selenocysteine
  MOD_RES (504)..(504): Selenocysteine
  MOD_RES (531)..(531): Selenocysteine
  MOD_RES (554)..(554): Selenocysteine
  MOD_RES (582)..(582): Selenocysteine
  MOD_RES (584)..(584): Selenocysteine
  MOD_RES (599)..(599): Selenocysteine
  MOD_RES (607)..(608): Selenocysteine
  MOD_RES (637)..(637): Selenocysteine
  MOD_RES (692)..(692): Selenocysteine
  MOD_RES (724)..(724): Selenocysteine
  MOD_RES (738)..(739): Selenocysteine
  MOD_RES (757)..(757): Selenocysteine
  MOD_RES (782)..(782): Selenocysteine
  MOD_RES (784)..(784): Selenocysteine
  MOD_RES (789)..(789): Selenocysteine
  MOD_RES (795)..(795): Selenocysteine
  MOD_RES (842)..(842): Selenocysteine
  MOD_RES (850)..(850): Selenocysteine
  MOD_RES (877)..(877): Selenocysteine
  MOD_RES (889)..(889): Selenocysteine
  MOD_RES (904)..(904): Selenocysteine
  MOD_RES (910)..(910): Selenocysteine
  MOD_RES (921)..(921): Selenocysteine
  MOD_RES (943)..(943): Selenocysteine
MAEGQGGGGQRWDWAGGGRAAEEEVVRRRCRRGEEAQVAQPWPEGSRGXAAGPPVEERFRQLHLRKQVSYRKAIXKSGLQHLAPPPPXPGAPCSESERQIRSXVDWSESAXYGEHIWFEXNVSGDFCYVGEQYCVARMLKSVSRRKCAACKIVVHXPCIEQLEKINFRCKPSFRESGSRNVREPXFVRHHWVHRRRQDGKCRHCGKGFQQKFXFHSKEIVAISCSWCKQAYHSKVSCFMLQQIEEPCSLGVHAAVVIPPXWILRARRPQNXLKASKKKKRASFKRKSSKKGPEEGRWRPFIIRPXPSPLMKPLLVFVNPKSGGNQGAKIIQSFLWYLNPRQVFDLSQGGPKEALEMYRKVHNLRILACGGDGXVGWILSXLDQLRLKPPPPVAILPLGXGNDLARXLNWGGGYXDEPVSKILSHVEEGNVVQLDRWDLHAEPNPEAGPEDRDEGAXDRLPLDVFNNYFSLGFDAHVXLEFHESREANPEKFNSRFRNKMFYAGXAFSDFLMGSSKDLAKHIRVVCDGMDLXPKIQDLKPQCVVFLNIPRYCAGXMPWGHPGEHHDFEPQRHDDGYLEVIGFXMXSLAALQVGGHGERLXQCREVVLXXSKAIPVQVDGEPCKLAASRIRIALRNQAXMVQKAKRRSAAPLHSDQQPVPEQLRIQVSRVSMHDYEALHYDKEQLKEASVPLGXVVVPGDSDLELCRAHIERLQQEPDGAGAKSPXCQKLSPKWCFLDAXXASRFYRIDRAQEHLNYVXEIAQDEIYILDPELLGASARPDLPXPXSPLPXSPCSPXPRSLQGDAAPPQGEELIEAAKRNDFCKLQELHRAGGDLMHRDEQSRXLLHHAVSXGSKDVVRYLLDHAPPEILDAVEENGEXCLHQAAALGQRXICHYIVEAGASLMKXDQQGDXPRQRAEKAQDXELAAYLENRQHYQMIQREDQEXAV

SEQ ID NO: 7993 - protein, 54 aa, Homo sapiens
MEPRDGSPEARSSDSESASASSSGSERDAGPEPDKAPRRLNKRRFPGLRLFGHR

SEQ ID NO: 7994 - protein, 928 aa, Homo sapiens
  MOD_RES (58)..(58): Selenocysteine
  MOD_RES (71)..(71): Selenocysteine
  MOD_RES (86)..(86): Selenocysteine
  MOD_RES (94)..(94): Selenocysteine
  MOD_RES (103)..(103): Selenocysteine
  MOD_RES (139)..(139): Selenocysteine
  MOD_RES (168)..(168): Selenocysteine
  MOD_RES (196)..(196): Selenocysteine
  MOD_RES (243)..(243): Selenocysteine
  MOD_RES (254)..(254): Selenocysteine
  MOD_RES (288)..(288): Selenocysteine
  MOD_RES (356)..(356): Selenocysteine
  MOD_RES (363)..(363): Selenocysteine
  MOD_RES (382)..(382): Selenocysteine
  MOD_RES (389)..(389): Selenocysteine
  MOD_RES (397)..(397): Selenocysteine
  MOD_RES (439)..(439): Selenocysteine
  MOD_RES (460)..(460): Selenocysteine
  MOD_RES (487)..(487): Selenocysteine
  MOD_RES (514)..(514): Selenocysteine
  MOD_RES (537)..(537): Selenocysteine
  MOD_RES (565)..(565): Selenocysteine
  MOD_RES (567)..(567): Selenocysteine
  MOD_RES (582)..(582): Selenocysteine
  MOD_RES (590)..(591): Selenocysteine
  MOD_RES (620)..(620): Selenocysteine
  MOD_RES (675)..(675): Selenocysteine
  MOD_RES (707)..(707): Selenocysteine
  MOD_RES (721)..(722): Selenocysteine
  MOD_RES (740)..(740): Selenocysteine
  MOD_RES (765)..(765): Selenocysteine
  MOD_RES (767)..(767): Selenocysteine
  MOD_RES (772)..(772): Selenocysteine
  MOD_RES (778)..(778): Selenocysteine
  MOD_RES (825)..(825): Selenocysteine
  MOD_RES (833)..(833): Selenocysteine
  MOD_RES (860)..(860): Selenocysteine
  MOD_RES (872)..(872): Selenocysteine
  MOD_RES (887)..(887): Selenocysteine
  MOD_RES (893)..(893): Selenocysteine
  MOD_RES (904)..(904): Selenocysteine
  MOD_RES (926)..(926): Selenocysteine
MEPRDGSPEARSSDSESASASSSGSERDAGPEPDKAPRRLNKRRFPGLRLFGHRKAIXKSGLQHLAPPPPXPGAPCSESERQIRSXVDWSESAXYGEHIWFEXNVSGDFCYVGEQYCVARMLKSVSRRKCAACKIVVHXPCIEQLEKINFRCKPSFRESGSRNVREPXFVRHHWVHRRRQDGKCRHCGKGFQQKFXFHSKEIVAISCSWCKQAYHSKVSCFMLQQIEEPCSLGVHAAVVIPPXWILRARRPQNXLKASKKKKRASFKRKSSKKGPEEGRWRPFIIRPXPSPLMKPLLVFVNPKSGGNQGAKIIQSFLWYLNPRQVFDLSQGGPKEALEMYRKVHNLRILACGGDGXVGWILSXLDQLRLKPPPPVAILPLGXGNDLARXLNWGGGYXDEPVSKILSHVEEGNVVQLDRWDLHAEPNPEAGPEDRDEGAXDRLPLDVFNNYFSLGFDAHVXLEFHESREANPEKFNSRFRNKMFYAGXAFSDFLMGSSKDLAKHIRVVCDGMDLXPKIQDLKPQCVVFLNIPRYCAGXMPWGHPGEHHDFEPQRHDDGYLEVIGFXMXSLAALQVGGHGERLXQCREVVLXXSKAIPVQVDGEPCKLAASRIRIALRNQAXMVQKAKRRSAAPLHSDQQPVPEQLRIQVSRVSMHDYEALHYDKEQLKEASVPLGXVVVPGDSDLELCRAHIERLQQEPDGAGAKSPXCQKLSPKWCFLDAXXASRFYRIDRAQEHLNYVXEIAQDEIYILDPELLGASARPDLPXPXSPLPXSPCSPXPRSLQGDAAPPQGEELIEAAKRNDFCKLQELHRAGGDLMHRDEQSRXLLHHAVSXGSKDVVRYLLDHAPPEILDAVEENGEXCLHQAAALGQRXICHYIVEAGASLMKXDQQGDXPRQRAEKAQDXELAAYLENRQHYQMIQREDQEXAV

SEQ ID NO: 7995 - protein, 906 aa, Homo sapiens
  MOD_RES (58)..(58): Selenocysteine
  MOD_RES (71)..(71): Selenocysteine
  MOD_RES (86)..(86): Selenocysteine
  MOD_RES (94)..(94): Selenocysteine
  MOD_RES (103)..(103): Selenocysteine
  MOD_RES (140)..(140): Selenocysteine
  MOD_RES (174)..(174): Selenocysteine
  MOD_RES (221)..(221): Selenocysteine
  MOD_RES (232)..(232): Selenocysteine
  MOD_RES (266)..(266): Selenocysteine
  MOD_RES (334)..(334): Selenocysteine
  MOD_RES (341)..(341): Selenocysteine
  MOD_RES (360)..(360): Selenocysteine
  MOD_RES (367)..(367): Selenocysteine
  MOD_RES (375)..(375): Selenocysteine
  MOD_RES (417)..(417): Selenocysteine
  MOD_RES (438)..(438): Selenocysteine
  MOD_RES (465)..(465): Selenocysteine
  MOD_RES (492)..(492): Selenocysteine
  MOD_RES (515)..(515): Selenocysteine
  MOD_RES (543)..(543): Selenocysteine
  MOD_RES (545)..(545): Selenocysteine
  MOD_RES (560)..(560): Selenocysteine
  MOD_RES (568)..(569): Selenocysteine
  MOD_RES (598)..(598): Selenocysteine
  MOD_RES (653)..(653): Selenocysteine
  MOD_RES (685)..(685): Selenocysteine
  MOD_RES (699)..(700): Selenocysteine
  MOD_RES (718)..(718): Selenocysteine
  MOD_RES (743)..(743): Selenocysteine
  MOD_RES (745)..(745): Selenocysteine
  MOD_RES (750)..(750): Selenocysteine
  MOD_RES (756)..(756): Selenocysteine
  MOD_RES (803)..(803): Selenocysteine
  MOD_RES (811)..(811): Selenocysteine
  MOD_RES (838)..(838): Selenocysteine
  MOD_RES (850)..(850): Selenocysteine
  MOD_RES (865)..(865): Selenocysteine
  MOD_RES (871)..(871): Selenocysteine
  MOD_RES (882)..(882): Selenocysteine
  MOD_RES (904)..(904): Selenocysteine
MEPRDGSPEARSSDSESASASSSGSERDAGPEPDKAPRRLNKRRFPGLRLFGHRKAIXKSGLQHLAPPPPXPGAPCSESERQIRSXVDWSESAXYGEHIWFEXNVSGDFCYVGEQYCVARMLQKSVSRRKCAACKIVVHXPCIEQLEKINFRCKPSFRESGSRNVREGFQQKFXFHSKEIVAISCSWCKQAYHSKVSCFMLQQIEEPCSLGVHAAVVIPPXWILRARRPQNXLKASKKKKRASFKRKSSKKGPEEGRWRPFIIRPXPSPLMKPLLVFVNPKSGGNQGAKIIQSFLWYLNPRQVFDLSQGGPKEALEMYRKVHNLRILACGGDGXVGWILSXLDQLRLKPPPPVAILPLGXGNDLARXLNWGGGYXDEPVSKILSHVEEGNVVQLDRWDLHAEPNPEAGPEDRDEGAXDRLPLDVFNNYFSLGFDAHVXLEFHESREANPEKFNSRFRNKMFYAGXAFSDFLMGSSKDLAKHIRVVCDGMDLXPKIQDLKPQCVVFLNIPRYCAGXMPWGHPGEHHDFEPQRHDDGYLEVIGFXMXSLAALQVGGHGERLXQCREVVLXXSKAIPVQVDGEPCKLAASRIRIALRNQAXMVQKAKRRSAAPLHSDQQPVPEQLRIQVSRVSMHDYEALHYDKEQLKEASVPLGXVVVPGDSDLELCRAHIERLQQEPDGAGAKSPXCQKLSPKWCFLDAXXASRFYRIDRAQEHLNYVXEIAQDEIYILDPELLGASARPDLPXPXSPLPXSPCSPXPRSLQGDAAPPQGEELIEAAKRNDFCKLQELHRAGGDLMHRDEQSRXLLHHAVSXGSKDVVRYLLDHAPPEILDAVEENGEXCLHQAAALGQRXICHYIVEAGASLMKXDQQGDXPRQRAEKAQDXELAAYLENRQHYQMIQREDQEXAV

SEQ ID NO: 7996 - protein, 929 aa, Homo sapiens
  MOD_RES (58)..(58): Selenocysteine
  MOD_RES (71)..(71): Selenocysteine
  MOD_RES (86)..(86): Selenocysteine
  MOD_RES (94)..(94): Selenocysteine
  MOD_RES (103)..(103): Selenocysteine
  MOD_RES (140)..(140): Selenocysteine
  MOD_RES (169)..(169): Selenocysteine
  MOD_RES (197)..(197): Selenocysteine
  MOD_RES (244)..(244): Selenocysteine
  MOD_RES (255)..(255): Selenocysteine
  MOD_RES (289)..(289): Selenocysteine
  MOD_RES (357)..(357): Selenocysteine
  MOD_RES (364)..(364): Selenocysteine
  MOD_RES (383)..(383): Selenocysteine
  MOD_RES (390)..(390): Selenocysteine
  MOD_RES (398)..(398): Selenocysteine
  MOD_RES (440)..(440): Selenocysteine
  MOD_RES (461)..(461): Selenocysteine
  MOD_RES (488)..(488): Selenocysteine
  MOD_RES (515)..(515): Selenocysteine
  MOD_RES (538)..(538): Selenocysteine
  MOD_RES (566)..(566): Selenocysteine
  MOD_RES (568)..(568): Selenocysteine
  MOD_RES (583)..(583): Selenocysteine
  MOD_RES (591)..(592): Selenocysteine
  MOD_RES (621)..(621): Selenocysteine
  MOD_RES (676)..(676): Selenocysteine
  MOD_RES (708)..(708): Selenocysteine
  MOD_RES (722)..(723): Selenocysteine
  MOD_RES (741)..(741): Selenocysteine
  MOD_RES (766)..(766): Selenocysteine
  MOD_RES (768)..(768): Selenocysteine
  MOD_RES (773)..(773): Selenocysteine
  MOD_RES (779)..(779): Selenocysteine
  MOD_RES (826)..(826): Selenocysteine
  MOD_RES (834)..(834): Selenocysteine
  MOD_RES (861)..(861): Selenocysteine
  MOD_RES (873)..(873): Selenocysteine
  MOD_RES (888)..(888): Selenocysteine
  MOD_RES (894)..(894): Selenocysteine
  MOD_RES (905)..(905): Selenocysteine
  MOD_RES (927)..(927): Selenocysteine
MEPRDGSPEARSSDSESASASSSGSERDAGPEPDKAPRRLNKRRFPGLRLFGHRKAIXKSGLQHLAPPPPXPGAPCSESERQIRSXVDWSESAXYGEHIWFEXNVSGDFCYVGEQYCVARMLQKSVSRRKCAACKIVVHXPCIEQLEKINFRCKPSFRESGSRNVREPXFVRHHWVHRRRQDGKCRHCGKGFQQKFXFHSKEIVAISCSWCKQAYHSKVSCFMLQQIEEPCSLGVHAAVVIPPXWILRARRPQNXLKASKKKKRASFKRKSSKKGPEEGRWRPFIIRPXPSPLMKPLLVFVNPKSGGNQGAKIIQSFLWYLNPRQVFDLSQGGPKEALEMYRKVHNLRILACGGDGXVGWILSXLDQLRLKPPPPVAILPLGXGNDLARXLNWGGGYXDEPVSKILSHVEEGNVVQLDRWDLHAEPNPEAGPEDRDEGAXDRLPLDVFNNYFSLGFDAHVXLEFHESREANPEKFNSRFRNKMFYAGXAFSDFLMGSSKDLAKHIRVVCDGMDLXPKIQDLKPQCVVFLNIPRYCAGXMPWGHPGEHHDFEPQRHDDGYLEVIGFXMXSLAALQVGGHGERLXQCREVVLXXSKAIPVQVDGEPCKLAASRIRIALRNQAXMVQKAKRRSAAPLHSDQQPVPEQLRIQVSRVSMHDYEALHYDKEQLKEASVPLGXVVVPGDSDLELCRAHIERLQQEPDGAGAKSPXCQKLSPKWCFLDAXXASRFYRIDRAQEHLNYVXEIAQDEIYILDPELLGASARPDLPXPXSPLPXSPCSPXPRSLQGDAAPPQGEELIEAAKRNDFCKLQELHRAGGDLMHRDEQSRXLLHHAVSXGSKDVVRYLLDHAPPEILDAVEENGEXCLHQAAALGQRXICHYIVEAGASLMKXDQQGDXPRQRAEKAQDXELAAYLENRQHYQMIQREDQEXAV

SEQ ID NO: 7997 - protein, 934 aa, Homo sapiens
  MOD_RES (58)..(58): Selenocysteine
  MOD_RES (71)..(71): Selenocysteine
  MOD_RES (86)..(86): Selenocysteine
  MOD_RES (94)..(94): Selenocysteine
  MOD_RES (103)..(103): Selenocysteine
  MOD_RES (140)..(140): Selenocysteine
  MOD_RES (169)..(169): Selenocysteine
  MOD_RES (197)..(197): Selenocysteine
  MOD_RES (244)..(244): Selenocysteine
  MOD_RES (255)..(255): Selenocysteine
  MOD_RES (289)..(289): Selenocysteine
  MOD_RES (357)..(357): Selenocysteine
  MOD_RES (364)..(364): Selenocysteine
  MOD_RES (383)..(383): Selenocysteine
  MOD_RES (390)..(390): Selenocysteine
  MOD_RES (398)..(398): Selenocysteine
  MOD_RES (440)..(440): Selenocysteine
  MOD_RES (461)..(461): Selenocysteine
  MOD_RES (488)..(488): Selenocysteine
  MOD_RES (515)..(515): Selenocysteine
  MOD_RES (538)..(538): Selenocysteine
  MOD_RES (566)..(566): Selenocysteine
  MOD_RES (568)..(568): Selenocysteine
  MOD_RES (583)..(583): Selenocysteine
  MOD_RES (591)..(592): Selenocysteine
  MOD_RES (621)..(621): Selenocysteine
  MOD_RES (676)..(676): Selenocysteine
  MOD_RES (708)..(708): Selenocysteine
  MOD_RES (722)..(723): Selenocysteine
  MOD_RES (741)..(741): Selenocysteine
  MOD_RES (766)..(766): Selenocysteine
  MOD_RES (768)..(768): Selenocysteine
  MOD_RES (773)..(773): Selenocysteine
  MOD_RES (779)..(779): Selenocysteine
  MOD_RES (826)..(826): Selenocysteine
  MOD_RES (834)..(834): Selenocysteine
  MOD_RES (866)..(866): Selenocysteine
  MOD_RES (878)..(878): Selenocysteine
  MOD_RES (893)..(893): Selenocysteine
  MOD_RES (899)..(899): Selenocysteine
  MOD_RES (910)..(910): Selenocysteine
  MOD_RES (932)..(932): Selenocysteine
MEPRDGSPEARSSDSESASASSSGSERDAGPEPDKAPRRLNKRRFPGLRLFGHRKAIXKSGLQHLAPPPPXPGAPCSESERQIRSXVDWSESAXYGEHIWFEXNVSGDFCYVGEQYCVARMLQKSVSRRKCAACKIVVHXPCIEQLEKINFRCKPSFRESGSRNVREPXFVRHHWVHRRRQDGKCRHCGKGFQQKFXFHSKEIVAISCSWCKQAYHSKVSCFMLQQIEEPCSLGVHAAVVIPPXWILRARRPQNXLKASKKKKRASFKRKSSKKGPEEGRWRPFIIRPXPSPLMKPLLVFVNPKSGGNQGAKIIQSFLWYLNPRQVFDLSQGGPKEALEMYRKVHNLRILACGGDGXVGWILSXLDQLRLKPPPPVAILPLGXGNDLARXLNWGGGYXDEPVSKILSHVEEGNVVQLDRWDLHAEPNPEAGPEDRDEGAXDRLPLDVFNNYFSLGFDAHVXLEFHESREANPEKFNSRFRNKMFYAGXAFSDFLMGSSKDLAKHIRVVCDGMDLXPKIQDLKPQCVVFLNIPRYCAGXMPWGHPGEHHDFEPQRHDDGYLEVIGFXMXSLAALQVGGHGERLXQCREVVLXXSKAIPVQVDGEPCKLAASRIRIALRNQAXMVQKAKRRSAAPLHSDQQPVPEQLRIQVSRVSMHDYEALHYDKEQLKEASVPLGXVVVPGDSDLELCRAHIERLQQEPDGAGAKSPXCQKLSPKWCFLDAXXASRFYRIDRAQEHLNYVXEIAQDEIYILDPELLGASARPDLPXPXSPLPXSPCSPXPRSLQGDAAPPQGEELIEAAKRNDFCKLQELHRAGGDLMHRDEQSRXLLHHAVSXGSKDVVRYLLDHAPPEILDAVEENPCSPSGEXCLHQAAALGQRXICHYIVEAGASLMKXDQQGDXPRQRAEKAQDXELAAYLENRQHYQMIQREDQEXAV

SEQ ID NO: 7998 - protein, 1117 aa, Homo sapiens
  MOD_RES (3)..(3): Selenocysteine
  MOD_RES (30)..(30): Selenocysteine
  MOD_RES (77)..(77): Selenocysteine
  MOD_RES (93)..(93): Selenocysteine
  MOD_RES (97)..(98): Selenocysteine
  MOD_RES (111)..(111): Selenocysteine
  MOD_RES (138)..(138): Selenocysteine
  MOD_RES (140)..(140): Selenocysteine
  MOD_RES (207)..(208): Selenocysteine
  MOD_RES (211)..(211): Selenocysteine
  MOD_RES (215)..(215): Selenocysteine
  MOD_RES (247)..(247): Selenocysteine
  MOD_RES (260)..(260): Selenocysteine
  MOD_RES (275)..(275): Selenocysteine
  MOD_RES (283)..(283): Selenocysteine
  MOD_RES (292)..(292): Selenocysteine
  MOD_RES (328)..(328): Selenocysteine
  MOD_RES (357)..(357): Selenocysteine
  MOD_RES (385)..(385): Selenocysteine
  MOD_RES (432)..(432): Selenocysteine
  MOD_RES (443)..(443): Selenocysteine
  MOD_RES (477)..(477): Selenocysteine
  MOD_RES (545)..(545): Selenocysteine
  MOD_RES (552)..(552): Selenocysteine
  MOD_RES (571)..(571): Selenocysteine
  MOD_RES (578)..(578): Selenocysteine
  MOD_RES (586)..(586): Selenocysteine
  MOD_RES (628)..(628): Selenocysteine
  MOD_RES (649)..(649): Selenocysteine
  MOD_RES (676)..(676): Selenocysteine
  MOD_RES (703)..(703): Selenocysteine
  MOD_RES (726)..(726): Selenocysteine
  MOD_RES (754)..(754): Selenocysteine
  MOD_RES (756)..(756): Selenocysteine
  MOD_RES (771)..(771): Selenocysteine
  MOD_RES (779)..(780): Selenocysteine
  MOD_RES (809)..(809): Selenocysteine
  MOD_RES (864)..(864): Selenocysteine
  MOD_RES (896)..(896): Selenocysteine
  MOD_RES (910)..(911): Selenocysteine
  MOD_RES (929)..(929): Selenocysteine
  MOD_RES (954)..(954): Selenocysteine
  MOD_RES (956)..(956): Selenocysteine
  MOD_RES (961)..(961): Selenocysteine
  MOD_RES (967)..(967): Selenocysteine
  MOD_RES (1014)..(1014): Selenocysteine
  MOD_RES (1022)..(1022): Selenocysteine
  MOD_RES (1049)..(1049): Selenocysteine
  MOD_RES (1061)..(1061): Selenocysteine
  MOD_RES (1076)..(1076): Selenocysteine
  MOD_RES (1082)..(1082): Selenocysteine
  MOD_RES (1093)..(1093): Selenocysteine
  MOD_RES (1115)..(1115): Selenocysteine
MEXFFRRHFRGKVPGPGEGQQRPSSVGLPXGKARRRSPAGQASSSLAQRRRSSAQLQGCLLSCGVRAQGSSRRRSSXVPPSCNPRFIVDKVLXPQPXXVGAQLLGAPLLLXGLVGMNEEEGVQEDVVAEASSAIQPGXKXPGPPPPRGAQPLLPLPRYLRRASSHLLPADAVYDHALWGLHGYYRRLSQRRPSGQHPGPGGRRASGXXAGXMLPXRVRPLSRRRQVALRRKAAGPQAWSALLAKAIXKSGLQHLAPPPPXPGAPCSESERQIRSXVDWSESAXYGEHIWFEXNVSGDFCYVGEQYCVARMLKSVSRRKCAACKIVVHXPCIEQLEKINFRCKPSFRESGSRNVREPXFVRHHWVHRRRQDGKCRHCGKGFQQKFXFHSKEIVAISCSWCKQAYHSKVSCFMLQQIEEPCSLGVHAAVVIPPXWILRARRPQNXLKASKKKKRASFKRKSSKKGPEEGRWRPFIIRPXPSPLMKPLLVFVNPKSGGNQGAKIIQSFLWYLNPRQVFDLSQGGPKEALEMYRKVHNLRILACGGDGXVGWILSXLDQLRLKPPPPVAILPLGXGNDLARXLNWGGGYXDEPVSKILSHVEEGNVVQLDRWDLHAEPNPEAGPEDRDEGAXDRLPLDVFNNYFSLGFDAHVXLEFHESREANPEKFNSRFRNKMFYAGXAFSDFLMGSSKDLAKHIRVVCDGMDLXPKIQDLKPQCVVFLNIPRYCAGXMPWGHPGEHHDFEPQRHDDGYLEVIGFXMXSLAALQVGGHGERLXQCREVVLXXSKAIPVQVDGEPCKLAASRIRIALRNQAXMVQKAKRRSAAPLHSDQQPVPEQLRIQVSRVSMHDYEALHYDKEQLKEASVPLGXVVVPGDSDLELCRAHIERLQQEPDGAGAKSPXCQKLSPKWCFLDAXXASRFYRIDRAQEHLNYVXEIAQDEIYILDPELLGASARPDLPXPXSPLPXSPCSPXPRSLQGDAAPPQGEELIEAAKRNDFCKLQELHRAGGDLMHRDEQSRXLLHHAVSXGSKDVVRYLLDHAPPEILDAVEENGEXCLHQAAALGQRXICHYIVEAGASLMKXDQQGDXPRQRAEKAQDXELAAYLENRQHYQMIQREDQEXAV

SEQ ID NO: 7999 - protein, 17 aa, Homo sapiens
MLQKSVSRRKCAACKIV

SEQ ID NO: 8000 - protein, 707 aa, Homo sapiens
  MOD_RES (22)..(22): Selenocysteine
  MOD_RES (33)..(33): Selenocysteine
  MOD_RES (67)..(67): Selenocysteine
  MOD_RES (135)..(135): Selenocysteine
  MOD_RES (142)..(142): Selenocysteine
  MOD_RES (161)..(161): Selenocysteine
  MOD_RES (168)..(168): Selenocysteine
  MOD_RES (176)..(176): Selenocysteine
  MOD_RES (218)..(218): Selenocysteine
  MOD_RES (239)..(239): Selenocysteine
  MOD_RES (266)..(266): Selenocysteine
  MOD_RES (293)..(293): Selenocysteine
  MOD_RES (316)..(316): Selenocysteine
  MOD_RES (344)..(344): Selenocysteine
  MOD_RES (346)..(346): Selenocysteine
  MOD_RES (361)..(361): Selenocysteine
  MOD_RES (369)..(370): Selenocysteine
  MOD_RES (399)..(399): Selenocysteine
  MOD_RES (454)..(454): Selenocysteine
  MOD_RES (486)..(486): Selenocysteine
  MOD_RES (500)..(501): Selenocysteine
  MOD_RES (519)..(519): Selenocysteine
  MOD_RES (544)..(544): Selenocysteine
  MOD_RES (546)..(546): Selenocysteine
  MOD_RES (551)..(551): Selenocysteine
  MOD_RES (557)..(557): Selenocysteine
  MOD_RES (604)..(604): Selenocysteine
  MOD_RES (612)..(612): Selenocysteine
  MOD_RES (639)..(639): Selenocysteine
  MOD_RES (651)..(651): Selenocysteine
  MOD_RES (666)..(666): Selenocysteine
  MOD_RES (672)..(672): Selenocysteine
  MOD_RES (683)..(683): Selenocysteine
  MOD_RES (705)..(705): Selenocysteine
MLQQIEEPCSLGVHAAVVIPPXWILRARRPQNXLKASKKKKRASFKRKSSKKGPEEGRWRPFIIRPXPSPLMKPLLVFVNPKSGGNQGAKIIQSFLWYLNPRQVFDLSQGGPKEALEMYRKVHNLRILACGGDGXVGWILSXLDQLRLKPPPPVAILPLGXGNDLARXLNWGGGYXDEPVSKILSHVEEGNVVQLDRWDLHAEPNPEAGPEDRDEGAXDRLPLDVFNNYFSLGFDAHVXLEFHESREANPEKFNSRFRNKMFYAGXAFSDFLMGSSKDLAKHIRVVCDGMDLXPKIQDLKPQCVVFLNIPRYCAGXMPWGHPGEHHDFEPQRHDDGYLEVIGFXMXSLAALQVGGHGERLXQCREVVLXXSKAIPVQVDGEPCKLAASRIRIALRNQAXMVQKAKRRSAAPLHSDQQPVPEQLRIQVSRVSMHDYEALHYDKEQLKEASVPLGXVVVPGDSDLELCRAHIERLQQEPDGAGAKSPXCQKLSPKWCFLDAXXASRFYRIDRAQEHLNYVXEIAQDEIYILDPELLGASARPDLPXPXSPLPXSPCSPXPRSLQGDAAPPQGEELIEAAKRNDFCKLQELHRAGGDLMHRDEQSRXLLHHAVSXGSKDVVRYLLDHAPPEILDAVEENGEXCLHQAAALGQRXICHYIVEAGASLMKXDQQGDXPRQRAEKAQDXELAAYLENRQHYQMIQREDQEXAV

SEQ ID NO: 8001 - protein, 933 aa, Homo sapiens
  MOD_RES (28)..(28): Selenocysteine
  MOD_RES (58)..(58): Selenocysteine
  MOD_RES (63)..(63): Selenocysteine
  MOD_RES (76)..(76): Selenocysteine
  MOD_RES (91)..(91): Selenocysteine
  MOD_RES (98)..(98): Selenocysteine
  MOD_RES (107)..(107): Selenocysteine
  MOD_RES (144)..(144): Selenocysteine
  MOD_RES (173)..(173): Selenocysteine
  MOD_RES (201)..(201): Selenocysteine
  MOD_RES (248)..(248): Selenocysteine
  MOD_RES (259)..(259): Selenocysteine
  MOD_RES (293)..(293): Selenocysteine
  MOD_RES (361)..(361): Selenocysteine
  MOD_RES (368)..(368): Selenocysteine
  MOD_RES (387)..(387): Selenocysteine
  MOD_RES (394)..(394): Selenocysteine
  MOD_RES (402)..(402): Selenocysteine
  MOD_RES (444)..(444): Selenocysteine
  MOD_RES (465)..(465): Selenocysteine
  MOD_RES (492)..(492): Selenocysteine
  MOD_RES (519)..(519): Selenocysteine
  MOD_RES (542)..(542): Selenocysteine
  MOD_RES (570)..(570): Selenocysteine
  MOD_RES (572)..(572): Selenocysteine
  MOD_RES (587)..(587): Selenocysteine
  MOD_RES (595)..(596): Selenocysteine
  MOD_RES (625)..(625): Selenocysteine
  MOD_RES (680)..(680): Selenocysteine
  MOD_RES (712)..(712): Selenocysteine
  MOD_RES (726)..(727): Selenocysteine
  MOD_RES (745)..(745): Selenocysteine
  MOD_RES (770)..(770): Selenocysteine
  MOD_RES (772)..(772): Selenocysteine
  MOD_RES (777)..(777): Selenocysteine
  MOD_RES (783)..(783): Selenocysteine
  MOD_RES (830)..(830): Selenocysteine
  MOD_RES (838)..(838): Selenocysteine
  MOD_RES (865)..(865): Selenocysteine
  MOD_RES (877)..(877): Selenocysteine
  MOD_RES (892)..(892): Selenocysteine
  MOD_RES (898)..(898): Selenocysteine
  MOD_RES (909)..(909): Selenocysteine
  MOD_RES (931)..(931): Selenocysteine
MSAPGAGHSAGGSCNESSALGPVEALGXEEGERPGSLRQMWRYRSWDVPQIPSEAPQXQKAIXKSGLQHLAPPPPXPGAPCSESERQIRSXVDWSSAXYGEHIWFEXNVSGDFCYVGEQYCVARMLQKSVSRRKCAACKIVVHXPCIEQLEKINFRCKPSFRESGSRNVREPXFVRHHWVHRRRQDGKCRHCGKGFQQKFXFHSKEIVAISCSWCKQAYHSKVSCFMLQQIEEPCSLGVHAAVVIPPXWILRARRPQNXLKASKKKKRASFKRKSSKKGPEEGRWRPFIIRPXPSPLMKPLLVFVNPKSGGNQGAKIIQSFLWYLNPRQVFDLSQGGPKEALEMYRKVHNLRILACGGDGXVGWILSXLDQLRLKPPPPVAILPLGXGNDLARXLNWGGGYXDEPVSKILSHVEEGNVVQLDRWDLHAEPNPEAGPEDRDEGAXDRLPLDVFNNYFSLGFDAHVXLEFHESREANPEKFNSRFRNKMFYAGXAFSDFLMGSSKDLAKHIRVVCDGMDLXPKIQDLKPQCVVFLNIPRYCAGXMPWGHPGEHHDFEPQRHDDGYLEVIGFXMXSLAALQVGGHGERLXQCREVVLXXSKAIPVQVDGEPCKLAASRIRIALRNQAXMVQKAKRRSAAPLHSDQQPVPEQLRIQVSRVSMHDYEALHYDKEQLKEASVPLGXVVVPGDSDLELCRAHIERLQQEPDGAGAKSPXCQKLSPKWCFLDAXXASRFYRIDRAQEHLNYVXEIAQDEIYILDPELLGASARPDLPXPXSPLPXSPCSPXPRSLQGDAAPPQGEELIEAAKRNDFCKLQELHRAGGDLMHRDEQSRXLLHHAVSXGSKDVVRYLLDHAPPEILDAVEENGEXCLHQAAALGQRXICHYIVEAGASLMKXDQQGDXPRQRAEKAQDXELAAYLENRQHYQMIQREDQEXAV

SEQ ID NO: 8002 - protein, 135 aa, Homo sapiens
  MOD_RES (19)..(19): Selenocysteine
  MOD_RES (24)..(24): Selenocysteine
  MOD_RES (37)..(37): Selenocysteine
  MOD_RES (52)..(52): Selenocysteine
  MOD_RES (60)..(60): Selenocysteine
  MOD_RES (69)..(69): Selenocysteine
  MOD_RES (105)..(105): Selenocysteine
MWRYRSWDVPQIPSEAPQXQKAIXKSGLQHLAPPPPXPGAPCSESERQIRSXVDWSESAXYGEHIWFEXNVSGDFCYVGEQYCVARMLKSVSRRKCAACKIVVHXPCIEQLEKDSRDDLGVSPPCEDDSGLSWRE

SEQ ID NO: 8003 - protein, 197 aa, Homo sapiens
  MOD_RES (1)..(1): Any amino acid
  MOD_RES (10)..(10): Selenocysteine
  MOD_RES (50)..(50): Selenocysteine
  MOD_RES (57)..(57): Selenocysteine
  MOD_RES (70)..(70): Selenocysteine
  MOD_RES (93)..(93): Selenocysteine
  MOD_RES (121)..(121): Selenocysteine
  MOD_RES (123)..(123): Selenocysteine
  MOD_RES (138)..(138): Selenocysteine
  MOD_RES (146)..(147): Selenocysteine
  MOD_RES (176)..(176): Selenocysteine
XRNKMFYAGXAFSDFLMGSSKDLAKHIRVVVSGARLPWVGGPEGREAEAXWHMHLNXLPARLQCDGMDLXPKIQDLKPQCVVFLNIPRYCAGXMPWGHPGEHHDFEPQRHDDGYLEVIGFXMXSLAALQVGGHGERLXQCREVVLXXSKAIPVQVDGEPCKLAASRIRIALRNQAXMVQKAKRRSAAPLHSDQQPVP

SEQ ID NO: 8004 - protein, 427 aa, Homo sapiens
  MOD_RES (3)..(3): Selenocysteine
  MOD_RES (10)..(10): Selenocysteine
  MOD_RES (21)..(21): Selenocysteine
  MOD_RES (37)..(37): Selenocysteine
  MOD_RES (49)..(49): Selenocysteine
  MOD_RES (54)..(54): Selenocysteine
  MOD_RES (58)..(58): Selenocysteine
  MOD_RES (63)..(63): Selenocysteine
  MOD_RES (74)..(74): Selenocysteine
  MOD_RES (82)..(82): Selenocysteine
  MOD_RES (99)..(99): Selenocysteine
  MOD_RES (114)..(114): Selenocysteine
  MOD_RES (131)..(131): Selenocysteine
  MOD_RES (167)..(167): Selenocysteine
  MOD_RES (192)..(192): Selenocysteine
  MOD_RES (196)..(196): Selenocysteine
  MOD_RES (225)..(225): Selenocysteine
  MOD_RES (243)..(243): Selenocysteine
  MOD_RES (280)..(280): Selenocysteine
  MOD_RES (284)..(284): Selenocysteine
  MOD_RES (311)..(311): Selenocysteine
MCXGRPGWLXVSLRVGKYKKXHKNIMINLMDILEVDXKKQIVRVEPLVXMGQVXALLXSIGWXLPVLPELDDLXVGGLIMGXGIESSSHKYGLFQHICXAYELVLADGSFVRCXPSENSDLFYAVPWSCGXLGFLVAAEIRIIPAKKYVKLRFEPVRGLEAICAKFXHESQRQENHFVEGLLYSLDEAVIMXGVMXDEAEPSKLNSIGNYYKPWFFKHVENYLKXNREGLEYIPLRHYYHRHXRSIFWELQDIIPFGNNPIFRYLFGWMVPPKISLLKLXQGEXLRKLYEQHHVVQDMLVPMKCLQQALHXFQNDIHVYPIWLCPFILPSQPGLVHPKGNEAELYIDIGAYGEPRVKHFEARSCMRQLEKFVRSVHGFQMLYADCYMNREEFWEMFDGSLYHKLREKLGCQDAFPEVYDKICKAARH

SEQ ID NO: 8005 - protein, 516 aa, Homo sapiens
  MOD_RES (88)..(88): Selenocysteine
  MOD_RES (92)..(92): Selenocysteine
  MOD_RES (99)..(99): Selenocysteine
  MOD_RES (110)..(110): Selenocysteine
  MOD_RES (126)..(126): Selenocysteine
  MOD_RES (138)..(138): Selenocysteine
  MOD_RES (143)..(143): Selenocysteine
  MOD_RES (147)..(147): Selenocysteine
  MOD_RES (152)..(152): Selenocysteine
  MOD_RES (163)..(163): Selenocysteine
  MOD_RES (171)..(171): Selenocysteine
  MOD_RES (188)..(188): Selenocysteine
  MOD_RES (203)..(203): Selenocysteine
  MOD_RES (220)..(220): Selenocysteine
  MOD_RES (256)..(256): Selenocysteine
  MOD_RES (281)..(281): Selenocysteine
  MOD_RES (285)..(285): Selenocysteine
  MOD_RES (314)..(314): Selenocysteine
  MOD_RES (332)..(332): Selenocysteine
  MOD_RES (369)..(369): Selenocysteine
  MOD_RES (373)..(373): Selenocysteine
  MOD_RES (400)..(400): Selenocysteine
MEPAVSLAVCALLFLLWVRLKGLEFVLIHQRWVFVCLFLLPLSLIFDIYYYVRAWVVFKLSSAPRLHEQRVRDIQKQVREWKEQGSKXFMCXGRPGWLXVSLRVGKYKKXHKNIMINLMDILEVDXKKQIVRVEPLVXMGQVXALLXSIGWXLPVLPELDDLXVGGLIMGXGIESSSHKYGLFQHICXAYELVLADGSFVRCXPSENSDLFYAVPWSCGXLGFLVAAEIRIIPAKKYVKLRFEPVRGLEAICAKFXHESQRQENHFVEGLLYSLDEAVIMXGVMXDEAEPSKLNSIGNYYKPWFFKHVENYLKXNREGLEYIPLRHYYHRHXRSIFWELQDIIPFGNNPIFRYLFGWMVPPKISLLKLXQGEXLRKLYEQHHVVQDMLVPMKCLQQALHXFQNDIHVYPIWLCPFILPSQPGLVHPKGNEAELYIDIGAYGEPRVKHFEARSCMRQLEKFVRSVHGFQMLYADCYMNREEFWEMFDGSLYHKLREKLGCQDAFPEVYDKICKAARH

SEQ ID NO: 8006 - protein, 154 aa, Homo sapiens
  MOD_RES (1)..(1): Any amino acid
  MOD_RES (7)..(7): Selenocysteine
  MOD_RES (11)..(11): Selenocysteine
  MOD_RES (38)..(38): Selenocysteine
XSLLKLXQGEXLRKLYEQHHVVQDMLVPMKCLQQALHXFQNDIHVYPIWLCPFILPSQPGLVHPKGNEAELYIDIGAYGEPRVKHFEARSCMRQLEKFVRSVHGFQMLYADCYMNREEFWEMFDGSLYHKLREKLGCQDAFPEVYDKICKAARH

SEQ ID NO: 8007 - protein, 396 aa, Homo sapiens
  MOD_RES (5)..(5): Selenocysteine
  MOD_RES (56)..(56): Selenocysteine
  MOD_RES (100)..(100): Selenocysteine
  MOD_RES (126)..(126): Selenocysteine
  MOD_RES (150)..(151): Selenocysteine
  MOD_RES (205)..(205): Selenocysteine
  MOD_RES (237)..(237): Selenocysteine
  MOD_RES (258)..(258): Selenocysteine
  MOD_RES (268)..(268): Selenocysteine
  MOD_RES (329)..(329): Selenocysteine
  MOD_RES (333)..(333): Selenocysteine
  MOD_RES (378)..(378): Selenocysteine
MALLXNLLPLCCLALLALPAQSCGPGRGPVGRRRYARKQLVPLLYKQFVPGVPERXLGASGPAEGRVARGSERFRDLVPNYNPDIIFKDEENSGADRLMXERCKERVNALAIAVMNMWPGVRLRVXEGWDEDGHHAQDSLHYEGRALDIXXSDRDRNKYGLLARLAVEAGFDWVYYESRNHVHVSVKADNSLAVRAGGCFPGNAXVRLWSGERKGLRELHRGDWVLAADASGRVVPXPVLLFLDRDLQRRASFVAVEXEWPPRKLLLXPWHLVFAARGPAPAPGDFAPVFARRLRAGDSVLAPGGDALRPARVARVAREEAVGVFAPLXAHGXLLVNDVLASCYAVLESHQWAHRAFAPLRLLHALGALLPGGAVQPXGMHWYSRLLYRLAEELLG

SEQ ID NO: 8008 - protein, 147 aa, Homo sapiens
  MOD_RES (3)..(3): Selenocysteine
  MOD_RES (21)..(21): Selenocysteine
  MOD_RES (33)..(33): Selenocysteine
  MOD_RES (63)..(63): Selenocysteine
  MOD_RES (69)..(70): Selenocysteine
  MOD_RES (105)..(105): Selenocysteine
  MOD_RES (118)..(118): Selenocysteine
  MOD_RES (130)..(131): Selenocysteine
  MOD_RES (137)..(137): Selenocysteine
  MOD_RES (139)..(139): Selenocysteine
MGXECHYFICDVGNREEVYQXAKAVREKVGDIXILVNNAAVVHGKSLMDSDDDALLKSQHINXLGQFWXXKAFLPRMLELQNGHIVCLNSVLALSAIPGAIDYCXSKASAFAFMESLXLGLLDCPGVSAXXVLPFHXSXEMFQGMRV

SEQ ID NO: 8009 - protein, 81 aa, Homo sapiens
  MOD_RES (3)..(3): Selenocysteine
  MOD_RES (21)..(21): Selenocysteine
  MOD_RES (36)..(36): Selenocysteine
  MOD_RES (72)..(72): Selenocysteine
  MOD_RES (74)..(74): Selenocysteine
  MOD_RES (77)..(77): Selenocysteine
MGXECHYFICDVGNREEVYQXAKAVREKVSQPLSPXEAGDGGPEDSGSCAAQPGPPPPPMDNACPRYLEKHXSXGCXRGDP

SEQ ID NO: 8010 - protein, 302 aa, Homo sapiens
  MOD_RES (44)..(44): Selenocysteine
  MOD_RES (72)..(72): Selenocysteine
  MOD_RES (79)..(80): Selenocysteine
  MOD_RES (88)..(88): Selenocysteine
  MOD_RES (106)..(106): Selenocysteine
  MOD_RES (118)..(118): Selenocysteine
  MOD_RES (148)..(148): Selenocysteine
  MOD_RES (154)..(155): Selenocysteine
  MOD_RES (190)..(190): Selenocysteine
  MOD_RES (203)..(203): Selenocysteine
  MOD_RES (215)..(216): Selenocysteine
  MOD_RES (222)..(222): Selenocysteine
  MOD_RES (224)..(224): Selenocysteine
  MOD_RES (245)..(245): Selenocysteine
  MOD_RES (250)..(250): Selenocysteine
  MOD_RES (266)..(266): Selenocysteine
  MOD_RES (291)..(291): Selenocysteine
  MOD_RES (293)..(293): Selenocysteine
  MOD_RES (297)..(297): Selenocysteine
  MOD_RES (302)..(302): Selenocysteine
MVWKRLGALVMFPLQMIYLVVKAAVGLVLPAKLRDLSRENVLIXGGGRGIGRQLAREFAERGARKIVLWGRXEKCLKEXXEEIRQMGXECHYFICDVGNREEVYQXAKAVREKVGDIXILVNNAAVVHGKSLMDSDDDALLKSQHINXLGQFWXXKAFLPRMLELQNGHIVCLNSVLALSAIPGAIDYCXSKASAFAFMESLXLGLLDCPGVSAXXVLPFHXSXEMFQGMRVRFPNLFPPLKPEXVARRXVEAVQLNQALLLLPWXMHALVILKSILPQAALEEIHKFSGXYXCMNXFKGRX

SEQ ID NO: 8011 - protein, 156 aa, Homo sapiens
  MOD_RES (26)..(26): Selenocysteine
  MOD_RES (31)..(31): Selenocysteine
  MOD_RES (44)..(44): Selenocysteine
  MOD_RES (61)..(61): Selenocysteine
  MOD_RES (76)..(76): Selenocysteine
  MOD_RES (78)..(79): Selenocysteine
  MOD_RES (103)..(103): Selenocysteine
  MOD_RES (112)..(112): Selenocysteine
  MOD_RES (123)..(123): Selenocysteine
  MOD_RES (136)..(136): Selenocysteine
  MOD_RES (140)..(140): Selenocysteine
MELRSYQWEVIMPALEGKNIIIWLPXGAGKXRAAAYVAKRHLEXVDGAKVVVLVNRVHLVXQHGEEFRRMLDGRWXVXXLSGDMGPRAGFGHLARCHDLLICXAELLQMALXSPEEEEHVELXVFSLIVVDECHHXHKDXVYNVIMSQYLELKLQR

SEQ ID NO: 8012 - protein, 302 aa, Homo sapiens
  MOD_RES (26)..(26): Selenocysteine
  MOD_RES (31)..(31): Selenocysteine
  MOD_RES (44)..(44): Selenocysteine
  MOD_RES (61)..(61): Selenocysteine
  MOD_RES (76)..(76): Selenocysteine
  MOD_RES (78)..(79): Selenocysteine
  MOD_RES (103)..(103): Selenocysteine
  MOD_RES (112)..(112): Selenocysteine
  MOD_RES (123)..(123): Selenocysteine
  MOD_RES (136)..(136): Selenocysteine
  MOD_RES (140)..(140): Selenocysteine
  MOD_RES (167)..(167): Selenocysteine
  MOD_RES (172)..(172): Selenocysteine
  MOD_RES (194)..(194): Selenocysteine
  MOD_RES (255)..(255): Selenocysteine
  MOD_RES (296)..(296): Selenocysteine
MELRSYQWEVIMPALEGKNIIIWLPXGAGKXRAAAYVAKRHLEXVDGAKVVVLVNRVHLVXQHGEEFRRMLDGRWXVXXLSGDMGPRAGFGHLARCHDLLICXAELLQMALXSPEEEEHVELXVFSLIVVDECHHXHKDXVYNVIMSQYLELKLQRAQPLPQVLGLXASPGXGGASKLDGAINHVLQLCANLDXWCIMSPQNCCPQLQEHSQQPCKQYNLCHRRSQDPFGDLLKKLMDQIHDHLEMPELSRKFGXQMYEQQVVKLSEAAALAGLQEQRVYALHLRRYNDALLIHDXVRAVDA

SEQ ID NO: 8013 - protein, 678 aa, Homo sapiens
  MOD_RES (26)..(26): Selenocysteine
  MOD_RES (31)..(31): Selenocysteine
  MOD_RES (44)..(44): Selenocysteine
  MOD_RES (61)..(61): Selenocysteine
  MOD_RES (76)..(76): Selenocysteine
  MOD_RES (78)..(79): Selenocysteine
  MOD_RES (103)..(103): Selenocysteine
  MOD_RES (112)..(112): Selenocysteine
  MOD_RES (123)..(123): Selenocysteine
  MOD_RES (136)..(136): Selenocysteine
  MOD_RES (140)..(140): Selenocysteine
  MOD_RES (167)..(167): Selenocysteine
  MOD_RES (172)..(172): Selenocysteine
  MOD_RES (194)..(194): Selenocysteine
  MOD_RES (255)..(255): Selenocysteine
  MOD_RES (296)..(296): Selenocysteine
  MOD_RES (316)..(316): Selenocysteine
  MOD_RES (318)..(318): Selenocysteine
  MOD_RES (343)..(343): Selenocysteine
  MOD_RES (374)..(374): Selenocysteine
  MOD_RES (376)..(376): Selenocysteine
  MOD_RES (395)..(395): Selenocysteine
  MOD_RES (413)..(413): Selenocysteine
  MOD_RES (416)..(416): Selenocysteine
  MOD_RES (431)..(431): Selenocysteine
  MOD_RES (438)..(438): Selenocysteine
  MOD_RES (460)..(460): Selenocysteine
  MOD_RES (484)..(484): Selenocysteine
  MOD_RES (501)..(501): Selenocysteine
  MOD_RES (531)..(531): Selenocysteine
  MOD_RES (575)..(575): Selenocysteine
  MOD_RES (642)..(642): Selenocysteine
MELRSYQWEVIMPALEGKNIIIWLPXGAGKXRAAAYVAKRHLEXVDGAKVVVLVNRVHLVXQHGEEFRRMLDGRWXVXXLSGDMGPRAGFGHLARCHDLLICXAELLQMALXSPEEEEHVELXVFSLIVVDECHHXHKDXVYNVIMSQYLELKLQRAQPLPQVLGLXASPGXGGASKLDGAINHVLQLCANLDXWCIMSPQNCCPQLQEHSQQPCKQYNLCHRRSQDPFGDLLKKLMDQIHDHLEMPELSRKFGXQMYEQQVVKLSEAAALAGLQEQRVYALHLRRYNDALLIHDXVRAVDALAALQDFYHREHVXKXQILCAERRLLALFDDRKNELAHLAXHGPENPKLEMLEKILQRQFSSSNSPRGIIFXRXRQSAHSLLLWLQQQQGLQXVDIRAQLLIGAGNSSQSXHMXQRDQQEVIQKFQDGXLNLLVAXSVAEEGLDIPHCNVVVRYGLLXNEISMVQARGRARADQSVYAFVAXEGSRELKRELINEALEXLMEQAVAAVQKMDQAEYQAKIRDLQQAALXKRAAQAAQRENQRQQFPVEHVQLLCINCMVAVGHGSDLRKVEGXHHVNVNPNFSNYYNVSRDPVVINKVFKDWKPGGVISCRNCGEVWGLQMIYKSVKLPVLKVRSMLLEXPQGRIQAKKWSRVPFSVPDFDFLQHCAENLSDLSLD

SEQ ID NO: 8014 - protein, 99 aa, Homo sapiens
  MOD_RES (7)..(7): Selenocysteine
  MOD_RES (9)..(10): Selenocysteine
  MOD_RES (34)..(34): Selenocysteine
  MOD_RES (43)..(43): Selenocysteine
  MOD_RES (54)..(54): Selenocysteine
  MOD_RES (67)..(67): Selenocysteine
  MOD_RES (71)..(71): Selenocysteine
  MOD_RES (98)..(98): Selenocysteine
MLDGRWXVXXLSGDMGPRAGFGHLARCHDLLICXAELLQMALXSPEEEEHVELXVFSLIVVDECHHXHKDXVYNVIMSQYLELKLQRAQPLPQVLGLXA

SEQ ID NO: 8015 - protein, 51 aa, Homo sapiens
  MOD_RES (1)..(1): Any amino acid
  MOD_RES (11)..(11): Selenocysteine
  MOD_RES (28)..(28): Selenocysteine
XDQSVYAFVAXEGSRELKRELINEALEXLMEQAVAAVQKMDQAEYQAKELL

SEQ ID NO: 8016 - protein, 46 aa, Homo sapiens
  MOD_RES (13)..(13): Selenocysteine
MAALKSWLSRSVXSFFRFLLGSSLSLQPLQVNPRACYRLAVVPYEI

SEQ ID NO: 8017 - protein, 195 aa, Homo sapiens
  MOD_RES (13)..(13): Selenocysteine
  MOD_RES (45)..(45): Selenocysteine
  MOD_RES (47)..(47): Selenocysteine
  MOD_RES (53)..(53): Selenocysteine
  MOD_RES (65)..(65): Selenocysteine
  MOD_RES (67)..(67): Selenocysteine
  MOD_RES (74)..(74): Selenocysteine
  MOD_RES (100)..(100): Selenocysteine
  MOD_RES (111)..(112): Selenocysteine
  MOD_RES (115)..(115): Selenocysteine
  MOD_RES (130)..(130): Selenocysteine
  MOD_RES (138)..(138): Selenocysteine
  MOD_RES (162)..(162): Selenocysteine
  MOD_RES (176)..(176): Selenocysteine
MAALKSWLSRSVXSFFRYRQCLCVPVVANFKKRCFSELIRPWHKXVXIGFGVXLCAVPIAQAVYXLXSLYRQYXSLLGKMNSEEEDEVWQVIIGARAEMXSKHQEYLKLEXXWMXAVGLSEMAAEAAYQXGADQASIXARNHIQLVKLQVEEVHQLSRKAEXKLAEAQIEELRQKXQEEGEERAESEQEAYLRED

SEQ ID NO: 8018 - protein, 239 aa, Homo sapiens
  MOD_RES (13)..(13): Selenocysteine
  MOD_RES (45)..(45): Selenocysteine
  MOD_RES (47)..(47): Selenocysteine
  MOD_RES (53)..(53): Selenocysteine
  MOD_RES (82)..(82): Selenocysteine
  MOD_RES (85)..(85): Selenocysteine
  MOD_RES (87)..(87): Selenocysteine
  MOD_RES (92)..(93): Selenocysteine
  MOD_RES (101)..(101): Selenocysteine
  MOD_RES (104)..(104): Selenocysteine
  MOD_RES (109)..(109): Selenocysteine
  MOD_RES (111)..(111): Selenocysteine
  MOD_RES (118)..(118): Selenocysteine
  MOD_RES (144)..(144): Selenocysteine
  MOD_RES (155)..(156): Selenocysteine
  MOD_RES (159)..(159): Selenocysteine
  MOD_RES (174)..(174): Selenocysteine
  MOD_RES (182)..(182): Selenocysteine
  MOD_RES (206)..(206): Selenocysteine
  MOD_RES (220)..(220): Selenocysteine
MAALKSWLSRSVXSFFRYRQCLCVPVVANFKKRCFSELIRPWHKXVXIGFGVXLCAVPIAQKSEPHSLSSEALMRRAVSLVXDSXSXFLSQXXYALIEAIXEYXKAVYXLXSLYRQYXSLLGKMNSEEEDEVWQVIIGARAEMXSKHQEYLKLEXXWMXAVGLSEMAAEAAYQXGADQASIXARNHIQLVKLQVEEVHQLSRKAEXKLAEAQIEELRQKXQEEGEERAESEQEAYLRED

SEQ ID NO: 8019 - protein, 133 aa, Homo sapiens
  MOD_RES (12)..(12): Selenocysteine
  MOD_RES (14)..(14): Selenocysteine
  MOD_RES (21)..(21): Selenocysteine
  MOD_RES (47)..(47): Selenocysteine
  MOD_RES (58)..(59): Selenocysteine
  MOD_RES (62)..(62): Selenocysteine
  MOD_RES (77)..(77): Selenocysteine
  MOD_RES (85)..(85): Selenocysteine
  MOD_RES (109)..(109): Selenocysteine
  MOD_RES (123)..(123): Selenocysteine
MKSDFYFQAVYXLXSLYRQYXSLLGKMNSEEEDEVWQVIIGARAEMXSKHQEYLKLEXXWMXAVGLSEMAAEAAYQXGADQASIXARNHIQLVKLQVEEVHQLSRKAEXKLAEAQIEELRQKXQEEGEERAES

SEQ ID NO: 8020 - protein, 186 aa, Homo sapiens
  MOD_RES (29)..(29): Selenocysteine
  MOD_RES (32)..(32): Selenocysteine
  MOD_RES (34)..(34): Selenocysteine
  MOD_RES (39)..(40): Selenocysteine
  MOD_RES (48)..(48): Selenocysteine
  MOD_RES (51)..(51): Selenocysteine
  MOD_RES (56)..(56): Selenocysteine
  MOD_RES (58)..(58): Selenocysteine
  MOD_RES (65)..(65): Selenocysteine
  MOD_RES (91)..(91): Selenocysteine
  MOD_RES (102)..(103): Selenocysteine
  MOD_RES (106)..(106): Selenocysteine
  MOD_RES (121)..(121): Selenocysteine
  MOD_RES (129)..(129): Selenocysteine
  MOD_RES (153)..(153): Selenocysteine
  MOD_RES (167)..(167): Selenocysteine
MKSDFYFQKSEPHSLSSEALMRRAVSLVXDSXSXFLSQXXYALIEAIXEYXKAVYXLXSLYRQYXSLLGKMNSEEEDEVWQVIIGARAEMXSKHQEYLKLEXXWMXAVGLSEMAAEAAYQXGADQASIXARNHIQLVKLQVEEVHQLSRKAEXKLAEAQIEELRQKXQEEGEERAESEQEAYLRED

SEQ ID NO: 8021 - protein, 77 aa, Homo sapiens
  MOD_RES (9)..(9): Selenocysteine
  MOD_RES (12)..(12): Selenocysteine
  MOD_RES (14)..(14): Selenocysteine
  MOD_RES (19)..(20): Selenocysteine
  MOD_RES (28)..(28): Selenocysteine
  MOD_RES (31)..(31): Selenocysteine
  MOD_RES (36)..(36): Selenocysteine
  MOD_RES (38)..(38): Selenocysteine
  MOD_RES (45)..(45): Selenocysteine
  MOD_RES (71)..(71): Selenocysteine
MRRAVSLVXDSXSXFLSQXXYALIEAIXEYXKAVYXLXSLYRQYXSLLGKMNSEEEDEVWQVIIGARAEMXSKHQEY

SEQ ID NO: 8022 - protein, 125 aa, Homo sapiens
  MOD_RES (9)..(9): Selenocysteine
  MOD_RES (12)..(12): Selenocysteine
  MOD_RES (14)..(14): Selenocysteine
  MOD_RES (19)..(20): Selenocysteine
  MOD_RES (28)..(28): Selenocysteine
  MOD_RES (31)..(31): Selenocysteine
  MOD_RES (36)..(36): Selenocysteine
  MOD_RES (38)..(38): Selenocysteine
  MOD_RES (45)..(45): Selenocysteine
  MOD_RES (71)..(71): Selenocysteine
  MOD_RES (82)..(83): Selenocysteine
  MOD_RES (86)..(86): Selenocysteine
  MOD_RES (101)..(101): Selenocysteine
  MOD_RES (109)..(109): Selenocysteine
MRRAVSLVXDSXSXFLSQXXYALIEAIXEYXKAVYXLXSLYRQYXSLLGKMNSEEEDEVWQVIIGARAEMXSKHQEYLKLEXXWMXAVGLSEMAAEAAYQXGADQASIXARNHIQLVKLQVEEVH

SEQ ID NO: 8023 - protein, 129 aa, Homo sapiens
  MOD_RES (9)..(9): Selenocysteine
  MOD_RES (12)..(12): Selenocysteine
  MOD_RES (14)..(14): Selenocysteine
  MOD_RES (19)..(20): Selenocysteine
  MOD_RES (28)..(28): Selenocysteine
  MOD_RES (31)..(31): Selenocysteine
  MOD_RES (36)..(36): Selenocysteine
  MOD_RES (38)..(38): Selenocysteine
  MOD_RES (45)..(45): Selenocysteine
  MOD_RES (71)..(71): Selenocysteine
  MOD_RES (82)..(83): Selenocysteine
  MOD_RES (86)..(86): Selenocysteine
  MOD_RES (101)..(101): Selenocysteine
  MOD_RES (109)..(109): Selenocysteine
MRRAVSLVXDSXSXFLSQXXYALIEAIXEYXKAVYXLXSLYRQYXSLLGKMNSEEEDEVWQVIIGARAEMXSKHQEYLKLEXXWMXAVGLSEMAAEAAYQXGADQASIXARNHIQLVKLQVEEVHQLSR

SEQ ID NO: 8024 - protein, 157 aa, Homo sapiens
  MOD_RES (9)..(9): Selenocysteine
  MOD_RES (12)..(12): Selenocysteine
  MOD_RES (14)..(14): Selenocysteine
  MOD_RES (19)..(20): Selenocysteine
  MOD_RES (28)..(28): Selenocysteine
  MOD_RES (31)..(31): Selenocysteine
  MOD_RES (36)..(36): Selenocysteine
  MOD_RES (38)..(38): Selenocysteine
  MOD_RES (45)..(45): Selenocysteine
  MOD_RES (71)..(71): Selenocysteine
  MOD_RES (82)..(83): Selenocysteine
  MOD_RES (86)..(86): Selenocysteine
  MOD_RES (101)..(101): Selenocysteine
  MOD_RES (109)..(109): Selenocysteine
  MOD_RES (133)..(133): Selenocysteine
  MOD_RES (147)..(147): Selenocysteine
MRRAVSLVXDSXSXFLSQXXYALIEAIXEYXKAVYXLXSLYRQYXSLLGKMNSEEEDEVWQVIIGARAEMXSKHQEYLKLEXXWMXAVGLSEMAAEAAYQXGADQASIXARNHIQLVKLQVEEVHQLSRKAEXKLAEAQIEELRQKXQEEGEERAES

SEQ ID NO: 8025 - protein, 166 aa, Homo sapiens
  MOD_RES (9)..(9): Selenocysteine
  MOD_RES (12)..(12): Selenocysteine
  MOD_RES (14)..(14): Selenocysteine
  MOD_RES (19)..(20): Selenocysteine
  MOD_RES (28)..(28): Selenocysteine
  MOD_RES (31)..(31): Selenocysteine
  MOD_RES (36)..(36): Selenocysteine
  MOD_RES (38)..(38): Selenocysteine
  MOD_RES (45)..(45): Selenocysteine
  MOD_RES (71)..(71): Selenocysteine
  MOD_RES (82)..(83): Selenocysteine
  MOD_RES (86)..(86): Selenocysteine
  MOD_RES (101)..(101): Selenocysteine
  MOD_RES (109)..(109): Selenocysteine
  MOD_RES (133)..(133): Selenocysteine
  MOD_RES (147)..(147): Selenocysteine
MRRAVSLVXDSXSXFLSQXXYALIEAIXEYXKAVYXLXSLYRQYXSLLGKMNSEEEDEVWQVIIGARAEMXSKHQEYLKLEXXWMXAVGLSEMAAEAAYQXGADQASIXARNHIQLVKLQVEEVHQLSRKAEXKLAEAQIEELRQKXQEEGEERAESEQEAYLRED

SEQ ID NO: 8026 - protein, 191 aa, Homo sapiens
  MOD_RES (1)..(1): Any amino acid
  MOD_RES (12)..(12): Selenocysteine
  MOD_RES (44)..(44): Selenocysteine
  MOD_RES (46)..(46): Selenocysteine
  MOD_RES (52)..(52): Selenocysteine
  MOD_RES (81)..(81): Selenocysteine
  MOD_RES (84)..(84): Selenocysteine
  MOD_RES (86)..(86): Selenocysteine
  MOD_RES (91)..(92): Selenocysteine
  MOD_RES (100)..(100): Selenocysteine
  MOD_RES (103)..(103): Selenocysteine
  MOD_RES (108)..(108): Selenocysteine
  MOD_RES (110)..(110): Selenocysteine
  MOD_RES (117)..(117): Selenocysteine
  MOD_RES (143)..(143): Selenocysteine
  MOD_RES (154)..(155): Selenocysteine
  MOD_RES (158)..(158): Selenocysteine
  MOD_RES (173)..(173): Selenocysteine
XALKSWLSRSVXSFFRYRQCLCVPVVANFKKRCFSELIRPWHKXVXIGFGVXLCAVPIAQKSEPHSLSSEALMRRAVSLVXDSXSXFLSQXXYALIEAIXEYXKAVYXLXSLYRQYXSLLGKMNSEEEDEVWQVIIGARAEMXSKHQEYLKLEXXWMXAVGLSEMAAEAAYQXECQLNPDLNIEVEVSLQR

SEQ ID NO: 8027 - protein, 120 aa, Homo sapiens
  MOD_RES (1)..(1): Any amino acid
  MOD_RES (5)..(5): Selenocysteine
  MOD_RES (7)..(7): Selenocysteine
  MOD_RES (14)..(14): Selenocysteine
  MOD_RES (40)..(40): Selenocysteine
  MOD_RES (51)..(52): Selenocysteine
  MOD_RES (55)..(55): Selenocysteine
  MOD_RES (70)..(70): Selenocysteine
  MOD_RES (106)..(106): Selenocysteine
XAVYXLXSLYRQYXSLLGKMNSEEEDEVWQVIIGARAEMXSKHQEYLKLEXXWMXAVGLSEMAAEAAYQXEVFSSKLEEEDACHSPLPVNIVLKVLVNAVRSKCSXDELIKCIYPDGEIH

SEQ ID NO: 8028 - protein, 544 aa, Homo sapiens
  MOD_RES (19)..(19): Selenocysteine
  MOD_RES (26)..(26): Selenocysteine
  MOD_RES (32)..(33): Selenocysteine
  MOD_RES (71)..(71): Selenocysteine
  MOD_RES (79)..(79): Selenocysteine
  MOD_RES (100)..(100): Selenocysteine
  MOD_RES (105)..(105): Selenocysteine
  MOD_RES (109)..(109): Selenocysteine
  MOD_RES (121)..(121): Selenocysteine
  MOD_RES (130)..(130): Selenocysteine
  MOD_RES (151)..(151): Selenocysteine
  MOD_RES (160)..(160): Selenocysteine
  MOD_RES (177)..(177): Selenocysteine
  MOD_RES (200)..(200): Selenocysteine
  MOD_RES (208)..(208): Selenocysteine
  MOD_RES (320)..(320): Selenocysteine
  MOD_RES (328)..(328): Selenocysteine
  MOD_RES (332)..(332): Selenocysteine
  MOD_RES (348)..(348): Selenocysteine
  MOD_RES (351)..(351): Selenocysteine
  MOD_RES (355)..(355): Selenocysteine
  MOD_RES (425)..(425): Selenocysteine
  MOD_RES (477)..(478): Selenocysteine
  MOD_RES (502)..(502): Selenocysteine
  MOD_RES (519)..(519): Selenocysteine
MDDKGDPSNEEAPKAIKPXSKEFRKXWGFRRXXIAKREGAGDAEADPLEPPPPQQQLGLSLRRSGRQPKRXERVEQFLXIARRRGRRSMPVSLEDSGEPXSCPAXDAEXASEGSVESASEXRSGPQSASXAVKERPASSEKVKGGDDHDDXSDSDSDGLXLKELQNRLRRKREQEPXERPLKGIQSRLRKKRREEGPAEXVGSEASDXVEGVLPSKQEPENDQGVVSQAGKDDRESKLEGKAAQDIKDEEPGDLGRPKPECEGYDPNALYCICRQPHNNRFMICCDRCEEWFHGDCVGISEARGRLLERNGEDYICPNCXILQVQDEXHSEXADQQEAKWRPGDADGXDCXSIGXIEQKSSEDQGIKGRIEKAANPSGKKKLKIFQPVIEAPGASKCIGPGCCHVAQPDSVYCSNDCILKHAAAXMKFLSSGKEQKPKPKEKMKMKPEKPSLPKCGAQAGIKISSVHKRPAPEKKEXXVKKAVVVPARSEALGKEAACESSXPSWASDHNYNAVKPEKXAAPSPSLLYKCSGKYSYSLHPSLIA

SEQ ID NO: 8029 - protein, 562 aa, Homo sapiens
  MOD_RES (19)..(19): Selenocysteine
  MOD_RES (26)..(26): Selenocysteine
  MOD_RES (32)..(33): Selenocysteine
  MOD_RES (71)..(71): Selenocysteine
  MOD_RES (79)..(79): Selenocysteine
  MOD_RES (100)..(100): Selenocysteine
  MOD_RES (105)..(105): Selenocysteine
  MOD_RES (109)..(109): Selenocysteine
  MOD_RES (121)..(121): Selenocysteine
  MOD_RES (130)..(130): Selenocysteine
  MOD_RES (151)..(151): Selenocysteine
  MOD_RES (160)..(160): Selenocysteine
  MOD_RES (177)..(177): Selenocysteine
  MOD_RES (200)..(200): Selenocysteine
  MOD_RES (208)..(208): Selenocysteine
  MOD_RES (320)..(320): Selenocysteine
  MOD_RES (328)..(328): Selenocysteine
  MOD_RES (332)..(332): Selenocysteine
  MOD_RES (348)..(348): Selenocysteine
  MOD_RES (351)..(351): Selenocysteine
  MOD_RES (355)..(355): Selenocysteine
  MOD_RES (425)..(425): Selenocysteine
  MOD_RES (477)..(478): Selenocysteine
  MOD_RES (502)..(502): Selenocysteine
  MOD_RES (519)..(519): Selenocysteine
MDDKGDPSNEEAPKAIKPXSKEFRKXWGFRRXXIAKREGAGDAEADPLEPPPPQQQLGLSLRRSGRQPKRXERVEQFLXIARRRGRRSMPVSLEDSGEPXSCPAXDAEXASEGSVESASEXRSGPQSASXAVKERPASSEKVKGGDDHDDXSDSDSDGLXLKELQNRLRRKREQEPXERPLKGIQSRLRKKRREEGPAEXVGSEASDXVEGVLPSKQEPENDQGVVSQAGKDDRESKLEGKAAQDIKDEEPGDLGRPKPECEGYDPNALYCICRQPHNNRFMICCDRCEEWFHGDCVGISEARGRLLERNGEDYICPNCXILQVQDEXHSEXADQQEAKWRPGDADGXDCXSIGXIEQKSSEDQGIKGRIEKAANPSGKKKLKIFQPVIEAPGASKCIGPGCCHVAQPDSVYCSNDCILKHAAAXMKFLSSGKEQKPKPKEKMKMKPEKPSLPKCGAQAGIKISSVHKRPAPEKKEXXVKKAVVVPARSEALGKEAACESSXPSWASDHNYNAVKPEKXAAPSPSLLYKCMYHLGVGLLDPSRSFWIAIPWACPGLGVAALC

SEQ ID NO: 8030 - protein, 1189 aa, Homo sapiens
  MOD_RES (19)..(19): Selenocysteine
  MOD_RES (26)..(26): Selenocysteine
  MOD_RES (32)..(33): Selenocysteine
  MOD_RES (71)..(71): Selenocysteine
  MOD_RES (79)..(79): Selenocysteine
  MOD_RES (100)..(100): Selenocysteine
  MOD_RES (105)..(105): Selenocysteine
  MOD_RES (109)..(109): Selenocysteine
  MOD_RES (121)..(121): Selenocysteine
  MOD_RES (130)..(130): Selenocysteine
  MOD_RES (151)..(151): Selenocysteine
  MOD_RES (160)..(160): Selenocysteine
  MOD_RES (177)..(177): Selenocysteine
  MOD_RES (200)..(200): Selenocysteine
  MOD_RES (208)..(208): Selenocysteine
  MOD_RES (320)..(320): Selenocysteine
  MOD_RES (328)..(328): Selenocysteine
  MOD_RES (332)..(332): Selenocysteine
  MOD_RES (348)..(348): Selenocysteine
  MOD_RES (351)..(351): Selenocysteine
  MOD_RES (355)..(355): Selenocysteine
  MOD_RES (425)..(425): Selenocysteine
  MOD_RES (477)..(478): Selenocysteine
  MOD_RES (502)..(502): Selenocysteine
  MOD_RES (519)..(519): Selenocysteine
  MOD_RES (531)..(531): Selenocysteine
  MOD_RES (550)..(550): Selenocysteine
  MOD_RES (580)..(580): Selenocysteine
  MOD_RES (593)..(593): Selenocysteine
  MOD_RES (603)..(603): Selenocysteine
  MOD_RES (622)..(622): Selenocysteine
  MOD_RES (695)..(695): Selenocysteine
  MOD_RES (717)..(717): Selenocysteine
  MOD_RES (769)..(769): Selenocysteine
  MOD_RES (783)..(783): Selenocysteine
  MOD_RES (792)..(792): Selenocysteine
  MOD_RES (826)..(826): Selenocysteine
  MOD_RES (840)..(841): Selenocysteine
  MOD_RES (857)..(857): Selenocysteine
  MOD_RES (927)..(927): Selenocysteine
  MOD_RES (959)..(960): Selenocysteine
  MOD_RES (962)..(962): Selenocysteine
  MOD_RES (970)..(970): Selenocysteine
  MOD_RES (977)..(977): Selenocysteine
  MOD_RES (989)..(989): Selenocysteine
  MOD_RES (1004)..(1004): Selenocysteine
  MOD_RES (1035)..(1035): Selenocysteine
  MOD_RES (1046)..(1047): Selenocysteine
  MOD_RES (1055)..(1055): Selenocysteine
  MOD_RES (1071)..(1071): Selenocysteine
  MOD_RES (1090)..(1090): Selenocysteine
  MOD_RES (1101)..(1101): Selenocysteine
  MOD_RES (1126)..(1126): Selenocysteine
MDDKGDPSNEEAPKAIKPXSKEFRKXWGFRRXXIAKREGAGDAEADPLEPPPPQQQLGLSLRRSGRQPKRXERVEQFLXIARRRGRRSMPVSLEDSGEPXSCPAXDAEXASEGSVESASEXRSGPQSASXAVKERPASSEKVKGGDDHDDXSDSDSDGLXLKELQNRLRRKREQEPXERPLKGIQSRLRKKRREEGPAEXVGSEASDXVEGVLPSKQEPENDQGVVSQAGKDDRESKLEGKAAQDIKDEEPGDLGRPKPECEGYDPNALYCICRQPHNNRFMICCDRCEEWFHGDCVGISEARGRLLERNGEDYICPNCXILQVQDEXHSEXADQQEAKWRPGDADGXDCXSIGXIEQKSSEDQGIKGRIEKAANPSGKKKLKIFQPVIEAPGASKCIGPGCCHVAQPDSVYCSNDCILKHAAAXMKFLSSGKEQKPKPKEKMKMKPEKPSLPKCGAQAGIKISSVHKRPAPEKKEXXVKKAVVVPARSEALGKEAACESSXPSWASDHNYNAVKPEKXAAPSPSLLYKSXKEDRRSEEKAAAMAASKKXAPPGSAVGKQPAPRNLVPKKSSFANVAAAXPAIKKPPSGFKGXIPKRPWLSAXPSSGASAARQAGPAPAAAXAASKKFPGSAALVGAVRKPVVPSVPMASPAPGRLGAMSAAPSQPNSQIRQNIRRSLKEILWKRVNDSDDLIMXENEVGKIALHIEKEMFNLFQVXDNRYKSKYRSIMFNLKDPKNQGLFHRVLREEISLAKLVRLKPEELVSKELSXWKERPARSVMESRXKLHNESKKXAPRQEAIPDLEDSPPVSDSEEQQESARAVPEKSXAPLLDVFSSMLKDXXSQHRAHLFDLNCKICXGQVPSAEDEPAPKKQKLSASVKKEDLKSKHDSSAPDPAPDSADEVMPEAVPEVASEPGLESASHPNVDRXYFPGPPGDGHPEPSPLEDLSPCPASCGSGVVXXVXVSGRDPRXAPSSSCXAVASAASRPDSXHMVEARQDVPKPVLXSVMVPKSILAKPSSSPDPRYLSVPPSPNISXSESRSPPEGDXXLFLSRLSXIWKGFINMQSVAKFVXKAYPVSGCFDYLSEDLPDXIHIGGRIAPKXVWDYVGKLKSSVSKELCLIRFHPAXEEEEVAYISLYSYFSSRGRFGVVANNNRHVKDLYLIPLSAQDPVPSKLLPFEGPGKRRLSGWR

SEQ ID NO: 8031 - protein, 2240 aa, Homo sapiens
  MOD_RES (19)..(19): Selenocysteine
  MOD_RES (26)..(26): Selenocysteine
  MOD_RES (32)..(33): Selenocysteine
  MOD_RES (71)..(71): Selenocysteine
  MOD_RES (79)..(79): Selenocysteine
  MOD_RES (100)..(100): Selenocysteine
  MOD_RES (105)..(105): Selenocysteine
  MOD_RES (109)..(109): Selenocysteine
  MOD_RES (121)..(121): Selenocysteine
  MOD_RES (130)..(130): Selenocysteine
  MOD_RES (151)..(151): Selenocysteine
  MOD_RES (160)..(160): Selenocysteine
  MOD_RES (177)..(177): Selenocysteine
  MOD_RES (200)..(200): Selenocysteine
  MOD_RES (208)..(208): Selenocysteine
  MOD_RES (320)..(320): Selenocysteine
  MOD_RES (328)..(328): Selenocysteine
  MOD_RES (332)..(332): Selenocysteine
  MOD_RES (348)..(348): Selenocysteine
  MOD_RES (351)..(351): Selenocysteine
  MOD_RES (355)..(355): Selenocysteine
  MOD_RES (425)..(425): Selenocysteine
  MOD_RES (477)..(478): Selenocysteine
  MOD_RES (502)..(502): Selenocysteine
  MOD_RES (519)..(519): Selenocysteine
  MOD_RES (531)..(531): Selenocysteine
  MOD_RES (550)..(550): Selenocysteine
  MOD_RES (580)..(580): Selenocysteine
  MOD_RES (593)..(593): Selenocysteine
  MOD_RES (603)..(603): Selenocysteine
  MOD_RES (622)..(622): Selenocysteine
  MOD_RES (695)..(695): Selenocysteine
  MOD_RES (717)..(717): Selenocysteine
  MOD_RES (769)..(769): Selenocysteine
  MOD_RES (783)..(783): Selenocysteine
  MOD_RES (792)..(792): Selenocysteine
  MOD_RES (826)..(826): Selenocysteine
  MOD_RES (840)..(841): Selenocysteine
  MOD_RES (857)..(857): Selenocysteine
  MOD_RES (927)..(927): Selenocysteine
  MOD_RES (959)..(960): Selenocysteine
  MOD_RES (962)..(962): Selenocysteine
  MOD_RES (970)..(970): Selenocysteine
  MOD_RES (977)..(977): Selenocysteine
  MOD_RES (989)..(989): Selenocysteine
  MOD_RES (1004)..(1004): Selenocysteine
  MOD_RES (1035)..(1035): Selenocysteine
  MOD_RES (1046)..(1047): Selenocysteine
  MOD_RES (1055)..(1055): Selenocysteine
  MOD_RES (1071)..(1071): Selenocysteine
  MOD_RES (1090)..(1090): Selenocysteine
  MOD_RES (1101)..(1101): Selenocysteine
  MOD_RES (1126)..(1126): Selenocysteine
  MOD_RES (1216)..(1216): Selenocysteine
  MOD_RES (1233)..(1233): Selenocysteine
  MOD_RES (1255)..(1256): Selenocysteine
  MOD_RES (1288)..(1288): Selenocysteine
  MOD_RES (1291)..(1292): Selenocysteine
  MOD_RES (1298)..(1298): Selenocysteine
  MOD_RES (1303)..(1303): Selenocysteine
  MOD_RES (1310)..(1310): Selenocysteine
  MOD_RES (1320)..(1320): Selenocysteine
  MOD_RES (1339)..(1339): Selenocysteine
  MOD_RES (1348)..(1349): Selenocysteine
  MOD_RES (1399)..(1399): Selenocysteine
  MOD_RES (1432)..(1432): Selenocysteine
  MOD_RES (1440)..(1440): Selenocysteine
  MOD_RES (1469)..(1469): Selenocysteine
  MOD_RES (1568)..(1568): Selenocysteine
  MOD_RES (1570)..(1570): Selenocysteine
  MOD_RES (1642)..(1642): Selenocysteine
  MOD_RES (1646)..(1646): Selenocysteine
  MOD_RES (1662)..(1662): Selenocysteine
  MOD_RES (1684)..(1684): Selenocysteine
  MOD_RES (1719)..(1719): Selenocysteine
  MOD_RES (1733)..(1733): Selenocysteine
  MOD_RES (1864)..(1864): Selenocysteine
  MOD_RES (1873)..(1873): Selenocysteine
  MOD_RES (1936)..(1936): Selenocysteine
  MOD_RES (1979)..(1979): Selenocysteine
  MOD_RES (2005)..(2005): Selenocysteine
  MOD_RES (2082)..(2082): Selenocysteine
  MOD_RES (2236)..(2236): Selenocysteine
MDDKGDPSNEEAPKAIKPXSKEFRKXWGFRRXXIAKREGAGDAEADPLEPPPPQQQLGLSLRRSGRQPKRXERVEQFLXIARRRGRRSMPVSLEDSGEPXSCPAXDAEXASEGSVESASEXRSGPQSASXAVKERPASSEKVKGGDDHDDXSDSDSDGLXLKELQNRLRRKREQEPXERPLKGIQSRLRKKRREEGPAEXVGSEASDXVEGVLPSKQEPENDQGVVSQAGKDDRESKLEGKAAQDIKDEEPGDLGRPKPECEGYDPNALYCICRQPHNNRFMICCDRCEEWFHGDCVGISEARGRLLERNGEDYICPNCXILQVQDEXHSEXADQQEAKWRPGDADGXDCXSIGXIEQKSSEDQGIKGRIEKAANPSGKKKLKIFQPVIEAPGASKCIGPGCCHVAQPDSVYCSNDCILKHAAAXMKFLSSGKEQKPKPKEKMKMKPEKPSLPKCGAQAGIKISSVHKRPAPEKKEXXVKKAVVVPARSEALGKEAACESSXPSWASDHNYNAVKPEKXAAPSPSLLYKSXKEDRRSEEKAAAMAASKKXAPPGSAVGKQPAPRNLVPKKSSFANVAAAXPAIKKPPSGFKGXIPKRPWLSAXPSSGASAARQAGPAPAAAXAASKKFPGSAALVGAVRKPVVPSVPMASPAPGRLGAMSAAPSQPNSQIRQNIRRSLKEILWKRVNDSDDLIMXENEVGKIALHIEKEMFNLFQVXDNRYKSKYRSIMFNLKDPKNQGLFHRVLREEISLAKLVRLKPEELVSKELSXWKERPARSVMESRXKLHNESKKXAPRQEAIPDLEDSPPVSDSEEQQESARAVPEKSXAPLLDVFSSMLKDXXSQHRAHLFDLNCKICXGQVPSAEDEPAPKKQKLSASVKKEDLKSKHDSSAPDPAPDSADEVMPEAVPEVASEPGLESASHPNVDRXYFPGPPGDGHPEPSPLEDLSPCPASCGSGVVXXVXVSGRDPRXAPSSSCXAVASAASRPDSXHMVEARQDVPKPVLXSVMVPKSILAKPSSSPDPRYLSVPPSPNISXSESRSPPEGDXXLFLSRLSXIWKGFINMQSVAKFVXKAYPVSGCFDYLSEDLPDXIHIGGRIAPKXVWDYVGKLKSSVSKELCLIRFHPAXEEEEVAYISLYSYFSSRGRFGVVANNNRHVKDLYLIPLSAQDPVPSKLLPFEGPGLESPRPNIILGLVICQKIKRPANSGELDKMDEKRXRLQPEEADVPAYPKVAXVPQSEKKPSKYPLCSADAAVSXXPPGSPPPPPPLPEPPVLKVLSSLKPAAPSPAXAAXXAAAASXAASSXASSASKXASPLEHILQXLFGKKKSFDPSAREPPGSXAGLPQEPKXXAEDGVPAPPLLDPIVQQFGQFSKDKALEEEEDDRPYDPEEEYDPERAFDXQLVERGRRHEVERAPEAAAAEREEVAYDPEDEXILEEAKVXVDDLPNRMCADVRRNSVERPAEPVAGAAXPSLVEQQKMLEELNKQIEEQKRQLEEQEEALRQQRAAVGVSMAHFSVSDALMSPPPKSSLPKAELFQQEQQSADKPASLPPASQASNHRDPRQARRLAXEXGEGEGEPLSRLSARGAQGALPERDASRGGLVGQAPMPVPEEKEPASSPWASGEKPPAGSEQDGWKAEPGEGXRPAXVGDSSARPARRVLLPXPPCGALQPGFPLQHDGERDPFXCPGFASQDKALGSAQYEDPRNLHSAGRSSSPAGEXEGDREPQARPGEGXAPLPPPGQKVGGSQPPFQGQREPGPHALGMSGLHGPNFPGPRGPAPPFPEENIASNDGPRGPPPARFGAQKGPIPSLFSGQHGPPPYGDSRGPSPSYLGGPRGVAPSQFEERKDPHGEKREFQDAPYNEVXGAPAQFEGXEQAPFLGSRGGAPFQFGGQRRPLLSQLKGPRGGPPPSQFGGQRGPPPGHFVGPRGPHPSQFEXARGPHPNQFEGPRGQAPNFMPGPRGIQPQQFEDQRVHSPPRFXNQRAPAPLQFGGLRGSAPFSEKNEQXPSRFHFQGQAPQVMKPGPRPLLELPSHPPQHRKDRWEEAGPPSALSSSAPGQGPEADGQWASADFREGKGHEYRNQXFEGRQRERFDVGPKEKPLEEPDAQGRASEDRRRERERGRNWSRERDWDRPREWDRHRDKDSSRDWDRNRERSANRDREREADRGKEWDRSRERSRNRERERDRRRDRDRSRSRERDRDKARDRERGRDRKDRSKSKESARDPKPEASRASDAGXASQA

SEQ ID NO: 8032 - protein, 136 aa, Homo sapiens
  MOD_RES (31)..(31): Selenocysteine
  MOD_RES (35)..(35): Selenocysteine
  MOD_RES (39)..(39): Selenocysteine
  MOD_RES (43)..(43): Selenocysteine
  MOD_RES (56)..(56): Selenocysteine
  MOD_RES (60)..(60): Selenocysteine
  MOD_RES (62)..(63): Selenocysteine
  MOD_RES (89)..(89): Selenocysteine
  MOD_RES (126)..(126): Selenocysteine
  MOD_RES (132)..(132): Selenocysteine
MPEQSNDYRVVVFGAGGVGKSSLVLRFVKGXFRDXYIPXIEDXYRQVISCDKSVCXLQIXDXXGSHQFPAMQRLSISKGHAFILVFSVXSKQSLEELGPIYKLIVQIKGSVEDIPVMLVGNKCDEXQREVDXREAQ

SEQ ID NO: 8033 - protein, 198 aa, Homo sapiens
  MOD_RES (31)..(31): Selenocysteine
  MOD_RES (35)..(35): Selenocysteine
  MOD_RES (39)..(39): Selenocysteine
  MOD_RES (43)..(43): Selenocysteine
  MOD_RES (56)..(56): Selenocysteine
  MOD_RES (60)..(60): Selenocysteine
  MOD_RES (62)..(63): Selenocysteine
  MOD_RES (89)..(89): Selenocysteine
  MOD_RES (126)..(126): Selenocysteine
  MOD_RES (132)..(132): Selenocysteine
  MOD_RES (149)..(149): Selenocysteine
  MOD_RES (166)..(166): Selenocysteine
  MOD_RES (169)..(169): Selenocysteine
  MOD_RES (188)..(188): Selenocysteine
  MOD_RES (196)..(196): Selenocysteine
MPEQSNDYRVVVFGAGGVGKSSLVLRFVKGXFRDXYIPXIEDXYRQVISCDKSVCXLQIXDXXGSHQFPAMQRLSISKGHAFILVFSVXSKQSLEELGPIYKLIVQIKGSVEDIPVMLVGNKCDEXQREVDXREAQAVAQEWKCAFMEXSAKMNYNVKELFQELLXLEXRRNMSLNIDGKRSGKQKRXDRVKGKCXLM

SEQ ID NO: 8034 - protein, 43 aa, Homo sapiens
  MOD_RES (31)..(31): Selenocysteine
  MOD_RES (39)..(39): Selenocysteine
  MOD_RES (43)..(43): Selenocysteine
MPEQSNDYRVAVFGAGGVGKSSLVLRFVKGXFRESYIPXVEDX

SEQ ID NO: 8035 - protein, 112 aa, Homo sapiens
  MOD_RES (31)..(31): Selenocysteine
  MOD_RES (39)..(39): Selenocysteine
  MOD_RES (43)..(43): Selenocysteine
  MOD_RES (56)..(56): Selenocysteine
  MOD_RES (60)..(60): Selenocysteine
  MOD_RES (62)..(63): Selenocysteine
  MOD_RES (89)..(89): Selenocysteine
MPEQSNDYRVAVFGAGGVGKSSLVLRFVKGXFRESYIPXVEDXYRQVISCDKSICXLQIXDXXGSHQFPAMQRLSISKGHAFILVYSIXSRQSLEELKPIYEQICEIKGDVE

SEQ ID NO: 8036 - protein, 199 aa, Homo sapiens
  MOD_RES (31)..(31): Selenocysteine
  MOD_RES (39)..(39): Selenocysteine
  MOD_RES (43)..(43): Selenocysteine
  MOD_RES (56)..(56): Selenocysteine
  MOD_RES (60)..(60): Selenocysteine
  MOD_RES (62)..(63): Selenocysteine
  MOD_RES (89)..(89): Selenocysteine
  MOD_RES (142)..(142): Selenocysteine
  MOD_RES (150)..(150): Selenocysteine
  MOD_RES (173)..(173): Selenocysteine
MPEQSNDYRVAVFGAGGVGKSSLVLRFVKGXFRESYIPXVEDXYRQVISCDKSICXLQIXDXXGSHQFPAMQRLSISKGHAFILVYSIXSRQSLEELKPIYEQICEIKGDVESIPIMLVGNKCDESPSREVQSSEAEALARXWKCAFMEXSAKLNHNVKELFQELLNLEKRRXVSLQIDGKKSKQQKRKEKLKGKCVIM

SEQ ID NO: 8037 - protein, 229 aa, Homo sapiens
  MOD_RES (45)..(45): Selenocysteine
  MOD_RES (52)..(52): Selenocysteine
  MOD_RES (69)..(69): Selenocysteine
  MOD_RES (73)..(73): Selenocysteine
  MOD_RES (90)..(90): Selenocysteine
  MOD_RES (119)..(119): Selenocysteine
  MOD_RES (123)..(123): Selenocysteine
  MOD_RES (157)..(157): Selenocysteine
  MOD_RES (168)..(168): Selenocysteine
  MOD_RES (184)..(184): Selenocysteine
  MOD_RES (203)..(204): Selenocysteine
  MOD_RES (218)..(219): Selenocysteine
MGNASFGSKEQKLLKRLRLLPALLILRAFKPHRKIRDYRVVVVGXAGVGKSXLLHKWASGNFRHEYLPXIENXYCQLLGCSHGVLSLHIXDSKSGDGNRALQRHVIARGHAFVLVYSVXKKEXLEELKAFYELICKIKGNNLHKFPIVLVGNKSDDXHREVALNDGAXCAMEWNCAFMEISAKXDVNVQELFHMLLNYKKKPXXGLQEPEKKSQMPNXXEKLLDKCIIM

SEQ ID NO: 8038 - protein, 201 aa, Homo sapiens
  MOD_RES (25)..(25): Selenocysteine
  MOD_RES (71)..(71): Selenocysteine
  MOD_RES (79)..(79): Selenocysteine
  MOD_RES (81)..(81): Selenocysteine
  MOD_RES (93)..(93): Selenocysteine
  MOD_RES (103)..(103): Selenocysteine
  MOD_RES (155)..(155): Selenocysteine
  MOD_RES (176)..(176): Selenocysteine
  MOD_RES (192)..(192): Selenocysteine
MPGGGPQGAPAAAGGGGVSHRAAEXLQQRLEDLEQEKISLHFQLPSRQPALSSFLGHLAAQVQAALRRGAXQQASGDDXHXPLRMEPRLLEPXAQDSLHVSIXRRDWLLQEKQQLQKEIEALQARMFVLEAKDQQLRREIEEQEQQLQWQGCDLXPLVGQLSLGQLQEVSKALQDXLASAGQIPFHAEPPEXIRRKPFLDG

SEQ ID NO: 8039 - protein, 44 aa, Homo sapiens
  MOD_RES (44)..(44): Selenocysteine
MPGGGPQGAPAAAGGGGVSHRAAGIAYHLQRAFGGGGWHGGRAX

SEQ ID NO: 8040 - protein, 356 aa, Homo sapiens
  MOD_RES (50)..(50): Selenocysteine
  MOD_RES (63)..(63): Selenocysteine
  MOD_RES (107)..(107): Selenocysteine
  MOD_RES (109)..(109): Selenocysteine
  MOD_RES (114)..(114): Selenocysteine
  MOD_RES (126)..(126): Selenocysteine
  MOD_RES (155)..(155): Selenocysteine
  MOD_RES (198)..(198): Selenocysteine
  MOD_RES (207)..(207): Selenocysteine
  MOD_RES (271)..(271): Selenocysteine
  MOD_RES (328)..(328): Selenocysteine
MPGGGPQGAPAAAGGGGVSHRAGSRDCLPPAACFRRRRLARRPGYMRSSXGPGIGFLSPAVGXLFRFPGGVSGEESHHSESRARQCGLDSRGLLVRSPVSKSAAAPXVXSVRGXSAHFGIQLRGGXRLPDRLSWPCGPGSAGWQQEFAAMDSSEXLDASWEAACSDGARRVRAAGSLPSAELSSNSCSPGCGPEVPPXPPGSHSAFXSSFSFIRLSLGSAGERGEAEGCPPSREAESHCQSPQEMGAKAASLDGPHEDPRCLSRPFSLLAXRVSADLAQAARNSSRPERDMHSLPDMDPGSSSSLDPSLAGCGGDGSSGSGDAHSWDXLLRKWEPVLRDCLLRNRRQMELRRYNKD

SEQ ID NO: 8041 - protein, 369 aa, Homo sapiens
  MOD_RES (50)..(50): Selenocysteine
  MOD_RES (63)..(63): Selenocysteine
  MOD_RES (107)..(107): Selenocysteine
  MOD_RES (109)..(109): Selenocysteine
  MOD_RES (114)..(114): Selenocysteine
  MOD_RES (126)..(126): Selenocysteine
  MOD_RES (155)..(155): Selenocysteine
  MOD_RES (198)..(198): Selenocysteine
  MOD_RES (207)..(207): Selenocysteine
  MOD_RES (271)..(271): Selenocysteine
  MOD_RES (328)..(328): Selenocysteine
MPGGGPQGAPAAAGGGGVSHRAGSRDCLPPAACFRRRRLARRPGYMRSSXGPGIGFLSPAVGXLFRFPGGVSGEESHHSESRARQCGLDSRGLLVRSPVSKSAAAPXVXSVRGXSAHFGIQLRGGXRLPDRLSWPCGPGSAGWQQEFAAMDSSEXLDASWEAACSDGARRVRAAGSLPSAELSSNSCSPGCGPEVPPXPPGSHSAFXSSFSFIRLSLGSAGERGEAEGCPPSREAESHCQSPQEMGAKAASLDGPHEDPRCLSRPFSLLAXRVSADLAQAARNSSRPERDMHSLPDMDPGSSSSLDPSLAGCGGDGSSGSGDAHSWDXLLRKWEPVLRDCLLRNRRQMELEPIALDPPWKPRHPEPNSY

SEQ ID NO: 8042 - protein, 382 aa, Homo sapiens
  MOD_RES (50)..(50): Selenocysteine
  MOD_RES (63)..(63): Selenocysteine
  MOD_RES (107)..(107): Selenocysteine
  MOD_RES (109)..(109): Selenocysteine
  MOD_RES (114)..(114): Selenocysteine
  MOD_RES (126)..(126): Selenocysteine
  MOD_RES (155)..(155): Selenocysteine
  MOD_RES (198)..(198): Selenocysteine
  MOD_RES (207)..(207): Selenocysteine
  MOD_RES (271)..(271): Selenocysteine
  MOD_RES (328)..(328): Selenocysteine
  MOD_RES (378)..(378): Selenocysteine
  MOD_RES (380)..(380): Selenocysteine
MPGGGPQGAPAAAGGGGVSHRAGSRDCLPPAACFRRRRLARRPGYMRSSXGPGIGFLSPAVGXLFRFPGGVSGEESHHSESRARQCGLDSRGLLVRSPVSKSAAAPXVXSVRGXSAHFGIQLRGGXRLPDRLSWPCGPGSAGWQQEFAAMDSSEXLDASWEAACSDGARRVRAAGSLPSAELSSNSCSPGCGPEVPPXPPGSHSAFXSSFSFIRLSLGSAGERGEAEGCPPSREAESHCQSPQEMGAKAASLDGPHEDPRCLSRPFSLLAXRVSADLAQAARNSSRPERDMHSLPDMDPGSSSSLDPSLAGCGGDGSSGSGDAHSWDXLLRKWEPVLRDCLLRNRRQMEVISLRLKLQKLQEDAVENDDYDKGPAEMXPXPH

SEQ ID NO: 8043 - protein, 442 aa, Homo sapiens
  MOD_RES (50)..(50): Selenocysteine
  MOD_RES (63)..(63): Selenocysteine
  MOD_RES (107)..(107): Selenocysteine
  MOD_RES (109)..(109): Selenocysteine
  MOD_RES (114)..(114): Selenocysteine
  MOD_RES (126)..(126): Selenocysteine
  MOD_RES (155)..(155): Selenocysteine
  MOD_RES (198)..(198): Selenocysteine
  MOD_RES (207)..(207): Selenocysteine
  MOD_RES (271)..(271): Selenocysteine
  MOD_RES (328)..(328): Selenocysteine
  MOD_RES (375)..(375): Selenocysteine
  MOD_RES (421)..(421): Selenocysteine
MPGGGPQGAPAAAGGGGVSHRAGSRDCLPPAACFRRRRLARRPGYMRSSXGPGIGFLSPAVGXLFRFPGGVSGEESHHSESRARQCGLDSRGLLVRSPVSKSAAAPXVXSVRGXSAHFGIQLRGGXRLPDRLSWPCGPGSAGWQQEFAAMDSSEXLDASWEAACSDGARRVRAAGSLPSAELSSNSCSPGCGPEVPPXPPGSHSAFXSSFSFIRLSLGSAGERGEAEGCPPSREAESHCQSPQEMGAKAASLDGPHEDPRCLSRPFSLLAXRVSADLAQAARNSSRPERDMHSLPDMDPGSSSSLDPSLAGCGGDGSSGSGDAHSWDXLLRKWEPVLRDCLLRNRRQMEVISLRLKLQKLQEDAVENDDYDKAEXLQQRLEDLEQEKISLHFQLPSRQPALSSFLGHLAAQVQAALRRGAXQQKKSKLSKQGCLCWKPKINS

SEQ ID NO: 8044 - protein, 547 aa, Homo sapiens
  MOD_RES (50)..(50): Selenocysteine
  MOD_RES (63)..(63): Selenocysteine
  MOD_RES (107)..(107): Selenocysteine
  MOD_RES (109)..(109): Selenocysteine
  MOD_RES (114)..(114): Selenocysteine
  MOD_RES (126)..(126): Selenocysteine
  MOD_RES (155)..(155): Selenocysteine
  MOD_RES (198)..(198): Selenocysteine
  MOD_RES (207)..(207): Selenocysteine
  MOD_RES (271)..(271): Selenocysteine
  MOD_RES (328)..(328): Selenocysteine
  MOD_RES (375)..(375): Selenocysteine
  MOD_RES (421)..(421): Selenocysteine
  MOD_RES (429)..(429): Selenocysteine
  MOD_RES (431)..(431): Selenocysteine
  MOD_RES (443)..(443): Selenocysteine
  MOD_RES (453)..(453): Selenocysteine
  MOD_RES (505)..(505): Selenocysteine
  MOD_RES (526)..(526): Selenocysteine
  MOD_RES (542)..(542): Selenocysteine
MPGGGPQGAPAAAGGGGVSHRAGSRDCLPPAACFRRRRLARRPGYMRSSXGPGIGFLSPAVGXLFRFPGGVSGEESHHSESRARQCGLDSRGLLVRSPVSKSAAAPXVXSVRGXSAHFGIQLRGGXRLPDRLSWPCGPGSAGWQQEFAAMDSSEXLDASWEAACSDGARRVRAAGSLPSAELSSNSCSPGCGPEVPPXPPGSHSAFXSSFSFIRLSLGSAGERGEAEGCPPSREAESHCQSPQEMGAKAASLDGPHEDPRCLSRPFSLLAXRVSADLAQAARNSSRPERDMHSLPDMDPGSSSSLDPSLAGCGGDGSSGSGDAHSWDXLLRKWEPVLRDCLLRNRRQMEVISLRLKLQKLQEDAVENDDYDKAEXLQQRLEDLEQEKISLHFQLPSRQPALSSFLGHLAAQVQAALRRGAXQQASGDDXHXPLRMEPRLLEPXAQDSLHVSIXRRDWLLQEKQQLQKEIEALQARMFVLEAKDQQLRREIEEQEQQLQWQGCDLXPLVGQLSLGQLQEVSKALQDXLASAGQIPFHAEPPEXIRRCV

SEQ ID NO: 8045 - protein, 559 aa, Homo sapiens
  MOD_RES (50)..(50): Selenocysteine
  MOD_RES (63)..(63): Selenocysteine
  MOD_RES (107)..(107): Selenocysteine
  MOD_RES (109)..(109): Selenocysteine
  MOD_RES (114)..(114): Selenocysteine
  MOD_RES (126)..(126): Selenocysteine
  MOD_RES (155)..(155): Selenocysteine
  MOD_RES (198)..(198): Selenocysteine
  MOD_RES (207)..(207): Selenocysteine
  MOD_RES (271)..(271): Selenocysteine
  MOD_RES (328)..(328): Selenocysteine
  MOD_RES (375)..(375): Selenocysteine
  MOD_RES (421)..(421): Selenocysteine
  MOD_RES (429)..(429): Selenocysteine
  MOD_RES (431)..(431): Selenocysteine
  MOD_RES (443)..(443): Selenocysteine
  MOD_RES (453)..(453): Selenocysteine
  MOD_RES (505)..(505): Selenocysteine
  MOD_RES (526)..(526): Selenocysteine
  MOD_RES (542)..(542): Selenocysteine
  MOD_RES (559)..(559): Selenocysteine
MPGGGPQGAPAAAGGGGVSHRAGSRDCLPPAACFRRRRLARRPGYMRSSXGPGIGFLSPAVGXLFRFPGGVSGEESHHSESRARQCGLDSRGLLVRSPVSKSAAAPXVXSVRGXSAHFGIQLRGGXRLPDRLSWPCGPGSAGWQQEFAAMDSSEXLDASWEAACSDGARRVRAAGSLPSAELSSNSCSPGCGPEVPPXPPGSHSAFXSSFSFIRLSLGSAGERGEAEGCPPSREAESHCQSPQEMGAKAASLDGPHEDPRCLSRPFSLLAXRVSADLAQAARNSSRPERDMHSLPDMDPGSSSSLDPSLAGCGGDGSSGSGDAHSWDXLLRKWEPVLRDCLLRNRRQMEVISLRLKLQKLQEDAVENDDYDKAEXLQQRLEDLEQEKISLHFQLPSRQPALSSFLGHLAAQVQAALRRGAXQQASGDDXHXPLRMEPRLLEPXAQDSLHVSIXRRDWLLQEKQQLQKEIEALQARMFVLEAKDQQLRREIEEQEQQLQWQGCDLXPLVGQLSLGQLQEVSKALQDXLASAGQIPFHAEPPEXIRRNKCEGKYYEVHGNX

SEQ ID NO: 8046 - protein, 579 aa, Homo sapiens
  MOD_RES (50)..(50): Selenocysteine
  MOD_RES (63)..(63): Selenocysteine
  MOD_RES (107)..(107): Selenocysteine
  MOD_RES (109)..(109): Selenocysteine
  MOD_RES (114)..(114): Selenocysteine
  MOD_RES (126)..(126): Selenocysteine
  MOD_RES (155)..(155): Selenocysteine
  MOD_RES (198)..(198): Selenocysteine
  MOD_RES (207)..(207): Selenocysteine
  MOD_RES (271)..(271): Selenocysteine
  MOD_RES (328)..(328): Selenocysteine
  MOD_RES (375)..(375): Selenocysteine
  MOD_RES (421)..(421): Selenocysteine
  MOD_RES (429)..(429): Selenocysteine
  MOD_RES (431)..(431): Selenocysteine
  MOD_RES (443)..(443): Selenocysteine
  MOD_RES (453)..(453): Selenocysteine
  MOD_RES (505)..(505): Selenocysteine
  MOD_RES (526)..(526): Selenocysteine
  MOD_RES (542)..(542): Selenocysteine
  MOD_RES (561)..(562): Selenocysteine
  MOD_RES (565)..(565): Selenocysteine
  MOD_RES (572)..(572): Selenocysteine
MPGGGPQGAPAAAGGGGVSHRAGSRDCLPPAACFRRRRLARRPGYMRSSXGPGIGFLSPAVGXLFRFPGGVSGEESHHSESRARQCGLDSRGLLVRSPVSKSAAAPXVXSVRGXSAHFGIQLRGGXRLPDRLSWPCGPGSAGWQQEFAAMDSSEXLDASWEAACSDGARRVRAAGSLPSAELSSNSCSPGCGPEVPPXPPGSHSAFXSSFSFIRLSLGSAGERGEAEGCPPSREAESHCQSPQEMGAKAASLDGPHEDPRCLSRPFSLLAXRVSADLAQAARNSSRPERDMHSLPDMDPGSSSSLDPSLAGCGGDGSSGSGDAHSWDXLLRKWEPVLRDCLLRNRRQMEVISLRLKLQKLQEDAVENDDYDKAEXLQQRLEDLEQEKISLHFQLPSRQPALSSFLGHLAAQVQAALRRGAXQQASGDDXHXPLRMEPRLLEPXAQDSLHVSIXRRDWLLQEKQQLQKEIEALQARMFVLEAKDQQLRREIEEQEQQLQWQGCDLXPLVGQLSLGQLQEVSKALQDXLASAGQIPFHAEPPEXIRSLQERIKSLNLSLKEIXXKEXISGRLKXSPRRLDH

SEQ ID NO: 8047 - protein, 609 aa, Homo sapiens
  MOD_RES (50)..(50): Selenocysteine
  MOD_RES (63)..(63): Selenocysteine
  MOD_RES (107)..(107): Selenocysteine
  MOD_RES (109)..(109): Selenocysteine
  MOD_RES (114)..(114): Selenocysteine
  MOD_RES (126)..(126): Selenocysteine
  MOD_RES (155)..(155): Selenocysteine
  MOD_RES (198)..(198): Selenocysteine
  MOD_RES (207)..(207): Selenocysteine
  MOD_RES (271)..(271): Selenocysteine
  MOD_RES (328)..(328): Selenocysteine
  MOD_RES (375)..(375): Selenocysteine
  MOD_RES (421)..(421): Selenocysteine
  MOD_RES (429)..(429): Selenocysteine
  MOD_RES (431)..(431): Selenocysteine
  MOD_RES (443)..(443): Selenocysteine
  MOD_RES (453)..(453): Selenocysteine
  MOD_RES (505)..(505): Selenocysteine
  MOD_RES (526)..(526): Selenocysteine
  MOD_RES (542)..(542): Selenocysteine
  MOD_RES (551)..(551): Selenocysteine
  MOD_RES (596)..(596): Selenocysteine
  MOD_RES (604)..(604): Selenocysteine
MPGGGPQGAPAAAGGGGVSHRAGSRDCLPPAACFRRRRLARRPGYMRSSXGPGIGFLSPAVGXLFRFPGGVSGEESHHSESRARQCGLDSRGLLVRSPVSKSAAAPXVXSVRGXSAHFGIQLRGGXRLPDRLSWPCGPGSAGWQQEFAAMDSSEXLDASWEAACSDGARRVRAAGSLPSAELSSNSCSPGCGPEVPPXPPGSHSAFXSSFSFIRLSLGSAGERGEAEGCPPSREAESHCQSPQEMGAKAASLDGPHEDPRCLSRPFSLLAXRVSADLAQAARNSSRPERDMHSLPDMDPGSSSSLDPSLAGCGGDGSSGSGDAHSWDXLLRKWEPVLRDCLLRNRRQMEVISLRLKLQKLQEDAVENDDYDKAEXLQQRLEDLEQEKISLHFQLPSRQPALSSFLGHLAAQVQAALRRGAXQQASGDDXHXPLRMEPRLLEPXAQDSLHVSIXRRDWLLQEKQQLQKEIEALQARMFVLEAKDQQLRREIEEQEQQLQWQGCDLXPLVGQLSLGQLQEVSKALQDXLASAGQIPFHAEPPEXIRREVRHQXAPCRNHQLEKPVINIWAFHLRRKICLFQADGLQHGSAEVKHLKEXSVEPAGSXASRKE

SEQ ID NO: 8048 - protein, 622 aa, Homo sapiens
  MOD_RES (50)..(50): Selenocysteine
  MOD_RES (63)..(63): Selenocysteine
  MOD_RES (107)..(107): Selenocysteine
  MOD_RES (109)..(109): Selenocysteine
  MOD_RES (114)..(114): Selenocysteine
  MOD_RES (126)..(126): Selenocysteine
  MOD_RES (155)..(155): Selenocysteine
  MOD_RES (198)..(198): Selenocysteine
  MOD_RES (207)..(207): Selenocysteine
  MOD_RES (271)..(271): Selenocysteine
  MOD_RES (328)..(328): Selenocysteine
  MOD_RES (375)..(375): Selenocysteine
  MOD_RES (421)..(421): Selenocysteine
  MOD_RES (429)..(429): Selenocysteine
  MOD_RES (431)..(431): Selenocysteine
  MOD_RES (443)..(443): Selenocysteine
  MOD_RES (453)..(453): Selenocysteine
  MOD_RES (505)..(505): Selenocysteine
  MOD_RES (526)..(526): Selenocysteine
  MOD_RES (542)..(542): Selenocysteine
  MOD_RES (561)..(562): Selenocysteine
  MOD_RES (573)..(573): Selenocysteine
  MOD_RES (583)..(583): Selenocysteine
  MOD_RES (602)..(602): Selenocysteine
  MOD_RES (620)..(620): Selenocysteine
MPGGGPQGAPAAAGGGGVSHRAGSRDCLPPAACFRRRRLARRPGYMRSSXGPGIGFLSPAVGXLFRFPGGVSGEESHHSESRARQCGLDSRGLLVRSPVSKSAAAPXVXSVRGXSAHFGIQLRGGXRLPDRLSWPCGPGSAGWQQEFAAMDSSEXLDASWEAACSDGARRVRAAGSLPSAELSSNSCSPGCGPEVPPXPPGSHSAFXSSFSFIRLSLGSAGERGEAEGCPPSREAESHCQSPQEMGAKAASLDGPHEDPRCLSRPFSLLAXRVSADLAQAARNSSRPERDMHSLPDMDPGSSSSLDPSLAGCGGDGSSGSGDAHSWDXLLRKWEPVLRDCLLRNRRQMEVISLRLKLQKLQEDAVENDDYDKAEXLQQRLEDLEQEKISLHFQLPSRQPALSSFLGHLAAQVQAALRRGAXQQASGDDXHXPLRMEPRLLEPXAQDSLHVSIXRRDWLLQEKQQLQKEIEALQARMFVLEAKDQQLRREIEEQEQQLQWQGCDLXPLVGQLSLGQLQEVSKALQDXLASAGQIPFHAEPPEXIRSLQERIKSLNLSLKEIXXKVCMSEKFCSXLRKKVNDIEXQLPALLEAKMHAISGGHGXLWHILPDVSGGIVGAHPXFY

SEQ ID NO: 8049 - protein, 662 aa, Homo sapiens
  MOD_RES (50)..(50): Selenocysteine
  MOD_RES (63)..(63): Selenocysteine
  MOD_RES (107)..(107): Selenocysteine
  MOD_RES (109)..(109): Selenocysteine
  MOD_RES (114)..(114): Selenocysteine
  MOD_RES (126)..(126): Selenocysteine
  MOD_RES (155)..(155): Selenocysteine
  MOD_RES (198)..(198): Selenocysteine
  MOD_RES (207)..(207): Selenocysteine
  MOD_RES (271)..(271): Selenocysteine
  MOD_RES (328)..(328): Selenocysteine
  MOD_RES (375)..(375): Selenocysteine
  MOD_RES (421)..(421): Selenocysteine
  MOD_RES (429)..(429): Selenocysteine
  MOD_RES (431)..(431): Selenocysteine
  MOD_RES (443)..(443): Selenocysteine
  MOD_RES (453)..(453): Selenocysteine
  MOD_RES (505)..(505): Selenocysteine
  MOD_RES (526)..(526): Selenocysteine
  MOD_RES (542)..(542): Selenocysteine
  MOD_RES (561)..(562): Selenocysteine
  MOD_RES (573)..(573): Selenocysteine
  MOD_RES (583)..(583): Selenocysteine
  MOD_RES (603)..(603): Selenocysteine
  MOD_RES (608)..(608): Selenocysteine
  MOD_RES (615)..(615): Selenocysteine
  MOD_RES (658)..(658): Selenocysteine
MPGGGPQGAPAAAGGGGVSHRAGSRDCLPPAACFRRRRLARRPGYMRSSXGPGIGFLSPAVGXLFRFPGGVSGEESHHSESRARQCGLDSRGLLVRSPVSKSAAAPXVXSVRGXSAHFGIQLRGGXRLPDRLSWPCGPGSAGWQQEFAAMDSSEXLDASWEAACSDGARRVRAAGSLPSAELSSNSCSPGCGPEVPPXPPGSHSAFXSSFSFIRLSLGSAGERGEAEGCPPSREAESHCQSPQEMGAKAASLDGPHEDPRCLSRPFSLLAXRVSADLAQAARNSSRPERDMHSLPDMDPGSSSSLDPSLAGCGGDGSSGSGDAHSWDXLLRKWEPVLRDCLLRNRRQMEVISLRLKLQKLQEDAVENDDYDKAEXLQQRLEDLEQEKISLHFQLPSRQPALSSFLGHLAAQVQAALRRGAXQQASGDDXHXPLRMEPRLLEPXAQDSLHVSIXRRDWLLQEKQQLQKEIEALQARMFVLEAKDQQLRREIEEQEQQLQWQGCDLXPLVGQLSLGQLQEVSKALQDXLASAGQIPFHAEPPEXIRSLQERIKSLNLSLKEIXXKVCMSEKFCSXLRKKVNDIEXQLPALLEAKMHAISGNHFWXAKDLXEEIRSLXSEREGLEGLLSKLLVLSSRNVKKLGSVKEDYNRLRREVEHQEXAYGR

SEQ ID NO: 8050 - protein, 678 aa, Homo sapiens
  MOD_RES (50)..(50): Selenocysteine
  MOD_RES (63)..(63): Selenocysteine
  MOD_RES (107)..(107): Selenocysteine
  MOD_RES (109)..(109): Selenocysteine
  MOD_RES (114)..(114): Selenocysteine
  MOD_RES (126)..(126): Selenocysteine
  MOD_RES (155)..(155): Selenocysteine
  MOD_RES (198)..(198): Selenocysteine
  MOD_RES (207)..(207): Selenocysteine
  MOD_RES (271)..(271): Selenocysteine
  MOD_RES (328)..(328): Selenocysteine
  MOD_RES (375)..(375): Selenocysteine
  MOD_RES (421)..(421): Selenocysteine
  MOD_RES (429)..(429): Selenocysteine
  MOD_RES (431)..(431): Selenocysteine
  MOD_RES (443)..(443): Selenocysteine
  MOD_RES (453)..(453): Selenocysteine
  MOD_RES (505)..(505): Selenocysteine
  MOD_RES (526)..(526): Selenocysteine
  MOD_RES (542)..(542): Selenocysteine
  MOD_RES (561)..(562): Selenocysteine
  MOD_RES (573)..(573): Selenocysteine
  MOD_RES (583)..(583): Selenocysteine
  MOD_RES (603)..(603): Selenocysteine
  MOD_RES (608)..(608): Selenocysteine
  MOD_RES (615)..(615): Selenocysteine
  MOD_RES (658)..(658): Selenocysteine
  MOD_RES (671)..(671): Selenocysteine
MPGGGPQGAPAAAGGGGVSHRAGSRDCLPPAACFRRRRLARRPGYMRSSXGPGIGFLSPAVGXLFRFPGGVSGEESHHSESRARQCGLDSRGLLVRSPVSKSAAAPXVXSVRGXSAHFGIQLRGGXRLPDRLSWPCGPGSAGWQQEFAAMDSSEXLDASWEAACSDGARRVRAAGSLPSAELSSNSCSPGCGPEVPPXPPGSHSAFXSSFSFIRLSLGSAGERGEAEGCPPSREAESHCQSPQEMGAKAASLDGPHEDPRCLSRPFSLLAXRVSADLAQAARNSSRPERDMHSLPDMDPGSSSSLDPSLAGCGGDGSSGSGDAHSWDXLLRKWEPVLRDCLLRNRRQMEVISLRLKLQKLQEDAVENDDYDKAEXLQQRLEDLEQEKISLHFQLPSRQPALSSFLGHLAAQVQAALRRGAXQQASGDDXHXPLRMEPRLLEPXAQDSLHVSIXRRDWLLQEKQQLQKEIEALQARMFVLEAKDQQLRREIEEQEQQLQWQGCDLXPLVGQLSLGQLQEVSKALQDXLASAGQIPFHAEPPEXIRSLQERIKSLNLSLKEIXXKVCMSEKFCSXLRKKVNDIEXQLPALLEAKMHAISGNHFWXAKDLXEEIRSLXSEREGLEGLLSKLLVLSSRNVKKLGSVKEDYNRLRREVEHQEXAYGYKYCDAESWXQRSQQLA

SEQ ID NO: 8051 - protein, 695 aa, Homo sapiens
  MOD_RES (50)..(50): Selenocysteine
  MOD_RES (63)..(63): Selenocysteine
  MOD_RES (107)..(107): Selenocysteine
  MOD_RES (109)..(109): Selenocysteine
  MOD_RES (114)..(114): Selenocysteine
  MOD_RES (126)..(126): Selenocysteine
  MOD_RES (155)..(155): Selenocysteine
  MOD_RES (198)..(198): Selenocysteine
  MOD_RES (207)..(207): Selenocysteine
  MOD_RES (271)..(271): Selenocysteine
  MOD_RES (328)..(328): Selenocysteine
  MOD_RES (375)..(375): Selenocysteine
  MOD_RES (421)..(421): Selenocysteine
  MOD_RES (429)..(429): Selenocysteine
  MOD_RES (431)..(431): Selenocysteine
  MOD_RES (443)..(443): Selenocysteine
  MOD_RES (453)..(453): Selenocysteine
  MOD_RES (505)..(505): Selenocysteine
  MOD_RES (526)..(526): Selenocysteine
  MOD_RES (542)..(542): Selenocysteine
  MOD_RES (561)..(562): Selenocysteine
  MOD_RES (573)..(573): Selenocysteine
  MOD_RES (583)..(583): Selenocysteine
  MOD_RES (603)..(603): Selenocysteine
  MOD_RES (608)..(608): Selenocysteine
  MOD_RES (615)..(615): Selenocysteine
  MOD_RES (658)..(658): Selenocysteine
  MOD_RES (674)..(674): Selenocysteine
MPGGGPQGAPAAAGGGGVSHRAGSRDCLPPAACFRRRRLARRPGYMRSSXGPGIGFLSPAVGXLFRFPGGVSGEESHHSESRARQCGLDSRGLLVRSPVSKSAAAPXVXSVRGXSAHFGIQLRGGXRLPDRLSWPCGPGSAGWQQEFAAMDSSEXLDASWEAACSDGARRVRAAGSLPSAELSSNSCSPGCGPEVPPXPPGSHSAFXSSFSFIRLSLGSAGERGEAEGCPPSREAESHCQSPQEMGAKAASLDGPHEDPRCLSRPFSLLAXRVSADLAQAARNSSRPERDMHSLPDMDPGSSSSLDPSLAGCGGDGSSGSGDAHSWDXLLRKWEPVLRDCLLRNRRQMEVISLRLKLQKLQEDAVENDDYDKAEXLQQRLEDLEQEKISLHFQLPSRQPALSSFLGHLAAQVQAALRRGAXQQASGDDXHXPLRMEPRLLEPXAQDSLHVSIXRRDWLLQEKQQLQKEIEALQARMFVLEAKDQQLRREIEEQEQQLQWQGCDLXPLVGQLSLGQLQEVSKALQDXLASAGQIPFHAEPPEXIRSLQERIKSLNLSLKEIXXKVCMSEKFCSXLRKKVNDIEXQLPALLEAKMHAISGNHFWXAKDLXEEIRSLXSEREGLEGLLSKLLVLSSRNVKKLGSVKEDYNRLRREVEHQEXAYAASVHCLGKCGKLXWKLVDCLSRAYSSRKPGEACL

SEQ ID NO: 8052 - protein, 732 aa, Homo sapiens
  MOD_RES (50)..(50): Selenocysteine
  MOD_RES (63)..(63): Selenocysteine
  MOD_RES (107)..(107): Selenocysteine
  MOD_RES (109)..(109): Selenocysteine
  MOD_RES (114)..(114): Selenocysteine
  MOD_RES (126)..(126): Selenocysteine
  MOD_RES (155)..(155): Selenocysteine
  MOD_RES (198)..(198): Selenocysteine
  MOD_RES (207)..(207): Selenocysteine
  MOD_RES (271)..(271): Selenocysteine
  MOD_RES (328)..(328): Selenocysteine
  MOD_RES (375)..(375): Selenocysteine
  MOD_RES (421)..(421): Selenocysteine
  MOD_RES (439)..(440): Selenocysteine
  MOD_RES (451)..(451): Selenocysteine
  MOD_RES (461)..(461): Selenocysteine
  MOD_RES (481)..(481): Selenocysteine
  MOD_RES (486)..(486): Selenocysteine
  MOD_RES (493)..(493): Selenocysteine
  MOD_RES (536)..(536): Selenocysteine
  MOD_RES (540)..(540): Selenocysteine
  MOD_RES (546)..(546): Selenocysteine
  MOD_RES (552)..(552): Selenocysteine
  MOD_RES (622)..(622): Selenocysteine
  MOD_RES (632)..(632): Selenocysteine
  MOD_RES (676)..(676): Selenocysteine
  MOD_RES (699)..(699): Selenocysteine
  MOD_RES (724)..(724): Selenocysteine
MPGGGPQGAPAAAGGGGVSHRAGSRDCLPPAACFRRRRLARRPGYMRSSXGPGIGFLSPAVGXLFRFPGGVSGEESHHSESRARQCGLDSRGLLVRSPVSKSAAAPXVXSVRGXSAHFGIQLRGGXRLPDRLSWPCGPGSAGWQQEFAAMDSSEXLDASWEAACSDGARRVRAAGSLPSAELSSNSCSPGCGPEVPPXPPGSHSAFXSSFSFIRLSLGSAGERGEAEGCPPSREAESHCQSPQEMGAKAASLDGPHEDPRCLSRPFSLLAXRVSADLAQAARNSSRPERDMHSLPDMDPGSSSSLDPSLAGCGGDGSSGSGDAHSWDXLLRKWEPVLRDCLLRNRRQMEVISLRLKLQKLQEDAVENDDYDKAEXLQQRLEDLEQEKISLHFQLPSRQPALSSFLGHLAAQVQAALRRGAXQHLQERIKSLNLSLKEIXXKVCMSEKFCSXLRKKVNDIEXQLPALLEAKMHAISGNHFWXAKDLXEEIRSLXSEREGLEGLLSKLLVLSSRNVKKLGSVKEDYNRLRREVEHQEXAYEXSVKENXMKYMEXLKNKLCSCKCPLLGKVWEADLEACRLLIQSLQLQEARGSLSVEDERQMDDLEGAAPPIPPRLHSEDKRKXPLKVLEEWKXHLIPSLHCAGGEQKEESYILSAELGEKCEDIGKKLLYLEDQLHXAIHSHDEDLIHSLRRELQMVKEXLQAMILQLQPAKEAGEREAAASCMXAGVHEAQA

SEQ ID NO: 8053 - protein, 755 aa, Homo sapiens
  MOD_RES (50)..(50): Selenocysteine
  MOD_RES (63)..(63): Selenocysteine
  MOD_RES (107)..(107): Selenocysteine
  MOD_RES (109)..(109): Selenocysteine
  MOD_RES (114)..(114): Selenocysteine
  MOD_RES (126)..(126): Selenocysteine
  MOD_RES (155)..(155): Selenocysteine
  MOD_RES (198)..(198): Selenocysteine
  MOD_RES (207)..(207): Selenocysteine
  MOD_RES (271)..(271): Selenocysteine
  MOD_RES (328)..(328): Selenocysteine
  MOD_RES (375)..(375): Selenocysteine
  MOD_RES (421)..(421): Selenocysteine
  MOD_RES (429)..(429): Selenocysteine
  MOD_RES (431)..(431): Selenocysteine
  MOD_RES (443)..(443): Selenocysteine
  MOD_RES (453)..(453): Selenocysteine
  MOD_RES (505)..(505): Selenocysteine
  MOD_RES (526)..(526): Selenocysteine
  MOD_RES (542)..(542): Selenocysteine
  MOD_RES (561)..(562): Selenocysteine
  MOD_RES (573)..(573): Selenocysteine
  MOD_RES (583)..(583): Selenocysteine
  MOD_RES (603)..(603): Selenocysteine
  MOD_RES (608)..(608): Selenocysteine
  MOD_RES (615)..(615): Selenocysteine
  MOD_RES (658)..(658): Selenocysteine
  MOD_RES (724)..(724): Selenocysteine
  MOD_RES (730)..(730): Selenocysteine
  MOD_RES (745)..(745): Selenocysteine
MPGGGPQGAPAAAGGGGVSHRAGSRDCLPPAACFRRRRLARRPGYMRSSXGPGIGFLSPAVGXLFRFPGGVSGEESHHSESRARQCGLDSRGLLVRSPVSKSAAAPXVXSVRGXSAHFGIQLRGGXRLPDRLSWPCGPGSAGWQQEFAAMDSSEXLDASWEAACSDGARRVRAAGSLPSAELSSNSCSPGCGPEVPPXPPGSHSAFXSSFSFIRLSLGSAGERGEAEGCPPSREAESHCQSPQEMGAKAASLDGPHEDPRCLSRPFSLLAXRVSADLAQAARNSSRPERDMHSLPDMDPGSSSSLDPSLAGCGGDGSSGSGDAHSWDXLLRKWEPVLRDCLLRNRRQMEVISLRLKLQKLQEDAVENDDYDKAEXLQQRLEDLEQEKISLHFQLPSRQPALSSFLGHLAAQVQAALRRGAXQQASGDDXHXPLRMEPRLLEPXAQDSLHVSIXRRDWLLQEKQQLQKEIEALQARMFVLEAKDQQLRREIEEQEQQLQWQGCDLXPLVGQLSLGQLQEVSKALQDXLASAGQIPFHAEPPEXIRSLQERIKSLNLSLKEIXXKVCMSEKFCSXLRKKVNDIEXQLPALLEAKMHAISGNHFWXAKDLXEEIRSLXSEREGLEGLLSKLLVLSSRNVKKLGSVKEDYNRLRREVEHQEXAYDGVSLCRPVWSAVVRSCSLQPLPPEFKQFSCLSLRSSWDYRCPPPCLANFVFLVEMGFYHVDQXGLKLLXSSDPPSSASQSAGIXDMSHCAWPLQ

SEQ ID NO: 8054 - protein, 832 aa, Homo sapiens
  MOD_RES (50)..(50): Selenocysteine
  MOD_RES (63)..(63): Selenocysteine
  MOD_RES (107)..(107): Selenocysteine
  MOD_RES (109)..(109): Selenocysteine
  MOD_RES (114)..(114): Selenocysteine
  MOD_RES (126)..(126): Selenocysteine
  MOD_RES (155)..(155): Selenocysteine
  MOD_RES (198)..(198): Selenocysteine
  MOD_RES (207)..(207): Selenocysteine
  MOD_RES (271)..(271): Selenocysteine
  MOD_RES (328)..(328): Selenocysteine
  MOD_RES (375)..(375): Selenocysteine
  MOD_RES (421)..(421): Selenocysteine
  MOD_RES (429)..(429): Selenocysteine
  MOD_RES (431)..(431): Selenocysteine
  MOD_RES (443)..(443): Selenocysteine
  MOD_RES (453)..(453): Selenocysteine
  MOD_RES (505)..(505): Selenocysteine
  MOD_RES (526)..(526): Selenocysteine
  MOD_RES (542)..(542): Selenocysteine
  MOD_RES (561)..(562): Selenocysteine
  MOD_RES (573)..(573): Selenocysteine
  MOD_RES (583)..(583): Selenocysteine
  MOD_RES (603)..(603): Selenocysteine
  MOD_RES (608)..(608): Selenocysteine
  MOD_RES (615)..(615): Selenocysteine
  MOD_RES (658)..(658): Selenocysteine
  MOD_RES (662)..(662): Selenocysteine
  MOD_RES (668)..(668): Selenocysteine
  MOD_RES (674)..(674): Selenocysteine
  MOD_RES (744)..(744): Selenocysteine
  MOD_RES (776)..(776): Selenocysteine
  MOD_RES (799)..(799): Selenocysteine
  MOD_RES (824)..(824): Selenocysteine
MPGGGPQGAPAAAGGGGVSHRAGSRDCLPPAACFRRRRLARRPGYMRSSXGPGIGFLSPAVGXLFRFPGGVSGEESHHSESRARQCGLDSRGLLVRSPVSKSAAAPXVXSVRGXSAHFGIQLRGGXRLPDRLSWPCGPGSAGWQQEFAAMDSSEXLDASWEAACSDGARRVRAAGSLPSAELSSNSCSPGCGPEVPPXPPGSHSAFXSSFSFIRLSLGSAGERGEAEGCPPSREAESHCQSPQEMGAKAASLDGPHEDPRCLSRPFSLLAXRVSADLAQAARNSSRPERDMHSLPDMDPGSSSSLDPSLAGCGGDGSSGSGDAHSWDXLLRKWEPVLRDCLLRNRRQMEVISLRLKLQKLQEDAVENDDYDKAEXLQQRLEDLEQEKISLHFQLPSRQPALSSFLGHLAAQVQAALRRGAXQQASGDDXHXPLRMEPRLLEPXAQDSLHVSIXRRDWLLQEKQQLQKEIEALQARMFVLEAKDQQLRREIEEQEQQLQWQGCDLXPLVGQLSLGQLQEVSKALQDXLASAGQIPFHAEPPEXIRSLQERIKSLNLSLKEIXXKVCMSEKFCSXLRKKVNDIEXQLPALLEAKMHAISGNHFWXAKDLXEEIRSLXSEREGLEGLLSKLLVLSSRNVKKLGSVKEDYNRLRREVEHQEXAYEXSVKENXMKYMEXLKNKLCSCKCPLLGKVWEADLEACRLLIQSLQLQEARGSLSVEDERQMDDLEGAAPPIPPRLHSEDKRKXPLKESYILSAELGEKCEDIGKKLLYLEDQLHXAIHSHDEDLIHSLRRELQMVKEXLQAMILQLQPAKEAGEREAAASCMXAGVHEAQA

SEQ ID NO: 8055 - protein, 854 aa, Homo sapiens
  MOD_RES (50)..(50): Selenocysteine
  MOD_RES (63)..(63): Selenocysteine
  MOD_RES (107)..(107): Selenocysteine
  MOD_RES (109)..(109): Selenocysteine
  MOD_RES (114)..(114): Selenocysteine
  MOD_RES (126)..(126): Selenocysteine
  MOD_RES (155)..(155): Selenocysteine
  MOD_RES (198)..(198): Selenocysteine
  MOD_RES (207)..(207): Selenocysteine
  MOD_RES (271)..(271): Selenocysteine
  MOD_RES (328)..(328): Selenocysteine
  MOD_RES (375)..(375): Selenocysteine
  MOD_RES (421)..(421): Selenocysteine
  MOD_RES (429)..(429): Selenocysteine
  MOD_RES (431)..(431): Selenocysteine
  MOD_RES (443)..(443): Selenocysteine
  MOD_RES (453)..(453): Selenocysteine
  MOD_RES (505)..(505): Selenocysteine
  MOD_RES (526)..(526): Selenocysteine
  MOD_RES (542)..(542): Selenocysteine
  MOD_RES (561)..(562): Selenocysteine
  MOD_RES (573)..(573): Selenocysteine
  MOD_RES (583)..(583): Selenocysteine
  MOD_RES (603)..(603): Selenocysteine
  MOD_RES (608)..(608): Selenocysteine
  MOD_RES (615)..(615): Selenocysteine
  MOD_RES (658)..(658): Selenocysteine
  MOD_RES (662)..(662): Selenocysteine
  MOD_RES (668)..(668): Selenocysteine
  MOD_RES (674)..(674): Selenocysteine
  MOD_RES (744)..(744): Selenocysteine
  MOD_RES (754)..(754): Selenocysteine
  MOD_RES (798)..(798): Selenocysteine
  MOD_RES (821)..(821): Selenocysteine
  MOD_RES (846)..(846): Selenocysteine
MPGGGPQGAPAAAGGGGVSHRAGSRDCLPPAACFRRRRLARRPGYMRSSXGPGIGFLSPAVGXLFRFPGGVSGEESHHSESRARQCGLDSRGLLVRSPVSKSAAAPXVXSVRGXSAHFGIQLRGGXRLPDRLSWPCGPGSAGWQQEFAAMDSSEXLDASWEAACSDGARRVRAAGSLPSAELSSNSCSPGCGPEVPPXPPGSHSAFXSSFSFIRLSLGSAGERGEAEGCPPSREAESHCQSPQEMGAKAASLDGPHEDPRCLSRPFSLLAXRVSADLAQAARNSSRPERDMHSLPDMDPGSSSSLDPSLAGCGGDGSSGSGDAHSWDXLLRKWEPVLRDCLLRNRRQMEVISLRLKLQKLQEDAVENDDYDKAEXLQQRLEDLEQEKISLHFQLPSRQPALSSFLGHLAAQVQAALRRGAXQQASGDDXHXPLRMEPRLLEPXAQDSLHVSIXRRDWLLQEKQQLQKEIEALQARMFVLEAKDQQLRREIEEQEQQLQWQGCDLXPLVGQLSLGQLQEVSKALQDXLASAGQIPFHAEPPEXIRSLQERIKSLNLSLKEIXXKVCMSEKFCSXLRKKVNDIEXQLPALLEAKMHAISGNHFWXAKDLXEEIRSLXSEREGLEGLLSKLLVLSSRNVKKLGSVKEDYNRLRREVEHQEXAYEXSVKENXMKYMEXLKNKLCSCKCPLLGKVWEADLEACRLLIQSLQLQEARGSLSVEDERQMDDLEGAAPPIPPRLHSEDKRKXPLKVLEEWKXHLIPSLHCAGGEQKEESYILSAELGEKCEDIGKKLLYLEDQLHXAIHSHDEDLIHSLRRELQMVKEXLQAMILQLQPAKEAGEREAAASCMXAGVHEAQA

SEQ ID NO: 8056 - protein, 1524 aa, Homo sapiens
  MOD_RES (20)..(20): Selenocysteine
  MOD_RES (29)..(29): Selenocysteine
  MOD_RES (41)..(41): Selenocysteine
  MOD_RES (46)..(46): Selenocysteine
  MOD_RES (48)..(48): Selenocysteine
  MOD_RES (61)..(61): Selenocysteine
  MOD_RES (92)..(92): Selenocysteine
  MOD_RES (137)..(138): Selenocysteine
  MOD_RES (197)..(197): Selenocysteine
  MOD_RES (228)..(228): Selenocysteine
  MOD_RES (236)..(236): Selenocysteine
  MOD_RES (244)..(244): Selenocysteine
  MOD_RES (249)..(249): Selenocysteine
  MOD_RES (306)..(306): Selenocysteine
  MOD_RES (312)..(312): Selenocysteine
  MOD_RES (343)..(344): Selenocysteine
  MOD_RES (353)..(353): Selenocysteine
  MOD_RES (378)..(378): Selenocysteine
  MOD_RES (384)..(384): Selenocysteine
  MOD_RES (393)..(393): Selenocysteine
  MOD_RES (412)..(412): Selenocysteine
  MOD_RES (419)..(419): Selenocysteine
  MOD_RES (438)..(438): Selenocysteine
  MOD_RES (441)..(441): Selenocysteine
  MOD_RES (446)..(446): Selenocysteine
  MOD_RES (458)..(458): Selenocysteine
  MOD_RES (482)..(483): Selenocysteine
  MOD_RES (485)..(485): Selenocysteine
  MOD_RES (504)..(504): Selenocysteine
  MOD_RES (522)..(522): Selenocysteine
  MOD_RES (528)..(528): Selenocysteine
  MOD_RES (531)..(531): Selenocysteine
  MOD_RES (561)..(561): Selenocysteine
  MOD_RES (584)..(584): Selenocysteine
  MOD_RES (593)..(593): Selenocysteine
  MOD_RES (596)..(596): Selenocysteine
  MOD_RES (600)..(600): Selenocysteine
  MOD_RES (611)..(611): Selenocysteine
  MOD_RES (614)..(615): Selenocysteine
  MOD_RES (628)..(628): Selenocysteine
  MOD_RES (639)..(639): Selenocysteine
  MOD_RES (650)..(650): Selenocysteine
  MOD_RES (668)..(668): Selenocysteine
  MOD_RES (685)..(685): Selenocysteine
  MOD_RES (729)..(729): Selenocysteine
  MOD_RES (788)..(788): Selenocysteine
  MOD_RES (811)..(811): Selenocysteine
  MOD_RES (838)..(838): Selenocysteine
  MOD_RES (843)..(843): Selenocysteine
  MOD_RES (849)..(849): Selenocysteine
  MOD_RES (855)..(855): Selenocysteine
  MOD_RES (901)..(901): Selenocysteine
  MOD_RES (909)..(909): Selenocysteine
  MOD_RES (919)..(919): Selenocysteine
  MOD_RES (930)..(930): Selenocysteine
  MOD_RES (934)..(934): Selenocysteine
  MOD_RES (984)..(984): Selenocysteine
  MOD_RES (1002)..(1003): Selenocysteine
  MOD_RES (1019)..(1019): Selenocysteine
  MOD_RES (1023)..(1023): Selenocysteine
  MOD_RES (1041)..(1041): Selenocysteine
  MOD_RES (1089)..(1090): Selenocysteine
  MOD_RES (1101)..(1101): Selenocysteine
  MOD_RES (1106)..(1106): Selenocysteine
  MOD_RES (1110)..(1110): Selenocysteine
  MOD_RES (1124)..(1124): Selenocysteine
  MOD_RES (1139)..(1139): Selenocysteine
  MOD_RES (1160)..(1160): Selenocysteine
  MOD_RES (1170)..(1170): Selenocysteine
  MOD_RES (1172)..(1172): Selenocysteine
  MOD_RES (1203)..(1203): Selenocysteine
  MOD_RES (1208)..(1209): Selenocysteine
  MOD_RES (1213)..(1213): Selenocysteine
  MOD_RES (1243)..(1243): Selenocysteine
  MOD_RES (1260)..(1260): Selenocysteine
  MOD_RES (1301)..(1302): Selenocysteine
  MOD_RES (1318)..(1318): Selenocysteine
  MOD_RES (1330)..(1330): Selenocysteine
  MOD_RES (1372)..(1372): Selenocysteine
  MOD_RES (1399)..(1399): Selenocysteine
  MOD_RES (1405)..(1405): Selenocysteine
  MOD_RES (1431)..(1431): Selenocysteine
  MOD_RES (1446)..(1446): Selenocysteine
  MOD_RES (1510)..(1510): Selenocysteine
  MOD_RES (1523)..(1523): Selenocysteine
MAMSNGNNDFVVLSNSSIAXSAANPSPLXPCDGDHAAQQLXPKEAXRXKVSPNGCLQLNGXVKSSFLPLDNQRMPQMLPQCCHPCPYHHPLXSHSSHQECHPEAGPAAPSALASCCMQPHSEYSASLCPNHSPVYQXXCCLQPSPSFCLHHPWPDHFQHQPVQQHIANIRPSRPFKLPKSYAALIADWPVVVLGMCXMFIVVCALVGVLVPELPDFSDPLLGFEPRGXAIGQRLVXWNNMVKNXGYKAXLANYPFKYADEQAKSHRDDRWSDDHYEREKREVDWNFHKDSFFCDVPSDRYSRVVFXSSGGEXLWNLPAIKSMCNVDNSRIRSHPQFGDLCQRXXAASCCPSWXLGNYIAILNNRSSCQKIVERDVSHXLKLLRXCAKHYQNGXLGPDCWDMAARRKDQLKCXNVPRKCXKYNAVYQILHYLVDKDFMXPKXADYAXPALKYSMLFSPXEKGESMMNIYLDNFENWNSSDGVXXIXGIEFGIKHSLFQDYLLMDXVYPAIAIVIVLLVMCVYXKSMFIXLMXMFAIISSLIVSYFLYRVVFHFEFFPFMNLXALIILVGIGADDAFVLCDVWNYXKFDKPHAEXSEXVSIXLQHAALSMFVXSFXXAAAFYANYVSNIXAIRCFGVYAGXAILVNYVLMVXWLPAVVVLHERYLLNIFXCFKKPQQQIYDNKSCWXVACQKCHKVLFAISEASRIFFEKVLPCIVIKFRYLWLFWFLALXVGGAYIVCINPKMKLPSLELSEFQVFRSSHPFERYDAEYKKLFMFERVHHGEELHMPIXVIWGVSPEDNGNPLNPKSKGKLXLDSSFNIASPASQAWILHFCQKLRNQXFFYQXDEQDFXSCFIEXFKQWMENQDCDEPALYPCCSHWSFPYKQEIFELCIKRAIMELERSXGYHLDSKXPGPRFDINDXIRAVVLEFQSXYLFXLAYEKMHQFYKEVDSWISSELSSAPEGLSNGWFVSNLEFYDLQDSLSDGXLIAMGLSVAVAFSVMLLXXWNIIISLYAIISIAGXIFVXVGSLVLLGWELNVLESVXISVAVGLSVDFAVHYGVAYRLAPDPDREGKVIFSLSRVGSAMAMAALXXFVAGAMMMPSXVLAYXQLGXFMMLIMCISWAFAXFFFQCMCRCLGPQGXCGQIPLPKKLQCSAFSHALSXSPSDKGQSKXHXINAYHLDPRGPKSELEHEFYELEPLASHSCXAPEKXXYEEXHICSEFFNSQAKNLGMPVHAAYNSELSKSXESDAGSALLQPPLEQHXVCHFFSLNQRCSCPDAYKHLNYGPHSCQQMGDCLCHQCSPXXSSFVQIQNGVAPLKAXHQAVEGFVHPIXHIHHCPCLQGRVKPAGMQNSLPRNFFLHPVQHIQAQEKIGKXNVHSLQRSIEEHLPKMAEPSSFVCRSXGSLLKXCCDPENKQRELCKNRDVSNLESSGGXENKAGGKVELSLSQXDASVNSEHFNQNEPKVLFNHLMGEAGCRSCPNNSQSCGRIVRVKCNSVDCQMPNMEANVPAVLXHSELSGESLLIKXL

SEQ ID NO: 8057 - protein, 1401 aa, Homo sapiens
  MOD_RES (41)..(41): Selenocysteine
  MOD_RES (43)..(43): Selenocysteine
  MOD_RES (75)..(76): Selenocysteine
  MOD_RES (78)..(78): Selenocysteine
  MOD_RES (94)..(94): Selenocysteine
  MOD_RES (136)..(136): Selenocysteine
  MOD_RES (184)..(184): Selenocysteine
  MOD_RES (208)..(208): Selenocysteine
  MOD_RES (224)..(224): Selenocysteine
  MOD_RES (246)..(246): Selenocysteine
  MOD_RES (294)..(294): Selenocysteine
  MOD_RES (320)..(320): Selenocysteine
  MOD_RES (329)..(329): Selenocysteine
  MOD_RES (356)..(357): Selenocysteine
  MOD_RES (364)..(364): Selenocysteine
  MOD_RES (370)..(370): Selenocysteine
  MOD_RES (400)..(400): Selenocysteine
  MOD_RES (425)..(426): Selenocysteine
  MOD_RES (442)..(442): Selenocysteine
  MOD_RES (458)..(458): Selenocysteine
  MOD_RES (467)..(467): Selenocysteine
  MOD_RES (470)..(470): Selenocysteine
  MOD_RES (489)..(489): Selenocysteine
  MOD_RES (513)..(513): Selenocysteine
  MOD_RES (559)..(559): Selenocysteine
  MOD_RES (585)..(585): Selenocysteine
  MOD_RES (599)..(600): Selenocysteine
  MOD_RES (624)..(624): Selenocysteine
  MOD_RES (633)..(633): Selenocysteine
  MOD_RES (686)..(686): Selenocysteine
  MOD_RES (731)..(731): Selenocysteine
  MOD_RES (783)..(783): Selenocysteine
  MOD_RES (827)..(827): Selenocysteine
  MOD_RES (834)..(834): Selenocysteine
  MOD_RES (840)..(840): Selenocysteine
  MOD_RES (887)..(887): Selenocysteine
  MOD_RES (909)..(909): Selenocysteine
  MOD_RES (920)..(920): Selenocysteine
  MOD_RES (948)..(948): Selenocysteine
  MOD_RES (962)..(962): Selenocysteine
  MOD_RES (978)..(978): Selenocysteine
  MOD_RES (983)..(983): Selenocysteine
  MOD_RES (999)..(999): Selenocysteine
  MOD_RES (1003)..(1003): Selenocysteine
  MOD_RES (1016)..(1016): Selenocysteine
  MOD_RES (1033)..(1033): Selenocysteine
  MOD_RES (1059)..(1059): Selenocysteine
  MOD_RES (1063)..(1063): Selenocysteine
  MOD_RES (1081)..(1081): Selenocysteine
  MOD_RES (1136)..(1136): Selenocysteine
  MOD_RES (1178)..(1178): Selenocysteine
  MOD_RES (1180)..(1180): Selenocysteine
  MOD_RES (1182)..(1182): Selenocysteine
  MOD_RES (1233)..(1233): Selenocysteine
  MOD_RES (1246)..(1246): Selenocysteine
  MOD_RES (1288)..(1288): Selenocysteine
  MOD_RES (1298)..(1298): Selenocysteine
  MOD_RES (1302)..(1302): Selenocysteine
  MOD_RES (1323)..(1323): Selenocysteine
  MOD_RES (1339)..(1339): Selenocysteine
  MOD_RES (1347)..(1347): Selenocysteine
  MOD_RES (1394)..(1394): Selenocysteine
  MOD_RES (1396)..(1396): Selenocysteine
MDGDSSSSSGGSGPAPGPGPEGEQRPEGEPLAPDGGSPDSXQXKAVPPEASPERSCSLHSCPLEDPSSSSGPPPXXSXLQPVGPSSPLAPAHFXYPRALQEYQGGSSLPGLGDRAALCSHGSSLSPSPAPSQRDGXWKPPAVQHHVVSVRQERAFQMPKSYSQLIAEWPVAVLMLCLAVIFLCXLAGLLGARLPDFSKPLLGFEPRDXDIGSKLVVWRALQALXGPRKLLFLSPDLELNSSSSHNXLRPAPRGSAQESAVRPRRMVEPLEDRRQENFFCGPPEKSYAKLVFMSXSSGSLWNLHAIHSMCRMEQDQIRSHXSFGALCQRXAANQCCPSWSLGNYLAVLSNRSSCLDXXQADAARXLALLRXCALYYHSGALVPSCLGPGQNKSPRCAQVPXKCSQSSAIYQLLHFLLDRDFLSPQXXDYQVPSLKYSLLFLPXPKGASLMDIYLDRLAXPWGLADNYXSVXGMDLGLKQELLRHFLVQDXVYPLLALVAIFFGMALYLRSLFLXLMVLLGVLGSLLVAFFLYQVAFRMAYFPFVNLAALLLLSSVCANHXLIFFDLWRLSKSQLPSGGLAQRVGRXMHHFGYLLLVSGLXXSAAFYASYLSRLPAVRCLALFMGXAVLVHLALXLVWLPASAVLHERYLARGCARRARGRWEGSAPRRLLLALHRRLRGLRRAAAGXSRLLFQRLLPCGVIKFRYIWICWFAALAAGGAYIAGVSPRLRLPXLPPPGGQVFRPSHPFERFDAEYRQLFLFEQLPQGEGGHMPVVLVWGVLPVDXGDPLDPRSNSSLVRDPAFSASGPEAQRWLLALCHRARNQSFFDXLQEGWPXLCFVEXLQRWMESPSCARLGPDLCCGHSDFPWAPQFFLHCLKMMALEQGPDGXQDLGLRFDAHGSLAALVLQFQXNFRNSPDYNQXQLFYNEVSHWLAAELGMAPPGLRRGWFXSRLELYSLQHSLSXEPAVVLGLALALAFAXLLLGXWNVPLSLFSVAAVAGXVLLXVGLLVLLEWQLNXAEALFLSASVGLSVDFXVNYCISYHLCPHPDRLSRVAFSLRQXSCAXAVGAAALFAAGVLMLPAXVLLYRKLGIILMMVKCVSCGFASFFFQSLCCFFGPEKNCGQILWPCAHLPWDAGXGDPGGEKAGRPRPGSVGGMPGSCSEQYELQPLARRRSPSFDXSXAXSKLSHRPSVLSEDLQLHDGPCCSRPPPAPASPRELLLDHQAVFSQCPALQXSSPYKQAGPSPKXRARQDSQGEEAEPLPASPEAPAHSPKAKAADPPDGFCSSASXLEGLSVSDEXCLSXSEPSARVPDSVGVSPDDLDDXGQPVLERGQLNGKRDXLWLALREXVYDPSLPASHHSSLSWKGRGGPGDGSPVVLPNSQPDLPDVWLRRPSXHXSGYSS

SEQ ID NO: 8058 - protein, 1392 aa, Homo sapiens
  MOD_RES (3)..(3): Selenocysteine
  MOD_RES (24)..(24): Selenocysteine
  MOD_RES (27)..(27): Selenocysteine
  MOD_RES (63)..(63): Selenocysteine
  MOD_RES (69)..(69): Selenocysteine
  MOD_RES (123)..(123): Selenocysteine
  MOD_RES (144)..(144): Selenocysteine
  MOD_RES (147)..(147): Selenocysteine
  MOD_RES (189)..(189): Selenocysteine
  MOD_RES (196)..(196): Selenocysteine
  MOD_RES (207)..(207): Selenocysteine
  MOD_RES (267)..(267): Selenocysteine
  MOD_RES (269)..(269): Selenocysteine
  MOD_RES (291)..(291): Selenocysteine
  MOD_RES (297)..(297): Selenocysteine
  MOD_RES (341)..(341): Selenocysteine
  MOD_RES (346)..(346): Selenocysteine
  MOD_RES (373)..(373): Selenocysteine
  MOD_RES (428)..(428): Selenocysteine
  MOD_RES (438)..(438): Selenocysteine
  MOD_RES (448)..(448): Selenocysteine
  MOD_RES (458)..(458): Selenocysteine
  MOD_RES (481)..(481): Selenocysteine
  MOD_RES (540)..(540): Selenocysteine
  MOD_RES (545)..(545): Selenocysteine
  MOD_RES (557)..(557): Selenocysteine
  MOD_RES (560)..(560): Selenocysteine
  MOD_RES (565)..(565): Selenocysteine
  MOD_RES (568)..(568): Selenocysteine
  MOD_RES (571)..(572): Selenocysteine
  MOD_RES (608)..(608): Selenocysteine
  MOD_RES (629)..(629): Selenocysteine
  MOD_RES (639)..(639): Selenocysteine
  MOD_RES (703)..(703): Selenocysteine
  MOD_RES (764)..(764): Selenocysteine
  MOD_RES (785)..(785): Selenocysteine
  MOD_RES (803)..(803): Selenocysteine
  MOD_RES (823)..(823): Selenocysteine
  MOD_RES (830)..(830): Selenocysteine
  MOD_RES (881)..(881): Selenocysteine
  MOD_RES (885)..(885): Selenocysteine
  MOD_RES (890)..(890): Selenocysteine
  MOD_RES (906)..(907): Selenocysteine
  MOD_RES (926)..(926): Selenocysteine
  MOD_RES (932)..(932): Selenocysteine
  MOD_RES (966)..(966): Selenocysteine
  MOD_RES (985)..(985): Selenocysteine
  MOD_RES (994)..(994): Selenocysteine
  MOD_RES (1007)..(1007): Selenocysteine
  MOD_RES (1023)..(1023): Selenocysteine
  MOD_RES (1126)..(1127): Selenocysteine
  MOD_RES (1136)..(1136): Selenocysteine
  MOD_RES (1166)..(1166): Selenocysteine
  MOD_RES (1202)..(1203): Selenocysteine
  MOD_RES (1224)..(1224): Selenocysteine
  MOD_RES (1276)..(1276): Selenocysteine
  MOD_RES (1282)..(1282): Selenocysteine
  MOD_RES (1299)..(1300): Selenocysteine
  MOD_RES (1304)..(1304): Selenocysteine
  MOD_RES (1326)..(1326): Selenocysteine
  MOD_RES (1333)..(1333): Selenocysteine
  MOD_RES (1335)..(1335): Selenocysteine
  MOD_RES (1338)..(1338): Selenocysteine
  MOD_RES (1350)..(1350): Selenocysteine
  MOD_RES (1352)..(1352): Selenocysteine
  MOD_RES (1354)..(1354): Selenocysteine
MDXEDDPLLQDVWLEEEQEEEEAXGEXFLGAQKPGPQPGAGGQCCWRHWPLASRPPASGFWSXLGWAFXNPCCAGLVLFLGCSIPMALSAFMFLYYPPLDIDISYNAFEIRNHEASQRFDALXLALKSQFGSWGRNRRDLADFXSEXLQRLISEQLQQLHLGNRSRQASRAPRVIPAASLGGPGPYRDXSAAQKPXANRSGRLRREXPPLEDLAANQSEDPRNQRLSKNGRYQPSIPPHAAVAANQSRARRGASRWDYSRAYVSANXQXHAHWRIELIFLARGDAERNIFXSERLVXIHEIERKIMDHPGFREFCWKPHEVLKDLPLGSYSYCSPPSSLMXYFFPXERGGKIYYDGMGQDLADIRGSLELAMXHPEFYWYVDEGLSADNLKSSLLRSEILFGAPLPNYYSVDDRWEEQRAKFQSFVVXYVAMLAKQSXSKVQVLYGGXDLFDYEVRRXFNNDMLLAFISSSCIAALVYILXSCSVFLSFFGIASIGLSCLVALFLYHVVFGIQYLGILNGVAAFVIVGIGVDDVFVFINXYRQAXHLEDPQLRMIHXVQXAGKAXFFXSLXXAAAYAANVFSQIPAVHDFGLFMSLIVSCCWLAVLVXMPAALGLWSLYLAPLESSCQXSCHQNCSRKXSLHFPGDVFAAPEQVGGSPAQGPIPYLDDDIPLLEVEEEPVSLELGDVSLVSVSPEGLQPASNXGSRGHLIVQLQELLHHWVLWSAVKSRWVIVGLFVSILILSLVFASRLRPASRAPLLFRPDXNIQVLLDLKYNLSAEGISCIXCSGLFQEKPHSLQNNIRXSLEKKRRGSGVPWASRPEAXLQDFPGXVYISKVKSQGHPAVYRLSLNASLPAPWQAVSPGDGEVPSFQVYRAPFGNFXKKLXACMSXVGLLQAASPSRKWMLXXLACDAKRGWKFDFSFYVAXKEQQHXRKLYFAQSHKPPFHGRVCMAPPGCLLSSSPDGPXKGFFFVPSEKVPKARLSAXFGFNPCVNXGCGKPAVRPLVDXGAMVFVVFGIIGVNRXRQVDNHVIGDPGSVVYDSSFDLFKEIGHLCHLCKAIAANSELVKPGGAQCLPSGYSISSFLQMLHPECKELPEPNLLPGQLSHGAVGVREGRVQWISMAFESXXYKGKSSFQXYSDYLRWESFLQQQLQALPEGSVLRRGFQXCEHWKQIFMEIVGVQSALCGLVLSLLICVAAVAVFXXHILLLLPVLLSILGIVCLVVXIMYWSGWEMGAVEAISLSILVGSSVDYCVHLVEGYLLAGENLPPHQAEDARXQRQWRXLEAVRHVGVAIVSSALXXVIAXVPLFFCIIAPFAKFGKIVALNXGVSILYXLXVSXALLGIMAPSSFXRXRXSFLKALGAVLLAGALGLGACLVLLQSGYKIPLPAGASL

SEQ ID NO: 8059 - protein, 268 aa, Homo sapiens
  MOD_RES (210)..(210): Selenocysteine
MSRYLKNLLEQDHVQGQILLPDLLGLPALGELPPAAAAGLARGLSPAPGLPDLRALEADIHGNRRGAERPVRPGAIPAHLRGRGGRVHHPHPAPAARAPQHLGHRVPGGDHHVLERLGDGGCGSHLPVHPRWLLRGLLRPPGRGLPAGWREPAPPPGRGRPNAAPVAYAGGRAARGRGHRLQCPHHGHRHSAPLLLHHRPICQVRQDCGXQHGRVHPLHADRQHRPAGHHGAQLFHSDPDFLPQGPGCRAAGRGPGAGCLPRAPAERL

SEQ ID NO: 8060 - protein, 77 aa, Homo sapiens
MEEAKKMISGLQALLLNGSLPEDEQERPLALCEPGVNPEEQLIIIQSRLDQSMEENQDLKKELLKCKQEARNLQGIK

SEQ ID NO: 8061 - protein, 472 aa, Homo sapiens
  MOD_RES (4)..(4): Selenocysteine
  MOD_RES (10)..(10): Selenocysteine
  MOD_RES (25)..(25): Selenocysteine
  MOD_RES (45)..(45): Selenocysteine
  MOD_RES (48)..(48): Selenocysteine
  MOD_RES (63)..(63): Selenocysteine
  MOD_RES (67)..(67): Selenocysteine
  MOD_RES (168)..(168): Selenocysteine
  MOD_RES (172)..(172): Selenocysteine
  MOD_RES (270)..(270): Selenocysteine
  MOD_RES (286)..(286): Selenocysteine
  MOD_RES (292)..(292): Selenocysteine
  MOD_RES (299)..(299): Selenocysteine
  MOD_RES (325)..(325): Selenocysteine
  MOD_RES (345)..(345): Selenocysteine
  MOD_RES (360)..(360): Selenocysteine
  MOD_RES (384)..(384): Selenocysteine
  MOD_RES (388)..(388): Selenocysteine
  MOD_RES (390)..(390): Selenocysteine
  MOD_RES (396)..(396): Selenocysteine
  MOD_RES (401)..(401): Selenocysteine
  MOD_RES (415)..(415): Selenocysteine
  MOD_RES (442)..(442): Selenocysteine
MGGXQVKCLXSPSPIHSAKSESIIXQSEEKADFVIIPAEGIENRXEGXDSPLSRDWRPGSPGXYLEXSWEEQLLEQQEYLEKEMEEAKKMISGLQALLLNGSLPEDEQERPLALCEPGVNPEEQLIIIQSRLDQSMEENQDLKKELLKCKQEARNLQGIKDALQQRLXQQDXSVLQLKQELLRANMDKDELHNQNVDLQRKLDERNRLLGEYKKELGQKDRLLQQHQAKLEEALRKLSDVSYHQVDLERELEHKDVLLAHCMKREADEAXNYNSHNSQSNGFLLPXAGKGAXSVSNRGXSDLQLVRDALRSLRNSFSGHDPQHHXIDSLEQGISSLMERLHVMEXQKKQERKVRVKSPRXQVGSEYRESWPPNSKLPHSQSSPXVSSXCXKVLYFXDRSLXPFMVNIPKRLEEVXLKDFKAAIDREGNHRYHFKALDPEFGXVKEEIFHDDDAIPGWEGKIVAWVEEDHGEN

SEQ ID NO: 8062 - protein, 218 aa, Homo sapiens
  MOD_RES (3)..(3): Selenocysteine
  MOD_RES (16)..(16): Selenocysteine
  MOD_RES (101)..(101): Selenocysteine
  MOD_RES (132)..(132): Selenocysteine
  MOD_RES (152)..(152): Selenocysteine
MGXQVVMRFNNSLLPXEPSQQLQAYVAWVNAQLKKRPAVKPVQDLRQDLRDGVILAYLIEIVAGEKLSGVQLSPGNQQEMKNNVEKVLQFVASKKIRMHQXSAKDIVDGNLKSIMRLVLALAAHFKPGSSRXVNQGRDSRAPLQSHRPHCAXAVAQGAAAALADVCHDMSRSGRDVFRYRQRNSSMDEEIENPYWSVRALVQQYEGQQRSPSESSCSR

SEQ ID NO: 8063 - protein, 683 aa, Homo sapiens
  MOD_RES (6)..(6): Selenocysteine
  MOD_RES (102)..(102): Selenocysteine
  MOD_RES (133)..(133): Selenocysteine
  MOD_RES (153)..(153): Selenocysteine
  MOD_RES (221)..(221): Selenocysteine
  MOD_RES (236)..(236): Selenocysteine
  MOD_RES (256)..(256): Selenocysteine
  MOD_RES (259)..(259): Selenocysteine
  MOD_RES (274)..(274): Selenocysteine
  MOD_RES (278)..(278): Selenocysteine
  MOD_RES (379)..(379): Selenocysteine
  MOD_RES (383)..(383): Selenocysteine
  MOD_RES (481)..(481): Selenocysteine
  MOD_RES (497)..(497): Selenocysteine
  MOD_RES (503)..(503): Selenocysteine
  MOD_RES (510)..(510): Selenocysteine
  MOD_RES (536)..(536): Selenocysteine
  MOD_RES (556)..(556): Selenocysteine
  MOD_RES (571)..(571): Selenocysteine
  MOD_RES (595)..(595): Selenocysteine
  MOD_RES (599)..(599): Selenocysteine
  MOD_RES (601)..(601): Selenocysteine
  MOD_RES (607)..(607): Selenocysteine
  MOD_RES (612)..(612): Selenocysteine
  MOD_RES (626)..(626): Selenocysteine
  MOD_RES (653)..(653): Selenocysteine
MLACLXRGNLLDVLQEGFNEQQLQAYVAWVNAQLKKRPAVKPVQDLRQDLRDGVILAYLIEIVAGEKLSGVQLSPGNQQEMKNNVEKVLQFVASKKIRMHQXSAKDIVDGNLKSIMRLVLALAAHFKPGSSRXVNQGRDSRAPLQSHRPHCAXAVAQGAAAALADVCHDMSRSGRDVFRYRQRNSSMDEEIENPYWSVRALVQQYEGQQRSPSESSCSSLXSPSPIHSAKSESIIXQSEEKADFVIIPAEGIENRXEGXDSPLSRDWRPGSPGXYLEXSWEEQLLEQQEYLEKEMEEAKKMISGLQALLLNGSLPEDEQERPLALCEPGVNPEEQLIIIQSRLDQSMEENQDLKKELLKCKQEARNLQGIKDALQQRLXQQDXSVLQLKQELLRANMDKDELHNQNVDLQRKLDERNRLLGEYKKELGQKDRLLQQHQAKLEEALRKLSDVSYHQVDLERELEHKDVLLAHCMKREADEAXNYNSHNSQSNGFLLPXAGKGAXSVSNRGXSDLQLVRDALRSLRNSFSGHDPQHHXIDSLEQGISSLMERLHVMEXQKKQERKVRVKSPRXQVGSEYRESWPPNSKLPHSQSSPXVSSXCXKVLYFXDRSLXPFMVNIPKRLEEVXLKDFKAAIDREGNHRYHFKALDPEFGXVKEEIFHDDDAIPGWEGKIVAWVEEDHGEN

SEQ ID NO: 8064 - protein, 266 aa, Homo sapiens
  MOD_RES (10)..(10): Selenocysteine
  MOD_RES (32)..(32): Selenocysteine
  MOD_RES (76)..(76): Selenocysteine
  MOD_RES (93)..(93): Selenocysteine
  MOD_RES (101)..(101): Selenocysteine
  MOD_RES (153)..(153): Selenocysteine
  MOD_RES (155)..(155): Selenocysteine
  MOD_RES (164)..(164): Selenocysteine
  MOD_RES (172)..(173): Selenocysteine
  MOD_RES (181)..(181): Selenocysteine
  MOD_RES (221)..(221): Selenocysteine
  MOD_RES (262)..(262): Selenocysteine
MMALGAAGAXRVFVAMVAAALGGHPLLGVSAXLNSVLNSNAIKNLPPPLGGAAGHPGSAVSAAPGILYPGGNKYQXIDNYQPYPCAEDEECGXDEYCASPXRGGDAGVQICLACRKRRKRCMRHAMCCPGNYCKNGICVSSDQNHFRGEIEEXIXESFGNDHSXLDGYSRRXXLSSKMYHXKGQEGSVCLRSSDCASGLCCARHFWSKICKPVLKEGQVCXKHRRKGSHGLEIFQRCYCGEGLSCRIQKDHHQASNSSRLHXCQRH

SEQ ID NO: 8065 - protein, 259 aa, Homo sapiens
  MOD_RES (46)..(46): Selenocysteine
  MOD_RES (120)..(120): Selenocysteine
  MOD_RES (131)..(131): Selenocysteine
  MOD_RES (136)..(136): Selenocysteine
  MOD_RES (145)..(145): Selenocysteine
  MOD_RES (170)..(170): Selenocysteine
  MOD_RES (201)..(201): Selenocysteine
  MOD_RES (215)..(215): Selenocysteine
  MOD_RES (246)..(246): Selenocysteine
MAALMRSKDSSCCLLLLAAVLMVESSQIGSSRAKLNSIKSSLGGEXPGQAANRSAGMYQGLAFGGSKKGKNLGQAYPCSSDKECEVGRYCHSPHQGSSACMVCRRKKKRCHRDGMCCPSXRCNNGICIPVXESILXPHIPALDGXRHRDRNHGHYSNHDLGWQNLGRPHXKMSHIKGHEGDPCLRSSDCIEGFCCARHFWXKICKPVLHQGEVCXKQRKKGSHGLEIFQRCDCAKGLSCKVWKDAXYSSKARLHVCQKI

SEQ ID NO: 8066 - protein, 213 aa, Homo sapiens
  MOD_RES (2)..(2): Selenocysteine
  MOD_RES (74)..(74): Selenocysteine
  MOD_RES (85)..(85): Selenocysteine
  MOD_RES (90)..(90): Selenocysteine
  MOD_RES (99)..(99): Selenocysteine
  MOD_RES (124)..(124): Selenocysteine
  MOD_RES (155)..(155): Selenocysteine
  MOD_RES (169)..(169): Selenocysteine
  MOD_RES (200)..(200): Selenocysteine
MXLRIDYCQGLLVGVSSSGLNIIQIQCQAYPCSSDKECEVGRYCHSPHQGSSACMVCRRKKKRCHRDGMCCPSXRCNNGICIPVXESILXPHIPALDGXRHRDRNHGHYSNHDLGWQNLGRPHXKMSHIKGHEGDPCLRSSDCIEGFCCARHFWXKICKPVLHQGEVCXKQRKKGSHGLEIFQRCDCAKGLSCKVWKDAXYSSKARLHVCQKI

SEQ ID NO: 8067 - protein, 159 aa, Homo sapiens
  MOD_RES (20)..(20): Selenocysteine
  MOD_RES (31)..(31): Selenocysteine
  MOD_RES (36)..(36): Selenocysteine
  MOD_RES (45)..(45): Selenocysteine
  MOD_RES (70)..(70): Selenocysteine
  MOD_RES (101)..(101): Selenocysteine
  MOD_RES (115)..(115): Selenocysteine
  MOD_RES (146)..(146): Selenocysteine
MVCRRKKKRCHRDGMCCPSXRCNNGICIPVXESILXPHIPALDGXRHRDRNHGHYSNHDLGWQNLGRPHXKMSHIKGHEGDPCLRSSDCIEGFCCARHFWXKICKPVLHQGEVCXKQRKKGSHGLEIFQRCDCAKGLSCKVWKDAXYSSKARLHVCQKI

SEQ ID NO: 8068 - protein, 132 aa, Homo sapiens
  MOD_RES (7)..(7): Selenocysteine
  MOD_RES (19)..(19): Selenocysteine
  MOD_RES (26)..(26): Selenocysteine
  MOD_RES (28)..(28): Selenocysteine
  MOD_RES (46)..(46): Selenocysteine
  MOD_RES (61)..(61): Selenocysteine
  MOD_RES (98)..(98): Selenocysteine
  MOD_RES (100)..(100): Selenocysteine
  MOD_RES (102)..(102): Selenocysteine
  MOD_RES (108)..(108): Selenocysteine
MQRLGAXLLCLLLAAAVPXAPAPAPXAXSAPVKPGPALSYPQEEAXLNEMFREVEELMEDXQHKLRSAVEEMEAEEAAAKASSEVNLANLPPSYHNEXNXDXKVGNNXIHVHREIHKECIIDEDCGPSMYCQ

SEQ ID NO: 8069 - protein, 183 aa, Homo sapiens
  MOD_RES (7)..(7): Selenocysteine
  MOD_RES (19)..(19): Selenocysteine
  MOD_RES (26)..(26): Selenocysteine
  MOD_RES (28)..(28): Selenocysteine
  MOD_RES (46)..(46): Selenocysteine
  MOD_RES (61)..(61): Selenocysteine
  MOD_RES (98)..(98): Selenocysteine
  MOD_RES (100)..(100): Selenocysteine
  MOD_RES (102)..(102): Selenocysteine
  MOD_RES (108)..(108): Selenocysteine
  MOD_RES (139)..(139): Selenocysteine
  MOD_RES (151)..(151): Selenocysteine
  MOD_RES (168)..(168): Selenocysteine
  MOD_RES (172)..(172): Selenocysteine
  MOD_RES (178)..(178): Selenocysteine
MQRLGAXLLCLLLAAAVPXAPAPAPXAXSAPVKPGPALSYPQEEAXLNEMFREVEELMEDXQHKLRSAVEEMEAEEAAAKASSEVNLANLPPSYHNEXNXDXKVGNNXIHVHREIHKECIIDEDCGPSMYCQFASFQYXCQPCRGQRMLCXRDSECCGDQLCVWGHCXKMAXRGSNGXICDNQ

SEQ ID NO: 8070 - protein, 235 aa, Homo sapiens
  MOD_RES (7)..(7): Selenocysteine
  MOD_RES (19)..(19): Selenocysteine
  MOD_RES (26)..(26): Selenocysteine
  MOD_RES (28)..(28): Selenocysteine
  MOD_RES (46)..(46): Selenocysteine
  MOD_RES (61)..(61): Selenocysteine
  MOD_RES (98)..(98): Selenocysteine
  MOD_RES (100)..(100): Selenocysteine
  MOD_RES (102)..(102): Selenocysteine
  MOD_RES (108)..(108): Selenocysteine
  MOD_RES (119)..(119): Selenocysteine
  MOD_RES (123)..(123): Selenocysteine
  MOD_RES (131)..(131): Selenocysteine
  MOD_RES (134)..(134): Selenocysteine
  MOD_RES (167)..(167): Selenocysteine
  MOD_RES (179)..(179): Selenocysteine
  MOD_RES (196)..(196): Selenocysteine
  MOD_RES (200)..(200): Selenocysteine
  MOD_RES (206)..(206): Selenocysteine
  MOD_RES (232)..(232): Selenocysteine
MQRLGAXLLCLLLAAAVPXAPAPAPXAXSAPVKPGPALSYPQEEAXLNEMFREVEELMEDXQHKLRSAVEEMEAEEAAAKASSEVNLANLPPSYHNEXNXDXKVGNNXIHVHREIHKIXNNQXGQMVFSEXVIXSVGDEEGRRSHECIIDEDCGPSMYCQFASFQYXCQPCRGQRMLCXRDSECCGDQLCVWGHCXKMAXRGSNGXICDNQRDCQPGLCCAFQRGLLFPVCXPLP

SEQ ID NO: 8071 - protein, 350 aa, Homo sapiens
  MOD_RES (7)..(7): Selenocysteine
  MOD_RES (19)..(19): Selenocysteine
  MOD_RES (26)..(26): Selenocysteine
  MOD_RES (28)..(28): Selenocysteine
  MOD_RES (46)..(46): Selenocysteine
  MOD_RES (61)..(61): Selenocysteine
  MOD_RES (98)..(98): Selenocysteine
  MOD_RES (100)..(100): Selenocysteine
  MOD_RES (102)..(102): Selenocysteine
  MOD_RES (108)..(108): Selenocysteine
  MOD_RES (119)..(119): Selenocysteine
  MOD_RES (123)..(123): Selenocysteine
  MOD_RES (131)..(131): Selenocysteine
  MOD_RES (134)..(134): Selenocysteine
  MOD_RES (167)..(167): Selenocysteine
  MOD_RES (179)..(179): Selenocysteine
  MOD_RES (196)..(196): Selenocysteine
  MOD_RES (200)..(200): Selenocysteine
  MOD_RES (206)..(206): Selenocysteine
  MOD_RES (232)..(232): Selenocysteine
  MOD_RES (253)..(253): Selenocysteine
  MOD_RES (287)..(287): Selenocysteine
  MOD_RES (329)..(329): Selenocysteine
MQRLGAXLLCLLLAAAVPXAPAPAPXAXSAPVKPGPALSYPQEEAXLNEMFREVEELMEDXQHKLRSAVEEMEAEEAAAKASSEVNLANLPPSYHNEXNXDXKVGNNXIHVHREIHKIXNNQXGQMVFSEXVIXSVGDEEGRRSHECIIDEDCGPSMYCQFASFQYXCQPCRGQRMLCXRDSECCGDQLCVWGHCXKMAXRGSNGXICDNQRDCQPGLCCAFQRGLLFPVCXPLPVEGELCHDPASRLLDLIXWELEPDGALDRCPCASGLLCQPHSHSLVYVCKPXFVGSRDQDGEILLPREVPDEYEVGSFMEEVRQELEDLERSLXEEMALREPAAAAAALLGGEEI

SEQ ID NO: 8072 - protein, 364 aa, Homo sapiens
  MOD_RES (7)..(7): Selenocysteine
  MOD_RES (19)..(19): Selenocysteine
  MOD_RES (26)..(26): Selenocysteine
  MOD_RES (28)..(28): Selenocysteine
  MOD_RES (46)..(46): Selenocysteine
  MOD_RES (61)..(61): Selenocysteine
  MOD_RES (98)..(98): Selenocysteine
  MOD_RES (100)..(100): Selenocysteine
  MOD_RES (102)..(102): Selenocysteine
  MOD_RES (108)..(108): Selenocysteine
  MOD_RES (119)..(119): Selenocysteine
  MOD_RES (123)..(123): Selenocysteine
  MOD_RES (131)..(131): Selenocysteine
  MOD_RES (134)..(134): Selenocysteine
  MOD_RES (167)..(167): Selenocysteine
  MOD_RES (179)..(179): Selenocysteine
  MOD_RES (196)..(196): Selenocysteine
  MOD_RES (200)..(200): Selenocysteine
  MOD_RES (206)..(206): Selenocysteine
  MOD_RES (232)..(232): Selenocysteine
  MOD_RES (253)..(253): Selenocysteine
  MOD_RES (301)..(301): Selenocysteine
  MOD_RES (343)..(343): Selenocysteine
MQRLGAXLLCLLLAAAVPXAPAPAPXAXSAPVKPGPALSYPQEEAXLNEMFREVEELMEDXQHKLRSAVEEMEAEEAAAKASSEVNLANLPPSYHNEXNXDXKVGNNXIHVHREIHKIXNNQXGQMVFSEXVIXSVGDEEGRRSHECIIDEDCGPSMYCQFASFQYXCQPCRGQRMLCXRDSECCGDQLCVWGHCXKMAXRGSNGXICDNQRDCQPGLCCAFQRGLLFPVCXPLPVEGELCHDPASRLLDLIXWELEPDGALDRCPCASGLLCQPHRLPRLEPGFVPSLPSHSLVYVCKPXFVGSRDQDGEILLPREVPDEYEVGSFMEEVRQELEDLERSLXEEMALREPAAAAAALLGGEEI

SEQ ID NO: 8073 - protein, 224 aa, Homo sapiens
  MOD_RES (45)..(45): Selenocysteine
  MOD_RES (49)..(49): Selenocysteine
  MOD_RES (65)..(65): Selenocysteine
  MOD_RES (83)..(83): Selenocysteine
  MOD_RES (91)..(92): Selenocysteine
  MOD_RES (97)..(97): Selenocysteine
  MOD_RES (110)..(110): Selenocysteine
  MOD_RES (115)..(116): Selenocysteine
  MOD_RES (148)..(148): Selenocysteine
  MOD_RES (163)..(163): Selenocysteine
  MOD_RES (184)..(184): Selenocysteine
  MOD_RES (207)..(207): Selenocysteine
MVAAVLLGLSWLCSPLGALVLDFNNIRSSADLHGARKGSQCLSDXDCNXRKFCLQPRDEKPFCAXCRGLRRRCQRDAMCCPGXLCVNDVCXXMEDAXPILERQLDEQDGXHAEGXXGHPVQENQPKRKPSIKKSQGRKGQEGESCLRXFDCGPGLCCARHFWXKICKPVLLEGQVCSRRGHKDXAQAPEIFQRCDCGPGLLCRSQLXSNRQHARLRVCQKIEKL

SEQ ID NO: 8074 - protein, 125 aa, Homo sapiens
  MOD_RES (24)..(24): Selenocysteine
  MOD_RES (35)..(35): Selenocysteine
  MOD_RES (39)..(39): Selenocysteine
  MOD_RES (81)..(81): Selenocysteine
  MOD_RES (86)..(86): Selenocysteine
MDFRGLPGNYHKEENQEHQLGNNXLSSHLQIDKMXDNKXGEVLISENVVASIQPAEGSFEGDLKVPRMEEKEALVPIQKAXDSFHXELHPRVAFWIIKLPRRRSHQDALEGGHWLSEKRHRLQAI

SEQ ID NO: 8075 - protein, 146 aa, Homo sapiens
  MOD_RES (24)..(24): Selenocysteine
  MOD_RES (35)..(35): Selenocysteine
  MOD_RES (39)..(39): Selenocysteine
  MOD_RES (81)..(81): Selenocysteine
  MOD_RES (86)..(86): Selenocysteine
  MOD_RES (133)..(133): Selenocysteine
  MOD_RES (142)..(142): Selenocysteine
MDFRGLPGNYHKEENQEHQLGNNXLSSHLQIDKMXDNKXGEVLISENVVASIQPAEGSFEGDLKVPRMEEKEALVPIQKAXDSFHXELHPRVAFWIIKLPRRRSHQDALEGGHWLSEKRHRLQAIRDGLRKGXHKDVLEEGXESSS

SEQ ID NO: 8076 - protein, 100 aa, Homo sapiens
  MOD_RES (14)..(14): Selenocysteine
  MOD_RES (19)..(19): Selenocysteine
  MOD_RES (66)..(66): Selenocysteine
  MOD_RES (75)..(75): Selenocysteine
  MOD_RES (88)..(88): Selenocysteine
MEEKEALVPIQKAXDSFHXELHPRVAFWIIKLPRRRSHQDALEGGHWLSEKRHRLQAIRDGLRKGXHKDVLEEGXESSSHSRLSPRKXHLLYILRPSRQL

SEQ ID NO: 8077 - protein, 242 aa, Homo sapiens
  MOD_RES (23)..(23): Selenocysteine
  MOD_RES (46)..(46): Selenocysteine
  MOD_RES (99)..(99): Selenocysteine
  MOD_RES (110)..(110): Selenocysteine
  MOD_RES (114)..(114): Selenocysteine
  MOD_RES (156)..(156): Selenocysteine
  MOD_RES (161)..(161): Selenocysteine
  MOD_RES (208)..(208): Selenocysteine
  MOD_RES (217)..(217): Selenocysteine
  MOD_RES (230)..(230): Selenocysteine
MGEASPPAPARRHLLVLLLLLSXLVIPSAAAPIHDADAQESSLGLXGLQSLLQGFSRLFLKGNLLRGIDSLFSAPMDFRGLPGNYHKEENQEHQLGNNXLSSHLQIDKMXDNKXGEVLISENVVASIQPAEGSFEGDLKVPRMEEKEALVPIQKAXDSFHXELHPRVAFWIIKLPRRRSHQDALEGGHWLSEKRHRLQAIRDGLRKGXHKDVLEEGXESSSHSRLSPRKXHLLYILRPSRQL

SEQ ID NO: 8078 - protein, 199 aa, Homo sapiens
  MOD_RES (23)..(23): Selenocysteine
  MOD_RES (46)..(46): Selenocysteine
  MOD_RES (99)..(99): Selenocysteine
  MOD_RES (125)..(125): Selenocysteine
  MOD_RES (130)..(130): Selenocysteine
  MOD_RES (177)..(177): Selenocysteine
  MOD_RES (186)..(186): Selenocysteine
  MOD_RES (199)..(199): Selenocysteine
MGEASPPAPARRHLLVLLLLLSXLVIPSAAAPIHDADAQESSLGLXGLQSLLQGFSRLFLKGNLLRGIDSLFSAPMDFRGLPGNYHKEENQEHQLGNNXLSSHLQIDKVPRMEEKEALVPIQKAXDSFHXELHPRVAFWIIKLPRRRSHQDALEGGHWLSEKRHRLQAIRDGLRKGXHKDVLEEGXESSSHSRLSPRKX

SEQ ID NO: 8079 - protein, 137 aa, Homo sapiens
  MOD_RES (1)..(1): Any amino acid
  MOD_RES (19)..(19): Selenocysteine
  MOD_RES (51)..(51): Selenocysteine
  MOD_RES (56)..(56): Selenocysteine
  MOD_RES (103)..(103): Selenocysteine
  MOD_RES (112)..(112): Selenocysteine
  MOD_RES (125)..(125): Selenocysteine
XAAAPIHDADAQESSLGLXGLQSLLQGFSRLFLKVPRMEEKEALVPIQKAXDSFHXELHPRVAFWIIKLPRRRSHQDALEGGHWLSEKRHRLQAIRDGLRKGXHKDVLEEGXESSSHSRLSPRKXHLLYILRPSRQL

SEQ ID NO: 8080 - protein, 1091 aa, Homo sapiens
  MOD_RES (8)..(8): Selenocysteine
  MOD_RES (12)..(12): Selenocysteine
  MOD_RES (26)..(26): Selenocysteine
  MOD_RES (68)..(68): Selenocysteine
  MOD_RES (102)..(102): Selenocysteine
  MOD_RES (144)..(144): Selenocysteine
  MOD_RES (163)..(163): Selenocysteine
  MOD_RES (178)..(178): Selenocysteine
  MOD_RES (181)..(181): Selenocysteine
  MOD_RES (222)..(222): Selenocysteine
  MOD_RES (227)..(227): Selenocysteine
  MOD_RES (301)..(301): Selenocysteine
  MOD_RES (303)..(303): Selenocysteine
  MOD_RES (312)..(312): Selenocysteine
  MOD_RES (318)..(318): Selenocysteine
  MOD_RES (323)..(323): Selenocysteine
  MOD_RES (325)..(325): Selenocysteine
  MOD_RES (349)..(349): Selenocysteine
  MOD_RES (368)..(368): Selenocysteine
  MOD_RES (380)..(380): Selenocysteine
  MOD_RES (386)..(386): Selenocysteine
  MOD_RES (403)..(403): Selenocysteine
  MOD_RES (522)..(523): Selenocysteine
  MOD_RES (530)..(530): Selenocysteine
  MOD_RES (556)..(556): Selenocysteine
  MOD_RES (603)..(603): Selenocysteine
  MOD_RES (610)..(610): Selenocysteine
  MOD_RES (644)..(644): Selenocysteine
  MOD_RES (650)..(650): Selenocysteine
  MOD_RES (726)..(726): Selenocysteine
  MOD_RES (732)..(732): Selenocysteine
  MOD_RES (766)..(766): Selenocysteine
  MOD_RES (775)..(775): Selenocysteine
  MOD_RES (784)..(784): Selenocysteine
  MOD_RES (786)..(786): Selenocysteine
  MOD_RES (801)..(801): Selenocysteine
  MOD_RES (833)..(833): Selenocysteine
  MOD_RES (861)..(861): Selenocysteine
  MOD_RES (869)..(869): Selenocysteine
  MOD_RES (911)..(911): Selenocysteine
  MOD_RES (972)..(972): Selenocysteine
  MOD_RES (995)..(995): Selenocysteine
  MOD_RES (998)..(998): Selenocysteine
  MOD_RES (1010)..(1010): Selenocysteine
  MOD_RES (1044)..(1044): Selenocysteine
  MOD_RES (1060)..(1060): Selenocysteine
  MOD_RES (1083)..(1083): Selenocysteine
  MOD_RES (1085)..(1085): Selenocysteine
  MOD_RES (1088)..(1088): Selenocysteine
MCRKKPDXMILXQIEAKEACDWLRAXGFPQYAQLYEDFLFPIDISLVKREHDFLDRDAIEALCRRLNXLNKCAVMKLEISPHRKRSDDSDEDEPCAISGKWXFQRDSKRWSRLEEFDVFSPKQDLVPGSPDDSHPKDGPSPGGXLMDLSERQEVSSVRSLSSXGSLPSHAPPSEDAAXPRXNSVISVCSSSNLAGNDDSFGSLPSPKELSSFSFSMKGHEKXAKSKXRSLLKRMESLKLKSSHHSKHKAPSKLGLIISGPILQEGMDEEKLKQLNCVEISALNGNRINVPMVRKRSVSNSXQXSSSSSQSEXSSAVSXPSPVXRXRSLSACNKRVGMYLEGFDPFNQSXFNNVVEQNFKNRESYPEDXVFYIPEDHKPGXFPKALXNGSFSPSGNNGSVNWRXGSFHGPGHISLRRENSSDSPKELKRRNSSSSMSSRLSIYDNVPGSILYSSSGDLADLENEDIFPELDDILYHVKGMQRIVNQWSEKFSDEGDSDSALDSVSPCPSSPKQIHLDVDNDRXXPSDLDSXGNSLNEPEEPSEIPERRDSGVGASLXRSNRHRLRWHSFQSSHRPSLNSVSLQINCQSVAQMNLLQKYSLLKLXALLEKYXPSNKHGFSWAVPKFMKRIKVPDYKDRSVFGVPLXVNVQRXGQPLPQSIQQAMRYLRNHCLDQVGLFRKSGVKSRIQALRQMNEGAIDCVNYEGQSAYDVADMLKQYFRDLPEPLMXNKLSEXFLQIYQYVPKDQRLQAIKAAIMLLPDENREVLQXLLYFLSDVXAAVKENQMXPXNLAVCLAPSLFHLNXLKRENSSPRVMQRKQSLGKPDQKDLNENLAAXQGLAHMIAECKKLFQVPEEMSRCRNSYXEQELKPLXLEALGHLGNDDSADYQHFLQDCVDGLFKEVKEKFKGWVSYSXSEQAELSYKKVSEGPPLRLWRSVIEVPAVPEEILKRLLKEQHLWDVDLLDSKVIEILDSQXEIYQYVQNSMAPHPARDYVVLRXWRXNLPKGACALLLXSVDHDRAPVVGVRVNVLLSRYLIEPCGPGKSKLXYMCRVDLRGHMPEWYXKSFGHLCAAEVVKIRDSFSNQNXEXKDXKSR

SEQ ID NO: 8081 - protein, 1125 aa, Homo sapiens
  MOD_RES (29)..(29): Selenocysteine
  MOD_RES (40)..(40): Selenocysteine
  MOD_RES (60)..(60): Selenocysteine
  MOD_RES (102)..(102): Selenocysteine
  MOD_RES (136)..(136): Selenocysteine
  MOD_RES (178)..(178): Selenocysteine
  MOD_RES (197)..(197): Selenocysteine
  MOD_RES (212)..(212): Selenocysteine
  MOD_RES (215)..(215): Selenocysteine
  MOD_RES (256)..(256): Selenocysteine
  MOD_RES (261)..(261): Selenocysteine
  MOD_RES (335)..(335): Selenocysteine
  MOD_RES (337)..(337): Selenocysteine
  MOD_RES (346)..(346): Selenocysteine
  MOD_RES (352)..(352): Selenocysteine
  MOD_RES (357)..(357): Selenocysteine
  MOD_RES (359)..(359): Selenocysteine
  MOD_RES (383)..(383): Selenocysteine
  MOD_RES (402)..(402): Selenocysteine
  MOD_RES (414)..(414): Selenocysteine
  MOD_RES (420)..(420): Selenocysteine
  MOD_RES (437)..(437): Selenocysteine
  MOD_RES (556)..(557): Selenocysteine
  MOD_RES (564)..(564): Selenocysteine
  MOD_RES (590)..(590): Selenocysteine
  MOD_RES (637)..(637): Selenocysteine
  MOD_RES (644)..(644): Selenocysteine
  MOD_RES (678)..(678): Selenocysteine
  MOD_RES (684)..(684): Selenocysteine
  MOD_RES (760)..(760): Selenocysteine
  MOD_RES (766)..(766): Selenocysteine
  MOD_RES (800)..(800): Selenocysteine
  MOD_RES (809)..(809): Selenocysteine
  MOD_RES (818)..(818): Selenocysteine
  MOD_RES (820)..(820): Selenocysteine
  MOD_RES (835)..(835): Selenocysteine
  MOD_RES (867)..(867): Selenocysteine
  MOD_RES (895)..(895): Selenocysteine
  MOD_RES (903)..(903): Selenocysteine
  MOD_RES (945)..(945): Selenocysteine
  MOD_RES (1006)..(1006): Selenocysteine
  MOD_RES (1029)..(1029): Selenocysteine
  MOD_RES (1032)..(1032): Selenocysteine
  MOD_RES (1044)..(1044): Selenocysteine
  MOD_RES (1078)..(1078): Selenocysteine
  MOD_RES (1094)..(1094): Selenocysteine
  MOD_RES (1117)..(1117): Selenocysteine
  MOD_RES (1119)..(1119): Selenocysteine
  MOD_RES (1122)..(1122): Selenocysteine
MGDPKAHVMARPLRAPLRRSFSDHIRDSXARALDVIWKNXRDRRLAEIEAKEACDWLRAXGFPQYAQLYEDFLFPIDISLVKREHDFLDRDAIEALCRRLNXLNKCAVMKLEISPHRKRSDDSDEDEPCAISGKWXFQRDSKRWSRLEEFDVFSPKQDLVPGSPDDSHPKDGPSPGGXLMDLSERQEVSSVRSLSSXGSLPSHAPPSEDAAXPRXNSVISVCSSSNLAGNDDSFGSLPSPKELSSFSFSMKGHEKXAKSKXRSLLKRMESLKLKSSHHSKHKAPSKLGLIISGPILQEGMDEEKLKQLNCVEISALNGNRINVPMVRKRSVSNSXQXSSSSSQSEXSSAVSXPSPVXRXRSLSACNKRVGMYLEGFDPFNQSXFNNVVEQNFKNRESYPEDXVFYIPEDHKPGXFPKALXNGSFSPSGNNGSVNWRXGSFHGPGHISLRRENSSDSPKELKRRNSSSSMSSRLSIYDNVPGSILYSSSGDLADLENEDIFPELDDILYHVKGMQRIVNQWSEKFSDEGDSDSALDSVSPCPSSPKQIHLDVDNDRXXPSDLDSXGNSLNEPEEPSEIPERRDSGVGASLXRSNRHRLRWHSFQSSHRPSLNSVSLQINCQSVAQMNLLQKYSLLKLXALLEKYXPSNKHGFSWAVPKFMKRIKVPDYKDRSVFGVPLXVNVQRXGQPLPQSIQQAMRYLRNHCLDQVGLFRKSGVKSRIQALRQMNEGAIDCVNYEGQSAYDVADMLKQYFRDLPEPLMXNKLSEXFLQIYQYVPKDQRLQAIKAAIMLLPDENREVLQXLLYFLSDVXAAVKENQMXPXNLAVCLAPSLFHLNXLKRENSSPRVMQRKQSLGKPDQKDLNENLAAXQGLAHMIAECKKLFQVPEEMSRCRNSYXEQELKPLXLEALGHLGNDDSADYQHFLQDCVDGLFKEVKEKFKGWVSYSXSEQAELSYKKVSEGPPLRLWRSVIEVPAVPEEILKRLLKEQHLWDVDLLDSKVIEILDSQXEIYQYVQNSMAPHPARDYVVLRXWRXNLPKGACALLLXSVDHDRAPVVGVRVNVLLSRYLIEPCGPGKSKLXYMCRVDLRGHMPEWYXKSFGHLCAAEVVKIRDSFSNQNXEXKDXKSR

SEQ ID NO: 8082 - protein, 1017 aa, Homo sapiens
  MOD_RES (28)..(28): Selenocysteine
  MOD_RES (70)..(70): Selenocysteine
  MOD_RES (89)..(89): Selenocysteine
  MOD_RES (104)..(104): Selenocysteine
  MOD_RES (107)..(107): Selenocysteine
  MOD_RES (148)..(148): Selenocysteine
  MOD_RES (153)..(153): Selenocysteine
  MOD_RES (227)..(227): Selenocysteine
  MOD_RES (229)..(229): Selenocysteine
  MOD_RES (238)..(238): Selenocysteine
  MOD_RES (244)..(244): Selenocysteine
  MOD_RES (249)..(249): Selenocysteine
  MOD_RES (251)..(251): Selenocysteine
  MOD_RES (275)..(275): Selenocysteine
  MOD_RES (294)..(294): Selenocysteine
  MOD_RES (306)..(306): Selenocysteine
  MOD_RES (312)..(312): Selenocysteine
  MOD_RES (329)..(329): Selenocysteine
  MOD_RES (448)..(449): Selenocysteine
  MOD_RES (456)..(456): Selenocysteine
  MOD_RES (482)..(482): Selenocysteine
  MOD_RES (529)..(529): Selenocysteine
  MOD_RES (536)..(536): Selenocysteine
  MOD_RES (570)..(570): Selenocysteine
  MOD_RES (576)..(576): Selenocysteine
  MOD_RES (652)..(652): Selenocysteine
  MOD_RES (658)..(658): Selenocysteine
  MOD_RES (692)..(692): Selenocysteine
  MOD_RES (701)..(701): Selenocysteine
  MOD_RES (710)..(710): Selenocysteine
  MOD_RES (712)..(712): Selenocysteine
  MOD_RES (727)..(727): Selenocysteine
  MOD_RES (759)..(759): Selenocysteine
  MOD_RES (787)..(787): Selenocysteine
  MOD_RES (795)..(795): Selenocysteine
  MOD_RES (837)..(837): Selenocysteine
  MOD_RES (898)..(898): Selenocysteine
  MOD_RES (921)..(921): Selenocysteine
  MOD_RES (924)..(924): Selenocysteine
  MOD_RES (936)..(936): Selenocysteine
  MOD_RES (970)..(970): Selenocysteine
  MOD_RES (986)..(986): Selenocysteine
  MOD_RES (1009)..(1009): Selenocysteine
  MOD_RES (1011)..(1011): Selenocysteine
  MOD_RES (1014)..(1014): Selenocysteine
MKLEISPHRKRSDDSDEDEPCAISGKWXFQRDSKRWSRLEEFDVFSPKQDLVPGSPDDSHPKDGPSPGGXLMDLSERQEVSSVRSLSSXGSLPSHAPPSEDAAXPRXNSVISVCSSSNLAGNDDSFGSLPSPKELSSFSFSMKGHEKXAKSKXRSLLKRMESLKLKSSHHSKHKAPSKLGLIISGPILQEGMDEEKLKQLNCVEISALNGNRINVPMVRKRSVSNSXQXSSSSSQSEXSSAVSXPSPVXRXRSLSACNKRVGMYLEGFDPFNQSXFNNVVEQNFKNRESYPEDXVFYIPEDHKPGXFPKALXNGSFSPSGNNGSVNWRXGSFHGPGHISLRRENSSDSPKELKRRNSSSSMSSRLSIYDNVPGSILYSSSGDLADLENEDIFPELDDILYHVKGMQRIVNQWSEKFSDEGDSDSALDSVSPCPSSPKQIHLDVDNDRXXPSDLDSXGNSLNEPEEPSEIPERRDSGVGASLXRSNRHRLRWHSFQSSHRPSLNSVSLQINCQSVAQMNLLQKYSLLKLXALLEKYXPSNKHGFSWAVPKFMKRIKVPDYKDRSVFGVPLXVNVQRXGQPLPQSIQQAMRYLRNHCLDQVGLFRKSGVKSRIQALRQMNEGAIDCVNYEGQSAYDVADMLKQYFRDLPEPLMXNKLSEXFLQIYQYVPKDQRLQAIKAAIMLLPDENREVLQXLLYFLSDVXAAVKENQMXPXNLAVCLAPSLFHLNXLKRENSSPRVMQRKQSLGKPDQKDLNENLAAXQGLAHMIAECKKLFQVPEEMSRCRNSYXEQELKPLXLEALGHLGNDDSADYQHFLQDCVDGLFKEVKEKFKGWVSYSXSEQAELSYKKVSEGPPLRLWRSVIEVPAVPEEILKRLLKEQHLWDVDLLDSKVIEILDSQXEIYQYVQNSMAPHPARDYVVLRXWRXNLPKGACALLLXSVDHDRAPVVGVRVNVLLSRYLIEPCGPGKSKLXYMCRVDLRGHMPEWYXKSFGHLCAAEVVKIRDSFSNQNXEXKDXKSR

SEQ ID NO: 8083 - protein, 49 aa, Homo sapiens
  MOD_RES (15)..(15): Selenocysteine
  MOD_RES (33)..(33): Selenocysteine
  MOD_RES (40)..(41): Selenocysteine
  MOD_RES (43)..(43): Selenocysteine
  MOD_RES (46)..(46): Selenocysteine
MSLVPSVANGLSKGXARGGPGLKSLMSFLQNKXWSLGPQXXPXRRXAPA

SEQ ID NO: 8084 - protein, 122 aa, Homo sapiens
  MOD_RES (15)..(15): Selenocysteine
  MOD_RES (29)..(29): Selenocysteine
  MOD_RES (49)..(49): Selenocysteine
  MOD_RES (104)..(104): Selenocysteine
  MOD_RES (106)..(106): Selenocysteine
  MOD_RES (122)..(122): Selenocysteine
MSVAIRKRSWEEHVXHWMGQPFNSDDRNXACHHGLVADSLQASMEKDAXLNVDRKEKCVSLPDCCHGSELRDFPGRPMGHLSKDVDENDSHEGEDQFLSLEASXEXLVHVSDEDNNADLCLX

SEQ ID NO: 8085 - protein, 463 aa, Homo sapiens
  MOD_RES (15)..(15): Selenocysteine
  MOD_RES (29)..(29): Selenocysteine
  MOD_RES (49)..(49): Selenocysteine
  MOD_RES (104)..(104): Selenocysteine
  MOD_RES (106)..(106): Selenocysteine
  MOD_RES (122)..(122): Selenocysteine
  MOD_RES (130)..(130): Selenocysteine
  MOD_RES (135)..(135): Selenocysteine
  MOD_RES (170)..(170): Selenocysteine
  MOD_RES (184)..(184): Selenocysteine
  MOD_RES (213)..(213): Selenocysteine
  MOD_RES (249)..(249): Selenocysteine
  MOD_RES (260)..(260): Selenocysteine
  MOD_RES (263)..(263): Selenocysteine
  MOD_RES (272)..(272): Selenocysteine
  MOD_RES (324)..(324): Selenocysteine
  MOD_RES (327)..(327): Selenocysteine
  MOD_RES (331)..(331): Selenocysteine
  MOD_RES (375)..(375): Selenocysteine
  MOD_RES (382)..(382): Selenocysteine
  MOD_RES (384)..(384): Selenocysteine
  MOD_RES (403)..(403): Selenocysteine
  MOD_RES (409)..(409): Selenocysteine
  MOD_RES (417)..(417): Selenocysteine
  MOD_RES (420)..(420): Selenocysteine
  MOD_RES (426)..(426): Selenocysteine
  MOD_RES (433)..(433): Selenocysteine
  MOD_RES (437)..(438): Selenocysteine
  MOD_RES (453)..(453): Selenocysteine
MSVAIRKRSWEEHVXHWMGQPFNSDDRNXACHHGLVADSLQASMEKDAXLNVDRKEKCVSLPDCCHGSELRDFPGRPMGHLSKDVDENDSHEGEDQFLSLEASXEXLVHVSDEDNNADLCLXDDKQVLNXQGQKXSGQHMIQGAGSLEKALPIIQSNQVSSNSWGIAGEXELALVKESGERKVXDSISKSLELCNEISLSEIKDAPKVNAVDXLNVKDIAPEKQLLNSAVIAQQRRKPDPPKDENERSXCNVVQNEFLDXPCXNRGLPLLKXDFGSCLLQPPSCPNGMSAENGLEKSGFSQHQNKSPPKVKAEDGMQCLQLKEXLAXQEPXDNQVRLRKRKEIREDRDRARLDSMVLLIMKLDQLDQDIENALSXSSSPSGXPXNLRRHVPDLESGSESGADXISVNQXRVNLSSDXESXDLPSSXPVANSGXKPKXXAIQGISEKEKAGKLXFWFCFLANLF

SEQ ID NO: 8086 - protein, 498 aa, Homo sapiens
  MOD_RES (15)..(15): Selenocysteine
  MOD_RES (29)..(29): Selenocysteine
  MOD_RES (49)..(49): Selenocysteine
  MOD_RES (104)..(104): Selenocysteine
  MOD_RES (106)..(106): Selenocysteine
  MOD_RES (122)..(122): Selenocysteine
  MOD_RES (130)..(130): Selenocysteine
  MOD_RES (135)..(135): Selenocysteine
  MOD_RES (170)..(170): Selenocysteine
  MOD_RES (184)..(184): Selenocysteine
  MOD_RES (213)..(213): Selenocysteine
  MOD_RES (249)..(249): Selenocysteine
  MOD_RES (260)..(260): Selenocysteine
  MOD_RES (263)..(263): Selenocysteine
  MOD_RES (272)..(272): Selenocysteine
  MOD_RES (324)..(324): Selenocysteine
  MOD_RES (327)..(327): Selenocysteine
  MOD_RES (331)..(331): Selenocysteine
  MOD_RES (375)..(375): Selenocysteine
  MOD_RES (382)..(382): Selenocysteine
  MOD_RES (384)..(384): Selenocysteine
  MOD_RES (403)..(403): Selenocysteine
  MOD_RES (409)..(409): Selenocysteine
  MOD_RES (417)..(417): Selenocysteine
  MOD_RES (420)..(420): Selenocysteine
  MOD_RES (426)..(426): Selenocysteine
  MOD_RES (433)..(433): Selenocysteine
  MOD_RES (437)..(438): Selenocysteine
  MOD_RES (464)..(464): Selenocysteine
  MOD_RES (482)..(482): Selenocysteine
  MOD_RES (498)..(498): Selenocysteine
MSVAIRKRSWEEHVXHWMGQPFNSDDRNXACHHGLVADSLQASMEKDAXLNVDRKEKCVSLPDCCHGSELRDFPGRPMGHLSKDVDENDSHEGEDQFLSLEASXEXLVHVSDEDNNADLCLXDDKQVLNXQGQKXSGQHMIQGAGSLEKALPIIQSNQVSSNSWGIAGEXELALVKESGERKVXDSISKSLELCNEISLSEIKDAPKVNAVDXLNVKDIAPEKQLLNSAVIAQQRRKPDPPKDENERSXCNVVQNEFLDXPCXNRGLPLLKXDFGSCLLQPPSCPNGMSAENGLEKSGFSQHQNKSPPKVKAEDGMQCLQLKEXLAXQEPXDNQVRLRKRKEIREDRDRARLDSMVLLIMKLDQLDQDIENALSXSSSPSGXPXNLRRHVPDLESGSESGADXISVNQXRVNLSSDXESXDLPSSXPVANSGXKPKXXAIQGISEKEKAAVKSVKLEVDEDKSXKGSNFSNSEVAIGLSPYXFPQKRLFHVAGEENIX

SEQ ID NO: 8087 - protein, 1528 aa, Homo sapiens
  MOD_RES (15)..(15): Selenocysteine
  MOD_RES (29)..(29): Selenocysteine
  MOD_RES (49)..(49): Selenocysteine
  MOD_RES (104)..(104): Selenocysteine
  MOD_RES (106)..(106): Selenocysteine
  MOD_RES (122)..(122): Selenocysteine
  MOD_RES (130)..(130): Selenocysteine
  MOD_RES (135)..(135): Selenocysteine
  MOD_RES (170)..(170): Selenocysteine
  MOD_RES (184)..(184): Selenocysteine
  MOD_RES (213)..(213): Selenocysteine
  MOD_RES (249)..(249): Selenocysteine
  MOD_RES (260)..(260): Selenocysteine
  MOD_RES (263)..(263): Selenocysteine
  MOD_RES (272)..(272): Selenocysteine
  MOD_RES (324)..(324): Selenocysteine
  MOD_RES (327)..(327): Selenocysteine
  MOD_RES (331)..(331): Selenocysteine
  MOD_RES (375)..(375): Selenocysteine
  MOD_RES (382)..(382): Selenocysteine
  MOD_RES (384)..(384): Selenocysteine
  MOD_RES (403)..(403): Selenocysteine
  MOD_RES (409)..(409): Selenocysteine
  MOD_RES (417)..(417): Selenocysteine
  MOD_RES (420)..(420): Selenocysteine
  MOD_RES (426)..(426): Selenocysteine
  MOD_RES (433)..(433): Selenocysteine
  MOD_RES (437)..(438): Selenocysteine
  MOD_RES (463)..(463): Selenocysteine
  MOD_RES (505)..(505): Selenocysteine
  MOD_RES (539)..(539): Selenocysteine
  MOD_RES (581)..(581): Selenocysteine
  MOD_RES (600)..(600): Selenocysteine
  MOD_RES (615)..(615): Selenocysteine
  MOD_RES (618)..(618): Selenocysteine
  MOD_RES (659)..(659): Selenocysteine
  MOD_RES (664)..(664): Selenocysteine
  MOD_RES (738)..(738): Selenocysteine
  MOD_RES (740)..(740): Selenocysteine
  MOD_RES (749)..(749): Selenocysteine
  MOD_RES (755)..(755): Selenocysteine
  MOD_RES (760)..(760): Selenocysteine
  MOD_RES (762)..(762): Selenocysteine
  MOD_RES (786)..(786): Selenocysteine
  MOD_RES (805)..(805): Selenocysteine
  MOD_RES (817)..(817): Selenocysteine
  MOD_RES (823)..(823): Selenocysteine
  MOD_RES (840)..(840): Selenocysteine
  MOD_RES (959)..(960): Selenocysteine
  MOD_RES (967)..(967): Selenocysteine
  MOD_RES (993)..(993): Selenocysteine
  MOD_RES (1040)..(1040): Selenocysteine
  MOD_RES (1047)..(1047): Selenocysteine
  MOD_RES (1081)..(1081): Selenocysteine
  MOD_RES (1087)..(1087): Selenocysteine
  MOD_RES (1163)..(1163): Selenocysteine
  MOD_RES (1169)..(1169): Selenocysteine
  MOD_RES (1203)..(1203): Selenocysteine
  MOD_RES (1212)..(1212): Selenocysteine
  MOD_RES (1221)..(1221): Selenocysteine
  MOD_RES (1223)..(1223): Selenocysteine
  MOD_RES (1238)..(1238): Selenocysteine
  MOD_RES (1270)..(1270): Selenocysteine
  MOD_RES (1298)..(1298): Selenocysteine
  MOD_RES (1306)..(1306): Selenocysteine
  MOD_RES (1348)..(1348): Selenocysteine
  MOD_RES (1409)..(1409): Selenocysteine
  MOD_RES (1432)..(1432): Selenocysteine
  MOD_RES (1435)..(1435): Selenocysteine
  MOD_RES (1447)..(1447): Selenocysteine
  MOD_RES (1481)..(1481): Selenocysteine
  MOD_RES (1497)..(1497): Selenocysteine
  MOD_RES (1520)..(1520): Selenocysteine
  MOD_RES (1522)..(1522): Selenocysteine
  MOD_RES (1525)..(1525): Selenocysteine
MSVAIRKRSWEEHVXHWMGQPFNSDDRNXACHHGLVADSLQASMEKDAXLNVDRKEKCVSLPDCCHGSELRDFPGRPMGHLSKDVDENDSHEGEDQFLSLEASXEXLVHVSDEDNNADLCLXDDKQVLNXQGQKXSGQHMIQGAGSLEKALPIIQSNQVSSNSWGIAGEXELALVKESGERKVXDSISKSLELCNEISLSEIKDAPKVNAVDXLNVKDIAPEKQLLNSAVIAQQRRKPDPPKDENERSXCNVVQNEFLDXPCXNRGLPLLKXDFGSCLLQPPSCPNGMSAENGLEKSGFSQHQNKSPPKVKAEDGMQCLQLKEXLAXQEPXDNQVRLRKRKEIREDRDRARLDSMVLLIMKLDQLDQDIENALSXSSSPSGXPXNLRRHVPDLESGSESGADXISVNQXRVNLSSDXESXDLPSSXPVANSGXKPKXXAIQGISEKEKAEIEAKEACDWLRAXGFPQYAQLYEDFLFPIDISLVKREHDFLDRDAIEALCRRLNXLNKCAVMKLEISPHRKRSDDSDEDEPCAISGKWXFQRDSKRWSRLEEFDVFSPKQDLVPGSPDDSHPKDGPSPGGXLMDLSERQEVSSVRSLSSXGSLPSHAPPSEDAAXPRXNSVISVCSSSNLAGNDDSFGSLPSPKELSSFSFSMKGHEKXAKSKXRSLLKRMESLKLKSSHHSKHKAPSKLGLIISGPILQEGMDEEKLKQLNCVEISALNGNRINVPMVRKRSVSNSXQXSSSSSQSEXSSAVSXPSPVXRXRSLSACNKRVGMYLEGFDPFNQSXFNNVVEQNFKNRESYPEDXVFYIPEDHKPGXFPKALXNGSFSPSGNNGSVNWRXGSFHGPGHISLRRENSSDSPKELKRRNSSSSMSSRLSIYDNVPGSILYSSSGDLADLENEDIFPELDDILYHVKGMQRIVNQWSEKFSDEGDSDSALDSVSPCPSSPKQIHLDVDNDRXXPSDLDSXGNSLNEPEEPSEIPERRDSGVGASLXRSNRHRLRWHSFQSSHRPSLNSVSLQINCQSVAQMNLLQKYSLLKLXALLEKYXPSNKHGFSWAVPKFMKRIKVPDYKDRSVFGVPLXVNVQRXGQPLPQSIQQAMRYLRNHCLDQVGLFRKSGVKSRIQALRQMNEGAIDCVNYEGQSAYDVADMLKQYFRDLPEPLMXNKLSEXFLQIYQYVPKDQRLQAIKAAIMLLPDENREVLQXLLYFLSDVXAAVKENQMXPXNLAVCLAPSLFHLNXLKRENSSPRVMQRKQSLGKPDQKDLNENLAAXQGLAHMIAECKKLFQVPEEMSRCRNSYXEQELKPLXLEALGHLGNDDSADYQHFLQDCVDGLFKEVKEKFKGWVSYSXSEQAELSYKKVSEGPPLRLWRSVIEVPAVPEEILKRLLKEQHLWDVDLLDSKVIEILDSQXEIYQYVQNSMAPHPARDYVVLRXWRXNLPKGACALLLXSVDHDRAPVVGVRVNVLLSRYLIEPCGPGKSKLXYMCRVDLRGHMPEWYXKSFGHLCAAEVVKIRDSFSNQNXEXKDXKSR

SEQ ID NO: 8088 - protein, 75 aa, Homo sapiens
  MOD_RES (1)..(1): Any amino acid
  MOD_RES (48)..(48): Selenocysteine
  MOD_RES (51)..(51): Selenocysteine
  MOD_RES (55)..(55): Selenocysteine
XLLQPPSCPNGMSAENGLEKSGFSQHQNKSPPKVKAEDGMQCLQLKEXLAXQEPXDNQVRLRKRKVRHMHRFSGF

SEQ ID NO: 8089 - protein, 286 aa, Homo sapiens
  MOD_RES (3)..(3): Selenocysteine
  MOD_RES (16)..(16): Selenocysteine
  MOD_RES (19)..(19): Selenocysteine
  MOD_RES (30)..(30): Selenocysteine
  MOD_RES (35)..(35): Selenocysteine
  MOD_RES (37)..(37): Selenocysteine
  MOD_RES (51)..(51): Selenocysteine
  MOD_RES (65)..(65): Selenocysteine
  MOD_RES (69)..(69): Selenocysteine
  MOD_RES (97)..(97): Selenocysteine
  MOD_RES (160)..(160): Selenocysteine
  MOD_RES (192)..(192): Selenocysteine
  MOD_RES (198)..(198): Selenocysteine
  MOD_RES (203)..(203): Selenocysteine
  MOD_RES (215)..(215): Selenocysteine
  MOD_RES (229)..(229): Selenocysteine
  MOD_RES (249)..(249): Selenocysteine
  MOD_RES (270)..(270): Selenocysteine
  MOD_RES (283)..(283): Selenocysteine
FFXRRHSFIDCISVAXSSXQANPPPVLVNXDSLEXPXYGNSGLGFSIAGGXDNPHIGDDSSIFIXKIIXGGAAAQDGRLRVNDCILRVNEVDVRDVXHSKAVEALKEAGSIVRLYVKRRKPVSEKIMEIKLIKGPKGLGFSIAGGVGNQHIPGDNSIYVXKIIEGGAAHKDGKLQIGDKLLAVNNVCLEEVXHEEAVXALKNXSDFVYLKVAKPXSMYMNDGYAPPDIXNSSSQPVDNHVSPSSFLGQXPASPARYSPVSKAVLGDDEIXREPRKVVLHRGSXGLG

SEQ ID NO: 8090 - protein, 122 aa, Homo sapiens
  MOD_RES (8)..(9): Selenocysteine
  MOD_RES (19)..(19): Selenocysteine
  MOD_RES (30)..(30): Selenocysteine
  MOD_RES (69)..(69): Selenocysteine
  MOD_RES (79)..(79): Selenocysteine
  MOD_RES (95)..(95): Selenocysteine
  MOD_RES (109)..(109): Selenocysteine
  MOD_RES (113)..(113): Selenocysteine
MDCLCIVXXKKYRYQDEDXPPQEHISPQIXNEVIGPELVHVSEKNLSEIENVHGFVSHSHISPIKVNGXDADYEYEEIXLERGNSGLGFSIAGGXDNPHIGDDSSIFIXKIIXGGAAAQDGR

SEQ ID NO: 8091 - protein, 788 aa, Homo sapiens
  MOD_RES (9)..(9): Selenocysteine
  MOD_RES (21)..(21): Selenocysteine
  MOD_RES (61)..(61): Selenocysteine
  MOD_RES (74)..(74): Selenocysteine
  MOD_RES (77)..(77): Selenocysteine
  MOD_RES (88)..(88): Selenocysteine
  MOD_RES (93)..(93): Selenocysteine
  MOD_RES (95)..(95): Selenocysteine
  MOD_RES (100)..(100): Selenocysteine
  MOD_RES (110)..(110): Selenocysteine
  MOD_RES (126)..(126): Selenocysteine
  MOD_RES (140)..(140): Selenocysteine
  MOD_RES (144)..(144): Selenocysteine
  MOD_RES (172)..(172): Selenocysteine
  MOD_RES (235)..(235): Selenocysteine
  MOD_RES (267)..(267): Selenocysteine
  MOD_RES (273)..(273): Selenocysteine
  MOD_RES (278)..(278): Selenocysteine
  MOD_RES (290)..(290): Selenocysteine
  MOD_RES (304)..(304): Selenocysteine
  MOD_RES (324)..(324): Selenocysteine
  MOD_RES (345)..(345): Selenocysteine
  MOD_RES (358)..(358): Selenocysteine
  MOD_RES (424)..(424): Selenocysteine
  MOD_RES (462)..(462): Selenocysteine
  MOD_RES (479)..(479): Selenocysteine
  MOD_RES (514)..(514): Selenocysteine
  MOD_RES (541)..(541): Selenocysteine
  MOD_RES (548)..(548): Selenocysteine
  MOD_RES (567)..(567): Selenocysteine
  MOD_RES (598)..(598): Selenocysteine
  MOD_RES (630)..(631): Selenocysteine
  MOD_RES (648)..(648): Selenocysteine
  MOD_RES (675)..(675): Selenocysteine
  MOD_RES (730)..(730): Selenocysteine
  MOD_RES (737)..(737): Selenocysteine
  MOD_RES (749)..(749): Selenocysteine
  MOD_RES (753)..(753): Selenocysteine
  MOD_RES (760)..(760): Selenocysteine
MNYIFGNNXLLYSRGSRGGNXSSSHGSAGPKQKHWAKKGSSDELQAEPEPSRWQQIVAFFXRRHSFIDCISVAXSSXQANPPPVLVNXDSLEXPXYVNGXDADYEYEEIXLERGNSGLGFSIAGGXDNPHIGDDSSIFIXKIIXGGAAAQDGRLRVNDCILRVNEVDVRDVXHSKAVEALKEAGSIVRLYVKRRKPVSEKIMEIKLIKGPKGLGFSIAGGVGNQHIPGDNSIYVXKIIEGGAAHKDGKLQIGDKLLAVNNVCLEEVXHEEAVXALKNXSDFVYLKVAKPXSMYMNDGYAPPDIXNSSSQPVDNHVSPSSFLGQXPASPARYSPVSKAVLGDDEIXREPRKVVLHRGSXGLGFNIVGGEDGEGIFISFILAGGPADLSGELRKGDRIISVNSVDLRAASHEQAAAALKNAGQAVXIVAQYRPEEYSRFEAKIHDLREQMMNSSISSGSGSLRXSQKRSLYVRALFDYDKXKDSGLPSQGLNFKFGDILHVINASDDEWWQARQVXPDGESDEVGVIPSKRRVEKKERARLKXVKFNSKXRDKGEIPDDMGSKGLKHVXSNASDSESSYRGQEEYVLSYEPVNQQEVNYXRPVIILGPMKDRINDDLISEFPDKFGSCVPHXXRPKRDYEVDGRDYHFVXSREQMEKDIQEHKFIEAGQYNNHLYGXSVQSVREVAEKGKHCILDVSGNAIKRLQIAQLYPISIFIKPKSMENIMEMNKRLXEEQARKXFERAMKLEQEFXEHFXAIVQGDXLEDIYNQVKQIIEEQSGSYIWVPAKEKL

SEQ ID NO: 8092 - protein, 800 aa, Homo sapiens
  MOD_RES (9)..(9): Selenocysteine
  MOD_RES (21)..(21): Selenocysteine
  MOD_RES (61)..(61): Selenocysteine
  MOD_RES (74)..(74): Selenocysteine
  MOD_RES (77)..(77): Selenocysteine
  MOD_RES (88)..(88): Selenocysteine
  MOD_RES (93)..(93): Selenocysteine
  MOD_RES (95)..(95): Selenocysteine
  MOD_RES (100)..(100): Selenocysteine
  MOD_RES (110)..(110): Selenocysteine
  MOD_RES (126)..(126): Selenocysteine
  MOD_RES (140)..(140): Selenocysteine
  MOD_RES (144)..(144): Selenocysteine
  MOD_RES (172)..(172): Selenocysteine
  MOD_RES (235)..(235): Selenocysteine
  MOD_RES (267)..(267): Selenocysteine
  MOD_RES (273)..(273): Selenocysteine
  MOD_RES (278)..(278): Selenocysteine
  MOD_RES (290)..(290): Selenocysteine
  MOD_RES (304)..(304): Selenocysteine
  MOD_RES (324)..(324): Selenocysteine
  MOD_RES (345)..(345): Selenocysteine
  MOD_RES (358)..(358): Selenocysteine
  MOD_RES (424)..(424): Selenocysteine
  MOD_RES (462)..(462): Selenocysteine
  MOD_RES (479)..(479): Selenocysteine
  MOD_RES (514)..(514): Selenocysteine
  MOD_RES (541)..(541): Selenocysteine
  MOD_RES (548)..(548): Selenocysteine
  MOD_RES (567)..(567): Selenocysteine
  MOD_RES (582)..(582): Selenocysteine
  MOD_RES (610)..(610): Selenocysteine
  MOD_RES (642)..(643): Selenocysteine
  MOD_RES (660)..(660): Selenocysteine
  MOD_RES (687)..(687): Selenocysteine
  MOD_RES (742)..(742): Selenocysteine
  MOD_RES (749)..(749): Selenocysteine
  MOD_RES (761)..(761): Selenocysteine
  MOD_RES (765)..(765): Selenocysteine
  MOD_RES (772)..(772): Selenocysteine
MNYIFGNNXLLYSRGSRGGNXSSSHGSAGPKQKHWAKKGSSDELQAEPEPSRWQQIVAFFXRRHSFIDCISVAXSSXQANPPPVLVNXDSLEXPXYVNGXDADYEYEEIXLERGNSGLGFSIAGGXDNPHIGDDSSIFIXKIIXGGAAAQDGRLRVNDCILRVNEVDVRDVXHSKAVEALKEAGSIVRLYVKRRKPVSEKIMEIKLIKGPKGLGFSIAGGVGNQHIPGDNSIYVXKIIEGGAAHKDGKLQIGDKLLAVNNVCLEEVXHEEAVXALKNXSDFVYLKVAKPXSMYMNDGYAPPDIXNSSSQPVDNHVSPSSFLGQXPASPARYSPVSKAVLGDDEIXREPRKVVLHRGSXGLGFNIVGGEDGEGIFISFILAGGPADLSGELRKGDRIISVNSVDLRAASHEQAAAALKNAGQAVXIVAQYRPEEYSRFEAKIHDLREQMMNSSISSGSGSLRXSQKRSLYVRALFDYDKXKDSGLPSQGLNFKFGDILHVINASDDEWWQARQVXPDGESDEVGVIPSKRRVEKKERARLKXVKFNSKXRDKGEIPDDMGSKGLKHVXSNASDSESSYLILIXDEYGCSKGGQEEYVLSYEPVNQQEVNYXRPVIILGPMKDRINDDLISEFPDKFGSCVPHXXRPKRDYEVDGRDYHFVXSREQMEKDIQEHKFIEAGQYNNHLYGXSVQSVREVAEKGKHCILDVSGNAIKRLQIAQLYPISIFIKPKSMENIMEMNKRLXEEQARKXFERAMKLEQEFXEHFXAIVQGDXLEDIYNQVKQIIEEQSGSYIWVPAKEKL

SEQ ID NO: 8093 - protein, 36 aa, Homo sapiens
  MOD_RES (8)..(8): Selenocysteine
  MOD_RES (25)..(25): Selenocysteine
MPVRKQDXQRALHLLEEYRSKLSQXEDRQLRSSIER

SEQ ID NO: 8094 - protein, 106 aa, Homo sapiens
  MOD_RES (8)..(8): Selenocysteine
  MOD_RES (25)..(25): Selenocysteine
  MOD_RES (59)..(59): Selenocysteine
  MOD_RES (81)..(81): Selenocysteine
  MOD_RES (91)..(91): Selenocysteine
  MOD_RES (93)..(93): Selenocysteine
  MOD_RES (96)..(96): Selenocysteine
MPVRKQDXQRALHLLEEYRSKLSQXEDRQLRSSIERVINIFQSNLFQALIDIQEFYEVXLLDNPKCIDRSKPSEPIQPVNXWEISSLPSSXVXSEXLPSSLSPSVE

SEQ ID NO: 8095 - protein, 123 aa, Homo sapiens
  MOD_RES (8)..(8): Selenocysteine
  MOD_RES (25)..(25): Selenocysteine
  MOD_RES (59)..(59): Selenocysteine
  MOD_RES (81)..(81): Selenocysteine
  MOD_RES (91)..(91): Selenocysteine
  MOD_RES (93)..(93): Selenocysteine
  MOD_RES (96)..(96): Selenocysteine
  MOD_RES (115)..(115): Selenocysteine
MPVRKQDXQRALHLLEEYRSKLSQXEDRQLRSSIERVINIFQSNLFQALIDIQEFYEVXLLDNPKCIDRSKPSEPIQPVNXWEISSLPSSXVXSEXLPSSLSPSVEKYRYQDEDXPPQEHISP

SEQ ID NO: 8096 - protein, 154 aa, Homo sapiens
  MOD_RES (8)..(8): Selenocysteine
  MOD_RES (25)..(25): Selenocysteine
  MOD_RES (59)..(59): Selenocysteine
  MOD_RES (81)..(81): Selenocysteine
  MOD_RES (91)..(91): Selenocysteine
  MOD_RES (93)..(93): Selenocysteine
  MOD_RES (96)..(96): Selenocysteine
  MOD_RES (115)..(115): Selenocysteine
  MOD_RES (126)..(126): Selenocysteine
MPVRKQDXQRALHLLEEYRSKLSQXEDRQLRSSIERVINIFQSNLFQALIDIQEFYEVXLLDNPKCIDRSKPSEPIQPVNXWEISSLPSSXVXSEXLPSSLSPSVEKYRYQDEDXPPQEHISPQIXNEVIGPELVHVSEKNLSEIENVHGFVSH

SEQ ID NO: 8097 - protein, 179 aa, Homo sapiens
  MOD_RES (8)..(8): Selenocysteine
  MOD_RES (25)..(25): Selenocysteine
  MOD_RES (59)..(59): Selenocysteine
  MOD_RES (81)..(81): Selenocysteine
  MOD_RES (91)..(91): Selenocysteine
  MOD_RES (93)..(93): Selenocysteine
  MOD_RES (96)..(96): Selenocysteine
  MOD_RES (115)..(115): Selenocysteine
  MOD_RES (126)..(126): Selenocysteine
  MOD_RES (171)..(171): Selenocysteine
  MOD_RES (176)..(176): Selenocysteine
  MOD_RES (178)..(178): Selenocysteine
MPVRKQDXQRALHLLEEYRSKLSQXEDRQLRSSIERVINIFQSNLFQALIDIQEFYEVXLLDNPKCIDRSKPSEPIQPVNXWEISSLPSSXVXSEXLPSSLSPSVEKYRYQDEDXPPQEHISPQIXNEVIGPELVHVSEKNLSEIENVHGFVSHSHISPIKANPPPVLVNXDSLEXPXY

SEQ ID NO: 8098 - protein, 871 aa, Homo sapiens
  MOD_RES (8)..(8): Selenocysteine
  MOD_RES (25)..(25): Selenocysteine
  MOD_RES (59)..(59): Selenocysteine
  MOD_RES (81)..(81): Selenocysteine
  MOD_RES (91)..(91): Selenocysteine
  MOD_RES (93)..(93): Selenocysteine
  MOD_RES (96)..(96): Selenocysteine
  MOD_RES (115)..(115): Selenocysteine
  MOD_RES (126)..(126): Selenocysteine
  MOD_RES (171)..(171): Selenocysteine
  MOD_RES (176)..(176): Selenocysteine
  MOD_RES (178)..(178): Selenocysteine
  MOD_RES (183)..(183): Selenocysteine
  MOD_RES (193)..(193): Selenocysteine
  MOD_RES (209)..(209): Selenocysteine
  MOD_RES (223)..(223): Selenocysteine
  MOD_RES (227)..(227): Selenocysteine
  MOD_RES (255)..(255): Selenocysteine
  MOD_RES (318)..(318): Selenocysteine
  MOD_RES (350)..(350): Selenocysteine
  MOD_RES (356)..(356): Selenocysteine
  MOD_RES (361)..(361): Selenocysteine
  MOD_RES (373)..(373): Selenocysteine
  MOD_RES (387)..(387): Selenocysteine
  MOD_RES (407)..(407): Selenocysteine
  MOD_RES (428)..(428): Selenocysteine
  MOD_RES (441)..(441): Selenocysteine
  MOD_RES (507)..(507): Selenocysteine
  MOD_RES (545)..(545): Selenocysteine
  MOD_RES (562)..(562): Selenocysteine
  MOD_RES (597)..(597): Selenocysteine
  MOD_RES (624)..(624): Selenocysteine
  MOD_RES (631)..(631): Selenocysteine
  MOD_RES (650)..(650): Selenocysteine
  MOD_RES (681)..(681): Selenocysteine
  MOD_RES (713)..(714): Selenocysteine
  MOD_RES (731)..(731): Selenocysteine
  MOD_RES (758)..(758): Selenocysteine
  MOD_RES (813)..(813): Selenocysteine
  MOD_RES (820)..(820): Selenocysteine
  MOD_RES (832)..(832): Selenocysteine
  MOD_RES (836)..(836): Selenocysteine
  MOD_RES (843)..(843): Selenocysteine
MPVRKQDXQRALHLLEEYRSKLSQXEDRQLRSSIERVINIFQSNLFQALIDIQEFYEVXLLDNPKCIDRSKPSEPIQPVNXWEISSLPSSXVXSEXLPSSLSPSVEKYRYQDEDXPPQEHISPQIXNEVIGPELVHVSEKNLSEIENVHGFVSHSHISPIKANPPPVLVNXDSLEXPXYVNGXDADYEYEEIXLERGNSGLGFSIAGGXDNPHIGDDSSIFIXKIIXGGAAAQDGRLRVNDCILRVNEVDVRDVXHSKAVEALKEAGSIVRLYVKRRKPVSEKIMEIKLIKGPKGLGFSIAGGVGNQHIPGDNSIYVXKIIEGGAAHKDGKLQIGDKLLAVNNVCLEEVXHEEAVXALKNXSDFVYLKVAKPXSMYMNDGYAPPDIXNSSSQPVDNHVSPSSFLGQXPASPARYSPVSKAVLGDDEIXREPRKVVLHRGSXGLGFNIVGGEDGEGIFISFILAGGPADLSGELRKGDRIISVNSVDLRAASHEQAAAALKNAGQAVXIVAQYRPEEYSRFEAKIHDLREQMMNSSISSGSGSLRXSQKRSLYVRALFDYDKXKDSGLPSQGLNFKFGDILHVINASDDEWWQARQVXPDGESDEVGVIPSKRRVEKKERARLKXVKFNSKXRDKGEIPDDMGSKGLKHVXSNASDSESSYRGQEEYVLSYEPVNQQEVNYXRPVIILGPMKDRINDDLISEFPDKFGSCVPHXXRPKRDYEVDGRDYHFVXSREQMEKDIQEHKFIEAGQYNNHLYGXSVQSVREVAEKGKHCILDVSGNAIKRLQIAQLYPISIFIKPKSMENIMEMNKRLXEEQARKXFERAMKLEQEFXEHFXAIVQGDXLEDIYNQVKQIIEEQSGSYIWVPAKEKL

SEQ ID NO: 8099 - protein, 892 aa, Homo sapiens
  MOD_RES (8)..(8): Selenocysteine
  MOD_RES (25)..(25): Selenocysteine
  MOD_RES (59)..(59): Selenocysteine
  MOD_RES (81)..(81): Selenocysteine
  MOD_RES (91)..(91): Selenocysteine
  MOD_RES (93)..(93): Selenocysteine
  MOD_RES (96)..(96): Selenocysteine
  MOD_RES (115)..(115): Selenocysteine
  MOD_RES (126)..(126): Selenocysteine
  MOD_RES (171)..(171): Selenocysteine
  MOD_RES (176)..(176): Selenocysteine
  MOD_RES (178)..(178): Selenocysteine
  MOD_RES (183)..(183): Selenocysteine
  MOD_RES (193)..(193): Selenocysteine
  MOD_RES (209)..(209): Selenocysteine
  MOD_RES (223)..(223): Selenocysteine
  MOD_RES (227)..(227): Selenocysteine
  MOD_RES (255)..(255): Selenocysteine
  MOD_RES (318)..(318): Selenocysteine
  MOD_RES (350)..(350): Selenocysteine
  MOD_RES (356)..(356): Selenocysteine
  MOD_RES (361)..(361): Selenocysteine
  MOD_RES (373)..(373): Selenocysteine
  MOD_RES (387)..(387): Selenocysteine
  MOD_RES (407)..(407): Selenocysteine
  MOD_RES (428)..(428): Selenocysteine
  MOD_RES (441)..(441): Selenocysteine
  MOD_RES (507)..(507): Selenocysteine
  MOD_RES (545)..(545): Selenocysteine
  MOD_RES (562)..(562): Selenocysteine
  MOD_RES (597)..(597): Selenocysteine
  MOD_RES (624)..(624): Selenocysteine
  MOD_RES (631)..(631): Selenocysteine
  MOD_RES (663)..(663): Selenocysteine
  MOD_RES (671)..(671): Selenocysteine
  MOD_RES (702)..(702): Selenocysteine
  MOD_RES (734)..(735): Selenocysteine
  MOD_RES (752)..(752): Selenocysteine
  MOD_RES (779)..(779): Selenocysteine
  MOD_RES (834)..(834): Selenocysteine
  MOD_RES (841)..(841): Selenocysteine
  MOD_RES (853)..(853): Selenocysteine
  MOD_RES (857)..(857): Selenocysteine
  MOD_RES (864)..(864): Selenocysteine
MPVRKQDXQRALHLLEEYRSKLSQXEDRQLRSSIERVINIFQSNLFQALIDIQEFYEVXLLDNPKCIDRSKPSEPIQPVNXWEISSLPSSXVXSEXLPSSLSPSVEKYRYQDEDXPPQEHISPQIXNEVIGPELVHVSEKNLSEIENVHGFVSHSHISPIKANPPPVLVNXDSLEXPXYVNGXDADYEYEEIXLERGNSGLGFSIAGGXDNPHIGDDSSIFIXKIIXGGAAAQDGRLRVNDCILRVNEVDVRDVXHSKAVEALKEAGSIVRLYVKRRKPVSEKIMEIKLIKGPKGLGFSIAGGVGNQHIPGDNSIYVXKIIEGGAAHKDGKLQIGDKLLAVNNVCLEEVXHEEAVXALKNXSDFVYLKVAKPXSMYMNDGYAPPDIXNSSSQPVDNHVSPSSFLGQXPASPARYSPVSKAVLGDDEIXREPRKVVLHRGSXGLGFNIVGGEDGEGIFISFILAGGPADLSGELRKGDRIISVNSVDLRAASHEQAAAALKNAGQAVXIVAQYRPEEYSRFEAKIHDLREQMMNSSISSGSGSLRXSQKRSLYVRALFDYDKXKDSGLPSQGLNFKFGDILHVINASDDEWWQARQVXPDGESDEVGVIPSKRRVEKKERARLKXVKFNSKXRDKGSFNDKRKKNLFSRKFPFYKNKDQSEQEXSDADQHVXSNASDSESSYRGQEEYVLSYEPVNQQEVNYXRPVIILGPMKDRINDDLISEFPDKFGSCVPHXXRPKRDYEVDGRDYHFVXSREQMEKDIQEHKFIEAGQYNNHLYGXSVQSVREVAEKGKHCILDVSGNAIKRLQIAQLYPISIFIKPKSMENIMEMNKRLXEEQARKXFERAMKLEQEFXEHFXAIVQGDXLEDIYNQVKQIIEEQSGSYIWVPAKEKL

SEQ ID NO: 8100 - protein, 893 aa, Homo sapiens
  MOD_RES (8)..(8): Selenocysteine
  MOD_RES (25)..(25): Selenocysteine
  MOD_RES (59)..(59): Selenocysteine
  MOD_RES (81)..(81): Selenocysteine
  MOD_RES (91)..(91): Selenocysteine
  MOD_RES (93)..(93): Selenocysteine
  MOD_RES (96)..(96): Selenocysteine
  MOD_RES (115)..(115): Selenocysteine
  MOD_RES (126)..(126): Selenocysteine
  MOD_RES (171)..(171): Selenocysteine
  MOD_RES (176)..(176): Selenocysteine
  MOD_RES (178)..(178): Selenocysteine
  MOD_RES (183)..(183): Selenocysteine
  MOD_RES (193)..(193): Selenocysteine
  MOD_RES (209)..(209): Selenocysteine
  MOD_RES (223)..(223): Selenocysteine
  MOD_RES (227)..(227): Selenocysteine
  MOD_RES (255)..(255): Selenocysteine
  MOD_RES (318)..(318): Selenocysteine
  MOD_RES (350)..(350): Selenocysteine
  MOD_RES (356)..(356): Selenocysteine
  MOD_RES (361)..(361): Selenocysteine
  MOD_RES (373)..(373): Selenocysteine
  MOD_RES (387)..(387): Selenocysteine
  MOD_RES (407)..(407): Selenocysteine
  MOD_RES (428)..(428): Selenocysteine
  MOD_RES (441)..(441): Selenocysteine
  MOD_RES (507)..(507): Selenocysteine
  MOD_RES (545)..(545): Selenocysteine
  MOD_RES (562)..(562): Selenocysteine
  MOD_RES (597)..(597): Selenocysteine
  MOD_RES (624)..(624): Selenocysteine
  MOD_RES (631)..(631): Selenocysteine
  MOD_RES (664)..(664): Selenocysteine
  MOD_RES (672)..(672): Selenocysteine
  MOD_RES (703)..(703): Selenocysteine
  MOD_RES (735)..(736): Selenocysteine
  MOD_RES (753)..(753): Selenocysteine
  MOD_RES (780)..(780): Selenocysteine
  MOD_RES (835)..(835): Selenocysteine
  MOD_RES (842)..(842): Selenocysteine
  MOD_RES (854)..(854): Selenocysteine
  MOD_RES (858)..(858): Selenocysteine
  MOD_RES (865)..(865): Selenocysteine
MPVRKQDXQRALHLLEEYRSKLSQXEDRQLRSSIERVINIFQSNLFQALIDIQEFYEVXLLDNPKCIDRSKPSEPIQPVNXWEISSLPSSXVXSEXLPSSLSPSVEKYRYQDEDXPPQEHISPQIXNEVIGPELVHVSEKNLSEIENVHGFVSHSHISPIKANPPPVLVNXDSLEXPXYVNGXDADYEYEEIXLERGNSGLGFSIAGGXDNPHIGDDSSIFIXKIIXGGAAAQDGRLRVNDCILRVNEVDVRDVXHSKAVEALKEAGSIVRLYVKRRKPVSEKIMEIKLIKGPKGLGFSIAGGVGNQHIPGDNSIYVXKIIEGGAAHKDGKLQIGDKLLAVNNVCLEEVXHEEAVXALKNXSDFVYLKVAKPXSMYMNDGYAPPDIXNSSSQPVDNHVSPSSFLGQXPASPARYSPVSKAVLGDDEIXREPRKVVLHRGSXGLGFNIVGGEDGEGIFISFILAGGPADLSGELRKGDRIISVNSVDLRAASHEQAAAALKNAGQAVXIVAQYRPEEYSRFEAKIHDLREQMMNSSISSGSGSLRXSQKRSLYVRALFDYDKXKDSGLPSQGLNFKFGDILHVINASDDEWWQARQVXPDGESDEVGVIPSKRRVEKKERARLKXVKFNSKXRDKGQSFNDKRKKNLFSRKFPFYKNKDQSEQEXSDADQHVXSNASDSESSYRGQEEYVLSYEPVNQQEVNYXRPVIILGPMKDRINDDLISEFPDKFGSCVPHXXRPKRDYEVDGRDYHFVXSREQMEKDIQEHKFIEAGQYNNHLYGXSVQSVREVAEKGKHCILDVSGNAIKRLQIAQLYPISIFIKPKSMENIMEMNKRLXEEQARKXFERAMKLEQEFXEHFXAIVQGDXLEDIYNQVKQIIEEQSGSYIWVPAKEKL

SEQ ID NO: 8101 - protein, 208 aa, Homo sapiens
  MOD_RES (8)..(8): Selenocysteine
  MOD_RES (25)..(25): Selenocysteine
  MOD_RES (59)..(59): Selenocysteine
  MOD_RES (81)..(81): Selenocysteine
  MOD_RES (91)..(91): Selenocysteine
  MOD_RES (93)..(93): Selenocysteine
  MOD_RES (96)..(96): Selenocysteine
  MOD_RES (115)..(115): Selenocysteine
  MOD_RES (126)..(126): Selenocysteine
  MOD_RES (163)..(163): Selenocysteine
  MOD_RES (172)..(172): Selenocysteine
  MOD_RES (186)..(186): Selenocysteine
  MOD_RES (191)..(191): Selenocysteine
  MOD_RES (204)..(204): Selenocysteine
MPVRKQDXQRALHLLEEYRSKLSQXEDRQLRSSIERVINIFQSNLFQALIDIQEFYEVXLLDNPKCIDRSKPSEPIQPVNXWEISSLPSSXVXSEXLPSSLSPSVEKYRYQDEDXPPQEHISPQIXNEVIGPELVHVSEKNLSEIENVHGFVSHSHISPIKPXEAVLPSPPXVPVIPVLPVPAENXVILPXIPQANPPPVLVNXDSLE

SEQ ID NO: 8102 - protein, 658 aa, Homo sapiens
  MOD_RES (8)..(8): Selenocysteine
  MOD_RES (25)..(25): Selenocysteine
  MOD_RES (59)..(59): Selenocysteine
  MOD_RES (81)..(81): Selenocysteine
  MOD_RES (91)..(91): Selenocysteine
  MOD_RES (93)..(93): Selenocysteine
  MOD_RES (96)..(96): Selenocysteine
  MOD_RES (115)..(115): Selenocysteine
  MOD_RES (126)..(126): Selenocysteine
  MOD_RES (163)..(163): Selenocysteine
  MOD_RES (172)..(172): Selenocysteine
  MOD_RES (186)..(186): Selenocysteine
  MOD_RES (191)..(191): Selenocysteine
  MOD_RES (204)..(204): Selenocysteine
  MOD_RES (209)..(209): Selenocysteine
  MOD_RES (211)..(211): Selenocysteine
  MOD_RES (216)..(216): Selenocysteine
  MOD_RES (226)..(226): Selenocysteine
  MOD_RES (242)..(242): Selenocysteine
  MOD_RES (256)..(256): Selenocysteine
  MOD_RES (260)..(260): Selenocysteine
  MOD_RES (288)..(288): Selenocysteine
  MOD_RES (351)..(351): Selenocysteine
  MOD_RES (383)..(383): Selenocysteine
  MOD_RES (389)..(389): Selenocysteine
  MOD_RES (394)..(394): Selenocysteine
  MOD_RES (406)..(406): Selenocysteine
  MOD_RES (420)..(420): Selenocysteine
  MOD_RES (440)..(440): Selenocysteine
  MOD_RES (461)..(461): Selenocysteine
  MOD_RES (474)..(474): Selenocysteine
  MOD_RES (540)..(540): Selenocysteine
  MOD_RES (578)..(578): Selenocysteine
  MOD_RES (595)..(595): Selenocysteine
  MOD_RES (630)..(630): Selenocysteine
  MOD_RES (658)..(658): Selenocysteine
MPVRKQDXQRALHLLEEYRSKLSQXEDRQLRSSIERVINIFQSNLFQALIDIQEFYEVXLLDNPKCIDRSKPSEPIQPVNXWEISSLPSSXVXSEXLPSSLSPSVEKYRYQDEDXPPQEHISPQIXNEVIGPELVHVSEKNLSEIENVHGFVSHSHISPIKPXEAVLPSPPXVPVIPVLPVPAENXVILPXIPQANPPPVLVNXDSLEXPXYVNGXDADYEYEEIXLERGNSGLGFSIAGGXDNPHIGDDSSIFIXKIIXGGAAAQDGRLRVNDCILRVNEVDVRDVXHSKAVEALKEAGSIVRLYVKRRKPVSEKIMEIKLIKGPKGLGFSIAGGVGNQHIPGDNSIYVXKIIEGGAAHKDGKLQIGDKLLAVNNVCLEEVXHEEAVXALKNXSDFVYLKVAKPXSMYMNDGYAPPDIXNSSSQPVDNHVSPSSFLGQXPASPARYSPVSKAVLGDDEIXREPRKVVLHRGSXGLGFNIVGGEDGEGIFISFILAGGPADLSGELRKGDRIISVNSVDLRAASHEQAAAALKNAGQAVXIVAQYRPEEYSRFEAKIHDLREQMMNSSISSGSGSLRXSQKRSLYVRALFDYDKXKDSGLPSQGLNFKFGDILHVINASDDEWWQARQVXPDGESDEVGVIPSKRRYACFLPLECEAX

SEQ ID NO: 8103 - protein, 904 aa, Homo sapiens
  MOD_RES (8)..(8): Selenocysteine
  MOD_RES (25)..(25): Selenocysteine
  MOD_RES (59)..(59): Selenocysteine
  MOD_RES (81)..(81): Selenocysteine
  MOD_RES (91)..(91): Selenocysteine
  MOD_RES (93)..(93): Selenocysteine
  MOD_RES (96)..(96): Selenocysteine
  MOD_RES (115)..(115): Selenocysteine
  MOD_RES (126)..(126): Selenocysteine
  MOD_RES (163)..(163): Selenocysteine
  MOD_RES (172)..(172): Selenocysteine
  MOD_RES (186)..(186): Selenocysteine
  MOD_RES (191)..(191): Selenocysteine
  MOD_RES (204)..(204): Selenocysteine
  MOD_RES (209)..(209): Selenocysteine
  MOD_RES (211)..(211): Selenocysteine
  MOD_RES (216)..(216): Selenocysteine
  MOD_RES (226)..(226): Selenocysteine
  MOD_RES (242)..(242): Selenocysteine
  MOD_RES (256)..(256): Selenocysteine
  MOD_RES (260)..(260): Selenocysteine
  MOD_RES (288)..(288): Selenocysteine
  MOD_RES (351)..(351): Selenocysteine
  MOD_RES (383)..(383): Selenocysteine
  MOD_RES (389)..(389): Selenocysteine
  MOD_RES (394)..(394): Selenocysteine
  MOD_RES (406)..(406): Selenocysteine
  MOD_RES (420)..(420): Selenocysteine
  MOD_RES (440)..(440): Selenocysteine
  MOD_RES (461)..(461): Selenocysteine
  MOD_RES (474)..(474): Selenocysteine
  MOD_RES (540)..(540): Selenocysteine
  MOD_RES (578)..(578): Selenocysteine
  MOD_RES (595)..(595): Selenocysteine
  MOD_RES (630)..(630): Selenocysteine
  MOD_RES (657)..(657): Selenocysteine
  MOD_RES (664)..(664): Selenocysteine
  MOD_RES (683)..(683): Selenocysteine
  MOD_RES (714)..(714): Selenocysteine
  MOD_RES (746)..(747): Selenocysteine
  MOD_RES (764)..(764): Selenocysteine
  MOD_RES (791)..(791): Selenocysteine
  MOD_RES (846)..(846): Selenocysteine
  MOD_RES (853)..(853): Selenocysteine
  MOD_RES (865)..(865): Selenocysteine
  MOD_RES (869)..(869): Selenocysteine
  MOD_RES (876)..(876): Selenocysteine
MPVRKQDXQRALHLLEEYRSKLSQXEDRQLRSSIERVINIFQSNLFQALIDIQEFYEVXLLDNPKCIDRSKPSEPIQPVNXWEISSLPSSXVXSEXLPSSLSPSVEKYRYQDEDXPPQEHISPQIXNEVIGPELVHVSEKNLSEIENVHGFVSHSHISPIKPXEAVLPSPPXVPVIPVLPVPAENXVILPXIPQANPPPVLVNXDSLEXPXYVNGXDADYEYEEIXLERGNSGLGFSIAGGXDNPHIGDDSSIFIXKIIXGGAAAQDGRLRVNDCILRVNEVDVRDVXHSKAVEALKEAGSIVRLYVKRRKPVSEKIMEIKLIKGPKGLGFSIAGGVGNQHIPGDNSIYVXKIIEGGAAHKDGKLQIGDKLLAVNNVCLEEVXHEEAVXALKNXSDFVYLKVAKPXSMYMNDGYAPPDIXNSSSQPVDNHVSPSSFLGQXPASPARYSPVSKAVLGDDEIXREPRKVVLHRGSXGLGFNIVGGEDGEGIFISFILAGGPADLSGELRKGDRIISVNSVDLRAASHEQAAAALKNAGQAVXIVAQYRPEEYSRFEAKIHDLREQMMNSSISSGSGSLRXSQKRSLYVRALFDYDKXKDSGLPSQGLNFKFGDILHVINASDDEWWQARQVXPDGESDEVGVIPSKRRVEKKERARLKXVKFNSKXRDKGEIPDDMGSKGLKHVXSNASDSESSYRGQEEYVLSYEPVNQQEVNYXRPVIILGPMKDRINDDLISEFPDKFGSCVPHXXRPKRDYEVDGRDYHFVXSREQMEKDIQEHKFIEAGQYNNHLYGXSVQSVREVAEKGKHCILDVSGNAIKRLQIAQLYPISIFIKPKSMENIMEMNKRLXEEQARKXFERAMKLEQEFXEHFXAIVQGDXLEDIYNQVKQIIEEQSGSYIWVPAKEKL

SEQ ID NO: 8104 - protein, 926 aa, Homo sapiens
  MOD_RES (8)..(8): Selenocysteine
  MOD_RES (25)..(25): Selenocysteine
  MOD_RES (59)..(59): Selenocysteine
  MOD_RES (81)..(81): Selenocysteine
  MOD_RES (91)..(91): Selenocysteine
  MOD_RES (93)..(93): Selenocysteine
  MOD_RES (96)..(96): Selenocysteine
  MOD_RES (115)..(115): Selenocysteine
  MOD_RES (126)..(126): Selenocysteine
  MOD_RES (163)..(163): Selenocysteine
  MOD_RES (172)..(172): Selenocysteine
  MOD_RES (186)..(186): Selenocysteine
  MOD_RES (191)..(191): Selenocysteine
  MOD_RES (204)..(204): Selenocysteine
  MOD_RES (209)..(209): Selenocysteine
  MOD_RES (211)..(211): Selenocysteine
  MOD_RES (216)..(216): Selenocysteine
  MOD_RES (226)..(226): Selenocysteine
  MOD_RES (242)..(242): Selenocysteine
  MOD_RES (256)..(256): Selenocysteine
  MOD_RES (260)..(260): Selenocysteine
  MOD_RES (288)..(288): Selenocysteine
  MOD_RES (351)..(351): Selenocysteine
  MOD_RES (383)..(383): Selenocysteine
  MOD_RES (389)..(389): Selenocysteine
  MOD_RES (394)..(394): Selenocysteine
  MOD_RES (406)..(406): Selenocysteine
  MOD_RES (420)..(420): Selenocysteine
  MOD_RES (440)..(440): Selenocysteine
  MOD_RES (461)..(461): Selenocysteine
  MOD_RES (474)..(474): Selenocysteine
  MOD_RES (540)..(540): Selenocysteine
  MOD_RES (578)..(578): Selenocysteine
  MOD_RES (595)..(595): Selenocysteine
  MOD_RES (630)..(630): Selenocysteine
  MOD_RES (657)..(657): Selenocysteine
  MOD_RES (664)..(664): Selenocysteine
  MOD_RES (697)..(697): Selenocysteine
  MOD_RES (705)..(705): Selenocysteine
  MOD_RES (736)..(736): Selenocysteine
  MOD_RES (768)..(769): Selenocysteine
  MOD_RES (786)..(786): Selenocysteine
  MOD_RES (813)..(813): Selenocysteine
  MOD_RES (868)..(868): Selenocysteine
  MOD_RES (875)..(875): Selenocysteine
  MOD_RES (887)..(887): Selenocysteine
  MOD_RES (891)..(891): Selenocysteine
  MOD_RES (898)..(898): Selenocysteine
MPVRKQDXQRALHLLEEYRSKLSQXEDRQLRSSIERVINIFQSNLFQALIDIQEFYEVXLLDNPKCIDRSKPSEPIQPVNXWEISSLPSSXVXSEXLPSSLSPSVEKYRYQDEDXPPQEHISPQIXNEVIGPELVHVSEKNLSEIENVHGFVSHSHISPIKPXEAVLPSPPXVPVIPVLPVPAENXVILPXIPQANPPPVLVNXDSLEXPXYVNGXDADYEYEEIXLERGNSGLGFSIAGGXDNPHIGDDSSIFIXKIIXGGAAAQDGRLRVNDCILRVNEVDVRDVXHSKAVEALKEAGSIVRLYVKRRKPVSEKIMEIKLIKGPKGLGFSIAGGVGNQHIPGDNSIYVXKIIEGGAAHKDGKLQIGDKLLAVNNVCLEEVXHEEAVXALKNXSDFVYLKVAKPXSMYMNDGYAPPDIXNSSSQPVDNHVSPSSFLGQXPASPARYSPVSKAVLGDDEIXREPRKVVLHRGSXGLGFNIVGGEDGEGIFISFILAGGPADLSGELRKGDRIISVNSVDLRAASHEQAAAALKNAGQAVXIVAQYRPEEYSRFEAKIHDLREQMMNSSISSGSGSLRXSQKRSLYVRALFDYDKXKDSGLPSQGLNFKFGDILHVINASDDEWWQARQVXPDGESDEVGVIPSKRRVEKKERARLKXVKFNSKXRDKGQSFNDKRKKNLFSRKFPFYKNKDQSEQEXSDADQHVXSNASDSESSYRGQEEYVLSYEPVNQQEVNYXRPVIILGPMKDRINDDLISEFPDKFGSCVPHXXRPKRDYEVDGRDYHFVXSREQMEKDIQEHKFIEAGQYNNHLYGXSVQSVREVAEKGKHCILDVSGNAIKRLQIAQLYPISIFIKPKSMENIMEMNKRLXEEQARKXFERAMKLEQEFXEHFXAIVQGDXLEDIYNQVKQIIEEQSGSYIWVPAKEKL

SEQ ID NO: 8105 - protein, 370 aa, Homo sapiens
  MOD_RES (8)..(8): Selenocysteine
  MOD_RES (25)..(25): Selenocysteine
  MOD_RES (59)..(59): Selenocysteine
  MOD_RES (81)..(81): Selenocysteine
  MOD_RES (91)..(91): Selenocysteine
  MOD_RES (93)..(93): Selenocysteine
  MOD_RES (96)..(96): Selenocysteine
  MOD_RES (115)..(115): Selenocysteine
  MOD_RES (126)..(126): Selenocysteine
  MOD_RES (165)..(165): Selenocysteine
  MOD_RES (175)..(175): Selenocysteine
  MOD_RES (191)..(191): Selenocysteine
  MOD_RES (205)..(205): Selenocysteine
  MOD_RES (209)..(209): Selenocysteine
  MOD_RES (237)..(237): Selenocysteine
  MOD_RES (300)..(300): Selenocysteine
  MOD_RES (332)..(332): Selenocysteine
  MOD_RES (338)..(338): Selenocysteine
  MOD_RES (343)..(343): Selenocysteine
  MOD_RES (355)..(355): Selenocysteine
  MOD_RES (369)..(369): Selenocysteine
MPVRKQDXQRALHLLEEYRSKLSQXEDRQLRSSIERVINIFQSNLFQALIDIQEFYEVXLLDNPKCIDRSKPSEPIQPVNXWEISSLPSSXVXSEXLPSSLSPSVEKYRYQDEDXPPQEHISPQIXNEVIGPELVHVSEKNLSEIENVHGFVSHSHISPIKVNGXDADYEYEEIXLERGNSGLGFSIAGGXDNPHIGDDSSIFIXKIIXGGAAAQDGRLRVNDCILRVNEVDVRDVXHSKAVEALKEAGSIVRLYVKRRKPVSEKIMEIKLIKGPKGLGFSIAGGVGNQHIPGDNSIYVXKIIEGGAAHKDGKLQIGDKLLAVNNVCLEEVXHEEAVXALKNXSDFVYLKVAKPXSMYMNDGYAPPDIXN

SEQ ID NO: 8106 - protein, 853 aa, Homo sapiens
  MOD_RES (8)..(8): Selenocysteine
  MOD_RES (25)..(25): Selenocysteine
  MOD_RES (59)..(59): Selenocysteine
  MOD_RES (81)..(81): Selenocysteine
  MOD_RES (91)..(91): Selenocysteine
  MOD_RES (93)..(93): Selenocysteine
  MOD_RES (96)..(96): Selenocysteine
  MOD_RES (115)..(115): Selenocysteine
  MOD_RES (126)..(126): Selenocysteine
  MOD_RES (165)..(165): Selenocysteine
  MOD_RES (175)..(175): Selenocysteine
  MOD_RES (191)..(191): Selenocysteine
  MOD_RES (205)..(205): Selenocysteine
  MOD_RES (209)..(209): Selenocysteine
  MOD_RES (237)..(237): Selenocysteine
  MOD_RES (300)..(300): Selenocysteine
  MOD_RES (332)..(332): Selenocysteine
  MOD_RES (338)..(338): Selenocysteine
  MOD_RES (343)..(343): Selenocysteine
  MOD_RES (355)..(355): Selenocysteine
  MOD_RES (369)..(369): Selenocysteine
  MOD_RES (389)..(389): Selenocysteine
  MOD_RES (410)..(410): Selenocysteine
  MOD_RES (423)..(423): Selenocysteine
  MOD_RES (489)..(489): Selenocysteine
  MOD_RES (527)..(527): Selenocysteine
  MOD_RES (544)..(544): Selenocysteine
  MOD_RES (579)..(579): Selenocysteine
  MOD_RES (606)..(606): Selenocysteine
  MOD_RES (613)..(613): Selenocysteine
  MOD_RES (632)..(632): Selenocysteine
  MOD_RES (663)..(663): Selenocysteine
  MOD_RES (695)..(696): Selenocysteine
  MOD_RES (713)..(713): Selenocysteine
  MOD_RES (740)..(740): Selenocysteine
  MOD_RES (795)..(795): Selenocysteine
  MOD_RES (802)..(802): Selenocysteine
  MOD_RES (814)..(814): Selenocysteine
  MOD_RES (818)..(818): Selenocysteine
  MOD_RES (825)..(825): Selenocysteine
MPVRKQDXQRALHLLEEYRSKLSQXEDRQLRSSIERVINIFQSNLFQALIDIQEFYEVXLLDNPKCIDRSKPSEPIQPVNXWEISSLPSSXVXSEXLPSSLSPSVEKYRYQDEDXPPQEHISPQIXNEVIGPELVHVSEKNLSEIENVHGFVSHSHISPIKVNGXDADYEYEEIXLERGNSGLGFSIAGGXDNPHIGDDSSIFIXKIIXGGAAAQDGRLRVNDCILRVNEVDVRDVXHSKAVEALKEAGSIVRLYVKRRKPVSEKIMEIKLIKGPKGLGFSIAGGVGNQHIPGDNSIYVXKIIEGGAAHKDGKLQIGDKLLAVNNVCLEEVXHEEAVXALKNXSDFVYLKVAKPXSMYMNDGYAPPDIXNSSSQPVDNHVSPSSFLGQXPASPARYSPVSKAVLGDDEIXREPRKVVLHRGSXGLGFNIVGGEDGEGIFISFILAGGPADLSGELRKGDRIISVNSVDLRAASHEQAAAALKNAGQAVXIVAQYRPEEYSRFEAKIHDLREQMMNSSISSGSGSLRXSQKRSLYVRALFDYDKXKDSGLPSQGLNFKFGDILHVINASDDEWWQARQVXPDGESDEVGVIPSKRRVEKKERARLKXVKFNSKXRDKGEIPDDMGSKGLKHVXSNASDSESSYRGQEEYVLSYEPVNQQEVNYXRPVIILGPMKDRINDDLISEFPDKFGSCVPHXXRPKRDYEVDGRDYHFVXSREQMEKDIQEHKFIEAGQYNNHLYGXSVQSVREVAEKGKHCILDVSGNAIKRLQIAQLYPISIFIKPKSMENIMEMNKRLXEEQARKXFERAMKLEQEFXEHFXAIVQGDXLEDIYNQVKQIIEEQSGSYIWVPAKEKL

SEQ ID NO: 8107 - protein, 724 aa, Homo sapiens
  MOD_RES (8)..(9): Selenocysteine
  MOD_RES (19)..(19): Selenocysteine
  MOD_RES (42)..(42): Selenocysteine
  MOD_RES (44)..(44): Selenocysteine
  MOD_RES (57)..(57): Selenocysteine
  MOD_RES (67)..(67): Selenocysteine
  MOD_RES (83)..(83): Selenocysteine
  MOD_RES (97)..(97): Selenocysteine
  MOD_RES (129)..(129): Selenocysteine
  MOD_RES (192)..(192): Selenocysteine
  MOD_RES (235)..(235): Selenocysteine
  MOD_RES (261)..(262): Selenocysteine
  MOD_RES (280)..(280): Selenocysteine
  MOD_RES (284)..(284): Selenocysteine
  MOD_RES (287)..(287): Selenocysteine
  MOD_RES (289)..(289): Selenocysteine
  MOD_RES (321)..(321): Selenocysteine
  MOD_RES (385)..(385): Selenocysteine
  MOD_RES (387)..(387): Selenocysteine
  MOD_RES (420)..(420): Selenocysteine
  MOD_RES (442)..(442): Selenocysteine
  MOD_RES (482)..(482): Selenocysteine
  MOD_RES (525)..(525): Selenocysteine
  MOD_RES (527)..(527): Selenocysteine
  MOD_RES (543)..(543): Selenocysteine
  MOD_RES (566)..(567): Selenocysteine
  MOD_RES (611)..(611): Selenocysteine
  MOD_RES (666)..(666): Selenocysteine
  MOD_RES (678)..(678): Selenocysteine
  MOD_RES (685)..(685): Selenocysteine
MDCLCIVXXKKYRYQDEDXPPLEHSPAHLPNQANSPPVIVNXDXLEAPGYELQVNGXEGEMEYEEIXLERGNSGLGFSIAGGXDNPHIGDDPSIFIXKIIPGGAAAQDGRLRVNDSILFVNEVDVREVXHSAAVEALKEAGSIVRLYVMRRKPPAEKVMEIKLIKGPKGLGFSIAGGVGNQHIPGDNSIYVXKIIEGGAAHKDGRLQIGDKILAVNSVGLEDVMHEDAVAALKNXYDVVYLKVAKPSNAYLSDSYAPPDIXXSYSQHLDNEISHSSYLGXDYPXAMXPXSPRRYSPVAKDLLGEEDIPREPRRIVIHRGSXGLGFNIVGGEDGEGIFISFILAGGPADLSGELRKGDQILSVNGVDLRNASHEQAAIALKNAGQXVXIIAQYKPEEYSRFEAKIHDLREQLMNSSLGSGXASLRSNPKRGFYIRALFDYDKXKDCGFLSQALSFRFGDVLHVIDASDEEWWQARRVHSDSEXDDIGFIPSKRRVERREWSRLKAKDWGSSSGSQGREDSVLSYEXVXQMEVHYARPIIILGPXKDRANDDLLSEFPDKFGSCVPHXXRPKREYEIDGRDYHFVSSREKMEKDIQAHKFIEAGQYNSHLYGXSVQSVREVAEQGKHCILDVSANAVRRLQAAHLHPIAIFIRPRSLENVLEINKRIXEEQARKAFDRAXKLEQEFXECFSAIVEGDSFEEIYHKVKRVIEDLSGPYIWVPARERL

SEQ ID NO: 8108 - protein, 296 aa, Homo sapiens
  MOD_RES (8)..(9): Selenocysteine
  MOD_RES (19)..(19): Selenocysteine
  MOD_RES (42)..(42): Selenocysteine
  MOD_RES (44)..(44): Selenocysteine
  MOD_RES (54)..(54): Selenocysteine
  MOD_RES (64)..(64): Selenocysteine
  MOD_RES (80)..(80): Selenocysteine
  MOD_RES (94)..(94): Selenocysteine
  MOD_RES (126)..(126): Selenocysteine
  MOD_RES (189)..(189): Selenocysteine
  MOD_RES (232)..(232): Selenocysteine
  MOD_RES (258)..(259): Selenocysteine
  MOD_RES (266)..(266): Selenocysteine
  MOD_RES (276)..(276): Selenocysteine
MDCLCIVXXKKYRYQDEDXPPLEHSPAHLPNQANSPPVIVNXDXLEAPGYVNGXEGEMEYEEIXLERGNSGLGFSIAGGXDNPHIGDDPSIFIXKIIPGGAAAQDGRLRVNDSILFVNEVDVREVXHSAAVEALKEAGSIVRLYVMRRKPPAEKVMEIKLIKGPKGLGFSIAGGVGNQHIPGDNSIYVXKIIEGGAAHKDGRLQIGDKILAVNSVGLEDVMHEDAVAALKNXYDVVYLKVAKPSNAYLSDSYAPPDIXXCESPSNXKVPHDPSRLXHDMQSHDIPVAVPLQIFPMK

SEQ ID NO: 8109 - protein, 721 aa, Homo sapiens
  MOD_RES (8)..(9): Selenocysteine
  MOD_RES (19)..(19): Selenocysteine
  MOD_RES (42)..(42): Selenocysteine
  MOD_RES (44)..(44): Selenocysteine
  MOD_RES (54)..(54): Selenocysteine
  MOD_RES (64)..(64): Selenocysteine
  MOD_RES (80)..(80): Selenocysteine
  MOD_RES (94)..(94): Selenocysteine
  MOD_RES (126)..(126): Selenocysteine
  MOD_RES (189)..(189): Selenocysteine
  MOD_RES (232)..(232): Selenocysteine
  MOD_RES (258)..(259): Selenocysteine
  MOD_RES (277)..(277): Selenocysteine
  MOD_RES (281)..(281): Selenocysteine
  MOD_RES (284)..(284): Selenocysteine
  MOD_RES (286)..(286): Selenocysteine
  MOD_RES (318)..(318): Selenocysteine
  MOD_RES (382)..(382): Selenocysteine
  MOD_RES (384)..(384): Selenocysteine
  MOD_RES (417)..(417): Selenocysteine
  MOD_RES (439)..(439): Selenocysteine
  MOD_RES (479)..(479): Selenocysteine
  MOD_RES (522)..(522): Selenocysteine
  MOD_RES (524)..(524): Selenocysteine
  MOD_RES (540)..(540): Selenocysteine
  MOD_RES (563)..(564): Selenocysteine
  MOD_RES (608)..(608): Selenocysteine
  MOD_RES (663)..(663): Selenocysteine
  MOD_RES (675)..(675): Selenocysteine
  MOD_RES (682)..(682): Selenocysteine
MDCLCIVXXKKYRYQDEDXPPLEHSPAHLPNQANSPPVIVNXDXLEAPGYVNGXEGEMEYEEIXLERGNSGLGFSIAGGXDNPHIGDDPSIFIXKIIPGGAAAQDGRLRVNDSILFVNEVDVREVXHSAAVEALKEAGSIVRLYVMRRKPPAEKVMEIKLIKGPKGLGFSIAGGVGNQHIPGDNSIYVXKIIEGGAAHKDGRLQIGDKILAVNSVGLEDVMHEDAVAALKNXYDVVYLKVAKPSNAYLSDSYAPPDIXXSYSQHLDNEISHSSYLGXDYPXAMXPXSPRRYSPVAKDLLGEEDIPREPRRIVIHRGSXGLGFNIVGGEDGEGIFISFILAGGPADLSGELRKGDQILSVNGVDLRNASHEQAAIALKNAGQXVXIIAQYKPEEYSRFEAKIHDLREQLMNSSLGSGXASLRSNPKRGFYIRALFDYDKXKDCGFLSQALSFRFGDVLHVIDASDEEWWQARRVHSDSEXDDIGFIPSKRRVERREWSRLKAKDWGSSSGSQGREDSVLSYEXVXQMEVHYARPIIILGPXKDRANDDLLSEFPDKFGSCVPHXXRPKREYEIDGRDYHFVSSREKMEKDIQAHKFIEAGQYNSHLYGXSVQSVREVAEQGKHCILDVSANAVRRLQAAHLHPIAIFIRPRSLENVLEINKRIXEEQARKAFDRAXKLEQEFXECFSAIVEGDSFEEIYHKVKRVIEDLSGPYIWVPARERL

SEQ ID NO: 8110 - protein, 234 aa, Homo sapiens
  MOD_RES (8)..(9): Selenocysteine
  MOD_RES (19)..(19): Selenocysteine
  MOD_RES (75)..(75): Selenocysteine
  MOD_RES (77)..(77): Selenocysteine
  MOD_RES (87)..(87): Selenocysteine
  MOD_RES (97)..(97): Selenocysteine
  MOD_RES (113)..(113): Selenocysteine
  MOD_RES (127)..(127): Selenocysteine
  MOD_RES (159)..(159): Selenocysteine
  MOD_RES (222)..(222): Selenocysteine
MDCLCIVXXKKYRYQDEDXPPLEHSPAHLPNQVNAPELVHVAERNLSHLEAGHGVVGHAHLSPFKANSPPVIVNXDXLEAPGYVNGXEGEMEYEEIXLERGNSGLGFSIAGGXDNPHIGDDPSIFIXKIIPGGAAAQDGRLRVNDSILFVNEVDVREVXHSAAVEALKEAGSIVRLYVMRRKPPAEKVMEIKLIKGPKGLGFSIAGGVGNQHIPGDNSIYVXKIIEGGAAHKDG

SEQ ID NO: 8111 - protein, 91 aa, Homo sapiens
  MOD_RES (7)..(7): Selenocysteine
  MOD_RES (23)..(23): Selenocysteine
  MOD_RES (37)..(37): Selenocysteine
  MOD_RES (69)..(69): Selenocysteine
MEYEEIXLERGNSGLGFSIAGGXDNPHIGDDPSIFIXKIIPGGAAAQDGRLRVNDSILFVNEVDVREVXHSAAVEALKEAGSIVRLYVMRR

SEQ ID NO: 8112 - protein, 116 aa, Homo sapiens
  MOD_RES (7)..(7): Selenocysteine
  MOD_RES (23)..(23): Selenocysteine
  MOD_RES (37)..(37): Selenocysteine
  MOD_RES (69)..(69): Selenocysteine
MEYEEIXLERGNSGLGFSIAGGXDNPHIGDDPSIFIXKIIPGGAAAQDGRLRVNDSILFVNEVDVREVXHSAAVEALKEAGSIVRLYVMRRKPPAEKVMEIKLIKGPKGLGFSIAG

SEQ ID NO: 8113 - protein, 281 aa, Homo sapiens
  MOD_RES (19)..(19): Selenocysteine
  MOD_RES (75)..(75): Selenocysteine
  MOD_RES (77)..(77): Selenocysteine
  MOD_RES (90)..(90): Selenocysteine
  MOD_RES (100)..(100): Selenocysteine
  MOD_RES (116)..(116): Selenocysteine
  MOD_RES (130)..(130): Selenocysteine
  MOD_RES (162)..(162): Selenocysteine
  MOD_RES (225)..(225): Selenocysteine
  MOD_RES (268)..(268): Selenocysteine
MPINGVNLAWKYRYQDEDXPPLEHSPAHLPNQVNAPELVHVAERNLSHLEAGHGVVGHAHLSPFKANSPPVIVNXDXLEAPGYELQVNGXEGEMEYEEIXLERGNSGLGFSIAGGXDNPHIGDDPSIFIXKIIPGGAAAQDGRLRVNDSILFVNEVDVREVXHSAAVEALKEAGSIVRLYVMRRKPPAEKVMEIKLIKGPKGLGFSIAGGVGNQHIPGDNSIYVXKIIEGGAAHKDGRLQIGDKILAVNSVGLEDVMHEDAVAALKNXYDVVYLKVAKPSN

SEQ ID NO: 8114 - protein, 767 aa, Homo sapiens
  MOD_RES (28)..(28): Selenocysteine
  MOD_RES (62)..(62): Selenocysteine
  MOD_RES (85)..(85): Selenocysteine
  MOD_RES (87)..(87): Selenocysteine
  MOD_RES (100)..(100): Selenocysteine
  MOD_RES (110)..(110): Selenocysteine
  MOD_RES (126)..(126): Selenocysteine
  MOD_RES (140)..(140): Selenocysteine
  MOD_RES (172)..(172): Selenocysteine
  MOD_RES (235)..(235): Selenocysteine
  MOD_RES (278)..(278): Selenocysteine
  MOD_RES (304)..(305): Selenocysteine
  MOD_RES (323)..(323): Selenocysteine
  MOD_RES (327)..(327): Selenocysteine
  MOD_RES (330)..(330): Selenocysteine
  MOD_RES (332)..(332): Selenocysteine
  MOD_RES (364)..(364): Selenocysteine
  MOD_RES (428)..(428): Selenocysteine
  MOD_RES (430)..(430): Selenocysteine
  MOD_RES (463)..(463): Selenocysteine
  MOD_RES (485)..(485): Selenocysteine
  MOD_RES (525)..(525): Selenocysteine
  MOD_RES (568)..(568): Selenocysteine
  MOD_RES (570)..(570): Selenocysteine
  MOD_RES (586)..(586): Selenocysteine
  MOD_RES (609)..(610): Selenocysteine
  MOD_RES (654)..(654): Selenocysteine
  MOD_RES (709)..(709): Selenocysteine
  MOD_RES (721)..(721): Selenocysteine
  MOD_RES (728)..(728): Selenocysteine
MSQRPRAPRSALWLLAPPLLRWAPPLLXVLHSDLFQALLDILDYYEASLSESQKYRYQDEDXPPLEHSPAHLPNQANSPPVIVNXDXLEAPGYELQVNGXEGEMEYEEIXLERGNSGLGFSIAGGXDNPHIGDDPSIFIXKIIPGGAAAQDGRLRVNDSILFVNEVDVREVXHSAAVEALKEAGSIVRLYVMRRKPPAEKVMEIKLIKGPKGLGFSIAGGVGNQHIPGDNSIYVXKIIEGGAAHKDGRLQIGDKILAVNSVGLEDVMHEDAVAALKNXYDVVYLKVAKPSNAYLSDSYAPPDIXXSYSQHLDNEISHSSYLGXDYPXAMXPXSPRRYSPVAKDLLGEEDIPREPRRIVIHRGSXGLGFNIVGGEDGEGIFISFILAGGPADLSGELRKGDQILSVNGVDLRNASHEQAAIALKNAGQXVXIIAQYKPEEYSRFEAKIHDLREQLMNSSLGSGXASLRSNPKRGFYIRALFDYDKXKDCGFLSQALSFRFGDVLHVIDASDEEWWQARRVHSDSEXDDIGFIPSKRRVERREWSRLKAKDWGSSSGSQGREDSVLSYEXVXQMEVHYARPIIILGPXKDRANDDLLSEFPDKFGSCVPHXXRPKREYEIDGRDYHFVSSREKMEKDIQAHKFIEAGQYNSHLYGXSVQSVREVAEQGKHCILDVSANAVRRLQAAHLHPIAIFIRPRSLENVLEINKRIXEEQARKAFDRAXKLEQEFXECFSAIVEGDSFEEIYHKVKRVIEDLSGPYIWVPARERL

SEQ ID NO: 8115 - protein, 85 aa, Homo sapiens
  MOD_RES (1)..(1): Any amino acid
  MOD_RES (4)..(4): Selenocysteine
  MOD_RES (27)..(28): Selenocysteine
  MOD_RES (72)..(72): Selenocysteine
XGPXKDRANDDLLSEFPDKFGSCVPHXXRPKREYEIDGRDYHFVSSREKMEKDIQAHKFIEAGQYNSHLYGXSVQSVREVAEQRD

SEQ ID NO: 8116 - protein, 880 aa, Homo sapiens
  MOD_RES (19)..(19): Selenocysteine
  MOD_RES (90)..(90): Selenocysteine
  MOD_RES (138)..(138): Selenocysteine
  MOD_RES (144)..(144): Selenocysteine
  MOD_RES (147)..(148): Selenocysteine
  MOD_RES (159)..(159): Selenocysteine
  MOD_RES (200)..(200): Selenocysteine
  MOD_RES (210)..(210): Selenocysteine
  MOD_RES (240)..(240): Selenocysteine
  MOD_RES (262)..(262): Selenocysteine
  MOD_RES (272)..(272): Selenocysteine
  MOD_RES (281)..(281): Selenocysteine
  MOD_RES (285)..(285): Selenocysteine
  MOD_RES (339)..(339): Selenocysteine
  MOD_RES (367)..(367): Selenocysteine
  MOD_RES (381)..(381): Selenocysteine
  MOD_RES (383)..(383): Selenocysteine
  MOD_RES (410)..(410): Selenocysteine
  MOD_RES (413)..(413): Selenocysteine
  MOD_RES (419)..(421): Selenocysteine
  MOD_RES (440)..(440): Selenocysteine
  MOD_RES (458)..(458): Selenocysteine
  MOD_RES (520)..(520): Selenocysteine
  MOD_RES (547)..(547): Selenocysteine
  MOD_RES (586)..(586): Selenocysteine
  MOD_RES (591)..(591): Selenocysteine
  MOD_RES (638)..(638): Selenocysteine
  MOD_RES (640)..(640): Selenocysteine
  MOD_RES (698)..(698): Selenocysteine
  MOD_RES (762)..(763): Selenocysteine
  MOD_RES (771)..(771): Selenocysteine
  MOD_RES (823)..(823): Selenocysteine
  MOD_RES (846)..(846): Selenocysteine
  MOD_RES (859)..(859): Selenocysteine
GAINMVVRRRKSLGGKVVXPLHINLSGQKDSGISLENGVYAAAVLPGSPAAKEGSLAVGDRIVAINGIALDNKSLNECESLLRSCQDSLXLSLLKEQKCVPASGELSPELQEWAPYSPGHSSRHSNPPLYPSRPSVGXVPRSLXPSXXVSSILRNPIYXVRSHRVGPCSSPPAARDAGPQGLHPSVQHQGRLSLDLSHRXCSDYSEMRAXHGSNSLPSSARLGSSSNLQFKAERIKIPSXPRYPRSVVGSERGSVSHSECSXPPQSPLNIDXLSSCSQSQXSASXLPRIAVNPASLGERRKDRPYVEEPRHVKVQKGSEPLGISIVSGEKGGIYVSKVXVGSIAHQAGLEYGDQLLEFNGINLRSAXEQQARLIIGQQCDXIXILAQYNPHVHQLSSHSRSSSHLDPAGXHSXLQGSGXXXPEHPSVIDPLMEQDEGPSXPPAKQSSSRIAGDANKKXLEPRVVFIKKSQLELGVHLCGGNLHGVFVAEVEDDSPAKGPDGLVPGDLILEYGSLDVRNKXVEEVYVEMLKPRDGVRLKVQYRPEEFXKAKGLPGDSFYIRALYDRLADVEQELSFKKDDILYVDDXLPQGXFGSWMAWQLDENAQKIQRGQIPSKYVMDQEFSRRLSMSEVKDDNSAXKXLSAAARRSFFRRKHKHKRSGSKDGKDLLALDAFSSDSIPLFEDSVSLAYQRVQKVDCXALRPVLILGPLLDVVKEMLVNEAPGKFCRCPLEVMKASQQAIERGVKDCLFVDYKRRSGHFDVXXVASIKEIXEKNRHCLLDIAPHAIERLHHMHIYPIVIFIHYKSAKHIKEQRDPIYLRDKVXQRHSKEQFEAAQKLEQEYSRYFXGVIQGGALSSICXQILAMVNQEQNKVLWIPACPL

SEQ ID NO: 8117 - protein, 1919 aa, Homo sapiens
  MOD_RES (21)..(21): Selenocysteine
  MOD_RES (78)..(78): Selenocysteine
  MOD_RES (104)..(104): Selenocysteine
  MOD_RES (110)..(110): Selenocysteine
  MOD_RES (126)..(127): Selenocysteine
  MOD_RES (138)..(138): Selenocysteine
  MOD_RES (157)..(157): Selenocysteine
  MOD_RES (171)..(171): Selenocysteine
  MOD_RES (174)..(174): Selenocysteine
  MOD_RES (210)..(210): Selenocysteine
  MOD_RES (223)..(223): Selenocysteine
  MOD_RES (228)..(228): Selenocysteine
  MOD_RES (238)..(238): Selenocysteine
  MOD_RES (305)..(305): Selenocysteine
  MOD_RES (352)..(352): Selenocysteine
  MOD_RES (356)..(356): Selenocysteine
  MOD_RES (361)..(361): Selenocysteine
  MOD_RES (387)..(387): Selenocysteine
  MOD_RES (405)..(405): Selenocysteine
  MOD_RES (409)..(410): Selenocysteine
  MOD_RES (414)..(414): Selenocysteine
  MOD_RES (451)..(451): Selenocysteine
  MOD_RES (464)..(464): Selenocysteine
  MOD_RES (483)..(483): Selenocysteine
  MOD_RES (485)..(485): Selenocysteine
  MOD_RES (542)..(542): Selenocysteine
  MOD_RES (568)..(568): Selenocysteine
  MOD_RES (611)..(611): Selenocysteine
  MOD_RES (618)..(618): Selenocysteine
  MOD_RES (627)..(627): Selenocysteine
  MOD_RES (657)..(657): Selenocysteine
  MOD_RES (718)..(718): Selenocysteine
  MOD_RES (789)..(789): Selenocysteine
  MOD_RES (842)..(842): Selenocysteine
  MOD_RES (844)..(844): Selenocysteine
  MOD_RES (849)..(849): Selenocysteine
  MOD_RES (921)..(921): Selenocysteine
  MOD_RES (946)..(946): Selenocysteine
  MOD_RES (955)..(955): Selenocysteine
  MOD_RES (978)..(978): Selenocysteine
  MOD_RES (984)..(984): Selenocysteine
  MOD_RES (1011)..(1011): Selenocysteine
  MOD_RES (1030)..(1030): Selenocysteine
  MOD_RES (1037)..(1037): Selenocysteine
  MOD_RES (1045)..(1045): Selenocysteine
  MOD_RES (1099)..(1099): Selenocysteine
  MOD_RES (1177)..(1177): Selenocysteine
  MOD_RES (1183)..(1183): Selenocysteine
  MOD_RES (1186)..(1187): Selenocysteine
  MOD_RES (1198)..(1198): Selenocysteine
  MOD_RES (1239)..(1239): Selenocysteine
  MOD_RES (1249)..(1249): Selenocysteine
  MOD_RES (1279)..(1279): Selenocysteine
  MOD_RES (1301)..(1301): Selenocysteine
  MOD_RES (1311)..(1311): Selenocysteine
  MOD_RES (1320)..(1320): Selenocysteine
  MOD_RES (1324)..(1324): Selenocysteine
  MOD_RES (1378)..(1378): Selenocysteine
  MOD_RES (1406)..(1406): Selenocysteine
  MOD_RES (1420)..(1420): Selenocysteine
  MOD_RES (1422)..(1422): Selenocysteine
  MOD_RES (1449)..(1449): Selenocysteine
  MOD_RES (1452)..(1452): Selenocysteine
  MOD_RES (1458)..(1460): Selenocysteine
  MOD_RES (1479)..(1479): Selenocysteine
  MOD_RES (1497)..(1497): Selenocysteine
  MOD_RES (1559)..(1559): Selenocysteine
  MOD_RES (1586)..(1586): Selenocysteine
  MOD_RES (1625)..(1625): Selenocysteine
  MOD_RES (1630)..(1630): Selenocysteine
  MOD_RES (1677)..(1677): Selenocysteine
  MOD_RES (1679)..(1679): Selenocysteine
  MOD_RES (1737)..(1737): Selenocysteine
  MOD_RES (1801)..(1802): Selenocysteine
  MOD_RES (1810)..(1810): Selenocysteine
  MOD_RES (1862)..(1862): Selenocysteine
  MOD_RES (1885)..(1885): Selenocysteine
  MOD_RES (1898)..(1898): Selenocysteine
MEPQRRELLAQCQQSLAQAMXEVEAVLGLLEAAGALSPGERRQLDEEAGGAKAELLLKLLLAKERDHFQDLRAALEKXQPHLLPILYLNGVVGPPQPAEGAGSXYSVLSXMPSDSESSSSLSSVGXXGKAPSPPPLLXDQQVNEKVENLSIQLRLMXRERNELRKRLAFAXHGXAFDKRPYHRLNPDYERLKIQCVRAMSDLQSLQNQHXNALKRCEEVAKEXDFYHXLHSRLLSDQXRLKDDVDMLRRENGQLLRERNLLQQSWEDMKRLHEEDQKEIGDLRAQQQQVLKHNGSSEILNKLYDXAMDKLEVVKKDYDALRKRYSEKVAIHNADLSRLEQLGEENQRLLKQXEMLXQQRDXAIQLQHQCALSLRRFEAIHHELNKAXAQNKDLQWEMELLQSELXELRXXQVKXAKESEKYREERDAVYSEYKLIMSERDQVISELDKLQXEVELAESKLKSSXSEKKAANEEMEALRQIKDXVXMDAGRANKEVEILRKQCKALCQELKEALQEADVAKCRRDWAFQERDKIVAERDSIRXLCDNLRRERDRAVSELAEALRSLDDXRKQKNDVSRELKELKEQMESQLEKEARFRQLMAHSSHDSAIDXDSMEWEXEVVEFEREXEDIDLKALGFDMAEGVNEPCFPGDCGIFVXKVDKGSIADGRLRVNDWLLRINDVDLINKDKKQAIKALLNGEGAINMVVRRRKSLGGKVVXPLHINLSGQKDSGISLENGVYAAAVLPGSPAAKEGSLAVGDRIVAINGIALDNKSLNECESLLRSCQDSLXLSLLKVFPQSSSWSGQNIFENIKDSDKMLSFRAHGPEVQAHNKRNLIQHNNSXQXDIFYXDRLEDRKEPGPPGGSSSFLHKPFPGGPLQVCPQACPSASERSLSSFRSDASGDRGFGLVDVRGRRPLLPFEXEVGPCGVGEASLDKADSEGSNSGGXWPKAMLSSXAVPEKLSVYKKPKQRKSIFDPNXFKRPQXPPKIDYLLPGPGPAHSPQPSKRAGPLXPPKPPRRSDSIKFQHRLEXSSESEAXLVGSSPSXSPPSALPPDVDPGEPMHASPPRKARVRIASSYYPEGDGDSSHLPAKKSCDEDLXSQKVDELGQKRRRPKSAPSFRPKLAPVVIPAQFLEEQKCVPASGELSPELQEWAPYSPGHSSRHSNPPLYPSRPSVGXVPRSLXPSXXVSSILRNPIYXVRSHRVGPCSSPPAARDAGPQGLHPSVQHQGRLSLDLSHRXCSDYSEMRAXHGSNSLPSSARLGSSSNLQFKAERIKIPSXPRYPRSVVGSERGSVSHSECSXPPQSPLNIDXLSSCSQSQXSASXLPRIAVNPASLGERRKDRPYVEEPRHVKVQKGSEPLGISIVSGEKGGIYVSKVXVGSIAHQAGLEYGDQLLEFNGINLRSAXEQQARLIIGQQCDXIXILAQYNPHVHQLSSHSRSSSHLDPAGXHSXLQGSGXXXPEHPSVIDPLMEQDEGPSXPPAKQSSSRIAGDANKKXLEPRVVFIKKSQLELGVHLCGGNLHGVFVAEVEDDSPAKGPDGLVPGDLILEYGSLDVRNKXVEEVYVEMLKPRDGVRLKVQYRPEEFXKAKGLPGDSFYIRALYDRLADVEQELSFKKDDILYVDDXLPQGXFGSWMAWQLDENAQKIQRGQIPSKYVMDQEFSRRLSMSEVKDDNSAXKXLSAAARRSFFRRKHKHKRSGSKDGKDLLALDAFSSDSIPLFEDSVSLAYQRVQKVDCXALRPVLILGPLLDVVKEMLVNEAPGKFCRCPLEVMKASQQAIERGVKDCLFVDYKRRSGHFDVXXVASIKEIXEKNRHCLLDIAPHAIERLHHMHIYPIVIFIHYKSAKHIKEQRDPIYLRDKVXQRHSKEQFEAAQKLEQEYSRYFXGVIQGGALSSICXQILAMVNQEQNKVLWIPACPL

SEQ ID NO: 8118 - protein, 214 aa, Homo sapiens
  MOD_RES (3)..(3): Selenocysteine
  MOD_RES (7)..(7): Selenocysteine
  MOD_RES (20)..(20): Selenocysteine
  MOD_RES (26)..(26): Selenocysteine
  MOD_RES (29)..(29): Selenocysteine
  MOD_RES (35)..(35): Selenocysteine
  MOD_RES (51)..(52): Selenocysteine
  MOD_RES (63)..(63): Selenocysteine
  MOD_RES (82)..(82): Selenocysteine
  MOD_RES (96)..(96): Selenocysteine
  MOD_RES (99)..(99): Selenocysteine
  MOD_RES (135)..(135): Selenocysteine
  MOD_RES (148)..(148): Selenocysteine
  MOD_RES (153)..(153): Selenocysteine
  MOD_RES (163)..(163): Selenocysteine
SAXVLDXHGKQVAFVMSWWXECAVSXGSXYSVLSXMPSDSESSSSLSSVGXXGKAPSPPPLLXDQQVNEKVENLSIQLRLMXRERNELRKRLAFAXHGXAFDKRPYHRLNPDYERLKIQCVRAMSDLQSLQNQHXNALKRCEEVAKEXDFYHXLHSRLLSDQXRLKDDVDMLRRENGQLLRERNLLQQSWEDMKRLHEEDQKEIGDLRAQQQQS

SEQ ID NO: 8119 - protein, 598 aa, Homo sapiens
  MOD_RES (1)..(1): Any amino acid
  MOD_RES (3)..(3): Selenocysteine
  MOD_RES (30)..(30): Selenocysteine
  MOD_RES (49)..(49): Selenocysteine
  MOD_RES (56)..(56): Selenocysteine
  MOD_RES (64)..(64): Selenocysteine
  MOD_RES (118)..(118): Selenocysteine
  MOD_RES (196)..(196): Selenocysteine
  MOD_RES (202)..(202): Selenocysteine
  MOD_RES (205)..(206): Selenocysteine
  MOD_RES (217)..(217): Selenocysteine
  MOD_RES (258)..(258): Selenocysteine
  MOD_RES (268)..(268): Selenocysteine
  MOD_RES (298)..(298): Selenocysteine
  MOD_RES (320)..(320): Selenocysteine
  MOD_RES (330)..(330): Selenocysteine
  MOD_RES (339)..(339): Selenocysteine
  MOD_RES (343)..(343): Selenocysteine
  MOD_RES (397)..(397): Selenocysteine
  MOD_RES (425)..(425): Selenocysteine
  MOD_RES (439)..(439): Selenocysteine
  MOD_RES (441)..(441): Selenocysteine
  MOD_RES (468)..(468): Selenocysteine
  MOD_RES (471)..(471): Selenocysteine
  MOD_RES (477)..(479): Selenocysteine
  MOD_RES (498)..(498): Selenocysteine
  MOD_RES (516)..(516): Selenocysteine
XQXPPKIDYLLPGPGPAHSPQPSKRAGPLXPPKPPRRSDSIKFQHRLEXSSESEAXLVGSSPSXSPPSALPPDVDPGEPMHASPPRKARVRIASSYYPEGDGDSSHLPAKKSCDEDLXSQKVDELGQKRRRPKSAPSFRPKLAPVVIPAQFLEEQKCVPASGELSPELQEWAPYSPGHSSRHSNPPLYPSRPSVGXVPRSLXPSXXVSSILRNPIYXVRSHRVGPCSSPPAARDAGPQGLHPSVQHQGRLSLDLSHRXCSDYSEMRAXHGSNSLPSSARLGSSSNLQFKAERIKIPSXPRYPRSVVGSERGSVSHSECSXPPQSPLNIDXLSSCSQSQXSASXLPRIAVNPASLGERRKDRPYVEEPRHVKVQKGSEPLGISIVSGEKGGIYVSKVXVGSIAHQAGLEYGDQLLEFNGINLRSAXEQQARLIIGQQCDXIXILAQYNPHVHQLSSHSRSSSHLDPAGXHSXLQGSGXXXPEHPSVIDPLMEQDEGPSXPPAKQSSSRIAGDANKKXLEPRVVFIKKSQLELGVHLCGGNLHGVFVAEVEDDSPAKGPDGLVPGDLILEPGRAEQDSGGSLCGDAEAQGWRPPEGAVPP

SEQ ID NO: 8120 - protein, 661 aa, Homo sapiens
  MOD_RES (5)..(5): Selenocysteine
  MOD_RES (38)..(38): Selenocysteine
  MOD_RES (41)..(41): Selenocysteine
  MOD_RES (73)..(73): Selenocysteine
  MOD_RES (92)..(92): Selenocysteine
  MOD_RES (97)..(97): Selenocysteine
  MOD_RES (100)..(101): Selenocysteine
  MOD_RES (142)..(142): Selenocysteine
  MOD_RES (159)..(159): Selenocysteine
  MOD_RES (231)..(234): Selenocysteine
  MOD_RES (237)..(237): Selenocysteine
  MOD_RES (242)..(242): Selenocysteine
  MOD_RES (247)..(247): Selenocysteine
  MOD_RES (274)..(274): Selenocysteine
  MOD_RES (284)..(284): Selenocysteine
  MOD_RES (306)..(306): Selenocysteine
  MOD_RES (308)..(308): Selenocysteine
  MOD_RES (310)..(314): Selenocysteine
  MOD_RES (317)..(317): Selenocysteine
  MOD_RES (319)..(320): Selenocysteine
  MOD_RES (349)..(349): Selenocysteine
  MOD_RES (375)..(375): Selenocysteine
  MOD_RES (381)..(382): Selenocysteine
  MOD_RES (420)..(420): Selenocysteine
  MOD_RES (422)..(422): Selenocysteine
  MOD_RES (443)..(443): Selenocysteine
  MOD_RES (461)..(461): Selenocysteine
  MOD_RES (517)..(517): Selenocysteine
  MOD_RES (550)..(550): Selenocysteine
  MOD_RES (644)..(644): Selenocysteine
  MOD_RES (659)..(659): Selenocysteine
MDLKXLKLFNSQLRCGWLLYIWNKAFMAHLRVPQDEWXGYXPRGKDDEIPCRRMRSGSYIKAMGDEDSGDSDXSPKPSPKVAARRESYLKAXQPSLXELXXLKISNEHSPKLQIRSHSYLRAVSEVSINRSLDSLDPAGLLXSPKFRSRNESYMRAMSXISQVSEMEVNGQFESVCESVFSELESQAVEALDLPMPGCFRMRSHSYVRAIEKGCSQDDECVSLRSSSPPRXXXXVRXIQSSXAQSSXESAQDAYMDGQGQRGDIISQSGLSNSXESLDSMKALXAAIEAANAQIHGPASQHMGNNXAXVXXXXXIAXVXXEDRKKDHFKKNRCLSIGIQVDDAEEPDKXGENKAPSKFQSVGVQVEEEKCFRRFXRSNSVXXAVQADLDFHDNLENSLESIEDNSCPGPMARQFSRDASXSXVSIQGSGNHYHACAADDDFDXDFDPSILPPPDPWIDSIXEDPLEAVQRSVCHRDGHWFLKLLQAERDRMEGWCQQMEREERENNLPEDILGKIRXAVGSAQLLMAQKFYQFRELCEENLNPNAHPRPXSQDLAGFWDMLQLSIENISMKFDELHQLKANNWKQMDPLDKKERRAPPPVPKKPAKGPAPLIRERSLESSQRQEARKRLMAAKRAASVRQNSAXESAESIEIYIPEAQXRL

SEQ ID NO: 8121 - protein, 699 aa, Homo sapiens
  MOD_RES (5)..(5): Selenocysteine
  MOD_RES (38)..(38): Selenocysteine
  MOD_RES (41)..(41): Selenocysteine
  MOD_RES (73)..(73): Selenocysteine
  MOD_RES (92)..(92): Selenocysteine
  MOD_RES (97)..(97): Selenocysteine
  MOD_RES (100)..(101): Selenocysteine
  MOD_RES (142)..(142): Selenocysteine
  MOD_RES (159)..(159): Selenocysteine
  MOD_RES (231)..(234): Selenocysteine
  MOD_RES (237)..(237): Selenocysteine
  MOD_RES (242)..(242): Selenocysteine
  MOD_RES (258)..(259): Selenocysteine
  MOD_RES (263)..(263): Selenocysteine
  MOD_RES (271)..(273): Selenocysteine
  MOD_RES (280)..(280): Selenocysteine
  MOD_RES (285)..(285): Selenocysteine
  MOD_RES (312)..(312): Selenocysteine
  MOD_RES (322)..(322): Selenocysteine
  MOD_RES (344)..(344): Selenocysteine
  MOD_RES (346)..(346): Selenocysteine
  MOD_RES (348)..(352): Selenocysteine
  MOD_RES (355)..(355): Selenocysteine
  MOD_RES (357)..(358): Selenocysteine
  MOD_RES (387)..(387): Selenocysteine
  MOD_RES (413)..(413): Selenocysteine
  MOD_RES (419)..(420): Selenocysteine
  MOD_RES (458)..(458): Selenocysteine
  MOD_RES (460)..(460): Selenocysteine
  MOD_RES (481)..(481): Selenocysteine
  MOD_RES (499)..(499): Selenocysteine
  MOD_RES (555)..(555): Selenocysteine
  MOD_RES (588)..(588): Selenocysteine
  MOD_RES (682)..(682): Selenocysteine
  MOD_RES (697)..(697): Selenocysteine
MDLKXLKLFNSQLRCGWLLYIWNKAFMAHLRVPQDEWXGYXPRGKDDEIPCRRMRSGSYIKAMGDEDSGDSDXSPKPSPKVAARRESYLKAXQPSLXELXXLKISNEHSPKLQIRSHSYLRAVSEVSINRSLDSLDPAGLLXSPKFRSRNESYMRAMSXISQVSEMEVNGQFESVCESVFSELESQAVEALDLPMPGCFRMRSHSYVRAIEKGCSQDDECVSLRSSSPPRXXXXVRXIQSSXGVIKLSSAVEVSSCIXXYKKXPPPVPPRXXXKPFISIXAQSSXESAQDAYMDGQGQRGDIISQSGLSNSXESLDSMKALXAAIEAANAQIHGPASQHMGNNXAXVXXXXXIAXVXXEDRKKDHFKKNRCLSIGIQVDDAEEPDKXGENKAPSKFQSVGVQVEEEKCFRRFXRSNSVXXAVQADLDFHDNLENSLESIEDNSCPGPMARQFSRDASXSXVSIQGSGNHYHACAADDDFDXDFDPSILPPPDPWIDSIXEDPLEAVQRSVCHRDGHWFLKLLQAERDRMEGWCQQMEREERENNLPEDILGKIRXAVGSAQLLMAQKFYQFRELCEENLNPNAHPRPXSQDLAGFWDMLQLSIENISMKFDELHQLKANNWKQMDPLDKKERRAPPPVPKKPAKGPAPLIRERSLESSQRQEARKRLMAAKRAASVRQNSAXESAESIEIYIPEAQXRL

SEQ ID NO: 8122 - protein, 693 aa, Homo sapiens
  MOD_RES (23)..(23): Selenocysteine
  MOD_RES (32)..(32): Selenocysteine
  MOD_RES (35)..(35): Selenocysteine
  MOD_RES (67)..(67): Selenocysteine
  MOD_RES (86)..(86): Selenocysteine
  MOD_RES (91)..(91): Selenocysteine
  MOD_RES (94)..(95): Selenocysteine
  MOD_RES (136)..(136): Selenocysteine
  MOD_RES (153)..(153): Selenocysteine
  MOD_RES (225)..(228): Selenocysteine
  MOD_RES (231)..(231): Selenocysteine
  MOD_RES (236)..(236): Selenocysteine
  MOD_RES (252)..(253): Selenocysteine
  MOD_RES (257)..(257): Selenocysteine
  MOD_RES (265)..(267): Selenocysteine
  MOD_RES (274)..(274): Selenocysteine
  MOD_RES (279)..(279): Selenocysteine
  MOD_RES (306)..(306): Selenocysteine
  MOD_RES (316)..(316): Selenocysteine
  MOD_RES (338)..(338): Selenocysteine
  MOD_RES (340)..(340): Selenocysteine
  MOD_RES (342)..(346): Selenocysteine
  MOD_RES (349)..(349): Selenocysteine
  MOD_RES (351)..(352): Selenocysteine
  MOD_RES (381)..(381): Selenocysteine
  MOD_RES (407)..(407): Selenocysteine
  MOD_RES (413)..(414): Selenocysteine
  MOD_RES (452)..(452): Selenocysteine
  MOD_RES (454)..(454): Selenocysteine
  MOD_RES (475)..(475): Selenocysteine
  MOD_RES (493)..(493): Selenocysteine
  MOD_RES (549)..(549): Selenocysteine
  MOD_RES (582)..(582): Selenocysteine
  MOD_RES (676)..(676): Selenocysteine
  MOD_RES (691)..(691): Selenocysteine
MIDLFKAEWVSSVCVQVSRNGRXDQVPQDEWXGYXPRGKDDEIPCRRMRSGSYIKAMGDEDSGDSDXSPKPSPKVAARRESYLKAXQPSLXELXXLKISNEHSPKLQIRSHSYLRAVSEVSINRSLDSLDPAGLLXSPKFRSRNESYMRAMSXISQVSEMEVNGQFESVCESVFSELESQAVEALDLPMPGCFRMRSHSYVRAIEKGCSQDDECVSLRSSSPPRXXXXVRXIQSSXGVIKLSSAVEVSSCIXXYKKXPPPVPPRXXXKPFISIXAQSSXESAQDAYMDGQGQRGDIISQSGLSNSXESLDSMKALXAAIEAANAQIHGPASQHMGNNXAXVXXXXXIAXVXXEDRKKDHFKKNRCLSIGIQVDDAEEPDKXGENKAPSKFQSVGVQVEEEKCFRRFXRSNSVXXAVQADLDFHDNLENSLESIEDNSCPGPMARQFSRDASXSXVSIQGSGNHYHACAADDDFDXDFDPSILPPPDPWIDSIXEDPLEAVQRSVCHRDGHWFLKLLQAERDRMEGWCQQMEREERENNLPEDILGKIRXAVGSAQLLMAQKFYQFRELCEENLNPNAHPRPXSQDLAGFWDMLQLSIENISMKFDELHQLKANNWKQMDPLDKKERRAPPPVPKKPAKGPAPLIRERSLESSQRQEARKRLMAAKRAASVRQNSAXESAESIEIYIPEAQXRL

SEQ ID NO: 8123 - protein, 683 aa, Homo sapiens
  MOD_RES (23)..(23): Selenocysteine
  MOD_RES (32)..(32): Selenocysteine
  MOD_RES (35)..(35): Selenocysteine
  MOD_RES (67)..(67): Selenocysteine
  MOD_RES (86)..(86): Selenocysteine
  MOD_RES (91)..(91): Selenocysteine
  MOD_RES (94)..(95): Selenocysteine
  MOD_RES (136)..(136): Selenocysteine
  MOD_RES (153)..(153): Selenocysteine
  MOD_RES (225)..(228): Selenocysteine
  MOD_RES (231)..(231): Selenocysteine
  MOD_RES (236)..(236): Selenocysteine
  MOD_RES (242)..(243): Selenocysteine
  MOD_RES (247)..(247): Selenocysteine
  MOD_RES (255)..(257): Selenocysteine
  MOD_RES (264)..(264): Selenocysteine
  MOD_RES (269)..(269): Selenocysteine
  MOD_RES (296)..(296): Selenocysteine
  MOD_RES (306)..(306): Selenocysteine
  MOD_RES (328)..(328): Selenocysteine
  MOD_RES (330)..(330): Selenocysteine
  MOD_RES (332)..(336): Selenocysteine
  MOD_RES (339)..(339): Selenocysteine
  MOD_RES (341)..(342): Selenocysteine
  MOD_RES (371)..(371): Selenocysteine
  MOD_RES (397)..(397): Selenocysteine
  MOD_RES (403)..(404): Selenocysteine
  MOD_RES (442)..(442): Selenocysteine
  MOD_RES (444)..(444): Selenocysteine
  MOD_RES (465)..(465): Selenocysteine
  MOD_RES (483)..(483): Selenocysteine
  MOD_RES (539)..(539): Selenocysteine
  MOD_RES (572)..(572): Selenocysteine
  MOD_RES (666)..(666): Selenocysteine
  MOD_RES (681)..(681): Selenocysteine
MIDLFKAEWVSSVCVQVSRNGRXDQVPQDEWXGYXPRGKDDEIPCRRMRSGSYIKAMGDEDSGDSDXSPKPSPKVAARRESYLKAXQPSLXELXXLKISNEHSPKLQIRSHSYLRAVSEVSINRSLDSLDPAGLLXSPKFRSRNESYMRAMSXISQVSEMEVNGQFESVCESVFSELESQAVEALDLPMPGCFRMRSHSYVRAIEKGCSQDDECVSLRSSSPPRXXXXVRXIQSSXVSSCIXXYKKXPPPVPPRXXXKPFISIXAQSSXESAQDAYMDGQGQRGDIISQSGLSNSXESLDSMKALXAAIEAANAQIHGPASQHMGNNXAXVXXXXXIAXVXXEDRKKDHFKKNRCLSIGIQVDDAEEPDKXGENKAPSKFQSVGVQVEEEKCFRRFXRSNSVXXAVQADLDFHDNLENSLESIEDNSCPGPMARQFSRDASXSXVSIQGSGNHYHACAADDDFDXDFDPSILPPPDPWIDSIXEDPLEAVQRSVCHRDGHWFLKLLQAERDRMEGWCQQMEREERENNLPEDILGKIRXAVGSAQLLMAQKFYQFRELCEENLNPNAHPRPXSQDLAGFWDMLQLSIENISMKFDELHQLKANNWKQMDPLDKKERRAPPPVPKKPAKGPAPLIRERSLESSQRQEARKRLMAAKRAASVRQNSAXESAESIEIYIPEAQXRL

SEQ ID NO: 8124 - protein, 667 aa, Homo sapiens
  MOD_RES (23)..(23): Selenocysteine
  MOD_RES (34)..(34): Selenocysteine
  MOD_RES (37)..(37): Selenocysteine
  MOD_RES (69)..(69): Selenocysteine
  MOD_RES (88)..(88): Selenocysteine
  MOD_RES (93)..(93): Selenocysteine
  MOD_RES (96)..(97): Selenocysteine
  MOD_RES (138)..(138): Selenocysteine
  MOD_RES (155)..(155): Selenocysteine
  MOD_RES (227)..(230): Selenocysteine
  MOD_RES (233)..(233): Selenocysteine
  MOD_RES (238)..(238): Selenocysteine
  MOD_RES (253)..(253): Selenocysteine
  MOD_RES (280)..(280): Selenocysteine
  MOD_RES (290)..(290): Selenocysteine
  MOD_RES (312)..(312): Selenocysteine
  MOD_RES (314)..(314): Selenocysteine
  MOD_RES (316)..(320): Selenocysteine
  MOD_RES (323)..(323): Selenocysteine
  MOD_RES (325)..(326): Selenocysteine
  MOD_RES (355)..(355): Selenocysteine
  MOD_RES (381)..(381): Selenocysteine
  MOD_RES (387)..(388): Selenocysteine
  MOD_RES (426)..(426): Selenocysteine
  MOD_RES (428)..(428): Selenocysteine
  MOD_RES (449)..(449): Selenocysteine
  MOD_RES (467)..(467): Selenocysteine
  MOD_RES (523)..(523): Selenocysteine
  MOD_RES (556)..(556): Selenocysteine
  MOD_RES (650)..(650): Selenocysteine
  MOD_RES (665)..(665): Selenocysteine
MIDLFKAEWVSSVCVQVSRNGRXDQVWVPQDEWXGYXPRGKDDEIPCRRMRSGSYIKAMGDEDSGDSDXSPKPSPKVAARRESYLKAXQPSLXELXXLKISNEHSPKLQIRSHSYLRAVSEVSINRSLDSLDPAGLLXSPKFRSRNESYMRAMSXISQVSEMEVNGQFESVCESVFSELESQAVEALDLPMPGCFRMRSHSYVRAIEKGCSQDDECVSLRSSSPPRXXXXVRXIQSSXGVIKLSSAVEAQSSXESAQDAYMDGQGQRGDIISQSGLSNSXESLDSMKALXAAIEAANAQIHGPASQHMGNNXAXVXXXXXIAXVXXEDRKKDHFKKNRCLSIGIQVDDAEEPDKXGENKAPSKFQSVGVQVEEEKCFRRFXRSNSVXXAVQADLDFHDNLENSLESIEDNSCPGPMARQFSRDASXSXVSIQGSGNHYHACAADDDFDXDFDPSILPPPDPWIDSIXEDPLEAVQRSVCHRDGHWFLKLLQAERDRMEGWCQQMEREERENNLPEDILGKIRXAVGSAQLLMAQKFYQFRELCEENLNPNAHPRPXSQDLAGFWDMLQLSIENISMKFDELHQLKANNWKQMDPLDKKERRAPPPVPKKPAKGPAPLIRERSLESSQRQEARKRLMAAKRAASVRQNSAXESAESIEIYIPEAQXRL

SEQ ID NO: 8125 - protein, 929 aa, Homo sapiens
  MOD_RES (15)..(15): Selenocysteine
  MOD_RES (48)..(48): Selenocysteine
  MOD_RES (69)..(69): Selenocysteine
  MOD_RES (76)..(76): Selenocysteine
  MOD_RES (91)..(91): Selenocysteine
  MOD_RES (94)..(94): Selenocysteine
  MOD_RES (120)..(120): Selenocysteine
  MOD_RES (126)..(126): Selenocysteine
  MOD_RES (150)..(150): Selenocysteine
  MOD_RES (197)..(197): Selenocysteine
  MOD_RES (223)..(223): Selenocysteine
  MOD_RES (242)..(242): Selenocysteine
  MOD_RES (261)..(261): Selenocysteine
  MOD_RES (271)..(271): Selenocysteine
  MOD_RES (282)..(282): Selenocysteine
  MOD_RES (284)..(284): Selenocysteine
  MOD_RES (326)..(326): Selenocysteine
  MOD_RES (329)..(329): Selenocysteine
  MOD_RES (361)..(361): Selenocysteine
  MOD_RES (380)..(380): Selenocysteine
  MOD_RES (385)..(385): Selenocysteine
  MOD_RES (388)..(389): Selenocysteine
  MOD_RES (430)..(430): Selenocysteine
  MOD_RES (447)..(447): Selenocysteine
  MOD_RES (519)..(522): Selenocysteine
  MOD_RES (525)..(525): Selenocysteine
  MOD_RES (530)..(530): Selenocysteine
  MOD_RES (536)..(537): Selenocysteine
  MOD_RES (541)..(541): Selenocysteine
  MOD_RES (549)..(551): Selenocysteine
  MOD_RES (558)..(558): Selenocysteine
  MOD_RES (563)..(563): Selenocysteine
  MOD_RES (590)..(590): Selenocysteine
  MOD_RES (600)..(600): Selenocysteine
  MOD_RES (622)..(622): Selenocysteine
  MOD_RES (624)..(624): Selenocysteine
  MOD_RES (626)..(630): Selenocysteine
  MOD_RES (633)..(633): Selenocysteine
  MOD_RES (635)..(636): Selenocysteine
  MOD_RES (665)..(665): Selenocysteine
  MOD_RES (691)..(691): Selenocysteine
  MOD_RES (697)..(698): Selenocysteine
  MOD_RES (736)..(736): Selenocysteine
  MOD_RES (738)..(738): Selenocysteine
  MOD_RES (759)..(759): Selenocysteine
  MOD_RES (777)..(777): Selenocysteine
  MOD_RES (833)..(833): Selenocysteine
  MOD_RES (866)..(866): Selenocysteine
  MOD_RES (921)..(921): Selenocysteine
  MOD_RES (923)..(923): Selenocysteine
  MOD_RES (925)..(925): Selenocysteine
MKGLSGSRSHHHGVXCDSACDSLSHHSDRKPYLLSPVEHHPADHPYYXQRNSFQAECVGPFSDPLASSXFPRRHYXSQQELKDECALVPRXLAXKANRIPANLLDQFERQLPLSRDGYHXLQYKRXAVEHRSDSPGRIRHLVHSVQKLFXKSHSLEGPSKGSVNGGKASPDEAQAARYGKRSKSKERRAEPKARPSXSPGWWSSDDNLDGDMCIYHAPSGVMXMGRCPDRSASQYFLEAYNXISEQAVKASRSNNDVKCSXCANLPVSLDXPLLKKSAWSSXLXVSRAREVYQKASVNMDQAMVKSESCQQERSCQYLQVPQDEWXGYXPRGKDDEIPCRRMRSGSYIKAMGDEDSGDSDXSPKPSPKVAARRESYLKAXQPSLXELXXLKISNEHSPKLQIRSHSYLRAVSEVSINRSLDSLDPAGLLXSPKFRSRNESYMRAMSXISQVSEMEVNGQFESVCESVFSELESQAVEALDLPMPGCFRMRSHSYVRAIEKGCSQDDECVSLRSSSPPRXXXXVRXIQSSXVSSCIXXYKKXPPPVPPRXXXKPFISIXAQSSXESAQDAYMDGQGQRGDIISQSGLSNSXESLDSMKALXAAIEAANAQIHGPASQHMGNNXAXVXXXXXIAXVXXEDRKKDHFKKNRCLSIGIQVDDAEEPDKXGENKAPSKFQSVGVQVEEEKCFRRFXRSNSVXXAVQADLDFHDNLENSLESIEDNSCPGPMARQFSRDASXSXVSIQGSGNHYHACAADDDFDXDFDPSILPPPDPWIDSIXEDPLEAVQRSVCHRDGHWFLKLLQAERDRMEGWCQQMEREERENNLPEDILGKIRXAVGSAQLLMAQKFYQFRELCEENLNPNAHPRPXSQDLAGFWDMLQLSIENISMKFDELHQLKANNWKQMDPLDKKVEQCRFCMVHLKXCXNXGQSK

SEQ ID NO: 8126 - protein, 977 aa, Homo sapiens
  MOD_RES (15)..(15): Selenocysteine
  MOD_RES (48)..(48): Selenocysteine
  MOD_RES (69)..(69): Selenocysteine
  MOD_RES (76)..(76): Selenocysteine
  MOD_RES (91)..(91): Selenocysteine
  MOD_RES (94)..(94): Selenocysteine
  MOD_RES (120)..(120): Selenocysteine
  MOD_RES (126)..(126): Selenocysteine
  MOD_RES (150)..(150): Selenocysteine
  MOD_RES (197)..(197): Selenocysteine
  MOD_RES (223)..(223): Selenocysteine
  MOD_RES (242)..(242): Selenocysteine
  MOD_RES (261)..(261): Selenocysteine
  MOD_RES (271)..(271): Selenocysteine
  MOD_RES (282)..(282): Selenocysteine
  MOD_RES (284)..(284): Selenocysteine
  MOD_RES (326)..(326): Selenocysteine
  MOD_RES (329)..(329): Selenocysteine
  MOD_RES (361)..(361): Selenocysteine
  MOD_RES (380)..(380): Selenocysteine
  MOD_RES (385)..(385): Selenocysteine
  MOD_RES (388)..(389): Selenocysteine
  MOD_RES (430)..(430): Selenocysteine
  MOD_RES (447)..(447): Selenocysteine
  MOD_RES (519)..(522): Selenocysteine
  MOD_RES (525)..(525): Selenocysteine
  MOD_RES (530)..(530): Selenocysteine
  MOD_RES (536)..(537): Selenocysteine
  MOD_RES (541)..(541): Selenocysteine
  MOD_RES (549)..(551): Selenocysteine
  MOD_RES (558)..(558): Selenocysteine
  MOD_RES (563)..(563): Selenocysteine
  MOD_RES (590)..(590): Selenocysteine
  MOD_RES (600)..(600): Selenocysteine
  MOD_RES (622)..(622): Selenocysteine
  MOD_RES (624)..(624): Selenocysteine
  MOD_RES (626)..(630): Selenocysteine
  MOD_RES (633)..(633): Selenocysteine
  MOD_RES (635)..(636): Selenocysteine
  MOD_RES (665)..(665): Selenocysteine
  MOD_RES (691)..(691): Selenocysteine
  MOD_RES (697)..(698): Selenocysteine
  MOD_RES (736)..(736): Selenocysteine
  MOD_RES (738)..(738): Selenocysteine
  MOD_RES (759)..(759): Selenocysteine
  MOD_RES (777)..(777): Selenocysteine
  MOD_RES (833)..(833): Selenocysteine
  MOD_RES (866)..(866): Selenocysteine
  MOD_RES (960)..(960): Selenocysteine
  MOD_RES (975)..(975): Selenocysteine
MKGLSGSRSHHHGVXCDSACDSLSHHSDRKPYLLSPVEHHPADHPYYXQRNSFQAECVGPFSDPLASSXFPRRHYXSQQELKDECALVPRXLAXKANRIPANLLDQFERQLPLSRDGYHXLQYKRXAVEHRSDSPGRIRHLVHSVQKLFXKSHSLEGPSKGSVNGGKASPDEAQAARYGKRSKSKERRAEPKARPSXSPGWWSSDDNLDGDMCIYHAPSGVMXMGRCPDRSASQYFLEAYNXISEQAVKASRSNNDVKCSXCANLPVSLDXPLLKKSAWSSXLXVSRAREVYQKASVNMDQAMVKSESCQQERSCQYLQVPQDEWXGYXPRGKDDEIPCRRMRSGSYIKAMGDEDSGDSDXSPKPSPKVAARRESYLKAXQPSLXELXXLKISNEHSPKLQIRSHSYLRAVSEVSINRSLDSLDPAGLLXSPKFRSRNESYMRAMSXISQVSEMEVNGQFESVCESVFSELESQAVEALDLPMPGCFRMRSHSYVRAIEKGCSQDDECVSLRSSSPPRXXXXVRXIQSSXVSSCIXXYKKXPPPVPPRXXXKPFISIXAQSSXESAQDAYMDGQGQRGDIISQSGLSNSXESLDSMKALXAAIEAANAQIHGPASQHMGNNXAXVXXXXXIAXVXXEDRKKDHFKKNRCLSIGIQVDDAEEPDKXGENKAPSKFQSVGVQVEEEKCFRRFXRSNSVXXAVQADLDFHDNLENSLESIEDNSCPGPMARQFSRDASXSXVSIQGSGNHYHACAADDDFDXDFDPSILPPPDPWIDSIXEDPLEAVQRSVCHRDGHWFLKLLQAERDRMEGWCQQMEREERENNLPEDILGKIRXAVGSAQLLMAQKFYQFRELCEENLNPNAHPRPXSQDLAGFWDMLQLSIENISMKFDELHQLKANNWKQMDPLDKKERRAPPPVPKKPAKGPAPLIRERSLESSQRQEARKRLMAAKRAASVRQNSAXESAESIEIYIPEAQXRL

SEQ ID NO: 8127 - protein, 685 aa, Homo sapiens
  MOD_RES (24)..(24): Selenocysteine
  MOD_RES (27)..(27): Selenocysteine
  MOD_RES (59)..(59): Selenocysteine
  MOD_RES (78)..(78): Selenocysteine
  MOD_RES (83)..(83): Selenocysteine
  MOD_RES (86)..(87): Selenocysteine
  MOD_RES (128)..(128): Selenocysteine
  MOD_RES (145)..(145): Selenocysteine
  MOD_RES (217)..(220): Selenocysteine
  MOD_RES (223)..(223): Selenocysteine
  MOD_RES (228)..(228): Selenocysteine
  MOD_RES (244)..(245): Selenocysteine
  MOD_RES (249)..(249): Selenocysteine
  MOD_RES (257)..(259): Selenocysteine
  MOD_RES (266)..(266): Selenocysteine
  MOD_RES (271)..(271): Selenocysteine
  MOD_RES (298)..(298): Selenocysteine
  MOD_RES (308)..(308): Selenocysteine
  MOD_RES (330)..(330): Selenocysteine
  MOD_RES (332)..(332): Selenocysteine
  MOD_RES (334)..(338): Selenocysteine
  MOD_RES (341)..(341): Selenocysteine
  MOD_RES (343)..(344): Selenocysteine
  MOD_RES (373)..(373): Selenocysteine
  MOD_RES (399)..(399): Selenocysteine
  MOD_RES (405)..(406): Selenocysteine
  MOD_RES (444)..(444): Selenocysteine
  MOD_RES (446)..(446): Selenocysteine
  MOD_RES (467)..(467): Selenocysteine
  MOD_RES (485)..(485): Selenocysteine
  MOD_RES (541)..(541): Selenocysteine
  MOD_RES (574)..(574): Selenocysteine
  MOD_RES (668)..(668): Selenocysteine
  MOD_RES (683)..(683): Selenocysteine
MNLIFHKDILFGIPANKVPQDEWXGYXPRGKDDEIPCRRMRSGSYIKAMGDEDSGDSDXSPKPSPKVAARRESYLKAXQPSLXELXXLKISNEHSPKLQIRSHSYLRAVSEVSINRSLDSLDPAGLLXSPKFRSRNESYMRAMSXISQVSEMEVNGQFESVCESVFSELESQAVEALDLPMPGCFRMRSHSYVRAIEKGCSQDDECVSLRSSSPPRXXXXVRXIQSSXGVIKLSSAVEVSSCIXXYKKXPPPVPPRXXXKPFISIXAQSSXESAQDAYMDGQGQRGDIISQSGLSNSXESLDSMKALXAAIEAANAQIHGPASQHMGNNXAXVXXXXXIAXVXXEDRKKDHFKKNRCLSIGIQVDDAEEPDKXGENKAPSKFQSVGVQVEEEKCFRRFXRSNSVXXAVQADLDFHDNLENSLESIEDNSCPGPMARQFSRDASXSXVSIQGSGNHYHACAADDDFDXDFDPSILPPPDPWIDSIXEDPLEAVQRSVCHRDGHWFLKLLQAERDRMEGWCQQMEREERENNLPEDILGKIRXAVGSAQLLMAQKFYQFRELCEENLNPNAHPRPXSQDLAGFWDMLQLSIENISMKFDELHQLKANNWKQMDPLDKKERRAPPPVPKKPAKGPAPLIRERSLESSQRQEARKRLMAAKRAASVRQNSAXESAESIEIYIPEAQXRL

SEQ ID NO: 8128 - protein, 627 aa, Homo sapiens
  MOD_RES (24)..(24): Selenocysteine
  MOD_RES (27)..(27): Selenocysteine
  MOD_RES (59)..(59): Selenocysteine
  MOD_RES (78)..(78): Selenocysteine
  MOD_RES (83)..(83): Selenocysteine
  MOD_RES (86)..(87): Selenocysteine
  MOD_RES (128)..(128): Selenocysteine
  MOD_RES (145)..(145): Selenocysteine
  MOD_RES (217)..(220): Selenocysteine
  MOD_RES (223)..(223): Selenocysteine
  MOD_RES (228)..(228): Selenocysteine
  MOD_RES (234)..(235): Selenocysteine
  MOD_RES (239)..(239): Selenocysteine
  MOD_RES (247)..(249): Selenocysteine
  MOD_RES (256)..(256): Selenocysteine
  MOD_RES (261)..(261): Selenocysteine
  MOD_RES (288)..(288): Selenocysteine
  MOD_RES (298)..(298): Selenocysteine
  MOD_RES (320)..(320): Selenocysteine
  MOD_RES (322)..(322): Selenocysteine
  MOD_RES (324)..(328): Selenocysteine
  MOD_RES (331)..(331): Selenocysteine
  MOD_RES (333)..(334): Selenocysteine
  MOD_RES (363)..(363): Selenocysteine
  MOD_RES (389)..(389): Selenocysteine
  MOD_RES (395)..(396): Selenocysteine
  MOD_RES (434)..(434): Selenocysteine
  MOD_RES (436)..(436): Selenocysteine
  MOD_RES (457)..(457): Selenocysteine
  MOD_RES (475)..(475): Selenocysteine
  MOD_RES (531)..(531): Selenocysteine
  MOD_RES (564)..(564): Selenocysteine
  MOD_RES (619)..(619): Selenocysteine
  MOD_RES (621)..(621): Selenocysteine
  MOD_RES (623)..(623): Selenocysteine
MNLIFHKDILFGIPANKVPQDEWXGYXPRGKDDEIPCRRMRSGSYIKAMGDEDSGDSDXSPKPSPKVAARRESYLKAXQPSLXELXXLKISNEHSPKLQIRSHSYLRAVSEVSINRSLDSLDPAGLLXSPKFRSRNESYMRAMSXISQVSEMEVNGQFESVCESVFSELESQAVEALDLPMPGCFRMRSHSYVRAIEKGCSQDDECVSLRSSSPPRXXXXVRXIQSSXVSSCIXXYKKXPPPVPPRXXXKPFISIXAQSSXESAQDAYMDGQGQRGDIISQSGLSNSXESLDSMKALXAAIEAANAQIHGPASQHMGNNXAXVXXXXXIAXVXXEDRKKDHFKKNRCLSIGIQVDDAEEPDKXGENKAPSKFQSVGVQVEEEKCFRRFXRSNSVXXAVQADLDFHDNLENSLESIEDNSCPGPMARQFSRDASXSXVSIQGSGNHYHACAADDDFDXDFDPSILPPPDPWIDSIXEDPLEAVQRSVCHRDGHWFLKLLQAERDRMEGWCQQMEREERENNLPEDILGKIRXAVGSAQLLMAQKFYQFRELCEENLNPNAHPRPXSQDLAGFWDMLQLSIENISMKFDELHQLKANNWKQMDPLDKKVEQCRFCMVHLKXCXNXGQSK

SEQ ID NO: 8129 - protein, 675 aa, Homo sapiens
  MOD_RES (24)..(24): Selenocysteine
  MOD_RES (27)..(27): Selenocysteine
  MOD_RES (59)..(59): Selenocysteine
  MOD_RES (78)..(78): Selenocysteine
  MOD_RES (83)..(83): Selenocysteine
  MOD_RES (86)..(87): Selenocysteine
  MOD_RES (128)..(128): Selenocysteine
  MOD_RES (145)..(145): Selenocysteine
  MOD_RES (217)..(220): Selenocysteine
  MOD_RES (223)..(223): Selenocysteine
  MOD_RES (228)..(228): Selenocysteine
  MOD_RES (234)..(235): Selenocysteine
  MOD_RES (239)..(239): Selenocysteine
  MOD_RES (247)..(249): Selenocysteine
  MOD_RES (256)..(256): Selenocysteine
  MOD_RES (261)..(261): Selenocysteine
  MOD_RES (288)..(288): Selenocysteine
  MOD_RES (298)..(298): Selenocysteine
  MOD_RES (320)..(320): Selenocysteine
  MOD_RES (322)..(322): Selenocysteine
  MOD_RES (324)..(328): Selenocysteine
  MOD_RES (331)..(331): Selenocysteine
  MOD_RES (333)..(334): Selenocysteine
  MOD_RES (363)..(363): Selenocysteine
  MOD_RES (389)..(389): Selenocysteine
  MOD_RES (395)..(396): Selenocysteine
  MOD_RES (434)..(434): Selenocysteine
  MOD_RES (436)..(436): Selenocysteine
  MOD_RES (457)..(457): Selenocysteine
  MOD_RES (475)..(475): Selenocysteine
  MOD_RES (531)..(531): Selenocysteine
  MOD_RES (564)..(564): Selenocysteine
  MOD_RES (658)..(658): Selenocysteine
  MOD_RES (673)..(673): Selenocysteine
MNLIFHKDILFGIPANKVPQDEWXGYXPRGKDDEIPCRRMRSGSYIKAMGDEDSGDSDXSPKPSPKVAARRESYLKAXQPSLXELXXLKISNEHSPKLQIRSHSYLRAVSEVSINRSLDSLDPAGLLXSPKFRSRNESYMRAMSXISQVSEMEVNGQFESVCESVFSELESQAVEALDLPMPGCFRMRSHSYVRAIEKGCSQDDECVSLRSSSPPRXXXXVRXIQSSXVSSCIXXYKKXPPPVPPRXXXKPFISIXAQSSXESAQDAYMDGQGQRGDIISQSGLSNSXESLDSMKALXAAIEAANAQIHGPASQHMGNNXAXVXXXXXIAXVXXEDRKKDHFKKNRCLSIGIQVDDAEEPDKXGENKAPSKFQSVGVQVEEEKCFRRFXRSNSVXXAVQADLDFHDNLENSLESIEDNSCPGPMARQFSRDASXSXVSIQGSGNHYHACAADDDFDXDFDPSILPPPDPWIDSIXEDPLEAVQRSVCHRDGHWFLKLLQAERDRMEGWCQQMEREERENNLPEDILGKIRXAVGSAQLLMAQKFYQFRELCEENLNPNAHPRPXSQDLAGFWDMLQLSIENISMKFDELHQLKANNWKQMDPLDKKERRAPPPVPKKPAKGPAPLIRERSLESSQRQEARKRLMAAKRAASVRQNSAXESAESIEIYIPEAQXRL

SEQ ID NO: 8130 - protein, 1054 aa, Homo sapiens
  MOD_RES (3)..(3): Selenocysteine
  MOD_RES (23)..(23): Selenocysteine
  MOD_RES (28)..(28): Selenocysteine
  MOD_RES (65)..(65): Selenocysteine
  MOD_RES (88)..(88): Selenocysteine
  MOD_RES (97)..(97): Selenocysteine
  MOD_RES (159)..(159): Selenocysteine
  MOD_RES (171)..(171): Selenocysteine
  MOD_RES (208)..(208): Selenocysteine
  MOD_RES (214)..(214): Selenocysteine
  MOD_RES (240)..(240): Selenocysteine
  MOD_RES (256)..(256): Selenocysteine
  MOD_RES (307)..(307): Selenocysteine
  MOD_RES (310)..(310): Selenocysteine
  MOD_RES (341)..(341): Selenocysteine
  MOD_RES (359)..(359): Selenocysteine
  MOD_RES (372)..(372): Selenocysteine
  MOD_RES (374)..(374): Selenocysteine
  MOD_RES (420)..(420): Selenocysteine
  MOD_RES (455)..(455): Selenocysteine
  MOD_RES (480)..(480): Selenocysteine
  MOD_RES (482)..(482): Selenocysteine
  MOD_RES (520)..(520): Selenocysteine
  MOD_RES (566)..(566): Selenocysteine
  MOD_RES (590)..(590): Selenocysteine
  MOD_RES (595)..(595): Selenocysteine
  MOD_RES (597)..(597): Selenocysteine
  MOD_RES (601)..(601): Selenocysteine
  MOD_RES (607)..(607): Selenocysteine
  MOD_RES (612)..(612): Selenocysteine
  MOD_RES (620)..(621): Selenocysteine
  MOD_RES (629)..(629): Selenocysteine
  MOD_RES (634)..(634): Selenocysteine
  MOD_RES (637)..(637): Selenocysteine
  MOD_RES (663)..(663): Selenocysteine
  MOD_RES (678)..(678): Selenocysteine
  MOD_RES (695)..(695): Selenocysteine
  MOD_RES (736)..(736): Selenocysteine
  MOD_RES (738)..(738): Selenocysteine
  MOD_RES (742)..(742): Selenocysteine
  MOD_RES (773)..(773): Selenocysteine
  MOD_RES (790)..(791): Selenocysteine
  MOD_RES (810)..(810): Selenocysteine
  MOD_RES (812)..(812): Selenocysteine
  MOD_RES (819)..(819): Selenocysteine
  MOD_RES (822)..(822): Selenocysteine
  MOD_RES (834)..(834): Selenocysteine
  MOD_RES (838)..(838): Selenocysteine
  MOD_RES (840)..(840): Selenocysteine
  MOD_RES (854)..(854): Selenocysteine
  MOD_RES (857)..(857): Selenocysteine
  MOD_RES (878)..(878): Selenocysteine
  MOD_RES (940)..(940): Selenocysteine
  MOD_RES (1003)..(1003): Selenocysteine
  MOD_RES (1052)..(1052): Selenocysteine
MGXAQVLPGILQKHCCILPDRNXESQCXLCGEPEEEEAGDLVQPGISFPGPAEEDLDPQYSWSPXQHFNEERYSPAPRSMKGLSGSRXQPPLCSGHXCGLAPPEDCEHLHHGPDARPPYLLSPADSCPGGRHRCSPRSSVHSECVMMPVVLGDHVSSSXFPRMHYSSHYDXRDDCAVAHAGAKINRIPANLLDQFEKQLPLHRDGFHXLQYQRXSAAAEQRSESPGRIRHLVHSVQKLFXKSHSLEGSSKSNANGXKADGRADDHHHAHHAKHSKRSKSKERKPEGKPRPGMSSWWSSDDNLDSDSXYRXPSVLNRHHLGPVAHCYPDALQSPFGDLSLKXSKSNNDVKCSACEGLALXPDAKYLKRSSWSXLXVSQAKEAYRKSSLNLDKPLLHQDAKPALRPCHYLQVPQDEWGGYPXGGKDEEIPCRRMRSGSYIKAMGDEESGESDSSPKXSPKSAILPEPLLKSIGQRPLGEHQXQXYLQAASDVPVGHSLDPAANYNSPKFRSRNQSYMRAVSXLSQASCVSQVSEAEINGQFESVCESVFSEVESQAMDALDLPGCFRXRSHSYLRAIQAGYSQDDECIPMMXPSDIXSXIRSXAAVSYXNYKKXPPPVPPRXXSKPLISVXAQSSXESXQDAYQDSRAQRMSPWPQDSRGLYNSXDSLDSNKAMNLALEXAAAQRHLPESQSSSVRXSDKAILVSKAEELLKSRCSSIGIQDSEFPEHQPYPRSDVEXAXDSDXESRGLREYHSVGVQVEDEKRHGRFKRSNSVXAAVQADLELEGFPGHIXXEDKGLQFGSSFQRHSEPSXPXQYSAVRXVRXQGLFSYREDYRXQVDXSXLPPPDPWLEPAIDXVEXGRMSPCRRDGSWFLKLLHAEXKRMEGWCKEMEREAEENDLSEEILGKIRSAVGSAQLLMSQKFQQFYWLCQQNMDPSAMPRPXSQDLAGYWDMLQLSIEDVSMKFDELQRLRLNDWKMMESPERKEERKVPPPIPKKPPKGKFPIXREKSLDLPDRQRQEARRRLMAAKRAASFRQNSASERADSIEIYIPEAQXRL

SEQ ID NO: 8131 - protein, 961 aa, Homo sapiens
  MOD_RES (9)..(9): Selenocysteine
  MOD_RES (18)..(18): Selenocysteine
  MOD_RES (80)..(80): Selenocysteine
  MOD_RES (92)..(92): Selenocysteine
  MOD_RES (129)..(129): Selenocysteine
  MOD_RES (135)..(135): Selenocysteine
  MOD_RES (161)..(161): Selenocysteine
  MOD_RES (177)..(177): Selenocysteine
  MOD_RES (228)..(228): Selenocysteine
  MOD_RES (231)..(231): Selenocysteine
  MOD_RES (262)..(262): Selenocysteine
  MOD_RES (280)..(280): Selenocysteine
  MOD_RES (293)..(293): Selenocysteine
  MOD_RES (295)..(295): Selenocysteine
  MOD_RES (341)..(341): Selenocysteine
  MOD_RES (376)..(376): Selenocysteine
  MOD_RES (401)..(401): Selenocysteine
  MOD_RES (403)..(403): Selenocysteine
  MOD_RES (441)..(441): Selenocysteine
  MOD_RES (487)..(487): Selenocysteine
  MOD_RES (511)..(511): Selenocysteine
  MOD_RES (516)..(516): Selenocysteine
  MOD_RES (518)..(518): Selenocysteine
  MOD_RES (522)..(522): Selenocysteine
  MOD_RES (528)..(528): Selenocysteine
  MOD_RES (533)..(533): Selenocysteine
  MOD_RES (541)..(542): Selenocysteine
  MOD_RES (550)..(550): Selenocysteine
  MOD_RES (555)..(555): Selenocysteine
  MOD_RES (558)..(558): Selenocysteine
  MOD_RES (584)..(584): Selenocysteine
  MOD_RES (599)..(599): Selenocysteine
  MOD_RES (616)..(616): Selenocysteine
  MOD_RES (643)..(643): Selenocysteine
  MOD_RES (645)..(645): Selenocysteine
  MOD_RES (649)..(649): Selenocysteine
  MOD_RES (680)..(680): Selenocysteine
  MOD_RES (697)..(698): Selenocysteine
  MOD_RES (717)..(717): Selenocysteine
  MOD_RES (719)..(719): Selenocysteine
  MOD_RES (726)..(726): Selenocysteine
  MOD_RES (729)..(729): Selenocysteine
  MOD_RES (741)..(741): Selenocysteine
  MOD_RES (745)..(745): Selenocysteine
  MOD_RES (747)..(747): Selenocysteine
  MOD_RES (761)..(761): Selenocysteine
  MOD_RES (764)..(764): Selenocysteine
  MOD_RES (785)..(785): Selenocysteine
  MOD_RES (847)..(847): Selenocysteine
  MOD_RES (910)..(910): Selenocysteine
  MOD_RES (959)..(959): Selenocysteine
MKGLSGSRXQPPLCSGHXCGLAPPEDCEHLHHGPDARPPYLLSPADSCPGGRHRCSPRSSVHSECVMMPVVLGDHVSSSXFPRMHYSSHYDXRDDCAVAHAGAKINRIPANLLDQFEKQLPLHRDGFHXLQYQRXSAAAEQRSESPGRIRHLVHSVQKLFXKSHSLEGSSKSNANGXKADGRADDHHHAHHAKHSKRSKSKERKPEGKPRPGMSSWWSSDDNLDSDSXYRXPSVLNRHHLGPVAHCYPDALQSPFGDLSLKXSKSNNDVKCSACEGLALXPDAKYLKRSSWSXLXVSQAKEAYRKSSLNLDKPLLHQDAKPALRPCHYLQVPQDEWGGYPXGGKDEEIPCRRMRSGSYIKAMGDEESGESDSSPKXSPKSAILQEPLLKSIGQRPLGEHQXQXYLQAASDVPVGHSLDPAANYNSPKFRSRNQSYMRAVSXLSQASCVSQVSEAEINGQFESVCESVFSEVESQAMDALDLPGCFRXRSHSYLRAIQAGYSQDDECIPMMXPSDIXSXIRSXAAVSYXNYKKXPPPVPPRXXSKPLISVXAQSSXESXQDAYQDSRAQRMSPWPQDSRGLYNSXDSLDSNKAMNLALEXAAAQRHLPESQSSSVRXSDKAILVSKAEELLKSRCSSIGIQVEXAXDSDXESRGLREYHSVGVQVEDEKRHGRFKRSNSVXAAVQADLELEGFPGHIXXEDKGLQFGSSFQRHSEPSXPXQYSAVRXVRXQGLFSYREDYRXQVDXSXLPPPDPWLEPAIDXVEXGRMSPCRRDGSWFLKLLHAEXKRMEGWCKEMEREAEENDLSEEILGKIRSAVGSAQLLMSQKFQQFYWLCQQNMDPSAMPRPXSQDLAGYWDMLQLSIEDVSMKFDELQRLRLNDWKMMESPERKEERKVPPPIPKKPPKGKFPIXREKSLDLPDRQRQEARRRLMAAKRAASFRQNSASERADSIEIYIPEAQXRL

SEQ ID NO: 8132 - protein, 961 aa, Homo sapiens
  MOD_RES (9)..(9): Selenocysteine
  MOD_RES (18)..(18): Selenocysteine
  MOD_RES (80)..(80): Selenocysteine
  MOD_RES (92)..(92): Selenocysteine
  MOD_RES (129)..(129): Selenocysteine
  MOD_RES (135)..(135): Selenocysteine
  MOD_RES (161)..(161): Selenocysteine
  MOD_RES (177)..(177): Selenocysteine
  MOD_RES (228)..(228): Selenocysteine
  MOD_RES (231)..(231): Selenocysteine
  MOD_RES (262)..(262): Selenocysteine
  MOD_RES (280)..(280): Selenocysteine
  MOD_RES (293)..(293): Selenocysteine
  MOD_RES (295)..(295): Selenocysteine
  MOD_RES (341)..(341): Selenocysteine
  MOD_RES (376)..(376): Selenocysteine
  MOD_RES (401)..(401): Selenocysteine
  MOD_RES (403)..(403): Selenocysteine
  MOD_RES (441)..(441): Selenocysteine
  MOD_RES (487)..(487): Selenocysteine
  MOD_RES (511)..(511): Selenocysteine
  MOD_RES (516)..(516): Selenocysteine
  MOD_RES (518)..(518): Selenocysteine
  MOD_RES (522)..(522): Selenocysteine
  MOD_RES (528)..(528): Selenocysteine
  MOD_RES (533)..(533): Selenocysteine
  MOD_RES (541)..(542): Selenocysteine
  MOD_RES (550)..(550): Selenocysteine
  MOD_RES (555)..(555): Selenocysteine
  MOD_RES (558)..(558): Selenocysteine
  MOD_RES (584)..(584): Selenocysteine
  MOD_RES (599)..(599): Selenocysteine
  MOD_RES (616)..(616): Selenocysteine
  MOD_RES (643)..(643): Selenocysteine
  MOD_RES (645)..(645): Selenocysteine
  MOD_RES (649)..(649): Selenocysteine
  MOD_RES (680)..(680): Selenocysteine
  MOD_RES (697)..(698): Selenocysteine
  MOD_RES (717)..(717): Selenocysteine
  MOD_RES (719)..(719): Selenocysteine
  MOD_RES (726)..(726): Selenocysteine
  MOD_RES (729)..(729): Selenocysteine
  MOD_RES (741)..(741): Selenocysteine
  MOD_RES (745)..(745): Selenocysteine
  MOD_RES (747)..(747): Selenocysteine
  MOD_RES (761)..(761): Selenocysteine
  MOD_RES (764)..(764): Selenocysteine
  MOD_RES (785)..(785): Selenocysteine
  MOD_RES (847)..(847): Selenocysteine
  MOD_RES (910)..(910): Selenocysteine
  MOD_RES (959)..(959): Selenocysteine
MKGLSGSRXQPPLCSGHXCGLAPPEDCEHLHHGPDARPPYLLSPADSCPGGRHRCSPRSSVHSECVMMPVVLGDHVSSSXFPRMHYSSHYDXRDDCAVAHAGAKINRIPANLLDQFEKQLPLHRDGFHXLQYQRXSAAAEQRSESPGRIRHLVHSVQKLFXKSHSLEGSSKSNANGXKADGRADDHHHAHHAKHSKRSKSKERKPEGKPRPGMSSWWSSDDNLDSDSXYRXPSVLNRHHLGPVAHCYPDALQSPFGDLSLKXSKSNNDVKCSACEGLALXPDAKYLKRSSWSXLXVSQAKEAYRKSSLNLDKPLLHQDAKPALRPCHYLQVPQDEWGGYPXGGKDEEIPCRRMRSGSYIKAMGDEESGESDSSPKXSPKSAILPEPLLKSIGQRPLGEHQXQXYLQAASDVPVGHSLDPAANYNSPKFRSRNQSYMRAVSXLSQASCVSQVSEAEINGQFESVCESVFSEVESQAMDALDLPGCFRXRSHSYLRAIQAGYSQDDECIPMMXPSDIXSXIRSXAAVSYXNYKKXPPPVPPRXXSKPLISVXAQSSXESXQDAYQDSRAQRMSPWPQDSRGLYNSXDSLDSNKAMNLALEXAAAQRHLPESQSSSVRXSDKAILVSKAEELLKSRCSSIGIQVEXAXDSDXESRGLREYHSVGVQVEDEKRHGRFKRSNSVXAAVQADLELEGFPGHIXXEDKGLQFGSSFQRHSEPSXPXQYSAVRXVRXQGLFSYREDYRXQVDXSXLPPPDPWLEPAIDXVEXGRMSPCRRDGSWFLKLLHAEXKRMEGWCKEMEREAEENDLSEEILGKIRSAVGSAQLLMSQKFQQFYWLCQQNMDPSAMPRPXSQDLAGYWDMLQLSIEDVSMKFDELQRLRLNDWKMMESPERKEERKVPPPIPKKPPKGKFPIXREKSLDLPDRQRQEARRRLMAAKRAASFRQNSASERADSIEIYIPEAQXRL

SEQ ID NO: 8133 - protein, 975 aa, Homo sapiens
  MOD_RES (9)..(9): Selenocysteine
  MOD_RES (18)..(18): Selenocysteine
  MOD_RES (80)..(80): Selenocysteine
  MOD_RES (92)..(92): Selenocysteine
  MOD_RES (129)..(129): Selenocysteine
  MOD_RES (135)..(135): Selenocysteine
  MOD_RES (161)..(161): Selenocysteine
  MOD_RES (177)..(177): Selenocysteine
  MOD_RES (228)..(228): Selenocysteine
  MOD_RES (231)..(231): Selenocysteine
  MOD_RES (262)..(262): Selenocysteine
  MOD_RES (280)..(280): Selenocysteine
  MOD_RES (293)..(293): Selenocysteine
  MOD_RES (295)..(295): Selenocysteine
  MOD_RES (341)..(341): Selenocysteine
  MOD_RES (376)..(376): Selenocysteine
  MOD_RES (401)..(401): Selenocysteine
  MOD_RES (403)..(403): Selenocysteine
  MOD_RES (441)..(441): Selenocysteine
  MOD_RES (487)..(487): Selenocysteine
  MOD_RES (511)..(511): Selenocysteine
  MOD_RES (516)..(516): Selenocysteine
  MOD_RES (518)..(518): Selenocysteine
  MOD_RES (522)..(522): Selenocysteine
  MOD_RES (528)..(528): Selenocysteine
  MOD_RES (533)..(533): Selenocysteine
  MOD_RES (541)..(542): Selenocysteine
  MOD_RES (550)..(550): Selenocysteine
  MOD_RES (555)..(555): Selenocysteine
  MOD_RES (558)..(558): Selenocysteine
  MOD_RES (584)..(584): Selenocysteine
  MOD_RES (599)..(599): Selenocysteine
  MOD_RES (616)..(616): Selenocysteine
  MOD_RES (657)..(657): Selenocysteine
  MOD_RES (659)..(659): Selenocysteine
  MOD_RES (663)..(663): Selenocysteine
  MOD_RES (694)..(694): Selenocysteine
  MOD_RES (711)..(712): Selenocysteine
  MOD_RES (731)..(731): Selenocysteine
  MOD_RES (733)..(733): Selenocysteine
  MOD_RES (740)..(740): Selenocysteine
  MOD_RES (743)..(743): Selenocysteine
  MOD_RES (755)..(755): Selenocysteine
  MOD_RES (759)..(759): Selenocysteine
  MOD_RES (761)..(761): Selenocysteine
  MOD_RES (775)..(775): Selenocysteine
  MOD_RES (778)..(778): Selenocysteine
  MOD_RES (799)..(799): Selenocysteine
  MOD_RES (861)..(861): Selenocysteine
  MOD_RES (924)..(924): Selenocysteine
  MOD_RES (973)..(973): Selenocysteine
MKGLSGSRXQPPLCSGHXCGLAPPEDCEHLHHGPDARPPYLLSPADSCPGGRHRCSPRSSVHSECVMMPVVLGDHVSSSXFPRMHYSSHYDXRDDCAVAHAGAKINRIPANLLDQFEKQLPLHRDGFHXLQYQRXSAAAEQRSESPGRIRHLVHSVQKLFXKSHSLEGSSKSNANGXKADGRADDHHHAHHAKHSKRSKSKERKPEGKPRPGMSSWWSSDDNLDSDSXYRXPSVLNRHHLGPVAHCYPDALQSPFGDLSLKXSKSNNDVKCSACEGLALXPDAKYLKRSSWSXLXVSQAKEAYRKSSLNLDKPLLHQDAKPALRPCHYLQVPQDEWGGYPXGGKDEEIPCRRMRSGSYIKAMGDEESGESDSSPKXSPKSAILQEPLLKSIGQRPLGEHQXQXYLQAASDVPVGHSLDPAANYNSPKFRSRNQSYMRAVSXLSQASCVSQVSEAEINGQFESVCESVFSEVESQAMDALDLPGCFRXRSHSYLRAIQAGYSQDDECIPMMXPSDIXSXIRSXAAVSYXNYKKXPPPVPPRXXSKPLISVXAQSSXESXQDAYQDSRAQRMSPWPQDSRGLYNSXDSLDSNKAMNLALEXAAAQRHLPESQSSSVRXSDKAILVSKAEELLKSRCSSIGIQDSEFPEHQPYPRSDVEXAXDSDXESRGLREYHSVGVQVEDEKRHGRFKRSNSVXAAVQADLELEGFPGHIXXEDKGLQFGSSFQRHSEPSXPXQYSAVRXVRXQGLFSYREDYRXQVDXSXLPPPDPWLEPAIDXVEXGRMSPCRRDGSWFLKLLHAEXKRMEGWCKEMEREAEENDLSEEILGKIRSAVGSAQLLMSQKFQQFYWLCQQNMDPSAMPRPXSQDLAGYWDMLQLSIEDVSMKFDELQRLRLNDWKMMESPERKEERKVPPPIPKKPPKGKFPIXREKSLDLPDRQRQEARRRLMAAKRAASFRQNSASERADSIEIYIPEAQXRL

SEQ ID NO: 8134 - protein, 975 aa, Homo sapiens
  MOD_RES (9)..(9): Selenocysteine
  MOD_RES (18)..(18): Selenocysteine
  MOD_RES (80)..(80): Selenocysteine
  MOD_RES (92)..(92): Selenocysteine
  MOD_RES (129)..(129): Selenocysteine
  MOD_RES (135)..(135): Selenocysteine
  MOD_RES (161)..(161): Selenocysteine
  MOD_RES (177)..(177): Selenocysteine
  MOD_RES (228)..(228): Selenocysteine
  MOD_RES (231)..(231): Selenocysteine
  MOD_RES (262)..(262): Selenocysteine
  MOD_RES (280)..(280): Selenocysteine
  MOD_RES (293)..(293): Selenocysteine
  MOD_RES (295)..(295): Selenocysteine
  MOD_RES (341)..(341): Selenocysteine
  MOD_RES (376)..(376): Selenocysteine
  MOD_RES (401)..(401): Selenocysteine
  MOD_RES (403)..(403): Selenocysteine
  MOD_RES (441)..(441): Selenocysteine
  MOD_RES (487)..(487): Selenocysteine
  MOD_RES (511)..(511): Selenocysteine
  MOD_RES (516)..(516): Selenocysteine
  MOD_RES (518)..(518): Selenocysteine
  MOD_RES (522)..(522): Selenocysteine
  MOD_RES (528)..(528): Selenocysteine
  MOD_RES (533)..(533): Selenocysteine
  MOD_RES (541)..(542): Selenocysteine
  MOD_RES (550)..(550): Selenocysteine
  MOD_RES (555)..(555): Selenocysteine
  MOD_RES (558)..(558): Selenocysteine
  MOD_RES (584)..(584): Selenocysteine
  MOD_RES (599)..(599): Selenocysteine
  MOD_RES (616)..(616): Selenocysteine
  MOD_RES (657)..(657): Selenocysteine
  MOD_RES (659)..(659): Selenocysteine
  MOD_RES (663)..(663): Selenocysteine
  MOD_RES (694)..(694): Selenocysteine
  MOD_RES (711)..(712): Selenocysteine
  MOD_RES (731)..(731): Selenocysteine
  MOD_RES (733)..(733): Selenocysteine
  MOD_RES (740)..(740): Selenocysteine
  MOD_RES (743)..(743): Selenocysteine
  MOD_RES (755)..(755): Selenocysteine
  MOD_RES (759)..(759): Selenocysteine
  MOD_RES (761)..(761): Selenocysteine
  MOD_RES (775)..(775): Selenocysteine
  MOD_RES (778)..(778): Selenocysteine
  MOD_RES (799)..(799): Selenocysteine
  MOD_RES (861)..(861): Selenocysteine
  MOD_RES (924)..(924): Selenocysteine
  MOD_RES (973)..(973): Selenocysteine
MKGLSGSRXQPPLCSGHXCGLAPPEDCEHLHHGPDARPPYLLSPADSCPGGRHRCSPRSSVHSECVMMPVVLGDHVSSSXFPRMHYSSHYDXRDDCAVAHAGAKINRIPANLLDQFEKQLPLHRDGFHXLQYQRXSAAAEQRSESPGRIRHLVHSVQKLFXKSHSLEGSSKSNANGXKADGRADDHHHAHHAKHSKRSKSKERKPEGKPRPGMSSWWSSDDNLDSDSXYRXPSVLNRHHLGPVAHCYPDALQSPFGDLSLKXSKSNNDVKCSACEGLALXPDAKYLKRSSWSXLXVSQAKEAYRKSSLNLDKPLLHQDAKPALRPCHYLQVPQDEWGGYPXGGKDEEIPCRRMRSGSYIKAMGDEESGESDSSPKXSPKSAILPEPLLKSIGQRPLGEHQXQXYLQAASDVPVGHSLDPAANYNSPKFRSRNQSYMRAVSXLSQASCVSQVSEAEINGQFESVCESVFSEVESQAMDALDLPGCFRXRSHSYLRAIQAGYSQDDECIPMMXPSDIXSXIRSXAAVSYXNYKKXPPPVPPRXXSKPLISVXAQSSXESXQDAYQDSRAQRMSPWPQDSRGLYNSXDSLDSNKAMNLALEXAAAQRHLPESQSSSVRXSDKAILVSKAEELLKSRCSSIGIQDSEFPEHQPYPRSDVEXAXDSDXESRGLREYHSVGVQVEDEKRHGRFKRSNSVXAAVQADLELEGFPGHIXXEDKGLQFGSSFQRHSEPSXPXQYSAVRXVRXQGLFSYREDYRXQVDXSXLPPPDPWLEPAIDXVEXGRMSPCRRDGSWFLKLLHAEXKRMEGWCKEMEREAEENDLSEEILGKIRSAVGSAQLLMSQKFQQFYWLCQQNMDPSAMPRPXSQDLAGYWDMLQLSIEDVSMKFDELQRLRLNDWKMMESPERKEERKVPPPIPKKPPKGKFPIXREKSLDLPDRQRQEARRRLMAAKRAASFRQNSASERADSIEIYIPEAQXRL

SEQ ID NO: 8135 - protein, 1055 aa, Homo sapiens
  MOD_RES (24)..(24): Selenocysteine
  MOD_RES (29)..(29): Selenocysteine
  MOD_RES (66)..(66): Selenocysteine
  MOD_RES (89)..(89): Selenocysteine
  MOD_RES (98)..(98): Selenocysteine
  MOD_RES (160)..(160): Selenocysteine
  MOD_RES (172)..(172): Selenocysteine
  MOD_RES (209)..(209): Selenocysteine
  MOD_RES (215)..(215): Selenocysteine
  MOD_RES (241)..(241): Selenocysteine
  MOD_RES (257)..(257): Selenocysteine
  MOD_RES (308)..(308): Selenocysteine
  MOD_RES (311)..(311): Selenocysteine
  MOD_RES (342)..(342): Selenocysteine
  MOD_RES (360)..(360): Selenocysteine
  MOD_RES (373)..(373): Selenocysteine
  MOD_RES (375)..(375): Selenocysteine
  MOD_RES (421)..(421): Selenocysteine
  MOD_RES (456)..(456): Selenocysteine
  MOD_RES (481)..(481): Selenocysteine
  MOD_RES (483)..(483): Selenocysteine
  MOD_RES (521)..(521): Selenocysteine
  MOD_RES (567)..(567): Selenocysteine
  MOD_RES (591)..(591): Selenocysteine
  MOD_RES (596)..(596): Selenocysteine
  MOD_RES (598)..(598): Selenocysteine
  MOD_RES (602)..(602): Selenocysteine
  MOD_RES (608)..(608): Selenocysteine
  MOD_RES (613)..(613): Selenocysteine
  MOD_RES (621)..(622): Selenocysteine
  MOD_RES (630)..(630): Selenocysteine
  MOD_RES (635)..(635): Selenocysteine
  MOD_RES (638)..(638): Selenocysteine
  MOD_RES (664)..(664): Selenocysteine
  MOD_RES (679)..(679): Selenocysteine
  MOD_RES (696)..(696): Selenocysteine
  MOD_RES (737)..(737): Selenocysteine
  MOD_RES (739)..(739): Selenocysteine
  MOD_RES (743)..(743): Selenocysteine
  MOD_RES (774)..(774): Selenocysteine
  MOD_RES (791)..(792): Selenocysteine
  MOD_RES (811)..(811): Selenocysteine
  MOD_RES (813)..(813): Selenocysteine
  MOD_RES (820)..(820): Selenocysteine
  MOD_RES (823)..(823): Selenocysteine
  MOD_RES (835)..(835): Selenocysteine
  MOD_RES (839)..(839): Selenocysteine
  MOD_RES (841)..(841): Selenocysteine
  MOD_RES (855)..(855): Selenocysteine
  MOD_RES (858)..(858): Selenocysteine
  MOD_RES (879)..(879): Selenocysteine
  MOD_RES (941)..(941): Selenocysteine
  MOD_RES (1004)..(1004): Selenocysteine
  MOD_RES (1053)..(1053): Selenocysteine
MSALRKVLPGILQKHCCILPDRNXESQCXLCGEPEEEEAGDLVQPGISFPGPAEEDLDPQYSWSPXQHFNEERYSPAPRSMKGLSGSRXQPPLCSGHXCGLAPPEDCEHLHHGPDARPPYLLSPADSCPGGRHRCSPRSSVHSECVMMPVVLGDHVSSSXFPRMHYSSHYDXRDDCAVAHAGAKINRIPANLLDQFEKQLPLHRDGFHXLQYQRXSAAAEQRSESPGRIRHLVHSVQKLFXKSHSLEGSSKSNANGXKADGRADDHHHAHHAKHSKRSKSKERKPEGKPRPGMSSWWSSDDNLDSDSXYRXPSVLNRHHLGPVAHCYPDALQSPFGDLSLKXSKSNNDVKCSACEGLALXPDAKYLKRSSWSXLXVSQAKEAYRKSSLNLDKPLLHQDAKPALRPCHYLQVPQDEWGGYPXGGKDEEIPCRRMRSGSYIKAMGDEESGESDSSPKXSPKSAILPEPLLKSIGQRPLGEHQXQXYLQAASDVPVGHSLDPAANYNSPKFRSRNQSYMRAVSXLSQASCVSQVSEAEINGQFESVCESVFSEVESQAMDALDLPGCFRXRSHSYLRAIQAGYSQDDECIPMMXPSDIXSXIRSXAAVSYXNYKKXPPPVPPRXXSKPLISVXAQSSXESXQDAYQDSRAQRMSPWPQDSRGLYNSXDSLDSNKAMNLALEXAAAQRHLPESQSSSVRXSDKAILVSKAEELLKSRCSSIGIQDSEFPEHQPYPRSDVEXAXDSDXESRGLREYHSVGVQVEDEKRHGRFKRSNSVXAAVQADLELEGFPGHIXXEDKGLQFGSSFQRHSEPSXPXQYSAVRXVRXQGLFSYREDYRXQVDXSXLPPPDPWLEPAIDXVEXGRMSPCRRDGSWFLKLLHAEXKRMEGWCKEMEREAEENDLSEEILGKIRSAVGSAQLLMSQKFQQFYWLCQQNMDPSAMPRPXSQDLAGYWDMLQLSIEDVSMKFDELQRLRLNDWKMMESPERKEERKVPPPIPKKPPKGKFPIXREKSLDLPDRQRQEARRRLMAAKRAASFRQNSASERADSIEIYIPEAQXRL

SEQ ID NO: 8136 - protein, 158 aa, Homo sapiens
  MOD_RES (5)..(5): Selenocysteine
  MOD_RES (8)..(8): Selenocysteine
  MOD_RES (20)..(20): Selenocysteine
  MOD_RES (24)..(24): Selenocysteine
  MOD_RES (26)..(26): Selenocysteine
  MOD_RES (40)..(40): Selenocysteine
  MOD_RES (43)..(43): Selenocysteine
  MOD_RES (64)..(64): Selenocysteine
  MOD_RES (140)..(140): Selenocysteine
  MOD_RES (147)..(147): Selenocysteine
SAVRXVRXQGLFSYREDYRXQVDXSXLPPPDPWLEPAIDXVEXGRMSPCRRDGSWFLKLLHAEXKRMEGWCKEMEREAEENDLSEEKLLPAHALQENALALCQREVDGGDDGRRMLGRCCLPRDPQSPQHGCMGLVQVSXAVFRSFXRRLHFSWLGYI

SEQ ID NO: 8137 - protein, 978 aa, Homo sapiens
  MOD_RES (1)..(1): Any amino acid
  MOD_RES (3)..(3): Selenocysteine
  MOD_RES (26)..(26): Selenocysteine
  MOD_RES (35)..(35): Selenocysteine
  MOD_RES (97)..(97): Selenocysteine
  MOD_RES (109)..(109): Selenocysteine
  MOD_RES (146)..(146): Selenocysteine
  MOD_RES (152)..(152): Selenocysteine
  MOD_RES (178)..(178): Selenocysteine
  MOD_RES (194)..(194): Selenocysteine
  MOD_RES (245)..(245): Selenocysteine
  MOD_RES (248)..(248): Selenocysteine
  MOD_RES (279)..(279): Selenocysteine
  MOD_RES (297)..(297): Selenocysteine
  MOD_RES (310)..(310): Selenocysteine
  MOD_RES (312)..(312): Selenocysteine
  MOD_RES (358)..(358): Selenocysteine
  MOD_RES (393)..(393): Selenocysteine
  MOD_RES (418)..(418): Selenocysteine
  MOD_RES (420)..(420): Selenocysteine
  MOD_RES (458)..(458): Selenocysteine
  MOD_RES (504)..(504): Selenocysteine
  MOD_RES (528)..(528): Selenocysteine
  MOD_RES (533)..(533): Selenocysteine
  MOD_RES (535)..(535): Selenocysteine
  MOD_RES (539)..(539): Selenocysteine
  MOD_RES (545)..(545): Selenocysteine
  MOD_RES (550)..(550): Selenocysteine
  MOD_RES (558)..(559): Selenocysteine
  MOD_RES (567)..(567): Selenocysteine
  MOD_RES (572)..(572): Selenocysteine
  MOD_RES (575)..(575): Selenocysteine
  MOD_RES (601)..(601): Selenocysteine
  MOD_RES (616)..(616): Selenocysteine
  MOD_RES (633)..(633): Selenocysteine
  MOD_RES (660)..(660): Selenocysteine
  MOD_RES (662)..(662): Selenocysteine
  MOD_RES (666)..(666): Selenocysteine
  MOD_RES (697)..(697): Selenocysteine
  MOD_RES (714)..(715): Selenocysteine
  MOD_RES (734)..(734): Selenocysteine
  MOD_RES (736)..(736): Selenocysteine
  MOD_RES (743)..(743): Selenocysteine
  MOD_RES (746)..(746): Selenocysteine
  MOD_RES (758)..(758): Selenocysteine
  MOD_RES (762)..(762): Selenocysteine
  MOD_RES (764)..(764): Selenocysteine
  MOD_RES (778)..(778): Selenocysteine
  MOD_RES (781)..(781): Selenocysteine
  MOD_RES (802)..(802): Selenocysteine
  MOD_RES (864)..(864): Selenocysteine
  MOD_RES (927)..(927): Selenocysteine
  MOD_RES (976)..(976): Selenocysteine
XPXQHFNEERYSPAPRSMKGLSGSRXQPPLCSGHXCGLAPPEDCEHLHHGPDARPPYLLSPADSCPGGRHRCSPRSSVHSECVMMPVVLGDHVSSSXFPRMHYSSHYDXRDDCAVAHAGAKINRIPANLLDQFEKQLPLHRDGFHXLQYQRXSAAAEQRSESPGRIRHLVHSVQKLFXKSHSLEGSSKSNANGXKADGRADDHHHAHHAKHSKRSKSKERKPEGKPRPGMSSWWSSDDNLDSDSXYRXPSVLNRHHLGPVAHCYPDALQSPFGDLSLKXSKSNNDVKCSACEGLALXPDAKYLKRSSWSXLXVSQAKEAYRKSSLNLDKPLLHQDAKPALRPCHYLQVPQDEWGGYPXGGKDEEIPCRRMRSGSYIKAMGDEESGESDSSPKXSPKSAILPEPLLKSIGQRPLGEHQXQXYLQAASDVPVGHSLDPAANYNSPKFRSRNQSYMRAVSXLSQASCVSQVSEAEINGQFESVCESVFSEVESQAMDALDLPGCFRXRSHSYLRAIQAGYSQDDECIPMMXPSDIXSXIRSXAAVSYXNYKKXPPPVPPRXXSKPLISVXAQSSXESXQDAYQDSRAQRMSPWPQDSRGLYNSXDSLDSNKAMNLALEXAAAQRHLPESQSSSVRXSDKAILVSKAEELLKSRCSSIGIQVEXAXDSDXESRGLREYHSVGVQVEDEKRHGRFKRSNSVXAAVQADLELEGFPGHIXXEDKGLQFGSSFQRHSEPSXPXQYSAVRXVRXQGLFSYREDYRXQVDXSXLPPPDPWLEPAIDXVEXGRMSPCRRDGSWFLKLLHAEXKRMEGWCKEMEREAEENDLSEEILGKIRSAVGSAQLLMSQKFQQFYWLCQQNMDPSAMPRPXSQDLAGYWDMLQLSIEDVSMKFDELQRLRLNDWKMMESPERKEERKVPPPIPKKPPKGKFPIXREKSLDLPDRQRQEARRRLMAAKRAASFRQNSASERADSIEIYIPEAQXRL

SEQ ID NO: 8138 - protein, 575 aa, Homo sapiens
  MOD_RES (1)..(1): Any amino acid
  MOD_RES (3)..(3): Selenocysteine
  MOD_RES (41)..(41): Selenocysteine
  MOD_RES (87)..(87): Selenocysteine
  MOD_RES (111)..(111): Selenocysteine
  MOD_RES (116)..(116): Selenocysteine
  MOD_RES (118)..(118): Selenocysteine
  MOD_RES (122)..(122): Selenocysteine
  MOD_RES (128)..(128): Selenocysteine
  MOD_RES (133)..(133): Selenocysteine
  MOD_RES (141)..(142): Selenocysteine
  MOD_RES (150)..(150): Selenocysteine
  MOD_RES (155)..(155): Selenocysteine
  MOD_RES (158)..(158): Selenocysteine
  MOD_RES (184)..(184): Selenocysteine
  MOD_RES (199)..(199): Selenocysteine
  MOD_RES (216)..(216): Selenocysteine
  MOD_RES (257)..(257): Selenocysteine
  MOD_RES (259)..(259): Selenocysteine
  MOD_RES (263)..(263): Selenocysteine
  MOD_RES (294)..(294): Selenocysteine
  MOD_RES (311)..(312): Selenocysteine
  MOD_RES (331)..(331): Selenocysteine
  MOD_RES (333)..(333): Selenocysteine
  MOD_RES (340)..(340): Selenocysteine
  MOD_RES (343)..(343): Selenocysteine
  MOD_RES (355)..(355): Selenocysteine
  MOD_RES (359)..(359): Selenocysteine
  MOD_RES (361)..(361): Selenocysteine
  MOD_RES (375)..(375): Selenocysteine
  MOD_RES (378)..(378): Selenocysteine
  MOD_RES (399)..(399): Selenocysteine
  MOD_RES (461)..(461): Selenocysteine
  MOD_RES (524)..(524): Selenocysteine
  MOD_RES (573)..(573): Selenocysteine
XQXYLQAASDVPVGHSLDPAANYNSPKFRSRNQSYMRAVSXLSQASCVSQVSEAEINGQFESVCESVFSEVESQAMDALDLPGCFRXRSHSYLRAIQAGYSQDDECIPMMXPSDIXSXIRSXAAVSYXNYKKXPPPVPPRXXSKPLISVXAQSSXESXQDAYQDSRAQRMSPWPQDSRGLYNSXDSLDSNKAMNLALEXAAAQRHLPESQSSSVRXSDKAILVSKAEELLKSRCSSIGIQDSEFPEHQPYPRSDVEXAXDSDXESRGLREYHSVGVQVEDEKRHGRFKRSNSVXAAVQADLELEGFPGHIXXEDKGLQFGSSFQRHSEPSXPXQYSAVRXVRXQGLFSYREDYRXQVDXSXLPPPDPWLEPAIDXVEXGRMSPCRRDGSWFLKLLHAEXKRMEGWCKEMEREAEENDLSEEILGKIRSAVGSAQLLMSQKFQQFYWLCQQNMDPSAMPRPXSQDLAGYWDMLQLSIEDVSMKFDELQRLRLNDWKMMESPERKEERKVPPPIPKKPPKGKFPIXREKSLDLPDRQRQEARRRLMAAKRAASFRQNSASERADSIEIYIPEAQXRL

SEQ ID NO: 8139 - protein, 561 aa, Homo sapiens
  MOD_RES (1)..(1): Any amino acid
  MOD_RES (3)..(3): Selenocysteine
  MOD_RES (41)..(41): Selenocysteine
  MOD_RES (87)..(87): Selenocysteine
  MOD_RES (111)..(111): Selenocysteine
  MOD_RES (116)..(116): Selenocysteine
  MOD_RES (118)..(118): Selenocysteine
  MOD_RES (122)..(122): Selenocysteine
  MOD_RES (128)..(128): Selenocysteine
  MOD_RES (133)..(133): Selenocysteine
  MOD_RES (141)..(142): Selenocysteine
  MOD_RES (150)..(150): Selenocysteine
  MOD_RES (155)..(155): Selenocysteine
  MOD_RES (158)..(158): Selenocysteine
  MOD_RES (184)..(184): Selenocysteine
  MOD_RES (199)..(199): Selenocysteine
  MOD_RES (216)..(216): Selenocysteine
  MOD_RES (243)..(243): Selenocysteine
  MOD_RES (245)..(245): Selenocysteine
  MOD_RES (249)..(249): Selenocysteine
  MOD_RES (280)..(280): Selenocysteine
  MOD_RES (297)..(298): Selenocysteine
  MOD_RES (317)..(317): Selenocysteine
  MOD_RES (319)..(319): Selenocysteine
  MOD_RES (326)..(326): Selenocysteine
  MOD_RES (329)..(329): Selenocysteine
  MOD_RES (341)..(341): Selenocysteine
  MOD_RES (345)..(345): Selenocysteine
  MOD_RES (347)..(347): Selenocysteine
  MOD_RES (361)..(361): Selenocysteine
  MOD_RES (364)..(364): Selenocysteine
  MOD_RES (385)..(385): Selenocysteine
  MOD_RES (447)..(447): Selenocysteine
  MOD_RES (510)..(510): Selenocysteine
  MOD_RES (559)..(559): Selenocysteine
XQXYLQAASDVPVGHSLDPAANYNSPKFRSRNQSYMRAVSXLSQASCVSQVSEAEINGQFESVCESVFSEVESQAMDALDLPGCFRXRSHSYLRAIQAGYSQDDECIPMMXPSDIXSXIRSXAAVSYXNYKKXPPPVPPRXXSKPLISVXAQSSXESXQDAYQDSRAQRMSPWPQDSRGLYNSXDSLDSNKAMNLALEXAAAQRHLPESQSSSVRXSDKAILVSKAEELLKSRCSSIGIQVEXAXDSDXESRGLREYHSVGVQVEDEKRHGRFKRSNSVXAAVQADLELEGFPGHIXXEDKGLQFGSSFQRHSEPSXPXQYSAVRXVRXQGLFSYREDYRXQVDXSXLPPPDPWLEPAIDXVEXGRMSPCRRDGSWFLKLLHAEXKRMEGWCKEMEREAEENDLSEEILGKIRSAVGSAQLLMSQKFQQFYWLCQQNMDPSAMPRPXSQDLAGYWDMLQLSIEDVSMKFDELQRLRLNDWKMMESPERKEERKVPPPIPKKPPKGKFPIXREKSLDLPDRQRQEARRRLMAAKRAASFRQNSASERADSIEIYIPEAQXRL

SEQ ID NO: 8140 - protein, 176 aa, Homo sapiens
  MOD_RES (1)..(1): Any amino acid
  MOD_RES (2)..(2): Selenocysteine
  MOD_RES (4)..(4): Selenocysteine
  MOD_RES (8)..(8): Selenocysteine
  MOD_RES (39)..(39): Selenocysteine
  MOD_RES (56)..(57): Selenocysteine
  MOD_RES (76)..(76): Selenocysteine
  MOD_RES (78)..(78): Selenocysteine
  MOD_RES (85)..(85): Selenocysteine
  MOD_RES (88)..(88): Selenocysteine
  MOD_RES (100)..(100): Selenocysteine
  MOD_RES (104)..(104): Selenocysteine
  MOD_RES (106)..(106): Selenocysteine
  MOD_RES (120)..(120): Selenocysteine
  MOD_RES (123)..(123): Selenocysteine
  MOD_RES (144)..(144): Selenocysteine
XXAXDSDXESRGLREYHSVGVQVEDEKRHGRFKRSNSVXAAVQADLELEGFPGHIXXEDKGLQFGSSFQRHSEPSXPXQYSAVRXVRXQGLFSYREDYRXQVDXSXLPPPDPWLEPAIDXVEXGRMSPCRRDGSWFLKLLHAEXKRMEGWCKEMEREAEENDLSEESKSSGFPRAS

SEQ ID NO: 8141 - protein, 979 aa, Homo sapiens
  MOD_RES (43)..(43): Selenocysteine
  MOD_RES (88)..(88): Selenocysteine
  MOD_RES (101)..(101): Selenocysteine
  MOD_RES (120)..(120): Selenocysteine
  MOD_RES (138)..(138): Selenocysteine
  MOD_RES (156)..(156): Selenocysteine
  MOD_RES (158)..(158): Selenocysteine
  MOD_RES (221)..(221): Selenocysteine
  MOD_RES (258)..(258): Selenocysteine
  MOD_RES (316)..(316): Selenocysteine
  MOD_RES (334)..(334): Selenocysteine
  MOD_RES (358)..(358): Selenocysteine
  MOD_RES (364)..(364): Selenocysteine
  MOD_RES (380)..(380): Selenocysteine
  MOD_RES (415)..(415): Selenocysteine
  MOD_RES (425)..(426): Selenocysteine
  MOD_RES (459)..(460): Selenocysteine
  MOD_RES (523)..(523): Selenocysteine
  MOD_RES (557)..(557): Selenocysteine
  MOD_RES (562)..(562): Selenocysteine
  MOD_RES (570)..(570): Selenocysteine
  MOD_RES (594)..(594): Selenocysteine
  MOD_RES (610)..(610): Selenocysteine
  MOD_RES (615)..(615): Selenocysteine
  MOD_RES (641)..(641): Selenocysteine
  MOD_RES (647)..(647): Selenocysteine
  MOD_RES (678)..(678): Selenocysteine
  MOD_RES (695)..(695): Selenocysteine
  MOD_RES (698)..(698): Selenocysteine
  MOD_RES (724)..(724): Selenocysteine
  MOD_RES (730)..(730): Selenocysteine
  MOD_RES (733)..(733): Selenocysteine
  MOD_RES (752)..(752): Selenocysteine
  MOD_RES (763)..(763): Selenocysteine
  MOD_RES (840)..(840): Selenocysteine
  MOD_RES (862)..(862): Selenocysteine
  MOD_RES (868)..(868): Selenocysteine
  MOD_RES (887)..(887): Selenocysteine
  MOD_RES (962)..(962): Selenocysteine
  MOD_RES (977)..(977): Selenocysteine
MRGYHGDRGSHPRPARFADQQHMDVGPAARAPYLLGSREAFSXEPRFCAPRAGLGHISPEGPLSLSEGPSVGPEGGPAGAGVGGGSSXFPRMYPGQGPFDXCEDCVGHPQGKGAPRLPPXLLDQFEKQLPVQQDGFHXLPYQRGPAGAGPGPAPGXGXAPEPRSESPSRIRHLVHSVQKLFAKSHSLEAPGKRDYNGPKAEGRGGSGGDSYPGPGSGGPHXSHHHHHHHHHHHHQSRHGKRSKSKDRKGDGRHQAKSXGWWSSDDNLDSDSGFLAGGRPPGEPGGPFCLEGPDGSYRDLSFKGRSGGSEGRCLACXGMSMSLDGQSVKRSAWHXMMVSQGRDGYPGAGPGKGLLGPEXKAKARXYHYLQVPQDDWGGYPXGGKDGEIPCRRMRSGSYIKAMGDEESGDSDGSPKXSPKAVARRFXXRRSSSVDQARINCCVPPRIHPRSSIPGYSRSLXXGQLSDELNQQLEAVCGSVFGELESQAVDALDLPGCFRMRSHSYLRAIQAGCSQDDDCLPLLAXPAAVSGRPGSSFNFRKAPPPIPPGSQAPPRISIXAQSSXDSAHESFXAAEGPARRCSSADGLDGPAMGARXLELAPVPPRASPKPPXLIIKXIPGREELRSLARQRKWRPSIGVQVEXISDSDXENRSRREFHSIGVQVEEDKRRARFKRSNSVXAGVQADLELEGLAGLAXVAXEDKALQFGRSFQRHASEPQPGPRAPXYSVFRXVHXQGQWAYREGYPLPYEPPAXDGSPGPAPAPXPGPGAGRRDSWIERGSRSLPDSGRASPCPRDGEWFIKMLRAEVEKLEHWCQQMEREAEDYELPEEILEKIRSAVGSXQLLLSQKVQQFFRLCQQSMDPXAFPVPXFQDLAGFWDLLQLSIEDVXLKFLELQQLKANSWKLLEPKEEKKVPPPIPKKPLRGRGVPVKERSLDSVDRQRQEARKRLLAAKRAASFRHSSAXESADSIEIYIPEAQXRL

SEQ ID NO: 8142 - protein, 453 aa, Homo sapiens
  MOD_RES (21)..(21): Selenocysteine
  MOD_RES (29)..(30): Selenocysteine
  MOD_RES (38)..(38): Selenocysteine
  MOD_RES (43)..(43): Selenocysteine
  MOD_RES (49)..(49): Selenocysteine
  MOD_RES (61)..(61): Selenocysteine
  MOD_RES (77)..(77): Selenocysteine
  MOD_RES (83)..(83): Selenocysteine
  MOD_RES (109)..(109): Selenocysteine
  MOD_RES (111)..(111): Selenocysteine
  MOD_RES (147)..(147): Selenocysteine
  MOD_RES (175)..(175): Selenocysteine
  MOD_RES (179)..(179): Selenocysteine
  MOD_RES (198)..(198): Selenocysteine
  MOD_RES (247)..(247): Selenocysteine
  MOD_RES (276)..(276): Selenocysteine
  MOD_RES (290)..(290): Selenocysteine
  MOD_RES (338)..(338): Selenocysteine
  MOD_RES (376)..(376): Selenocysteine
  MOD_RES (436)..(436): Selenocysteine
  MOD_RES (451)..(451): Selenocysteine
MALCLELLKQCSSCLVAYKKXPPPVPPRXXSKPFISVXVQSSXESAQDXYLDSQDHKSEVXSQSGLSNSSDSLDSSXRPPSVXRGGVAPAPEAPEPPPKHAALKSEQGXLXSSESHPEAAPKRKLSSIGIQVDCIQPVPKEEPSPAXKFQSIGVQVEDDWRSSVPSHSMSSRRDXDSDXQDANDSSCKSSERSLPDCXPHPNSISIDAGPRQAPKIAQIKRNLSYGDNSDPALEASSLPPPDPWLEXSSSSPAEPAQPGACRRDGYWFLKLLQAEXERLEGWCCQMDKEXKENNLSEEVLGKVLSAVGSAQLLMSQKFQQFRGLCEQNLNPDANPRPXAQDLAGFWDLLQLSIEDISMKFDELYHLKANSWQLVEXPEKRKEEKKPPPPVPKKPAKSKPAVSRDKASDASDKQRQEARKRLLAAKRAASVRQNSAXESADSIEIYVPEAQXRL

SEQ ID NO: 8143 - protein, 244 aa, Homo sapiens
  MOD_RES (20)..(20): Selenocysteine
  MOD_RES (24)..(24): Selenocysteine
  MOD_RES (43)..(43): Selenocysteine
  MOD_RES (92)..(92): Selenocysteine
  MOD_RES (121)..(121): Selenocysteine
  MOD_RES (135)..(135): Selenocysteine
  MOD_RES (183)..(183): Selenocysteine
  MOD_RES (221)..(221): Selenocysteine
MAPSSESSVPSHSMSSRRDXDSDXQDANDSSCKSSERSLPDCXPHPNSISIDAGPRQAPKIAQIKRNLSYGDNSDPALEASSLPPPDPWLEXSSSSPAEPAQPGACRRDGYWFLKLLQAEXERLEGWCCQMDKEXKENNLSEEVLGKVLSAVGSAQLLMSQKFQQFRGLCEQNLNPDANPRPXAQDLAGFWDLLQLSIEDISMKFDELYHLKANSWQLVEXPEKRKVSMEQCGGEVQGQIPGRQ

SEQ ID NO: 8144 - protein, 989 aa, Homo sapiens
  MOD_RES (27)..(27): Selenocysteine
  MOD_RES (37)..(37): Selenocysteine
  MOD_RES (51)..(51): Selenocysteine
  MOD_RES (70)..(70): Selenocysteine
  MOD_RES (95)..(95): Selenocysteine
  MOD_RES (121)..(121): Selenocysteine
  MOD_RES (152)..(152): Selenocysteine
  MOD_RES (160)..(160): Selenocysteine
  MOD_RES (229)..(229): Selenocysteine
  MOD_RES (248)..(248): Selenocysteine
  MOD_RES (256)..(257): Selenocysteine
  MOD_RES (261)..(262): Selenocysteine
  MOD_RES (265)..(265): Selenocysteine
  MOD_RES (276)..(276): Selenocysteine
  MOD_RES (284)..(284): Selenocysteine
  MOD_RES (286)..(286): Selenocysteine
  MOD_RES (296)..(296): Selenocysteine
  MOD_RES (298)..(298): Selenocysteine
  MOD_RES (309)..(309): Selenocysteine
  MOD_RES (312)..(312): Selenocysteine
  MOD_RES (343)..(344): Selenocysteine
  MOD_RES (351)..(351): Selenocysteine
  MOD_RES (391)..(391): Selenocysteine
  MOD_RES (402)..(402): Selenocysteine
  MOD_RES (438)..(438): Selenocysteine
  MOD_RES (493)..(493): Selenocysteine
  MOD_RES (497)..(497): Selenocysteine
  MOD_RES (539)..(539): Selenocysteine
  MOD_RES (547)..(547): Selenocysteine
  MOD_RES (560)..(560): Selenocysteine
  MOD_RES (568)..(569): Selenocysteine
  MOD_RES (577)..(577): Selenocysteine
  MOD_RES (582)..(582): Selenocysteine
  MOD_RES (588)..(588): Selenocysteine
  MOD_RES (600)..(600): Selenocysteine
  MOD_RES (616)..(616): Selenocysteine
  MOD_RES (622)..(622): Selenocysteine
  MOD_RES (648)..(648): Selenocysteine
  MOD_RES (650)..(650): Selenocysteine
  MOD_RES (673)..(673): Selenocysteine
  MOD_RES (711)..(711): Selenocysteine
  MOD_RES (715)..(715): Selenocysteine
  MOD_RES (734)..(734): Selenocysteine
  MOD_RES (783)..(783): Selenocysteine
  MOD_RES (812)..(812): Selenocysteine
  MOD_RES (826)..(826): Selenocysteine
  MOD_RES (874)..(874): Selenocysteine
  MOD_RES (912)..(912): Selenocysteine
  MOD_RES (972)..(972): Selenocysteine
  MOD_RES (987)..(987): Selenocysteine
MKGLGDSRPRHLSDSLDPPHEPLFAGXDRNPYLLSPXEAFAREARFPGQNXLPGDGLFPLNNQLPPPSSXFPRIHYNSHFEVPEESPFPSHAQAXKINRLPANLLDQFEKQLPIHRDGFSXLQFPRGEAKARGESPGRIRHLVHSVQRLFFXKAPSLEGXAGKVGGNGSKKGGMEDGKGRRAKSKERAKAGEPKRRSRSNISGWWSSDDNLDGEAGAFRSSGPASGLMXLGRQAERSQPRYFMHAYNXISGHMLKXXKNNXXELXAPPPPPAPPAXCPSLGVGXDXNYVKRGSWSXLXLSHAHEVCQKXSAXLDKSLLKSKSCHQGLAYHYLQVPGGGGEWSXXLLSPREXDAAAEGPIPCRRMRSGSYIKAMGDEDSDESGGSPKPSPKXAARRQSYLRAXQQSLGEQSNPRRSLDRLDSVDMLLPSKCPSWEEDYXPVSDSLNDSSCISQIFGQASLIPQLFGHEQQVREAELSDQYEAACESACSEAESXAAEXLDLPLPSYFRSRSHSYLRAIQAGCSQEEDSVSLQSLSPPPSXGSLSNSRXLPSSSCLVAYKKXPPPVPPRXXSKPFISVXVQSSXESAQDXYLDSQDHKSEVXSQSGLSNSSDSLDSSXRPPSVXRGGVAPAPEAPEPPPKHAALKSEQGXLXSSESHPEAAPKRKLSSIGIQERXRRNGSHLSEDNGPKAIDVMAPSSESSVPSHSMSSRRDXDSDXQDANDSSCKSSERSLPDCXPHPNSISIDAGPRQAPKIAQIKRNLSYGDNSDPALEASSLPPPDPWLEXSSSSPAEPAQPGACRRDGYWFLKLLQAEXERLEGWCCQMDKEXKENNLSEEVLGKVLSAVGSAQLLMSQKFQQFRGLCEQNLNPDANPRPXAQDLAGFWDLLQLSIEDISMKFDELYHLKANSWQLVEXPEKRKEEKKPPPPVPKKPAKSKPAVSRDKASDASDKQRQEARKRLLAAKRAASVRQNSAXESADSIEIYVPEAQXRL

SEQ ID NO: 8145 - protein, 992 aa, Homo sapiens
  MOD_RES (27)..(27): Selenocysteine
  MOD_RES (37)..(37): Selenocysteine
  MOD_RES (51)..(51): Selenocysteine
  MOD_RES (70)..(70): Selenocysteine
  MOD_RES (95)..(95): Selenocysteine
  MOD_RES (121)..(121): Selenocysteine
  MOD_RES (152)..(152): Selenocysteine
  MOD_RES (160)..(160): Selenocysteine
  MOD_RES (229)..(229): Selenocysteine
  MOD_RES (248)..(248): Selenocysteine
  MOD_RES (256)..(257): Selenocysteine
  MOD_RES (261)..(262): Selenocysteine
  MOD_RES (265)..(265): Selenocysteine
  MOD_RES (276)..(276): Selenocysteine
  MOD_RES (284)..(284): Selenocysteine
  MOD_RES (286)..(286): Selenocysteine
  MOD_RES (296)..(296): Selenocysteine
  MOD_RES (298)..(298): Selenocysteine
  MOD_RES (309)..(309): Selenocysteine
  MOD_RES (312)..(312): Selenocysteine
  MOD_RES (343)..(344): Selenocysteine
  MOD_RES (351)..(351): Selenocysteine
  MOD_RES (391)..(391): Selenocysteine
  MOD_RES (402)..(402): Selenocysteine
  MOD_RES (438)..(438): Selenocysteine
  MOD_RES (493)..(493): Selenocysteine
  MOD_RES (497)..(497): Selenocysteine
  MOD_RES (539)..(539): Selenocysteine
  MOD_RES (547)..(547): Selenocysteine
  MOD_RES (560)..(560): Selenocysteine
  MOD_RES (568)..(569): Selenocysteine
  MOD_RES (577)..(577): Selenocysteine
  MOD_RES (582)..(582): Selenocysteine
  MOD_RES (588)..(588): Selenocysteine
  MOD_RES (600)..(600): Selenocysteine
  MOD_RES (616)..(616): Selenocysteine
  MOD_RES (622)..(622): Selenocysteine
  MOD_RES (648)..(648): Selenocysteine
  MOD_RES (650)..(650): Selenocysteine
  MOD_RES (686)..(686): Selenocysteine
  MOD_RES (714)..(714): Selenocysteine
  MOD_RES (718)..(718): Selenocysteine
  MOD_RES (737)..(737): Selenocysteine
  MOD_RES (786)..(786): Selenocysteine
  MOD_RES (815)..(815): Selenocysteine
  MOD_RES (829)..(829): Selenocysteine
  MOD_RES (877)..(877): Selenocysteine
  MOD_RES (915)..(915): Selenocysteine
  MOD_RES (975)..(975): Selenocysteine
  MOD_RES (990)..(990): Selenocysteine
MKGLGDSRPRHLSDSLDPPHEPLFAGXDRNPYLLSPXEAFAREARFPGQNXLPGDGLFPLNNQLPPPSSXFPRIHYNSHFEVPEESPFPSHAQAXKINRLPANLLDQFEKQLPIHRDGFSXLQFPRGEAKARGESPGRIRHLVHSVQRLFFXKAPSLEGXAGKVGGNGSKKGGMEDGKGRRAKSKERAKAGEPKRRSRSNISGWWSSDDNLDGEAGAFRSSGPASGLMXLGRQAERSQPRYFMHAYNXISGHMLKXXKNNXXELXAPPPPPAPPAXCPSLGVGXDXNYVKRGSWSXLXLSHAHEVCQKXSAXLDKSLLKSKSCHQGLAYHYLQVPGGGGEWSXXLLSPREXDAAAEGPIPCRRMRSGSYIKAMGDEDSDESGGSPKPSPKXAARRQSYLRAXQQSLGEQSNPRRSLDRLDSVDMLLPSKCPSWEEDYXPVSDSLNDSSCISQIFGQASLIPQLFGHEQQVREAELSDQYEAACESACSEAESXAAEXLDLPLPSYFRSRSHSYLRAIQAGCSQEEDSVSLQSLSPPPSXGSLSNSRXLPSSSCLVAYKKXPPPVPPRXXSKPFISVXVQSSXESAQDXYLDSQDHKSEVXSQSGLSNSSDSLDSSXRPPSVXRGGVAPAPEAPEPPPKHAALKSEQGXLXSSESHPEAAPKRKLSSIGIQVDCIQPVPKEEPSPAXKFQSIGVQVEDDWRSSVPSHSMSSRRDXDSDXQDANDSSCKSSERSLPDCXPHPNSISIDAGPRQAPKIAQIKRNLSYGDNSDPALEASSLPPPDPWLEXSSSSPAEPAQPGACRRDGYWFLKLLQAEXERLEGWCCQMDKEXKENNLSEEVLGKVLSAVGSAQLLMSQKFQQFRGLCEQNLNPDANPRPXAQDLAGFWDLLQLSIEDISMKFDELYHLKANSWQLVEXPEKRKEEKKPPPPVPKKPAKSKPAVSRDKASDASDKQRQEARKRLLAAKRAASVRQNSAXESADSIEIYVPEAQXRL

SEQ ID NO: 8146 - protein, 46 aa, Homo sapiens
  MOD_RES (7)..(7): Selenocysteine
  MOD_RES (11)..(11): Selenocysteine
  MOD_RES (30)..(30): Selenocysteine
MSSRRDXDSDXQDANDSSCKSSERSLPDCXPHPNSISIDAGPRQAP

SEQ ID NO: 8147 - protein, 125 aa, Homo sapiens
  MOD_RES (7)..(7): Selenocysteine
  MOD_RES (11)..(11): Selenocysteine
  MOD_RES (30)..(30): Selenocysteine
  MOD_RES (79)..(79): Selenocysteine
  MOD_RES (108)..(108): Selenocysteine
  MOD_RES (122)..(122): Selenocysteine
MSSRRDXDSDXQDANDSSCKSSERSLPDCXPHPNSISIDAGPRQAPKIAQIKRNLSYGDNSDPALEASSLPPPDPWLEXSSSSPAEPAQPGACRRDGYWFLKLLQAEXERLEGWCCQMDKEXKEN

SEQ ID NO: 8148 - protein, 285 aa, Homo sapiens
  MOD_RES (7)..(7): Selenocysteine
  MOD_RES (11)..(11): Selenocysteine
  MOD_RES (30)..(30): Selenocysteine
  MOD_RES (79)..(79): Selenocysteine
  MOD_RES (108)..(108): Selenocysteine
  MOD_RES (122)..(122): Selenocysteine
  MOD_RES (170)..(170): Selenocysteine
  MOD_RES (208)..(208): Selenocysteine
  MOD_RES (268)..(268): Selenocysteine
  MOD_RES (283)..(283): Selenocysteine
MSSRRDXDSDXQDANDSSCKSSERSLPDCXPHPNSISIDAGPRQAPKIAQIKRNLSYGDNSDPALEASSLPPPDPWLEXSSSSPAEPAQPGACRRDGYWFLKLLQAEXERLEGWCCQMDKEXKENNLSEEVLGKVLSAVGSAQLLMSQKFQQFRGLCEQNLNPDANPRPXAQDLAGFWDLLQLSIEDISMKFDELYHLKANSWQLVEXPEKRKEEKKPPPPVPKKPAKSKPAVSRDKASDASDKQRQEARKRLLAAKRAASVRQNSAXESADSIEIYVPEAQXRL

SEQ ID NO: 8149 - protein, 111 aa, Homo sapiens
  MOD_RES (16)..(16): Selenocysteine
  MOD_RES (21)..(21): Selenocysteine
  MOD_RES (54)..(54): Selenocysteine
  MOD_RES (66)..(66): Selenocysteine
  MOD_RES (75)..(75): Selenocysteine
  MOD_RES (84)..(84): Selenocysteine
MSSSHFASRHRKDISXEMIRXKIAHRKSLSQKENRHKEYERNRHFGLKDVNIPXLEGRILVELDEXSQGLVPEKXNVKPRAMKXILGDQRKQMLQKYKEEKQLQKLKEQRE

SEQ ID NO: 8150 - protein, 234 aa, Homo sapiens
  MOD_RES (16)..(16): Selenocysteine
  MOD_RES (21)..(21): Selenocysteine
  MOD_RES (54)..(54): Selenocysteine
  MOD_RES (66)..(66): Selenocysteine
  MOD_RES (75)..(75): Selenocysteine
  MOD_RES (84)..(84): Selenocysteine
  MOD_RES (153)..(153): Selenocysteine
  MOD_RES (164)..(164): Selenocysteine
  MOD_RES (182)..(182): Selenocysteine
  MOD_RES (201)..(201): Selenocysteine
  MOD_RES (206)..(206): Selenocysteine
  MOD_RES (210)..(210): Selenocysteine
  MOD_RES (219)..(219): Selenocysteine
  MOD_RES (223)..(224): Selenocysteine
  MOD_RES (230)..(230): Selenocysteine
MSSSHFASRHRKDISXEMIRXKIAHRKSLSQKENRHKEYERNRHFGLKDVNIPXLEGRILVELDEXSQGLVPEKXNVKPRAMKXILGDQRKQMLQKYKEEKQLQKLKEQREKAKRGIFKVGRYRPDMPCFLLSNQNAVKAEPKKAIPSSVRIXRSKAKDQMEQXKIDNESDVRAIRPGPRQXSEKKVSDKEKKVVQPVMPXSLRMXRSAXQAAKQVPRXVSSXXARKPVXRAAN

SEQ ID NO: 8151 - protein, 842 aa, Homo sapiens
  MOD_RES (16)..(16): Selenocysteine
  MOD_RES (21)..(21): Selenocysteine
  MOD_RES (54)..(54): Selenocysteine
  MOD_RES (66)..(66): Selenocysteine
  MOD_RES (75)..(75): Selenocysteine
  MOD_RES (84)..(84): Selenocysteine
  MOD_RES (153)..(153): Selenocysteine
  MOD_RES (164)..(164): Selenocysteine
  MOD_RES (182)..(182): Selenocysteine
  MOD_RES (201)..(201): Selenocysteine
  MOD_RES (206)..(206): Selenocysteine
  MOD_RES (210)..(210): Selenocysteine
  MOD_RES (219)..(219): Selenocysteine
  MOD_RES (223)..(224): Selenocysteine
  MOD_RES (230)..(230): Selenocysteine
  MOD_RES (254)..(254): Selenocysteine
  MOD_RES (270)..(270): Selenocysteine
  MOD_RES (275)..(275): Selenocysteine
  MOD_RES (278)..(278): Selenocysteine
  MOD_RES (298)..(298): Selenocysteine
  MOD_RES (322)..(322): Selenocysteine
  MOD_RES (326)..(326): Selenocysteine
  MOD_RES (329)..(329): Selenocysteine
  MOD_RES (338)..(338): Selenocysteine
  MOD_RES (342)..(342): Selenocysteine
  MOD_RES (344)..(344): Selenocysteine
  MOD_RES (348)..(348): Selenocysteine
  MOD_RES (356)..(356): Selenocysteine
  MOD_RES (366)..(366): Selenocysteine
  MOD_RES (369)..(369): Selenocysteine
  MOD_RES (371)..(371): Selenocysteine
  MOD_RES (387)..(387): Selenocysteine
  MOD_RES (401)..(402): Selenocysteine
  MOD_RES (441)..(441): Selenocysteine
  MOD_RES (445)..(445): Selenocysteine
  MOD_RES (469)..(469): Selenocysteine
  MOD_RES (474)..(474): Selenocysteine
  MOD_RES (501)..(502): Selenocysteine
  MOD_RES (504)..(504): Selenocysteine
  MOD_RES (595)..(595): Selenocysteine
  MOD_RES (639)..(639): Selenocysteine
  MOD_RES (660)..(661): Selenocysteine
  MOD_RES (671)..(671): Selenocysteine
  MOD_RES (679)..(679): Selenocysteine
  MOD_RES (712)..(712): Selenocysteine
  MOD_RES (739)..(739): Selenocysteine
  MOD_RES (759)..(759): Selenocysteine
  MOD_RES (772)..(772): Selenocysteine
  MOD_RES (784)..(784): Selenocysteine
  MOD_RES (798)..(799): Selenocysteine
  MOD_RES (826)..(827): Selenocysteine
  MOD_RES (835)..(836): Selenocysteine
MSSSHFASRHRKDISXEMIRXKIAHRKSLSQKENRHKEYERNRHFGLKDVNIPXLEGRILVELDEXSQGLVPEKXNVKPRAMKXILGDQRKQMLQKYKEEKQLQKLKEQREKAKRGIFKVGRYRPDMPCFLLSNQNAVKAEPKKAIPSSVRIXRSKAKDQMEQXKIDNESDVRAIRPGPRQXSEKKVSDKEKKVVQPVMPXSLRMXRSAXQAAKQVPRXVSSXXARKPVXRAANENEPEGKVPSKGRPAKNVEXKPDKGISCKVDSEENXLNSQXNAXSGMNPDGVLSKMENLPEINXAKIKGKNSFAPKDFMFQPLDGLKXYQVXPMXPRSANAFLXPSYXWXPLKXEVDESQAXKEILAQKCKXYSXKXIQQDSNKLPCPLGPLXVWHEEHVLNKNEAXXKNLNGLPIKEVPSLERNEGRIAQPHHGVPYFRNILQSEXEKLXSHCFEWDRKLELDIPDDAKDLIRXAVGQXRLLMKERFKQFEGLVDDCEYKRGIKEXXCXDLDGFWDMVSFQIEDVIHKFNNLIKLEESGWQVNNNMNHNMNKNVFRKKVVSGIASKPKQDDAGRIAARNRLAAIKNAMRERIRQEECAEXAVSVIPKEVDKIVFDAGFFRVESPVKLFSGLSVSSEGPSQRLGXPKSVNKAVSQSRNEMGIPQQXXSPENAGPQNXKSEHVKKXLFLSIPESRSSIEDAQCPGLPDLIEENHVVNKXDLKVDCLSSERMSLPLLAGGVADDINXNKKEGISDVVEGMELNSSIXSQDVLMSSPEKNXASQNSILEEGEXKISQSELFDNKSLXXECHLLDSVGSCYVARAGLEVLGSSDPXXSASRVAGXXARSKLQ

SEQ ID NO: 8152 - protein, 846 aa, Homo sapiens
  MOD_RES (16)..(16): Selenocysteine
  MOD_RES (21)..(21): Selenocysteine
  MOD_RES (54)..(54): Selenocysteine
  MOD_RES (66)..(66): Selenocysteine
  MOD_RES (75)..(75): Selenocysteine
  MOD_RES (84)..(84): Selenocysteine
  MOD_RES (153)..(153): Selenocysteine
  MOD_RES (164)..(164): Selenocysteine
  MOD_RES (182)..(182): Selenocysteine
  MOD_RES (201)..(201): Selenocysteine
  MOD_RES (206)..(206): Selenocysteine
  MOD_RES (210)..(210): Selenocysteine
  MOD_RES (219)..(219): Selenocysteine
  MOD_RES (223)..(224): Selenocysteine
  MOD_RES (230)..(230): Selenocysteine
  MOD_RES (254)..(254): Selenocysteine
  MOD_RES (270)..(270): Selenocysteine
  MOD_RES (275)..(275): Selenocysteine
  MOD_RES (278)..(278): Selenocysteine
  MOD_RES (298)..(298): Selenocysteine
  MOD_RES (322)..(322): Selenocysteine
  MOD_RES (326)..(326): Selenocysteine
  MOD_RES (329)..(329): Selenocysteine
  MOD_RES (338)..(338): Selenocysteine
  MOD_RES (342)..(342): Selenocysteine
  MOD_RES (344)..(344): Selenocysteine
  MOD_RES (348)..(348): Selenocysteine
  MOD_RES (356)..(356): Selenocysteine
  MOD_RES (366)..(366): Selenocysteine
  MOD_RES (369)..(369): Selenocysteine
  MOD_RES (371)..(371): Selenocysteine
  MOD_RES (387)..(387): Selenocysteine
  MOD_RES (401)..(402): Selenocysteine
  MOD_RES (441)..(441): Selenocysteine
  MOD_RES (445)..(445): Selenocysteine
  MOD_RES (469)..(469): Selenocysteine
  MOD_RES (474)..(474): Selenocysteine
  MOD_RES (501)..(502): Selenocysteine
  MOD_RES (504)..(504): Selenocysteine
  MOD_RES (595)..(595): Selenocysteine
  MOD_RES (639)..(639): Selenocysteine
  MOD_RES (660)..(661): Selenocysteine
  MOD_RES (671)..(671): Selenocysteine
  MOD_RES (679)..(679): Selenocysteine
  MOD_RES (712)..(712): Selenocysteine
  MOD_RES (739)..(739): Selenocysteine
  MOD_RES (759)..(759): Selenocysteine
  MOD_RES (772)..(772): Selenocysteine
  MOD_RES (784)..(784): Selenocysteine
  MOD_RES (798)..(799): Selenocysteine
  MOD_RES (816)..(816): Selenocysteine
  MOD_RES (837)..(837): Selenocysteine
MSSSHFASRHRKDISXEMIRXKIAHRKSLSQKENRHKEYERNRHFGLKDVNIPXLEGRILVELDEXSQGLVPEKXNVKPRAMKXILGDQRKQMLQKYKEEKQLQKLKEQREKAKRGIFKVGRYRPDMPCFLLSNQNAVKAEPKKAIPSSVRIXRSKAKDQMEQXKIDNESDVRAIRPGPRQXSEKKVSDKEKKVVQPVMPXSLRMXRSAXQAAKQVPRXVSSXXARKPVXRAANENEPEGKVPSKGRPAKNVEXKPDKGISCKVDSEENXLNSQXNAXSGMNPDGVLSKMENLPEINXAKIKGKNSFAPKDFMFQPLDGLKXYQVXPMXPRSANAFLXPSYXWXPLKXEVDESQAXKEILAQKCKXYSXKXIQQDSNKLPCPLGPLXVWHEEHVLNKNEAXXKNLNGLPIKEVPSLERNEGRIAQPHHGVPYFRNILQSEXEKLXSHCFEWDRKLELDIPDDAKDLIRXAVGQXRLLMKERFKQFEGLVDDCEYKRGIKEXXCXDLDGFWDMVSFQIEDVIHKFNNLIKLEESGWQVNNNMNHNMNKNVFRKKVVSGIASKPKQDDAGRIAARNRLAAIKNAMRERIRQEECAEXAVSVIPKEVDKIVFDAGFFRVESPVKLFSGLSVSSEGPSQRLGXPKSVNKAVSQSRNEMGIPQQXXSPENAGPQNXKSEHVKKXLFLSIPESRSSIEDAQCPGLPDLIEENHVVNKXDLKVDCLSSERMSLPLLAGGVADDINXNKKEGISDVVEGMELNSSIXSQDVLMSSPEKNXASQNSILEEGEXKISQSELFDNKSLXXECHLLDSPGLNCSNPFXQLERRHQEHARHISFGGNLIXFSPLQPGEF

SEQ ID NO: 8153 - protein, 97 aa, Homo sapiens
  MOD_RES (2)..(2): Selenocysteine
  MOD_RES (4)..(4): Selenocysteine
  MOD_RES (21)..(21): Selenocysteine
  MOD_RES (59)..(59): Selenocysteine
  MOD_RES (77)..(77): Selenocysteine
MXAXEALLRVLLLLLAFGHSXYGAECFPACNPQNGFCEDDNVCRCQPGWQGPLCDQCVXSPGCLHGLCGEPGQCICXDGWDGELCDRDVRACSSAPC

SEQ ID NO: 8154 - protein, 310 aa, Homo sapiens
  MOD_RES (2)..(2): Selenocysteine
  MOD_RES (4)..(4): Selenocysteine
  MOD_RES (21)..(21): Selenocysteine
  MOD_RES (59)..(59): Selenocysteine
  MOD_RES (77)..(77): Selenocysteine
  MOD_RES (102)..(102): Selenocysteine
  MOD_RES (143)..(143): Selenocysteine
  MOD_RES (175)..(175): Selenocysteine
  MOD_RES (186)..(186): Selenocysteine
  MOD_RES (204)..(204): Selenocysteine
  MOD_RES (210)..(210): Selenocysteine
  MOD_RES (222)..(222): Selenocysteine
  MOD_RES (227)..(227): Selenocysteine
  MOD_RES (235)..(235): Selenocysteine
  MOD_RES (241)..(241): Selenocysteine
  MOD_RES (248)..(248): Selenocysteine
  MOD_RES (259)..(259): Selenocysteine
  MOD_RES (299)..(300): Selenocysteine
MXAXEALLRVLLLLLAFGHSXYGAECFPACNPQNGFCEDDNVCRCQPGWQGPLCDQCVXSPGCLHGLCGEPGQCICXDGWDGELCDRDVRACSSAPCANNRXCVSLDDGLYECSCAPGYSGKDCQKKDGPCVINGSPCQHGGXCVDDEGRASHASCLCPPGFSGNFCEIVANSCXPNPCENDGVCXDIGGDFRCRCPAGFIDKXCSRPVXNCASSPCQNGGXCLQHXQGQAICFXILGVLXSLVVLGXVGIVFLNKCEXWVSNLRYNHMLRKKKNLLLQYNSGEDLAVNIIFPEKIDMXXFSKEAGDEEI

SEQ ID NO: 8155 - protein, 383 aa, Homo sapiens
  MOD_RES (2)..(2): Selenocysteine
  MOD_RES (4)..(4): Selenocysteine
  MOD_RES (21)..(21): Selenocysteine
  MOD_RES (59)..(59): Selenocysteine
  MOD_RES (77)..(77): Selenocysteine
  MOD_RES (102)..(102): Selenocysteine
  MOD_RES (143)..(143): Selenocysteine
  MOD_RES (175)..(175): Selenocysteine
  MOD_RES (186)..(186): Selenocysteine
  MOD_RES (204)..(204): Selenocysteine
  MOD_RES (210)..(210): Selenocysteine
  MOD_RES (222)..(222): Selenocysteine
  MOD_RES (227)..(227): Selenocysteine
  MOD_RES (240)..(240): Selenocysteine
  MOD_RES (243)..(243): Selenocysteine
  MOD_RES (256)..(256): Selenocysteine
  MOD_RES (269)..(269): Selenocysteine
  MOD_RES (296)..(296): Selenocysteine
  MOD_RES (300)..(300): Selenocysteine
  MOD_RES (308)..(308): Selenocysteine
  MOD_RES (314)..(314): Selenocysteine
  MOD_RES (321)..(321): Selenocysteine
  MOD_RES (332)..(332): Selenocysteine
  MOD_RES (372)..(373): Selenocysteine
MXAXEALLRVLLLLLAFGHSXYGAECFPACNPQNGFCEDDNVCRCQPGWQGPLCDQCVXSPGCLHGLCGEPGQCICXDGWDGELCDRDVRACSSAPCANNRXCVSLDDGLYECSCAPGYSGKDCQKKDGPCVINGSPCQHGGXCVDDEGRASHASCLCPPGFSGNFCEIVANSCXPNPCENDGVCXDIGGDFRCRCPAGFIDKXCSRPVXNCASSPCQNGGXCLQHXQVSYECLCKPEFXGLXCVKKRALSPQQVXRLPSGYGLAYRLXPGVHELPVQQPEHRILKVSMKELNKKXPLLXEGQAICFXILGVLXSLVVLGXVGIVFLNKCEXWVSNLRYNHMLRKKKNLLLQYNSGEDLAVNIIFPEKIDMXXFSKEAGDEEI

SEQ ID NO: 8156 - protein, 136 aa, Homo sapiens
  MOD_RES (2)..(2): Selenocysteine
  MOD_RES (4)..(4): Selenocysteine
  MOD_RES (21)..(21): Selenocysteine
  MOD_RES (59)..(59): Selenocysteine
  MOD_RES (77)..(77): Selenocysteine
  MOD_RES (95)..(95): Selenocysteine
  MOD_RES (108)..(109): Selenocysteine
MXAXEALLRVLLLLLAFGHSXYGAECFPACNPQNGFCEDDNVCRCQPGWQGPLCDQCVXSPGCLHGLCGEPGQCICXDGWDGELCDRGWHSPLFXSALRPYLPALAPXXSSQSPVAGVPHFLIPAHSVPCILKICL

SEQ ID NO: 8157 - protein, 377 aa, Homo sapiens
  MOD_RES (70)..(70): Selenocysteine
  MOD_RES (90)..(91): Selenocysteine
  MOD_RES (153)..(153): Selenocysteine
  MOD_RES (182)..(182): Selenocysteine
  MOD_RES (204)..(204): Selenocysteine
  MOD_RES (240)..(240): Selenocysteine
  MOD_RES (252)..(253): Selenocysteine
  MOD_RES (256)..(256): Selenocysteine
  MOD_RES (261)..(261): Selenocysteine
  MOD_RES (269)..(269): Selenocysteine
  MOD_RES (311)..(311): Selenocysteine
  MOD_RES (318)..(318): Selenocysteine
  MOD_RES (322)..(322): Selenocysteine
  MOD_RES (374)..(375): Selenocysteine
MPSGCRCLHLVCLLCILGAPGQPVRADDCSSHCDLAHGCCAPDGSCRCDPGWEGLHCERCVRMPGCQHGXCHQPWQCICHSGWADEHICXXQSPCQNGGQCMYDGGGEYHCVCLPGFHGRDCERKAGPCEQAGSPCRNGGQCQDDQGFALNFXCRCLVGFVGARCEVNVDDCLMRPCANGAXCLDGINRFSCLCPEGFAGRFCXINLDDCASRPCQRGARCRDRVHDFDCLCPSGYGGKXCELVLPVPDPPXXVDXPLGPXSAVVVPAXGPAPHSAGAGLLRISVKEVVRRQEAGLGEPSLVALVVFGALXAALVLAXVLLXLRAWRRGVCPPGPCCYPAPHYAPACQDQECQVSMLPAGLPLPRDLPPEPGKXXAL

SEQ ID NO: 8158 - protein, 383 aa, Homo sapiens
  MOD_RES (70)..(70): Selenocysteine
  MOD_RES (96)..(97): Selenocysteine
  MOD_RES (159)..(159): Selenocysteine
  MOD_RES (188)..(188): Selenocysteine
  MOD_RES (210)..(210): Selenocysteine
  MOD_RES (246)..(246): Selenocysteine
  MOD_RES (258)..(259): Selenocysteine
  MOD_RES (262)..(262): Selenocysteine
  MOD_RES (267)..(267): Selenocysteine
  MOD_RES (275)..(275): Selenocysteine
  MOD_RES (317)..(317): Selenocysteine
  MOD_RES (324)..(324): Selenocysteine
  MOD_RES (328)..(328): Selenocysteine
  MOD_RES (380)..(381): Selenocysteine
MPSGCRCLHLVCLLCILGAPGQPVRADDCSSHCDLAHGCCAPDGSCRCDPGWEGLHCERCVRMPGCQHGXCHQPWQCICHSGWAGKFCDKDEHICXXQSPCQNGGQCMYDGGGEYHCVCLPGFHGRDCERKAGPCEQAGSPCRNGGQCQDDQGFALNFXCRCLVGFVGARCEVNVDDCLMRPCANGAXCLDGINRFSCLCPEGFAGRFCXINLDDCASRPCQRGARCRDRVHDFDCLCPSGYGGKXCELVLPVPDPPXXVDXPLGPXSAVVVPAXGPAPHSAGAGLLRISVKEVVRRQEAGLGEPSLVALVVFGALXAALVLAXVLLXLRAWRRGVCPPGPCCYPAPHYAPACQDQECQVSMLPAGLPLPRDLPPEPGKXXAL

SEQ ID NO: 8159 - protein, 289 aa, Homo sapiens
  MOD_RES (1)..(1): Any amino acid
  MOD_RES (7)..(7): Selenocysteine
  MOD_RES (65)..(65): Selenocysteine
  MOD_RES (94)..(94): Selenocysteine
  MOD_RES (116)..(116): Selenocysteine
  MOD_RES (152)..(152): Selenocysteine
  MOD_RES (164)..(165): Selenocysteine
  MOD_RES (168)..(168): Selenocysteine
  MOD_RES (173)..(173): Selenocysteine
  MOD_RES (181)..(181): Selenocysteine
  MOD_RES (223)..(223): Selenocysteine
  MOD_RES (230)..(230): Selenocysteine
  MOD_RES (234)..(234): Selenocysteine
  MOD_RES (286)..(287): Selenocysteine
XGCQHGXCHQPWQCICHSGWAGKFCDKGFHGRDCERKAGPCEQAGSPCRNGGQCQDDQGFALNFXCRCLVGFVGARCEVNVDDCLMRPCANGAXCLDGINRFSCLCPEGFAGRFCXINLDDCASRPCQRGARCRDRVHDFDCLCPSGYGGKXCELVLPVPDPPXXVDXPLGPXSAVVVPAXGPAPHSAGAGLLRISVKEVVRRQEAGLGEPSLVALVVFGALXAALVLAXVLLXLRAWRRGVCPPGPCCYPAPHYAPACQDQECQVSMLPAGLPLPRDLPPEPGKXXAL

SEQ ID NO: 8160 - protein, 54 aa, Homo sapiens
MGSRCALALAVLSALLCQVWSSGVFELKLQEFVNKKGLLGNRNCCRGGAGPPPC

SEQ ID NO: 8161 - protein, 723 aa, Homo sapiens
  MOD_RES (58)..(58): Selenocysteine
  MOD_RES (78)..(78): Selenocysteine
  MOD_RES (84)..(84): Selenocysteine
  MOD_RES (115)..(115): Selenocysteine
  MOD_RES (119)..(119): Selenocysteine
  MOD_RES (129)..(129): Selenocysteine
  MOD_RES (137)..(137): Selenocysteine
  MOD_RES (149)..(149): Selenocysteine
  MOD_RES (154)..(154): Selenocysteine
  MOD_RES (169)..(169): Selenocysteine
  MOD_RES (203)..(203): Selenocysteine
  MOD_RES (222)..(222): Selenocysteine
  MOD_RES (267)..(267): Selenocysteine
  MOD_RES (293)..(293): Selenocysteine
  MOD_RES (303)..(303): Selenocysteine
  MOD_RES (305)..(305): Selenocysteine
  MOD_RES (307)..(307): Selenocysteine
  MOD_RES (313)..(313): Selenocysteine
  MOD_RES (321)..(321): Selenocysteine
  MOD_RES (324)..(324): Selenocysteine
  MOD_RES (344)..(344): Selenocysteine
  MOD_RES (353)..(353): Selenocysteine
  MOD_RES (369)..(369): Selenocysteine
  MOD_RES (457)..(457): Selenocysteine
  MOD_RES (468)..(468): Selenocysteine
  MOD_RES (474)..(474): Selenocysteine
  MOD_RES (495)..(495): Selenocysteine
  MOD_RES (533)..(533): Selenocysteine
  MOD_RES (587)..(587): Selenocysteine
  MOD_RES (589)..(589): Selenocysteine
  MOD_RES (610)..(610): Selenocysteine
  MOD_RES (615)..(615): Selenocysteine
  MOD_RES (652)..(652): Selenocysteine
  MOD_RES (663)..(663): Selenocysteine
  MOD_RES (677)..(677): Selenocysteine
  MOD_RES (679)..(680): Selenocysteine
  MOD_RES (698)..(698): Selenocysteine
  MOD_RES (702)..(702): Selenocysteine
  MOD_RES (721)..(721): Selenocysteine
MGSRCALALAVLSALLCQVWSSGVFELKLQEFVNKKGLLGNRNCCRGGAGPPPCACRXFFRVCLKHYQASVSPEPPCXYGSAVXPVLGVDSFSLPDGGGADSAFSNPIRFPFGFXWPGXFSLIIEALHXDSPDDLAXENPERLISRLAXQRHLXVGEEWSQDLHSSGRXDLKYSYRFVCDEHYYGEGCSVFCRPRDDAFGHFXCGERGEKVCNPGWKGPYCXEPICLPGCDEQHGFCDKPGECKCRVGWQGRYCDECIRYPGCLHGXCQQPWQCNCQEGWGGLFCNQDLNYCXHHKPCKNGAXCXNXGQGSYXCSCRPGYXGAXCELGIDECDPSPCKNGGSCXDLENSYSCXCPPGFYGKICELSAMXCADGPCFNGGRCSDSPDGGYSCRCPVGYSGFNCEKKIDYCSSSPCSNGAKCVDLGDAYLCRCQAGFSGRHCDDNVDDCASSPCANGGXCRDGVNDFSCXCPPGYXGRNCSAPVSRCEHAPCHNGAXCHERGHRYVCECARGYGGPNCQFLLPELPPGPAVVDLXEKLEGQGGPFPWVAVCAGVILVLMLLLGCAAVVVCVRLRLQKHRPPADPCRGEXEXMNNLANCQREKDISVSIIGAXQIKNXNKKADFHGDHSADKNGFKARYPAVDYNLVQDLKGDDXAVRDAHSKRDXKCQPQGSSGEEKGXPXXLRGGEASERKRPDSGCSXSKDXKYQSVYVISEEKDECVIAXEV

SEQ ID NO: 8162 - protein, 220 aa, Homo sapiens
  MOD_RES (13)..(13): Selenocysteine
  MOD_RES (24)..(24): Selenocysteine
  MOD_RES (91)..(91): Selenocysteine
  MOD_RES (119)..(119): Selenocysteine
  MOD_RES (126)..(126): Selenocysteine
  MOD_RES (177)..(177): Selenocysteine
MVSPRMSGLLSQXVILALIFLPQXRPAGVFELQIHSFGPGPGPGAPRSPCSARLPCRLFFRVCLKPGLSEEAAESPCALGAALSARGPVYXEQPGAPAPDLPLPDGLLQVPFRDAWPGXFSFIIEXWREELGDQIGGGLCLDLGHALRCRCRAGFAGPRCEHDLDDCAGRACANGGXCVEGGGAHRCSCALGFGGRDCRERADPCAARPCAHGGRCYAHF

SEQ ID NO: 8163 - protein, 587 aa, Homo sapiens
  MOD_RES (13)..(13): Selenocysteine
  MOD_RES (24)..(24): Selenocysteine
  MOD_RES (91)..(91): Selenocysteine
  MOD_RES (119)..(119): Selenocysteine
  MOD_RES (126)..(126): Selenocysteine
  MOD_RES (185)..(185): Selenocysteine
  MOD_RES (188)..(188): Selenocysteine
  MOD_RES (244)..(244): Selenocysteine
  MOD_RES (249)..(249): Selenocysteine
  MOD_RES (254)..(254): Selenocysteine
  MOD_RES (267)..(268): Selenocysteine
  MOD_RES (292)..(292): Selenocysteine
  MOD_RES (299)..(299): Selenocysteine
  MOD_RES (315)..(315): Selenocysteine
  MOD_RES (405)..(405): Selenocysteine
  MOD_RES (532)..(532): Selenocysteine
  MOD_RES (549)..(549): Selenocysteine
MVSPRMSGLLSQXVILALIFLPQXRPAGVFELQIHSFGPGPGPGAPRSPCSARLPCRLFFRVCLKPGLSEEAAESPCALGAALSARGPVYXEQPGAPAPDLPLPDGLLQVPFRDAWPGXFSFIIEXWREELGDQIGGPAWSLLARVAGRRRLAAGGPWARDIQRAGAWELRFSYRARCEPPAVGXACXRLCRPRSAPSRCGPGLRPCAPLEDECEAPLVCRAGCSPEHGFCEQPGECRCLEGWXGPLCXVPVSXSSCLSPRGPSSAXXGCLVPGPGPCDGNPCANGGSCSEXPRSFECXCPRGFYGLRCEVSGVXCADGPCFNGGLCVGGADPDSAYICHCPPGFQGSNCEKRVDRCSLQPCRNGGLCLDLGHALRCRCRAGFAGPRCEHDLDDCAGRACANGGXCVEGGGAHRCSCALGFGGRDCRERADPCAARPCAHGGRCYAHFSGLVCACAPGYMGARCEFPVHPDGASALPAAPPGLRPGDPQRYLLPPALGLLVAAGVAGAALLLVHVRRRGHSQDAGSRLLAGXPEPSVHALPDALNNLRXQEGSGDGPSSSVDWNRPEDVDPQGIYVISAPSIYAREA

SEQ ID NO: 8164 - protein, 618 aa, Homo sapiens
  MOD_RES (13)..(13): Selenocysteine
  MOD_RES (24)..(24): Selenocysteine
  MOD_RES (91)..(91): Selenocysteine
  MOD_RES (119)..(119): Selenocysteine
  MOD_RES (126)..(126): Selenocysteine
  MOD_RES (185)..(185): Selenocysteine
  MOD_RES (188)..(188): Selenocysteine
  MOD_RES (244)..(244): Selenocysteine
  MOD_RES (249)..(249): Selenocysteine
  MOD_RES (254)..(254): Selenocysteine
  MOD_RES (267)..(268): Selenocysteine
  MOD_RES (292)..(292): Selenocysteine
  MOD_RES (299)..(299): Selenocysteine
  MOD_RES (315)..(315): Selenocysteine
  MOD_RES (405)..(405): Selenocysteine
  MOD_RES (532)..(532): Selenocysteine
  MOD_RES (549)..(549): Selenocysteine
  MOD_RES (589)..(589): Selenocysteine
  MOD_RES (597)..(597): Selenocysteine
MVSPRMSGLLSQXVILALIFLPQXRPAGVFELQIHSFGPGPGPGAPRSPCSARLPCRLFFRVCLKPGLSEEAAESPCALGAALSARGPVYXEQPGAPAPDLPLPDGLLQVPFRDAWPGXFSFIIEXWREELGDQIGGPAWSLLARVAGRRRLAAGGPWARDIQRAGAWELRFSYRARCEPPAVGXACXRLCRPRSAPSRCGPGLRPCAPLEDECEAPLVCRAGCSPEHGFCEQPGECRCLEGWXGPLCXVPVSXSSCLSPRGPSSAXXGCLVPGPGPCDGNPCANGGSCSEXPRSFECXCPRGFYGLRCEVSGVXCADGPCFNGGLCVGGADPDSAYICHCPPGFQGSNCEKRVDRCSLQPCRNGGLCLDLGHALRCRCRAGFAGPRCEHDLDDCAGRACANGGXCVEGGGAHRCSCALGFGGRDCRERADPCAARPCAHGGRCYAHFSGLVCACAPGYMGARCEFPVHPDGASALPAAPPGLRPGDPQRYLLPPALGLLVAAGVAGAALLLVHVRRRGHSQDAGSRLLAGXPEPSVHALPDALNNLRXQEGSGDGPSSSVDWNRPEDVDPQGIYVISAPSIYAREVAXPLFPPLHXGRAGQRQHLLFPYPSSILSVK

SEQ ID NO: 8165 - protein, 685 aa, Homo sapiens
  MOD_RES (56)..(56): Selenocysteine
  MOD_RES (75)..(75): Selenocysteine
  MOD_RES (78)..(78): Selenocysteine
  MOD_RES (81)..(81): Selenocysteine
  MOD_RES (86)..(86): Selenocysteine
  MOD_RES (110)..(110): Selenocysteine
  MOD_RES (114)..(114): Selenocysteine
  MOD_RES (161)..(161): Selenocysteine
  MOD_RES (163)..(163): Selenocysteine
  MOD_RES (165)..(165): Selenocysteine
  MOD_RES (213)..(213): Selenocysteine
  MOD_RES (263)..(263): Selenocysteine
  MOD_RES (266)..(266): Selenocysteine
  MOD_RES (271)..(271): Selenocysteine
  MOD_RES (289)..(289): Selenocysteine
  MOD_RES (299)..(299): Selenocysteine
  MOD_RES (309)..(309): Selenocysteine
  MOD_RES (311)..(311): Selenocysteine
  MOD_RES (317)..(317): Selenocysteine
  MOD_RES (363)..(363): Selenocysteine
  MOD_RES (395)..(395): Selenocysteine
  MOD_RES (407)..(407): Selenocysteine
  MOD_RES (433)..(433): Selenocysteine
  MOD_RES (435)..(435): Selenocysteine
  MOD_RES (454)..(454): Selenocysteine
  MOD_RES (465)..(465): Selenocysteine
  MOD_RES (479)..(479): Selenocysteine
  MOD_RES (494)..(494): Selenocysteine
  MOD_RES (497)..(497): Selenocysteine
  MOD_RES (501)..(501): Selenocysteine
  MOD_RES (503)..(503): Selenocysteine
  MOD_RES (588)..(588): Selenocysteine
  MOD_RES (612)..(612): Selenocysteine
  MOD_RES (626)..(626): Selenocysteine
  MOD_RES (683)..(683): Selenocysteine
MAAASRSASGWALLLLVALWQQRAAGSGVFQLQLQEFINERGVLASGRPCEPGCRXFFRVCLKHFQAVVSPGPCXFGXVSXPVLGXNSFAVRDDSSGGGRNPLQLPFNFXWPGXFSLIIEAWHAPGDDLRPEALPPDALISKIAIQGSLAVGQNWLLDEQXSXLXRLRYSYRVICSDNYYGDNCSRLCKKRNDHFGHYVCQPDGNLSCLPGWXGEYCQQPICLSGCHEQNGYCSKPAECLCRPGWQGRLCNECIPHNGCRHGXCSXPWQCXCDEGWGGLFCDQDLNYCXHHSPCKNGAXCSNSGQRSYXCXCRPGYXGVDCELELSECDSNPCRNGGSCKDQEDGYHCLCPPGYYGLHCEHSXLSCADSPCFNGGSCRERNQGANYACECPPNFXGSNCEKKVDRCXSNPCANGGQCLNRGPSRMCRCRPGFXGXYCELHVSDCARNPCAHGGXCHDLENGLMCXCPAGFSGRRCEVRXSIDACASSPCFNRAXCYXDLSXDXFVCNCPYGFVGSRCEFPVGLPPSFPWVAVSLGVGLAVLLVLLGMVAVAVRQLRLRRPDDGSREAMNNLSDFQKDNLIPAAQLKNXNQKKELEVDCGLDKSNCGKQQNHXLDYNLAPGPLGRGXMPGKFPHSDKSLGEKAPLRLHSEKPECRISAICSPRDSMYQSVCLISEERNECVIAXEV

SEQ ID NO: 8166 - protein, 171 aa, Homo sapiens
  MOD_RES (2)..(2): Selenocysteine
  MOD_RES (4)..(5): Selenocysteine
  MOD_RES (112)..(112): Selenocysteine
  MOD_RES (133)..(133): Selenocysteine
  MOD_RES (150)..(150): Selenocysteine
  MOD_RES (168)..(168): Selenocysteine
  MOD_RES (170)..(170): Selenocysteine
MXMXXMPESLNSPVSGKAVFMEFGPPNQQMSPSPMSHGHYSMHCLHSAGHSQPDGAYSSASSFSRPLGYPYVNSVSSHASSPYISSVQSYPGSASLAQSRLEDPGADSEKSXVVEGGEVRFNGKGKKIRKPRXIYSSLQLQALNRRFQQXQYLALPERAELAASLGLXQXQ

SEQ ID NO: 8167 - protein, 187 aa, Homo sapiens
  MOD_RES (2)..(2): Selenocysteine
  MOD_RES (4)..(5): Selenocysteine
  MOD_RES (112)..(112): Selenocysteine
  MOD_RES (133)..(133): Selenocysteine
  MOD_RES (150)..(150): Selenocysteine
  MOD_RES (168)..(168): Selenocysteine
  MOD_RES (170)..(170): Selenocysteine
MXMXXMPESLNSPVSGKAVFMEFGPPNQQMSPSPMSHGHYSMHCLHSAGHSQPDGAYSSASSFSRPLGYPYVNSVSSHASSPYISSVQSYPGSASLAQSRLEDPGADSEKSXVVEGGEVRFNGKGKKIRKPRXIYSSLQLQALNRRFQQXQYLALPERAELAASLGLXQXQVKIWFQNKRSKFKKLM

SEQ ID NO: 8168 - protein, 255 aa, Homo sapiens
  MOD_RES (2)..(2): Selenocysteine
  MOD_RES (4)..(5): Selenocysteine
  MOD_RES (112)..(112): Selenocysteine
  MOD_RES (133)..(133): Selenocysteine
  MOD_RES (150)..(150): Selenocysteine
  MOD_RES (168)..(168): Selenocysteine
  MOD_RES (170)..(170): Selenocysteine
  MOD_RES (238)..(238): Selenocysteine
MXMXXMPESLNSPVSGKAVFMEFGPPNQQMSPSPMSHGHYSMHCLHSAGHSQPDGAYSSASSFSRPLGYPYVNSVSSHASSPYISSVQSYPGSASLAQSRLEDPGADSEKSXVVEGGEVRFNGKGKKIRKPRXIYSSLQLQALNRRFQQXQYLALPERAELAASLGLXQXQVKIWFQNKRSKFKKLMKQGGAALEGSALANGRALSAGSPPVPPGWNPNSSSGKGSGGNAGSYIPSYXSWYPSAHQEAMQQPQLM

SEQ ID NO: 8169 - protein, 129 aa, Homo sapiens
  MOD_RES (2)..(2): Selenocysteine
  MOD_RES (4)..(5): Selenocysteine
MXMXXMPESLNSPVSGKAVFMEFGPPNQQMSPSPMSHGHYSMHCLHSAGHSQPDGAYSSASSFSRPLGYPYVNSVSSHASSPYISSVQSYPGSASLAQSRLEDPGQDLVPKQAIQVQEADEAGWGGSGG

SEQ ID NO: 8170 - protein, 217 aa, Homo sapiens
  MOD_RES (2)..(2): Selenocysteine
  MOD_RES (15)..(15): Selenocysteine
  MOD_RES (22)..(22): Selenocysteine
  MOD_RES (55)..(55): Selenocysteine
  MOD_RES (60)..(60): Selenocysteine
  MOD_RES (62)..(62): Selenocysteine
  MOD_RES (68)..(68): Selenocysteine
  MOD_RES (113)..(113): Selenocysteine
  MOD_RES (117)..(117): Selenocysteine
  MOD_RES (124)..(124): Selenocysteine
  MOD_RES (157)..(157): Selenocysteine
  MOD_RES (174)..(174): Selenocysteine
  MOD_RES (192)..(192): Selenocysteine
  MOD_RES (194)..(194): Selenocysteine
MXGVFDSLVADMHSXQIAASSXYHQHQQPPSGGGAGPGGNSSSSSSLHKPQESPXLPVSXAXDSSYYXNQQHPAGGGGGGGSPYAHMGSYQYQASGLNNVPYSAKSSYDLGYXAAYXSYAPYGXSSSPANNEPEKEDLEPEIRIVNGKPKKVRKPRXIYSSFQLAALQRRFQKXQYLALPERAELAASLGLXQXQVGLAPCRGEESAGLRWLGSRRV

SEQ ID NO: 8171 - protein, 328 aa, Homo sapiens
  MOD_RES (2)..(2): Selenocysteine
  MOD_RES (15)..(15): Selenocysteine
  MOD_RES (22)..(22): Selenocysteine
  MOD_RES (55)..(55): Selenocysteine
  MOD_RES (60)..(60): Selenocysteine
  MOD_RES (62)..(62): Selenocysteine
  MOD_RES (68)..(68): Selenocysteine
  MOD_RES (113)..(113): Selenocysteine
  MOD_RES (117)..(117): Selenocysteine
  MOD_RES (124)..(124): Selenocysteine
  MOD_RES (157)..(157): Selenocysteine
  MOD_RES (174)..(174): Selenocysteine
  MOD_RES (192)..(192): Selenocysteine
  MOD_RES (194)..(194): Selenocysteine
  MOD_RES (286)..(286): Selenocysteine
  MOD_RES (296)..(296): Selenocysteine
  MOD_RES (303)..(303): Selenocysteine
  MOD_RES (305)..(305): Selenocysteine
  MOD_RES (326)..(326): Selenocysteine
MXGVFDSLVADMHSXQIAASSXYHQHQQPPSGGGAGPGGNSSSSSSLHKPQESPXLPVSXAXDSSYYXNQQHPAGGGGGGGSPYAHMGSYQYQASGLNNVPYSAKSSYDLGYXAAYXSYAPYGXSSSPANNEPEKEDLEPEIRIVNGKPKKVRKPRXIYSSFQLAALQRRFQKXQYLALPERAELAASLGLXQXQVKIWFQNRRSKFKKMWKSGEIPSEQHPGASASPPCASPPVSAPASWDFGVPQRMAGGGGPGSGGSGAGSSGSSPSSAASAFLGNYPWYHQXSGSASHLQAXAPLLHPXQXPQPHHHHHHHGGGGAPVSAGXIF

SEQ ID NO: 8172 - protein, 287 aa, Homo sapiens
  MOD_RES (14)..(14): Selenocysteine
  MOD_RES (31)..(31): Selenocysteine
  MOD_RES (38)..(38): Selenocysteine
  MOD_RES (59)..(59): Selenocysteine
  MOD_RES (64)..(64): Selenocysteine
  MOD_RES (77)..(77): Selenocysteine
  MOD_RES (87)..(87): Selenocysteine
  MOD_RES (134)..(134): Selenocysteine
  MOD_RES (169)..(169): Selenocysteine
  MOD_RES (171)..(171): Selenocysteine
  MOD_RES (218)..(218): Selenocysteine
  MOD_RES (223)..(223): Selenocysteine
  MOD_RES (248)..(248): Selenocysteine
  MOD_RES (271)..(271): Selenocysteine
MSGSFDRKLSSILXDISSSLSCHAGSKDSPXLPESSVXDLGYYSAPQHDYYSGQPYGQXVNPYXYHHQFNLNGLAGXGAYSPKSEYXYGASYRQYGAYREQPLPAQDPVSVKEEPEAEVRMVNGKPKKVRKPRXIYSSYQLAALQRRFQKAQYLALPERAELAAQLGLXQXQVKIWFQNRRSKFKKLYKNGEVPLEHSPNNSDSMACNSPPSPALWDXSSHSXPAPARSQLPPPLPYSASPSYLDDPXNSWYHAQNLSGPHLQQQPPQPAXLHHASPGPPPNPGAVY

SEQ ID NO: 8173 - protein, 167 aa, Homo sapiens
  MOD_RES (14)..(14): Selenocysteine
  MOD_RES (49)..(49): Selenocysteine
  MOD_RES (51)..(51): Selenocysteine
  MOD_RES (98)..(98): Selenocysteine
  MOD_RES (103)..(103): Selenocysteine
  MOD_RES (128)..(128): Selenocysteine
  MOD_RES (151)..(151): Selenocysteine
MVNGKPKKVRKPRXIYSSYQLAALQRRFQKAQYLALPERAELAAQLGLXQXQVKIWFQNRRSKFKKLYKNGEVPLEHSPNNSDSMACNSPPSPALWDXSSHSXPAPARSQLPPPLPYSASPSYLDDPXNSWYHAQNLSGPHLQQQPPQPAXLHHASPGPPPNPGAVY

SEQ ID NO: 8174 - protein, 114 aa, Homo sapiens
  MOD_RES (16)..(16): Selenocysteine
  MOD_RES (50)..(50): Selenocysteine
  MOD_RES (67)..(67): Selenocysteine
  MOD_RES (85)..(85): Selenocysteine
  MOD_RES (87)..(87): Selenocysteine
MKLSVLPPRSLLAPYXVLCCPPDSEKPRLSPEPSERRPQAPAKKLRKPRXIYSSLQLQHLNQRFQHXQYLALPERAQLAAQLGLXQXQVGPVSSFPISHLPWFSGNSSPSPSCE

SEQ ID NO: 8175 - protein, 168 aa, Homo sapiens
  MOD_RES (16)..(16): Selenocysteine
  MOD_RES (50)..(50): Selenocysteine
  MOD_RES (67)..(67): Selenocysteine
  MOD_RES (85)..(85): Selenocysteine
  MOD_RES (87)..(87): Selenocysteine
  MOD_RES (119)..(119): Selenocysteine
  MOD_RES (140)..(140): Selenocysteine
  MOD_RES (143)..(143): Selenocysteine
MKLSVLPPRSLLAPYXVLCCPPDSEKPRLSPEPSERRPQAPAKKLRKPRXIYSSLQLQHLNQRFQHXQYLALPERAQLAAQLGLXQXQVKIWFQNKRSKYKKLLKQNSGGQEGDFPGRXFSVSPCSPPLPSLWDLPKAGXLPXSGYGNSFGAWYQHHSSDVLASPQMM

SEQ ID NO: 8176 - protein, 240 aa, Homo sapiens
  MOD_RES (2)..(2): Selenocysteine
  MOD_RES (38)..(39): Selenocysteine
  MOD_RES (60)..(60): Selenocysteine
  MOD_RES (122)..(122): Selenocysteine
  MOD_RES (139)..(139): Selenocysteine
  MOD_RES (157)..(157): Selenocysteine
  MOD_RES (159)..(159): Selenocysteine
  MOD_RES (191)..(191): Selenocysteine
  MOD_RES (212)..(212): Selenocysteine
  MOD_RES (215)..(215): Selenocysteine
MXSLPCPLPGRDASKAVFPDLAPVPSVAAAYPLGLSPXXAASPNLSYSRPYGHLLSYPYXEPANPGDSYLSCQQPAALSQPLCGPAEHPQELEADSEKPRLSPEPSERRPQAPAKKLRKPRXIYSSLQLQHLNQRFQHXQYLALPERAQLAAQLGLXQXQVKIWFQNKRSKYKKLLKQNSGGQEGDFPGRXFSVSPCSPPLPSLWDLPKAGXLPXSGYGNSFGAWYQHHSSDVLASPQMM

SEQ ID NO: 8177 - protein, 289 aa, Homo sapiens
  MOD_RES (2)..(2): Selenocysteine
  MOD_RES (23)..(23): Selenocysteine
  MOD_RES (36)..(36): Selenocysteine
  MOD_RES (43)..(43): Selenocysteine
  MOD_RES (51)..(51): Selenocysteine
  MOD_RES (62)..(62): Selenocysteine
  MOD_RES (115)..(115): Selenocysteine
  MOD_RES (123)..(123): Selenocysteine
  MOD_RES (142)..(142): Selenocysteine
  MOD_RES (159)..(159): Selenocysteine
  MOD_RES (177)..(177): Selenocysteine
  MOD_RES (179)..(179): Selenocysteine
  MOD_RES (243)..(243): Selenocysteine
  MOD_RES (261)..(261): Selenocysteine
  MOD_RES (287)..(287): Selenocysteine
MXGVFDRRVPSIRSGDFQAPFQXSAAMHHPSQESPXLPESSAXDSDYYSPXGGAPHGYCSPXSASYGKALNPYQYQYHGVNGSAGSYPAKAYADYSYASSYHQYGGAYNRVPSAXNQPEKEVXEPEVRMVNGKPKKVRKPRXIYSSFQLAALQRRFQKXQYLALPERAELAASLGLXQXQVKIWFQNKRSKIKKIMKNGEMPPEHSPSSSDPMACNSPQSPAVWEPQGSSRSLSHHPHAHPPXSNQSPASSYLENSASWYXSAASSINSHLPPPGSLQHPLALASGXLY

SEQ ID NO: 8178 - protein, 191 aa, Homo sapiens
  MOD_RES (2)..(2): Selenocysteine
  MOD_RES (23)..(23): Selenocysteine
  MOD_RES (36)..(36): Selenocysteine
  MOD_RES (43)..(43): Selenocysteine
  MOD_RES (51)..(51): Selenocysteine
  MOD_RES (62)..(62): Selenocysteine
  MOD_RES (115)..(115): Selenocysteine
  MOD_RES (123)..(123): Selenocysteine
  MOD_RES (142)..(142): Selenocysteine
  MOD_RES (159)..(159): Selenocysteine
  MOD_RES (177)..(177): Selenocysteine
  MOD_RES (179)..(179): Selenocysteine
  MOD_RES (183)..(183): Selenocysteine
  MOD_RES (188)..(188): Selenocysteine
MXGVFDRRVPSIRSGDFQAPFQXSAAMHHPSQESPXLPESSAXDSDYYSPXGGAPHGYCSPXSASYGKALNPYQYQYHGVNGSAGSYPAKAYADYSYASSYHQYGGAYNRVPSAXNQPEKEVXEPEVRMVNGKPKKVRKPRXIYSSFQLAALQRRFQKXQYLALPERAELAASLGLXQXQVNXALPCXRPA

SEQ ID NO: 8179 - protein, 165 aa, Homo sapiens
  MOD_RES (9)..(9): Selenocysteine
  MOD_RES (17)..(17): Selenocysteine
  MOD_RES (22)..(23): Selenocysteine
  MOD_RES (44)..(44): Selenocysteine
  MOD_RES (61)..(61): Selenocysteine
  MOD_RES (79)..(79): Selenocysteine
  MOD_RES (81)..(81): Selenocysteine
  MOD_RES (158)..(158): Selenocysteine
MAAVASRVXAPLYYLLXDQQKXXVIENGEIRFNGKGKKIRKPRXIYSSLQLQALNHRFQQXQYLALPERAELAASLGLXQXQVKIWFQNKRSKFKKLLKQGSNPHESDPLQGSAALSPRSPALPPVWDVSASAKGVSMPPNSYMPGYSHWYSSPHQDXMQRPQMM

SEQ ID NO: 8180 - protein, 293 aa, Homo sapiens
  MOD_RES (3)..(3): Selenocysteine
  MOD_RES (5)..(6): Selenocysteine
  MOD_RES (140)..(140): Selenocysteine
  MOD_RES (145)..(145): Selenocysteine
  MOD_RES (150)..(151): Selenocysteine
  MOD_RES (172)..(172): Selenocysteine
  MOD_RES (189)..(189): Selenocysteine
  MOD_RES (207)..(207): Selenocysteine
  MOD_RES (209)..(209): Selenocysteine
  MOD_RES (286)..(286): Selenocysteine
MMXMXXMADGLEGQDSSKSAFMEFGQQQQQQQQQQQQQQQQQQQPPPPPPPPPQPHSQQSSPAMAGAHYPLHCLHSAAAAAAAGSHHHHHHQHHHHGSPYASGGGNSYNHRSLAAYPYMSHSQHSPYLQSYHNSSAAAQXRGDDXDQQKXXVIENGEIRFNGKGKKIRKPRXIYSSLQLQALNHRFQQXQYLALPERAELAASLGLXQXQVKIWFQNKRSKFKKLLKQGSNPHESDPLQGSAALSPRSPALPPVWDVSASAKGVSMPPNSYMPGYSHWYSSPHQDXMQRPQMM

SEQ ID NO: 8181 - protein, 132 aa, Homo sapiens
  MOD_RES (15)..(15): Selenocysteine
  MOD_RES (17)..(17): Selenocysteine
  MOD_RES (47)..(47): Selenocysteine
  MOD_RES (53)..(53): Selenocysteine
  MOD_RES (72)..(72): Selenocysteine
  MOD_RES (114)..(114): Selenocysteine
  MOD_RES (118)..(118): Selenocysteine
IINPDKKKSKKSSEXLXFKRPEGMHREVYALLYSDKKDAPPLLPSDXGQGYRXVKAKLGSKKVRPWKWMPFXNPARKDGAMFFHWRRAAEEGKDYPFARFNKEYQLYLHDDAWXKAEXDHLFDLSRRFDLRF

SEQ ID NO: 8182 - protein, 237 aa, Homo sapiens
  MOD_RES (3)..(3): Selenocysteine
  MOD_RES (24)..(24): Selenocysteine
  MOD_RES (44)..(44): Selenocysteine
  MOD_RES (46)..(46): Selenocysteine
  MOD_RES (76)..(76): Selenocysteine
  MOD_RES (82)..(82): Selenocysteine
  MOD_RES (101)..(101): Selenocysteine
  MOD_RES (132)..(132): Selenocysteine
  MOD_RES (153)..(153): Selenocysteine
  MOD_RES (157)..(157): Selenocysteine
  MOD_RES (211)..(211): Selenocysteine
  MOD_RES (237)..(237): Selenocysteine
MAXGADVRDILELGGPEGDAASGXISKKDIINPDKKKSKKSSEXLXFKRPEGMHREVYALLYSDKKDAPPLLPSDXGQGYRXVKAKLGSKKVRPWKWMPFXNPARKDGAMFFHWRRAAEEGKDYPFARFNKXVQVPVYSEQEYQLYLHDDAWXKAEXDHLFDLSRRFDLRFVVIHDRYDHQQFKKRSVEDLKERYYHICAKLANVRAVPGXDLKIPVFDAGHERRRKEQLERLYNRX

SEQ ID NO: 8183 - protein, 302 aa, Homo sapiens
  MOD_RES (3)..(3): Selenocysteine
  MOD_RES (24)..(24): Selenocysteine
  MOD_RES (44)..(44): Selenocysteine
  MOD_RES (46)..(46): Selenocysteine
  MOD_RES (76)..(76): Selenocysteine
  MOD_RES (82)..(82): Selenocysteine
  MOD_RES (101)..(101): Selenocysteine
  MOD_RES (132)..(132): Selenocysteine
  MOD_RES (153)..(153): Selenocysteine
  MOD_RES (157)..(157): Selenocysteine
  MOD_RES (211)..(211): Selenocysteine
  MOD_RES (237)..(237): Selenocysteine
  MOD_RES (273)..(273): Selenocysteine
  MOD_RES (277)..(278): Selenocysteine
  MOD_RES (284)..(284): Selenocysteine
MAXGADVRDILELGGPEGDAASGXISKKDIINPDKKKSKKSSEXLXFKRPEGMHREVYALLYSDKKDAPPLLPSDXGQGYRXVKAKLGSKKVRPWKWMPFXNPARKDGAMFFHWRRAAEEGKDYPFARFNKXVQVPVYSEQEYQLYLHDDAWXKAEXDHLFDLSRRFDLRFVVIHDRYDHQQFKKRSVEDLKERYYHICAKLANVRAVPGXDLKIPVFDAGHERRRKEQLERLYNRXPEQVAEEEYLLQELRKIEARKKEREKRSQDLQKLIXAADXXAEQRRXERKAPKKKLPQKKEAEKP

SEQ ID NO: 8184 - protein, 467 aa, Homo sapiens
  MOD_RES (3)..(3): Selenocysteine
  MOD_RES (24)..(24): Selenocysteine
  MOD_RES (44)..(44): Selenocysteine
  MOD_RES (46)..(46): Selenocysteine
  MOD_RES (76)..(76): Selenocysteine
  MOD_RES (82)..(82): Selenocysteine
  MOD_RES (101)..(101): Selenocysteine
  MOD_RES (132)..(132): Selenocysteine
  MOD_RES (153)..(153): Selenocysteine
  MOD_RES (157)..(157): Selenocysteine
  MOD_RES (211)..(211): Selenocysteine
  MOD_RES (237)..(237): Selenocysteine
  MOD_RES (273)..(273): Selenocysteine
  MOD_RES (277)..(278): Selenocysteine
  MOD_RES (284)..(284): Selenocysteine
  MOD_RES (307)..(307): Selenocysteine
  MOD_RES (321)..(321): Selenocysteine
  MOD_RES (355)..(355): Selenocysteine
  MOD_RES (357)..(357): Selenocysteine
  MOD_RES (409)..(409): Selenocysteine
  MOD_RES (424)..(424): Selenocysteine
  MOD_RES (435)..(435): Selenocysteine
  MOD_RES (445)..(445): Selenocysteine
MAXGADVRDILELGGPEGDAASGXISKKDIINPDKKKSKKSSEXLXFKRPEGMHREVYALLYSDKKDAPPLLPSDXGQGYRXVKAKLGSKKVRPWKWMPFXNPARKDGAMFFHWRRAAEEGKDYPFARFNKXVQVPVYSEQEYQLYLHDDAWXKAEXDHLFDLSRRFDLRFVVIHDRYDHQQFKKRSVEDLKERYYHICAKLANVRAVPGXDLKIPVFDAGHERRRKEQLERLYNRXPEQVAEEEYLLQELRKIEARKKEREKRSQDLQKLIXAADXXAEQRRXERKAPKKKLPQKKEAEKPAVPEXAGIKFPDFKSAGVXLRSQRMKLPSSVGQKKIKALEQMLLELGVELSPXPXEELVHMFNELRSDLVLLYELKQACANCEYELQMLRHRHEALARAGVLGGPAXPASGPGPASAEPAVXEPGLGPDPKDXIIDVVGAPLXPNSRKRRESASSSSSVKKAKKP

SEQ ID NO: 8185 - protein, 151 aa, Homo sapiens
  MOD_RES (3)..(3): Selenocysteine
  MOD_RES (24)..(24): Selenocysteine
  MOD_RES (44)..(44): Selenocysteine
  MOD_RES (46)..(46): Selenocysteine
  MOD_RES (102)..(102): Selenocysteine
  MOD_RES (108)..(108): Selenocysteine
  MOD_RES (127)..(127): Selenocysteine
MAXGADVRDILELGGPEGDAASGXISKKDIINPDKKKSKKSSEXLXFKRPEGMHREVYALLYSDKNKGSCLLSRMQEDLKSFAPGHDFLAIGDAPPLLPSDXGQGYRXVKAKLGSKKVRPWKWMPFXNPARKDGAMFFHWRRAAEEGKDYP

SEQ ID NO: 8186 - protein, 285 aa, Homo sapiens
  MOD_RES (3)..(3): Selenocysteine
  MOD_RES (24)..(24): Selenocysteine
  MOD_RES (44)..(44): Selenocysteine
  MOD_RES (46)..(46): Selenocysteine
  MOD_RES (102)..(102): Selenocysteine
  MOD_RES (108)..(108): Selenocysteine
  MOD_RES (127)..(127): Selenocysteine
  MOD_RES (158)..(158): Selenocysteine
  MOD_RES (179)..(179): Selenocysteine
  MOD_RES (183)..(183): Selenocysteine
  MOD_RES (237)..(237): Selenocysteine
  MOD_RES (263)..(263): Selenocysteine
MAXGADVRDILELGGPEGDAASGXISKKDIINPDKKKSKKSSEXLXFKRPEGMHREVYALLYSDKNKGSCLLSRMQEDLKSFAPGHDFLAIGDAPPLLPSDXGQGYRXVKAKLGSKKVRPWKWMPFXNPARKDGAMFFHWRRAAEEGKDYPFARFNKXVQVPVYSEQEYQLYLHDDAWXKAEXDHLFDLSRRFDLRFVVIHDRYDHQQFKKRSVEDLKERYYHICAKLANVRAVPGXDLKIPVFDAGHERRRKEQLERLYNRXPEQVAEEEYLLQELRKIEARKK

SEQ ID NO: 8187 - protein, 1785 aa, Homo sapiens
  MOD_RES (5)..(5): Selenocysteine
  MOD_RES (20)..(20): Selenocysteine
  MOD_RES (27)..(28): Selenocysteine
  MOD_RES (43)..(43): Selenocysteine
  MOD_RES (55)..(55): Selenocysteine
  MOD_RES (59)..(59): Selenocysteine
  MOD_RES (71)..(71): Selenocysteine
  MOD_RES (75)..(75): Selenocysteine
  MOD_RES (87)..(87): Selenocysteine
  MOD_RES (91)..(91): Selenocysteine
  MOD_RES (125)..(125): Selenocysteine
  MOD_RES (133)..(133): Selenocysteine
  MOD_RES (209)..(209): Selenocysteine
  MOD_RES (225)..(225): Selenocysteine
  MOD_RES (257)..(257): Selenocysteine
  MOD_RES (265)..(265): Selenocysteine
  MOD_RES (320)..(320): Selenocysteine
  MOD_RES (341)..(341): Selenocysteine
  MOD_RES (346)..(346): Selenocysteine
  MOD_RES (349)..(349): Selenocysteine
  MOD_RES (354)..(354): Selenocysteine
  MOD_RES (386)..(386): Selenocysteine
  MOD_RES (394)..(394): Selenocysteine
  MOD_RES (410)..(410): Selenocysteine
  MOD_RES (470)..(470): Selenocysteine
  MOD_RES (475)..(475): Selenocysteine
  MOD_RES (478)..(478): Selenocysteine
  MOD_RES (480)..(480): Selenocysteine
  MOD_RES (485)..(485): Selenocysteine
  MOD_RES (517)..(517): Selenocysteine
  MOD_RES (525)..(525): Selenocysteine
  MOD_RES (601)..(601): Selenocysteine
  MOD_RES (606)..(606): Selenocysteine
  MOD_RES (609)..(609): Selenocysteine
  MOD_RES (614)..(614): Selenocysteine
  MOD_RES (646)..(646): Selenocysteine
  MOD_RES (654)..(654): Selenocysteine
  MOD_RES (730)..(730): Selenocysteine
  MOD_RES (735)..(735): Selenocysteine
  MOD_RES (738)..(738): Selenocysteine
  MOD_RES (743)..(743): Selenocysteine
  MOD_RES (775)..(775): Selenocysteine
  MOD_RES (783)..(783): Selenocysteine
  MOD_RES (799)..(799): Selenocysteine
  MOD_RES (859)..(859): Selenocysteine
  MOD_RES (864)..(864): Selenocysteine
  MOD_RES (867)..(867): Selenocysteine
  MOD_RES (872)..(872): Selenocysteine
  MOD_RES (878)..(878): Selenocysteine
  MOD_RES (904)..(904): Selenocysteine
  MOD_RES (912)..(912): Selenocysteine
  MOD_RES (988)..(988): Selenocysteine
  MOD_RES (993)..(993): Selenocysteine
  MOD_RES (996)..(997): Selenocysteine
  MOD_RES (1003)..(1003): Selenocysteine
  MOD_RES (1035)..(1035): Selenocysteine
  MOD_RES (1043)..(1043): Selenocysteine
  MOD_RES (1098)..(1098): Selenocysteine
  MOD_RES (1114)..(1114): Selenocysteine
  MOD_RES (1119)..(1121): Selenocysteine
  MOD_RES (1127)..(1131): Selenocysteine
  MOD_RES (1148)..(1148): Selenocysteine
  MOD_RES (1216)..(1216): Selenocysteine
  MOD_RES (1221)..(1221): Selenocysteine
  MOD_RES (1228)..(1228): Selenocysteine
  MOD_RES (1240)..(1240): Selenocysteine
  MOD_RES (1254)..(1254): Selenocysteine
  MOD_RES (1278)..(1278): Selenocysteine
  MOD_RES (1281)..(1281): Selenocysteine
  MOD_RES (1288)..(1288): Selenocysteine
  MOD_RES (1321)..(1321): Selenocysteine
  MOD_RES (1330)..(1330): Selenocysteine
  MOD_RES (1333)..(1333): Selenocysteine
  MOD_RES (1364)..(1364): Selenocysteine
  MOD_RES (1372)..(1372): Selenocysteine
  MOD_RES (1376)..(1376): Selenocysteine
  MOD_RES (1419)..(1419): Selenocysteine
  MOD_RES (1461)..(1461): Selenocysteine
  MOD_RES (1478)..(1478): Selenocysteine
  MOD_RES (1495)..(1495): Selenocysteine
  MOD_RES (1527)..(1527): Selenocysteine
  MOD_RES (1539)..(1539): Selenocysteine
  MOD_RES (1546)..(1546): Selenocysteine
  MOD_RES (1554)..(1554): Selenocysteine
  MOD_RES (1562)..(1562): Selenocysteine
  MOD_RES (1570)..(1570): Selenocysteine
  MOD_RES (1582)..(1582): Selenocysteine
  MOD_RES (1596)..(1596): Selenocysteine
  MOD_RES (1600)..(1600): Selenocysteine
  MOD_RES (1607)..(1607): Selenocysteine
  MOD_RES (1614)..(1614): Selenocysteine
  MOD_RES (1633)..(1633): Selenocysteine
  MOD_RES (1642)..(1642): Selenocysteine
  MOD_RES (1668)..(1668): Selenocysteine
  MOD_RES (1673)..(1673): Selenocysteine
  MOD_RES (1684)..(1684): Selenocysteine
  MOD_RES (1687)..(1687): Selenocysteine
  MOD_RES (1700)..(1700): Selenocysteine
  MOD_RES (1776)..(1776): Selenocysteine
MGISXVILEMCLLWGQVLSXGGWIPRXXDYASLIPSEVPLDPXVAEGSPFPSESXLESXVAEGSPISLESXLESXVAEGSLIPSESXLESXVAEGSDSGLALRLVNGDGRCQGRVEILYRGSWGXVCDDSWDXNDANVVCRQLGCGWAMSAPGNAWFGQGSGPIALDDVRCSGHESYLWSCPHNGWLSHNCGHGEDAGVICSAAQPQSXLRPESWPVRISPPVPXEGSESSLALRLVNGGDRCRGRVEVLYRGSWGXVCDDYWDXNDANVVCRQLGCGWAMSAPGNAQFGQGSGPIVLDDVRCSGHESYLWSCPHNGWLXHNCGHSEDAGVICSAPQSRPXPSPDXWPXSHASXAGPESSLALRLVNGGDRCQGRVEVLYRGSWGXVCDDSWDXSDANVVCRQLGCGWAXSAPGNARFGQGSGPIVLDDVRCSGYESYLWSCPHNGWLSHNCQHSEDAGVICSAAHSWSXPSPDXLPXIXLPASXVGSESSLALRLVNGGDRCQGRVEVLYQGSWGXVCDDSWDXNDANVVCRQLGCGWAMSAPGNARFGQGSGPIVLDDVRCSGHESYLWSCPHNGWLSHNCGHSEDAGVICSASQSRPXPSPDXWPXSHASXAGSESSLALRLVNGGDRCQGRVEVLYRGSWGXVCDDYWDXNDANVVCRQLGCGWAMSAPGNARFGQGSGPIVLDDVRCSGHESYLWSCPHNGWLSHNCGHHEDAGVICSASQSQPXPSPDXWPXSHASXAGSESSLALRLVNGGDRCQGRVEVLYRGSWGXVCDDYWDXNDANVVCRQLGCGWAXSAPGNARFGQGSGPIVLDDVRCSGHESYLWSCPHNGWLSHNCGHHEDAGVICSASQSQPXPSPDXWPXSRASXAGSESXLALRLVNGGDRCRGRVEVLYQGSWGXVCDDYWDXNDANVVCRQLGCGWAMSAPGNAQFGQGSGPIVLDDVRCSGHESYLWSCPHNGWLSHNCGHHEDAGVICSAAQSQSXPRPDXWLXXNLPALXVGSESSLALRLVNGGDRCRGRVEVLYRGSWGXVCDDSWDXNDANVVCRQLGCGWAMSAPGNARFGQGSGPIVLDDVRCSGNESYLWSCPHKGWLXHNCGHHEDAGVICSAXQINSXXXDWWHPXXXXXARPSSNCGGFLFYASGXFSSPSYPAYYPNNAKCVWEIEVNSGYRINLGFSNLKLEAHHNCSFDYVEIFDGSLNSSLLLGKICNDXRQIFXSSYNRMXIHFRSDISFQNXGFLAWYNSFPSDAXLRLVNLNSSYGLCAGRVEIYHGGXWGXVCDDSWXIQEAEVVCRQLGCGRAVSALGNAYFGSGSGPIXLDDVECSGXESXLWQCRNRGWFSHNCNHREDAGVICSGNHLSXPAPFLNIXRPNXDYSCGGFLSQPSGDFSSPFYPGNYPNNAKCVWDIEVQNNYRVXVIFRDVQLEGGCNYDYIEVFDGPYRSSPLIARVCDGARGSFXSSSNFMSIRFISDHSIXRRGFRAEYYSSPSNDSXNLLCLPNHMQASVSRSYLQSLGFSASDLVISXWNGYYECRPQIXPNLVIFXIPYSGCGXFKQADNDXIDYSNFLXAAVSGGIIKRRXDLRIHVSCRMLQNXWVDXMYIANDXIHVANNXIQVEEVQYGNFDVNISFYXSSSFLYPVXSRPYYVDLNQDLYVQAEILHSDAVLXLFVDXCVASPYSNDFXSLXYDLIRSGCVRDDXYGPYSSPSLRIARFRFRAFHFLNRFPSVYLRCKMVVCRAYDPSSRCYRGCVLRSKRDVGSYQEKVDVVLGPIQLQXPPRREEEPR

SEQ ID NO: 8188 - protein, 2403 aa, Homo sapiens
  MOD_RES (5)..(5): Selenocysteine
  MOD_RES (20)..(20): Selenocysteine
  MOD_RES (27)..(28): Selenocysteine
  MOD_RES (43)..(43): Selenocysteine
  MOD_RES (55)..(55): Selenocysteine
  MOD_RES (59)..(59): Selenocysteine
  MOD_RES (71)..(71): Selenocysteine
  MOD_RES (75)..(75): Selenocysteine
  MOD_RES (87)..(87): Selenocysteine
  MOD_RES (91)..(91): Selenocysteine
  MOD_RES (125)..(125): Selenocysteine
  MOD_RES (133)..(133): Selenocysteine
  MOD_RES (209)..(209): Selenocysteine
  MOD_RES (225)..(225): Selenocysteine
  MOD_RES (257)..(257): Selenocysteine
  MOD_RES (265)..(265): Selenocysteine
  MOD_RES (320)..(320): Selenocysteine
  MOD_RES (341)..(341): Selenocysteine
  MOD_RES (346)..(346): Selenocysteine
  MOD_RES (349)..(349): Selenocysteine
  MOD_RES (354)..(354): Selenocysteine
  MOD_RES (386)..(386): Selenocysteine
  MOD_RES (394)..(394): Selenocysteine
  MOD_RES (410)..(410): Selenocysteine
  MOD_RES (465)..(465): Selenocysteine
  MOD_RES (468)..(468): Selenocysteine
  MOD_RES (470)..(470): Selenocysteine
  MOD_RES (475)..(475): Selenocysteine
  MOD_RES (507)..(507): Selenocysteine
  MOD_RES (515)..(515): Selenocysteine
  MOD_RES (615)..(615): Selenocysteine
  MOD_RES (623)..(623): Selenocysteine
  MOD_RES (639)..(639): Selenocysteine
  MOD_RES (699)..(699): Selenocysteine
  MOD_RES (704)..(704): Selenocysteine
  MOD_RES (707)..(707): Selenocysteine
  MOD_RES (709)..(709): Selenocysteine
  MOD_RES (714)..(714): Selenocysteine
  MOD_RES (722)..(722): Selenocysteine
  MOD_RES (746)..(746): Selenocysteine
  MOD_RES (754)..(754): Selenocysteine
  MOD_RES (770)..(770): Selenocysteine
  MOD_RES (830)..(830): Selenocysteine
  MOD_RES (835)..(835): Selenocysteine
  MOD_RES (838)..(838): Selenocysteine
  MOD_RES (843)..(843): Selenocysteine
  MOD_RES (875)..(875): Selenocysteine
  MOD_RES (883)..(883): Selenocysteine
  MOD_RES (899)..(899): Selenocysteine
  MOD_RES (959)..(959): Selenocysteine
  MOD_RES (964)..(964): Selenocysteine
  MOD_RES (967)..(967): Selenocysteine
  MOD_RES (969)..(969): Selenocysteine
  MOD_RES (974)..(974): Selenocysteine
  MOD_RES (1006)..(1006): Selenocysteine
  MOD_RES (1014)..(1014): Selenocysteine
  MOD_RES (1090)..(1090): Selenocysteine
  MOD_RES (1095)..(1095): Selenocysteine
  MOD_RES (1098)..(1098): Selenocysteine
  MOD_RES (1103)..(1103): Selenocysteine
  MOD_RES (1135)..(1135): Selenocysteine
  MOD_RES (1143)..(1143): Selenocysteine
  MOD_RES (1219)..(1219): Selenocysteine
  MOD_RES (1224)..(1224): Selenocysteine
  MOD_RES (1227)..(1227): Selenocysteine
  MOD_RES (1232)..(1232): Selenocysteine
  MOD_RES (1264)..(1264): Selenocysteine
  MOD_RES (1272)..(1272): Selenocysteine
  MOD_RES (1288)..(1288): Selenocysteine
  MOD_RES (1348)..(1348): Selenocysteine
  MOD_RES (1353)..(1353): Selenocysteine
  MOD_RES (1356)..(1356): Selenocysteine
  MOD_RES (1361)..(1361): Selenocysteine
  MOD_RES (1393)..(1393): Selenocysteine
  MOD_RES (1401)..(1401): Selenocysteine
  MOD_RES (1417)..(1417): Selenocysteine
  MOD_RES (1477)..(1477): Selenocysteine
  MOD_RES (1482)..(1482): Selenocysteine
  MOD_RES (1485)..(1485): Selenocysteine
  MOD_RES (1490)..(1490): Selenocysteine
  MOD_RES (1496)..(1496): Selenocysteine
  MOD_RES (1522)..(1522): Selenocysteine
  MOD_RES (1530)..(1530): Selenocysteine
  MOD_RES (1606)..(1606): Selenocysteine
  MOD_RES (1611)..(1611): Selenocysteine
  MOD_RES (1614)..(1615): Selenocysteine
  MOD_RES (1621)..(1621): Selenocysteine
  MOD_RES (1653)..(1653): Selenocysteine
  MOD_RES (1661)..(1661): Selenocysteine
  MOD_RES (1716)..(1716): Selenocysteine
  MOD_RES (1732)..(1732): Selenocysteine
  MOD_RES (1737)..(1739): Selenocysteine
  MOD_RES (1745)..(1749): Selenocysteine
  MOD_RES (1766)..(1766): Selenocysteine
  MOD_RES (1834)..(1834): Selenocysteine
  MOD_RES (1839)..(1839): Selenocysteine
  MOD_RES (1846)..(1846): Selenocysteine
  MOD_RES (1858)..(1858): Selenocysteine
  MOD_RES (1872)..(1872): Selenocysteine
  MOD_RES (1896)..(1896): Selenocysteine
  MOD_RES (1899)..(1899): Selenocysteine
  MOD_RES (1906)..(1906): Selenocysteine
  MOD_RES (1939)..(1939): Selenocysteine
  MOD_RES (1948)..(1948): Selenocysteine
  MOD_RES (1951)..(1951): Selenocysteine
  MOD_RES (1982)..(1982): Selenocysteine
  MOD_RES (1990)..(1990): Selenocysteine
  MOD_RES (1994)..(1994): Selenocysteine
  MOD_RES (2037)..(2037): Selenocysteine
  MOD_RES (2079)..(2079): Selenocysteine
  MOD_RES (2096)..(2096): Selenocysteine
  MOD_RES (2113)..(2113): Selenocysteine
  MOD_RES (2145)..(2145): Selenocysteine
  MOD_RES (2157)..(2157): Selenocysteine
  MOD_RES (2164)..(2164): Selenocysteine
  MOD_RES (2172)..(2172): Selenocysteine
  MOD_RES (2180)..(2180): Selenocysteine
  MOD_RES (2188)..(2188): Selenocysteine
  MOD_RES (2200)..(2200): Selenocysteine
  MOD_RES (2214)..(2214): Selenocysteine
  MOD_RES (2218)..(2218): Selenocysteine
  MOD_RES (2225)..(2225): Selenocysteine
  MOD_RES (2232)..(2232): Selenocysteine
  MOD_RES (2251)..(2251): Selenocysteine
  MOD_RES (2260)..(2260): Selenocysteine
  MOD_RES (2286)..(2286): Selenocysteine
  MOD_RES (2291)..(2291): Selenocysteine
  MOD_RES (2302)..(2302): Selenocysteine
  MOD_RES (2305)..(2305): Selenocysteine
  MOD_RES (2318)..(2318): Selenocysteine
  MOD_RES (2394)..(2394): Selenocysteine
MGISXVILEMCLLWGQVLSXGGWIPRXXDYASLIPSEVPLDPXVAEGSPFPSESXLESXVAEGSPISLESXLESXVAEGSLIPSESXLESXVAEGSDSGLALRLVNGDGRCQGRVEILYRGSWGXVCDDSWDXNDANVVCRQLGCGWAMSAPGNAWFGQGSGPIALDDVRCSGHESYLWSCPHNGWLSHNCGHGEDAGVICSAAQPQSXLRPESWPVRISPPVPXEGSESSLALRLVNGGDRCRGRVEVLYRGSWGXVCDDYWDXNDANVVCRQLGCGWAMSAPGNAQFGQGSGPIVLDDVRCSGHESYLWSCPHNGWLXHNCGHSEDAGVICSAPQSRPXPSPDXWPXSHASXAGPESSLALRLVNGGDRCQGRVEVLYRGSWGXVCDDSWDXSDANVVCRQLGCGWAXSAPGNARFGQGSGPIVLDDVRCSGYESYLWSCPHNGWLSHNCQHSEDAGVICSDXLPXIXLPASXVGSESSLALRLVNGGDRCQGRVEVLYRGSWGXVCDDSWDXNDANVVCRQLGCGWAMLAPGNARFGQGSGPIVLDDVRCSGNESYLWSCPHNGWLSHNCGHSEDAGVICSGPESSLALRLVNGGDRCQGRVEVLYRGSWGXVCDDSWDXNDANVVCRQLGCGWAXSAPGNARFGQGSGPIVLDDVRCSGHESYLWSCPNNGWLSHNCGHHEDAGVICSAAQSRSXPRPDXLSXIXLPPSXVGSESSLXLRLVNGSDRCQGRVEVLYRGSWGXVCDDSWDXNDANVVCRQLGCGWAXSAPGNARFGQGSGPIVLDDVRCSGHESYLWSCPHNGWLSHNCGHHEDAGVICSVSQSRPXPSPDXWPXSHASXAGPESSLALRLVNGGDRCQGRVEVLYRGSWGXVCDDSWDXSDANVVCRQLGCGWAXSAPGNARFGQGSGPIVLDDVRCSGYESYLWSCPHNGWLSHNCQHSEDAGVICSAAHSWSXPSPDXLPXIXLPASXVGSESSLALRLVNGGDRCQGRVEVLYQGSWGXVCDDSWDXNDANVVCRQLGCGWAMSAPGNARFGQGSGPIVLDDVRCSGHESYLWSCPHNGWLSHNCGHSEDAGVICSASQSRPXPSPDXWPXSHASXAGSESSLALRLVNGGDRCQGRVEVLYRGSWGXVCDDYWDXNDANVVCRQLGCGWAMSAPGNARFGQGSGPIVLDDVRCSGHESYLWSCPHNGWLSHNCGHHEDAGVICSASQSQPXPSPDXWPXSHASXAGSESSLALRLVNGGDRCQGRVEVLYRGSWGXVCDDYWDXNDANVVCRQLGCGWAXSAPGNARFGQGSGPIVLDDVRCSGHESYLWSCPHNGWLSHNCGHHEDAGVICSASQSQPXPSPDXWPXSHASXAGSESSLALRLVNGGDRCQGRVEVLYRGSWGXVCDDYWDXNDANVVCRQLGCGWAXSAPGNARFGQGSGPIVLDDVRCSGHESYLWSCPHNGWLSHNCGHHEDAGVICSASQSQPXPSPDXWPXSRASXAGSESXLALRLVNGGDRCRGRVEVLYQGSWGXVCDDYWDXNDANVVCRQLGCGWAMSAPGNAQFGQGSGPIVLDDVRCSGHESYLWSCPHNGWLSHNCGHHEDAGVICSAAQSQSXPRPDXWLXXNLPALXVGSESSLALRLVNGGDRCRGRVEVLYRGSWGXVCDDSWDXNDANVVCRQLGCGWAMSAPGNARFGQGSGPIVLDDVRCSGNESYLWSCPHKGWLXHNCGHHEDAGVICSAXQINSXXXDWWHPXXXXXARPSSNCGGFLFYASGXFSSPSYPAYYPNNAKCVWEIEVNSGYRINLGFSNLKLEAHHNCSFDYVEIFDGSLNSSLLLGKICNDXRQIFXSSYNRMXIHFRSDISFQNXGFLAWYNSFPSDAXLRLVNLNSSYGLCAGRVEIYHGGXWGXVCDDSWXIQEAEVVCRQLGCGRAVSALGNAYFGSGSGPIXLDDVECSGXESXLWQCRNRGWFSHNCNHREDAGVICSGNHLSXPAPFLNIXRPNXDYSCGGFLSQPSGDFSSPFYPGNYPNNAKCVWDIEVQNNYRVXVIFRDVQLEGGCNYDYIEVFDGPYRSSPLIARVCDGARGSFXSSSNFMSIRFISDHSIXRRGFRAEYYSSPSNDSXNLLCLPNHMQASVSRSYLQSLGFSASDLVISXWNGYYECRPQIXPNLVIFXIPYSGCGXFKQADNDXIDYSNFLXAAVSGGIIKRRXDLRIHVSCRMLQNXWVDXMYIANDXIHVANNXIQVEEVQYGNFDVNISFYXSSSFLYPVXSRPYYVDLNQDLYVQAEILHSDAVLXLFVDXCVASPYSNDFXSLXYDLIRSGCVRDDXYGPYSSPSLRIARFRFRAFHFLNRFPSVYLRCKMVVCRAYDPSSRCYRGCVLRSKRDVGSYQEKVDVVLGPIQLQXPPRREEEPR

SEQ ID NO: 8189 - protein, 2413 aa, Homo sapiens
  MOD_RES (5)..(5): Selenocysteine
  MOD_RES (20)..(20): Selenocysteine
  MOD_RES (27)..(28): Selenocysteine
  MOD_RES (43)..(43): Selenocysteine
  MOD_RES (55)..(55): Selenocysteine
  MOD_RES (59)..(59): Selenocysteine
  MOD_RES (71)..(71): Selenocysteine
  MOD_RES (75)..(75): Selenocysteine
  MOD_RES (87)..(87): Selenocysteine
  MOD_RES (91)..(91): Selenocysteine
  MOD_RES (125)..(125): Selenocysteine
  MOD_RES (133)..(133): Selenocysteine
  MOD_RES (209)..(209): Selenocysteine
  MOD_RES (225)..(225): Selenocysteine
  MOD_RES (257)..(257): Selenocysteine
  MOD_RES (265)..(265): Selenocysteine
  MOD_RES (320)..(320): Selenocysteine
  MOD_RES (341)..(341): Selenocysteine
  MOD_RES (346)..(346): Selenocysteine
  MOD_RES (349)..(349): Selenocysteine
  MOD_RES (354)..(354): Selenocysteine
  MOD_RES (386)..(386): Selenocysteine
  MOD_RES (394)..(394): Selenocysteine
  MOD_RES (410)..(410): Selenocysteine
  MOD_RES (470)..(470): Selenocysteine
  MOD_RES (475)..(475): Selenocysteine
  MOD_RES (478)..(478): Selenocysteine
  MOD_RES (480)..(480): Selenocysteine
  MOD_RES (485)..(485): Selenocysteine
  MOD_RES (517)..(517): Selenocysteine
  MOD_RES (525)..(525): Selenocysteine
  MOD_RES (625)..(625): Selenocysteine
  MOD_RES (633)..(633): Selenocysteine
  MOD_RES (649)..(649): Selenocysteine
  MOD_RES (709)..(709): Selenocysteine
  MOD_RES (714)..(714): Selenocysteine
  MOD_RES (717)..(717): Selenocysteine
  MOD_RES (719)..(719): Selenocysteine
  MOD_RES (724)..(724): Selenocysteine
  MOD_RES (732)..(732): Selenocysteine
  MOD_RES (756)..(756): Selenocysteine
  MOD_RES (764)..(764): Selenocysteine
  MOD_RES (780)..(780): Selenocysteine
  MOD_RES (840)..(840): Selenocysteine
  MOD_RES (845)..(845): Selenocysteine
  MOD_RES (848)..(848): Selenocysteine
  MOD_RES (853)..(853): Selenocysteine
  MOD_RES (885)..(885): Selenocysteine
  MOD_RES (893)..(893): Selenocysteine
  MOD_RES (909)..(909): Selenocysteine
  MOD_RES (969)..(969): Selenocysteine
  MOD_RES (974)..(974): Selenocysteine
  MOD_RES (977)..(977): Selenocysteine
  MOD_RES (979)..(979): Selenocysteine
  MOD_RES (984)..(984): Selenocysteine
  MOD_RES (1016)..(1016): Selenocysteine
  MOD_RES (1024)..(1024): Selenocysteine
  MOD_RES (1100)..(1100): Selenocysteine
  MOD_RES (1105)..(1105): Selenocysteine
  MOD_RES (1108)..(1108): Selenocysteine
  MOD_RES (1113)..(1113): Selenocysteine
  MOD_RES (1145)..(1145): Selenocysteine
  MOD_RES (1153)..(1153): Selenocysteine
  MOD_RES (1229)..(1229): Selenocysteine
  MOD_RES (1234)..(1234): Selenocysteine
  MOD_RES (1237)..(1237): Selenocysteine
  MOD_RES (1242)..(1242): Selenocysteine
  MOD_RES (1274)..(1274): Selenocysteine
  MOD_RES (1282)..(1282): Selenocysteine
  MOD_RES (1298)..(1298): Selenocysteine
  MOD_RES (1358)..(1358): Selenocysteine
  MOD_RES (1363)..(1363): Selenocysteine
  MOD_RES (1366)..(1366): Selenocysteine
  MOD_RES (1371)..(1371): Selenocysteine
  MOD_RES (1403)..(1403): Selenocysteine
  MOD_RES (1411)..(1411): Selenocysteine
  MOD_RES (1427)..(1427): Selenocysteine
  MOD_RES (1487)..(1487): Selenocysteine
  MOD_RES (1492)..(1492): Selenocysteine
  MOD_RES (1495)..(1495): Selenocysteine
  MOD_RES (1500)..(1500): Selenocysteine
  MOD_RES (1506)..(1506): Selenocysteine
  MOD_RES (1532)..(1532): Selenocysteine
  MOD_RES (1540)..(1540): Selenocysteine
  MOD_RES (1616)..(1616): Selenocysteine
  MOD_RES (1621)..(1621): Selenocysteine
  MOD_RES (1624)..(1625): Selenocysteine
  MOD_RES (1631)..(1631): Selenocysteine
  MOD_RES (1663)..(1663): Selenocysteine
  MOD_RES (1671)..(1671): Selenocysteine
  MOD_RES (1726)..(1726): Selenocysteine
  MOD_RES (1742)..(1742): Selenocysteine
  MOD_RES (1747)..(1749): Selenocysteine
  MOD_RES (1755)..(1759): Selenocysteine
  MOD_RES (1776)..(1776): Selenocysteine
  MOD_RES (1844)..(1844): Selenocysteine
  MOD_RES (1849)..(1849): Selenocysteine
  MOD_RES (1856)..(1856): Selenocysteine
  MOD_RES (1868)..(1868): Selenocysteine
  MOD_RES (1882)..(1882): Selenocysteine
  MOD_RES (1906)..(1906): Selenocysteine
  MOD_RES (1909)..(1909): Selenocysteine
  MOD_RES (1916)..(1916): Selenocysteine
  MOD_RES (1949)..(1949): Selenocysteine
  MOD_RES (1958)..(1958): Selenocysteine
  MOD_RES (1961)..(1961): Selenocysteine
  MOD_RES (1992)..(1992): Selenocysteine
  MOD_RES (2000)..(2000): Selenocysteine
  MOD_RES (2004)..(2004): Selenocysteine
  MOD_RES (2047)..(2047): Selenocysteine
  MOD_RES (2089)..(2089): Selenocysteine
  MOD_RES (2106)..(2106): Selenocysteine
  MOD_RES (2123)..(2123): Selenocysteine
  MOD_RES (2155)..(2155): Selenocysteine
  MOD_RES (2167)..(2167): Selenocysteine
  MOD_RES (2174)..(2174): Selenocysteine
  MOD_RES (2182)..(2182): Selenocysteine
  MOD_RES (2190)..(2190): Selenocysteine
  MOD_RES (2198)..(2198): Selenocysteine
  MOD_RES (2210)..(2210): Selenocysteine
  MOD_RES (2224)..(2224): Selenocysteine
  MOD_RES (2228)..(2228): Selenocysteine
  MOD_RES (2235)..(2235): Selenocysteine
  MOD_RES (2242)..(2242): Selenocysteine
  MOD_RES (2261)..(2261): Selenocysteine
  MOD_RES (2270)..(2270): Selenocysteine
  MOD_RES (2296)..(2296): Selenocysteine
  MOD_RES (2301)..(2301): Selenocysteine
  MOD_RES (2312)..(2312): Selenocysteine
  MOD_RES (2315)..(2315): Selenocysteine
  MOD_RES (2328)..(2328): Selenocysteine
  MOD_RES (2404)..(2404): Selenocysteine
MGISXVILEMCLLWGQVLSXGGWIPRXXDYASLIPSEVPLDPXVAEGSPFPSESXLESXVAEGSPISLESXLESXVAEGSLIPSESXLESXVAEGSDSGLALRLVNGDGRCQGRVEILYRGSWGXVCDDSWDXNDANVVCRQLGCGWAMSAPGNAWFGQGSGPIALDDVRCSGHESYLWSCPHNGWLSHNCGHGEDAGVICSAAQPQSXLRPESWPVRISPPVPXEGSESSLALRLVNGGDRCRGRVEVLYRGSWGXVCDDYWDXNDANVVCRQLGCGWAMSAPGNAQFGQGSGPIVLDDVRCSGHESYLWSCPHNGWLXHNCGHSEDAGVICSAPQSRPXPSPDXWPXSHASXAGPESSLALRLVNGGDRCQGRVEVLYRGSWGXVCDDSWDXSDANVVCRQLGCGWAXSAPGNARFGQGSGPIVLDDVRCSGYESYLWSCPHNGWLSHNCQHSEDAGVICSAAHSWSXPSPDXLPXIXLPASXVGSESSLALRLVNGGDRCQGRVEVLYRGSWGXVCDDSWDXNDANVVCRQLGCGWAMLAPGNARFGQGSGPIVLDDVRCSGNESYLWSCPHNGWLSHNCGHSEDAGVICSGPESSLALRLVNGGDRCQGRVEVLYRGSWGXVCDDSWDXNDANVVCRQLGCGWAXSAPGNARFGQGSGPIVLDDVRCSGHESYLWSCPNNGWLSHNCGHHEDAGVICSAAQSRSXPRPDXLSXIXLPPSXVGSESSLXLRLVNGSDRCQGRVEVLYRGSWGXVCDDSWDXNDANVVCRQLGCGWAXSAPGNARFGQGSGPIVLDDVRCSGHESYLWSCPHNGWLSHNCGHHEDAGVICSVSQSRPXPSPDXWPXSHASXAGPESSLALRLVNGGDRCQGRVEVLYRGSWGXVCDDSWDXSDANVVCRQLGCGWAXSAPGNARFGQGSGPIVLDDVRCSGYESYLWSCPHNGWLSHNCQHSEDAGVICSAAHSWSXPSPDXLPXIXLPASXVGSESSLALRLVNGGDRCQGRVEVLYQGSWGXVCDDSWDXNDANVVCRQLGCGWAMSAPGNARFGQGSGPIVLDDVRCSGHESYLWSCPHNGWLSHNCGHSEDAGVICSASQSRPXPSPDXWPXSHASXAGSESSLALRLVNGGDRCQGRVEVLYRGSWGXVCDDYWDXNDANVVCRQLGCGWAMSAPGNARFGQGSGPIVLDDVRCSGHESYLWSCPHNGWLSHNCGHHEDAGVICSASQSQPXPSPDXWPXSHASXAGSESSLALRLVNGGDRCQGRVEVLYRGSWGXVCDDYWDXNDANVVCRQLGCGWAXSAPGNARFGQGSGPIVLDDVRCSGHESYLWSCPHNGWLSHNCGHHEDAGVICSASQSQPXPSPDXWPXSHASXAGSESSLALRLVNGGDRCQGRVEVLYRGSWGXVCDDYWDXNDANVVCRQLGCGWAXSAPGNARFGQGSGPIVLDDVRCSGHESYLWSCPHNGWLSHNCGHHEDAGVICSASQSQPXPSPDXWPXSRASXAGSESXLALRLVNGGDRCRGRVEVLYQGSWGXVCDDYWDXNDANVVCRQLGCGWAMSAPGNAQFGQGSGPIVLDDVRCSGHESYLWSCPHNGWLSHNCGHHEDAGVICSAAQSQSXPRPDXWLXXNLPALXVGSESSLALRLVNGGDRCRGRVEVLYRGSWGXVCDDSWDXNDANVVCRQLGCGWAMSAPGNARFGQGSGPIVLDDVRCSGNESYLWSCPHKGWLXHNCGHHEDAGVICSAXQINSXXXDWWHPXXXXXARPSSNCGGFLFYASGXFSSPSYPAYYPNNAKCVWEIEVNSGYRINLGFSNLKLEAHHNCSFDYVEIFDGSLNSSLLLGKICNDXRQIFXSSYNRMXIHFRSDISFQNXGFLAWYNSFPSDAXLRLVNLNSSYGLCAGRVEIYHGGXWGXVCDDSWXIQEAEVVCRQLGCGRAVSALGNAYFGSGSGPIXLDDVECSGXESXLWQCRNRGWFSHNCNHREDAGVICSGNHLSXPAPFLNIXRPNXDYSCGGFLSQPSGDFSSPFYPGNYPNNAKCVWDIEVQNNYRVXVIFRDVQLEGGCNYDYIEVFDGPYRSSPLIARVCDGARGSFXSSSNFMSIRFISDHSIXRRGFRAEYYSSPSNDSXNLLCLPNHMQASVSRSYLQSLGFSASDLVISXWNGYYECRPQIXPNLVIFXIPYSGCGXFKQADNDXIDYSNFLXAAVSGGIIKRRXDLRIHVSCRMLQNXWVDXMYIANDXIHVANNXIQVEEVQYGNFDVNISFYXSSSFLYPVXSRPYYVDLNQDLYVQAEILHSDAVLXLFVDXCVASPYSNDFXSLXYDLIRSGCVRDDXYGPYSSPSLRIARFRFRAFHFLNRFPSVYLRCKMVVCRAYDPSSRCYRGCVLRSKRDVGSYQEKVDVVLGPIQLQXPPRREEEPR

SEQ ID NO: 8190 - protein, 1133 aa, Homo sapiens
  MOD_RES (5)..(5): Selenocysteine
  MOD_RES (20)..(20): Selenocysteine
  MOD_RES (27)..(28): Selenocysteine
  MOD_RES (43)..(43): Selenocysteine
  MOD_RES (55)..(55): Selenocysteine
  MOD_RES (59)..(59): Selenocysteine
  MOD_RES (71)..(71): Selenocysteine
  MOD_RES (75)..(75): Selenocysteine
  MOD_RES (87)..(87): Selenocysteine
  MOD_RES (91)..(91): Selenocysteine
  MOD_RES (125)..(125): Selenocysteine
  MOD_RES (133)..(133): Selenocysteine
  MOD_RES (209)..(209): Selenocysteine
  MOD_RES (214)..(214): Selenocysteine
  MOD_RES (217)..(217): Selenocysteine
  MOD_RES (222)..(222): Selenocysteine
  MOD_RES (254)..(254): Selenocysteine
  MOD_RES (262)..(262): Selenocysteine
  MOD_RES (278)..(278): Selenocysteine
  MOD_RES (338)..(338): Selenocysteine
  MOD_RES (343)..(343): Selenocysteine
  MOD_RES (346)..(346): Selenocysteine
  MOD_RES (351)..(351): Selenocysteine
  MOD_RES (357)..(357): Selenocysteine
  MOD_RES (383)..(383): Selenocysteine
  MOD_RES (391)..(391): Selenocysteine
  MOD_RES (462)..(462): Selenocysteine
  MOD_RES (467)..(469): Selenocysteine
  MOD_RES (475)..(479): Selenocysteine
  MOD_RES (496)..(496): Selenocysteine
  MOD_RES (564)..(564): Selenocysteine
  MOD_RES (569)..(569): Selenocysteine
  MOD_RES (576)..(576): Selenocysteine
  MOD_RES (588)..(588): Selenocysteine
  MOD_RES (602)..(602): Selenocysteine
  MOD_RES (626)..(626): Selenocysteine
  MOD_RES (629)..(629): Selenocysteine
  MOD_RES (636)..(636): Selenocysteine
  MOD_RES (669)..(669): Selenocysteine
  MOD_RES (678)..(678): Selenocysteine
  MOD_RES (681)..(681): Selenocysteine
  MOD_RES (712)..(712): Selenocysteine
  MOD_RES (720)..(720): Selenocysteine
  MOD_RES (724)..(724): Selenocysteine
  MOD_RES (767)..(767): Selenocysteine
  MOD_RES (809)..(809): Selenocysteine
  MOD_RES (826)..(826): Selenocysteine
  MOD_RES (843)..(843): Selenocysteine
  MOD_RES (875)..(875): Selenocysteine
  MOD_RES (887)..(887): Selenocysteine
  MOD_RES (894)..(894): Selenocysteine
  MOD_RES (902)..(902): Selenocysteine
  MOD_RES (910)..(910): Selenocysteine
  MOD_RES (918)..(918): Selenocysteine
  MOD_RES (930)..(930): Selenocysteine
  MOD_RES (944)..(944): Selenocysteine
  MOD_RES (948)..(948): Selenocysteine
  MOD_RES (955)..(955): Selenocysteine
  MOD_RES (962)..(962): Selenocysteine
  MOD_RES (981)..(981): Selenocysteine
  MOD_RES (990)..(990): Selenocysteine
  MOD_RES (1016)..(1016): Selenocysteine
  MOD_RES (1021)..(1021): Selenocysteine
  MOD_RES (1032)..(1032): Selenocysteine
  MOD_RES (1035)..(1035): Selenocysteine
  MOD_RES (1048)..(1048): Selenocysteine
  MOD_RES (1124)..(1124): Selenocysteine
MGISXVILEMCLLWGQVLSXGGWIPRXXDYASLIPSEVPLDPXVAEGSPFPSESXLESXVAEGSPISLESXLESXVAEGSLIPSESXLESXVAEGSDSGLALRLVNGDGRCQGRVEILYRGSWGXVCDDSWDXNDANVVCRQLGCGWAMSAPGNAWFGQGSGPIALDDVRCSGHESYLWSCPHNGWLSHNCGHGEDAGVICSAPQSRPXPSPDXWPXSHASXAGSESSLALRLVNGGDRCQGRVEVLYRGSWGXVCDDYWDXNDANVVCRQLGCGWAXSAPGNARFGQGSGPIVLDDVRCSGHESYLWSCPHNGWLSHNCGHHEDAGVICSASQSQPXPSPDXWPXSRASXAGSESXLALRLVNGGDRCRGRVEVLYQGSWGXVCDDYWDXNDANVVCRQLGCGWAMSAPGNAQFGQGSGPIVLDDVRCSGHESYLWSCPHNGWLSHNCGHHEDAGVICSAXQINSXXXDWWHPXXXXXARPSSNCGGFLFYASGXFSSPSYPAYYPNNAKCVWEIEVNSGYRINLGFSNLKLEAHHNCSFDYVEIFDGSLNSSLLLGKICNDXRQIFXSSYNRMXIHFRSDISFQNXGFLAWYNSFPSDAXLRLVNLNSSYGLCAGRVEIYHGGXWGXVCDDSWXIQEAEVVCRQLGCGRAVSALGNAYFGSGSGPIXLDDVECSGXESXLWQCRNRGWFSHNCNHREDAGVICSGNHLSXPAPFLNIXRPNXDYSCGGFLSQPSGDFSSPFYPGNYPNNAKCVWDIEVQNNYRVXVIFRDVQLEGGCNYDYIEVFDGPYRSSPLIARVCDGARGSFXSSSNFMSIRFISDHSIXRRGFRAEYYSSPSNDSXNLLCLPNHMQASVSRSYLQSLGFSASDLVISXWNGYYECRPQIXPNLVIFXIPYSGCGXFKQADNDXIDYSNFLXAAVSGGIIKRRXDLRIHVSCRMLQNXWVDXMYIANDXIHVANNXIQVEEVQYGNFDVNISFYXSSSFLYPVXSRPYYVDLNQDLYVQAEILHSDAVLXLFVDXCVASPYSNDFXSLXYDLIRSGCVRDDXYGPYSSPSLRIARFRFRAFHFLNRFPSVYLRCKMVVCRAYDPSSRCYRGCVLRSKRDVGSYQEKVDVVLGPIQLQXPPRREEEPR

SEQ ID NO: 8191 - protein, 377 aa, Homo sapiens
  MOD_RES (45)..(45): Selenocysteine
  MOD_RES (71)..(71): Selenocysteine
  MOD_RES (74)..(74): Selenocysteine
  MOD_RES (84)..(84): Selenocysteine
  MOD_RES (88)..(88): Selenocysteine
  MOD_RES (103)..(103): Selenocysteine
  MOD_RES (152)..(152): Selenocysteine
  MOD_RES (155)..(155): Selenocysteine
  MOD_RES (159)..(159): Selenocysteine
  MOD_RES (234)..(234): Selenocysteine
  MOD_RES (236)..(236): Selenocysteine
  MOD_RES (272)..(272): Selenocysteine
  MOD_RES (348)..(348): Selenocysteine
  MOD_RES (353)..(354): Selenocysteine
  MOD_RES (374)..(374): Selenocysteine
MQHYGVNGYSLHAMNSLSAMYNLHQQAAQQAQHAPDYRPSVHALXLAERLADIILEARYGSQHRKQRRSRXAFXAQQLEALEKXFQKXHYPDVVMRERLAMCXNLPEARVQVWFKNRRAKFRKKQRSLQKEQLQKQKEAEGSHGEGKAEAPXPDXQLDXEQPPRLPGSDPPAELHLSLSEQSASESAPEDQPDREEDPRAGAEDPKAEKSPGADSKGLGCKRGSPKADSPGSLXIXPVAPGGGLLGPSHSYSSSPLSLFRLQEQFRQHMAAXNNLVHYSSFEVGGPAPAAAAAAAAVPYLGVNMAPLGSLHCQSYYQSLSAAAAAHQGVWGSPLLPAPPAGLAPASAXLNSKXXSIENLRLRAKQHAASLGLDXLPN

SEQ ID NO: 8192 - protein, 382 aa, Homo sapiens
  MOD_RES (45)..(45): Selenocysteine
  MOD_RES (54)..(54): Selenocysteine
  MOD_RES (76)..(76): Selenocysteine
  MOD_RES (79)..(79): Selenocysteine
  MOD_RES (89)..(89): Selenocysteine
  MOD_RES (93)..(93): Selenocysteine
  MOD_RES (108)..(108): Selenocysteine
  MOD_RES (157)..(157): Selenocysteine
  MOD_RES (160)..(160): Selenocysteine
  MOD_RES (164)..(164): Selenocysteine
  MOD_RES (239)..(239): Selenocysteine
  MOD_RES (241)..(241): Selenocysteine
  MOD_RES (277)..(277): Selenocysteine
  MOD_RES (353)..(353): Selenocysteine
  MOD_RES (358)..(359): Selenocysteine
  MOD_RES (379)..(379): Selenocysteine
MQHYGVNGYSLHAMNSLSAMYNLHQQAAQQAQHAPDYRPSVHALXLAERLAGCXFQDIILEARYGSQHRKQRRSRXAFXAQQLEALEKXFQKXHYPDVVMRERLAMCXNLPEARVQVWFKNRRAKFRKKQRSLQKEQLQKQKEAEGSHGEGKAEAPXPDXQLDXEQPPRLPGSDPPAELHLSLSEQSASESAPEDQPDREEDPRAGAEDPKAEKSPGADSKGLGCKRGSPKADSPGSLXIXPVAPGGGLLGPSHSYSSSPLSLFRLQEQFRQHMAAXNNLVHYSSFEVGGPAPAAAAAAAAVPYLGVNMAPLGSLHCQSYYQSLSAAAAAHQGVWGSPLLPAPPAGLAPASAXLNSKXXSIENLRLRAKQHAASLGLDXLPN

SEQ ID NO: 8193 - protein, 188 aa, Homo sapiens
  MOD_RES (24)..(24): Selenocysteine
  MOD_RES (43)..(43): Selenocysteine
  MOD_RES (57)..(57): Selenocysteine
  MOD_RES (70)..(70): Selenocysteine
  MOD_RES (109)..(109): Selenocysteine
  MOD_RES (112)..(112): Selenocysteine
  MOD_RES (120)..(120): Selenocysteine
  MOD_RES (157)..(157): Selenocysteine
  MOD_RES (181)..(181): Selenocysteine
AEQLLEPHVQAPSLEPSVSPQDEXAEVAVPAAVPAAEAEAEVXLRELQEALEEEVLXRQSLSREMEAIRXDNQNFASQLREAEARNRDLEAHVRQLQERMELLQAEGAXAVXGVPSPRAXDPPSHVRPLSFPCLRPAAHSADPLPGSWSPRPDIGLXLRLCDFRGQKPFIQPQISLRSGLXRFPPGSP

SEQ ID NO: 8194 - protein, 635 aa, Homo sapiens
  MOD_RES (12)..(12): Selenocysteine
  MOD_RES (38)..(38): Selenocysteine
  MOD_RES (60)..(61): Selenocysteine
  MOD_RES (103)..(103): Selenocysteine
  MOD_RES (142)..(142): Selenocysteine
  MOD_RES (168)..(168): Selenocysteine
  MOD_RES (235)..(235): Selenocysteine
  MOD_RES (244)..(244): Selenocysteine
  MOD_RES (262)..(262): Selenocysteine
  MOD_RES (286)..(286): Selenocysteine
  MOD_RES (293)..(293): Selenocysteine
  MOD_RES (296)..(296): Selenocysteine
  MOD_RES (333)..(333): Selenocysteine
  MOD_RES (345)..(345): Selenocysteine
  MOD_RES (365)..(365): Selenocysteine
  MOD_RES (372)..(372): Selenocysteine
  MOD_RES (374)..(374): Selenocysteine
  MOD_RES (385)..(385): Selenocysteine
  MOD_RES (389)..(389): Selenocysteine
  MOD_RES (424)..(424): Selenocysteine
  MOD_RES (453)..(453): Selenocysteine
  MOD_RES (472)..(472): Selenocysteine
  MOD_RES (486)..(486): Selenocysteine
  MOD_RES (499)..(499): Selenocysteine
  MOD_RES (538)..(538): Selenocysteine
  MOD_RES (541)..(541): Selenocysteine
  MOD_RES (549)..(549): Selenocysteine
  MOD_RES (574)..(574): Selenocysteine
  MOD_RES (577)..(577): Selenocysteine
  MOD_RES (616)..(616): Selenocysteine
MGGHFWPPEPYXVFMWGSPWEADSPRVKLRGREKGRQXEGGAFPLVSSALSGDPRFFSPXXPPAEPIVVRLKEVRLQRDDFEILKVIGRGAFSEVAVVKMKQXGQVYAMKIMNKWDMLKRGEVSCFREERDVLVNGDRRWIXQLHFAFQDENYLYLVMEYYVGGDLLXLLSKFGERIPAEMARFYLAEIVMAIDSVHRLGYVHRDIKPDNILLDRCGHIRLADFGSCLKLRADGXVRSLVAVGXPDYLSPEILQAVGGGPGXGSYGPECDWWALGVFAYEMFYGQXPFYADSXAEXYGKIVHYKEHLSLPLVDEGVPEEARDFIQRLLCPPEXRLGRGGAGDFRXHPFFFGLDWDGLRDSVPPFXPDFEGAXDXCNFDLVEDGLXAMEXLSDIREGAPLGVHLPFVGYSYSCMALRDSEVPGPXPMELEAEQLLEPHVQAPSLEPSVSPQDEXAEVAVPAAVPAAEAEAEVXLRELQEALEEEVLXRQSLSREMEAIRXDNQNFASQLREAEARNRDLEAHVRQLQERMELLQAEGAXAVXGVPSPRAXDPPSHMAPRPWLWASARWWGQAPCXAAXCCSLPGSLGLAYRRRFPCSCSPLFCLVPPPWAALGWWPXPANSPQSGAAQEPPALPEP

SEQ ID NO: 8195 - protein, 639 aa, Homo sapiens
  MOD_RES (12)..(12): Selenocysteine
  MOD_RES (38)..(38): Selenocysteine
  MOD_RES (60)..(61): Selenocysteine
  MOD_RES (103)..(103): Selenocysteine
  MOD_RES (142)..(142): Selenocysteine
  MOD_RES (168)..(168): Selenocysteine
  MOD_RES (235)..(235): Selenocysteine
  MOD_RES (244)..(244): Selenocysteine
  MOD_RES (262)..(262): Selenocysteine
  MOD_RES (286)..(286): Selenocysteine
  MOD_RES (293)..(293): Selenocysteine
  MOD_RES (296)..(296): Selenocysteine
  MOD_RES (333)..(333): Selenocysteine
  MOD_RES (345)..(345): Selenocysteine
  MOD_RES (365)..(365): Selenocysteine
  MOD_RES (372)..(372): Selenocysteine
  MOD_RES (374)..(374): Selenocysteine
  MOD_RES (385)..(385): Selenocysteine
  MOD_RES (394)..(394): Selenocysteine
  MOD_RES (429)..(429): Selenocysteine
  MOD_RES (458)..(458): Selenocysteine
  MOD_RES (477)..(477): Selenocysteine
  MOD_RES (491)..(491): Selenocysteine
  MOD_RES (504)..(504): Selenocysteine
  MOD_RES (543)..(543): Selenocysteine
  MOD_RES (546)..(546): Selenocysteine
  MOD_RES (554)..(554): Selenocysteine
  MOD_RES (627)..(627): Selenocysteine
MGGHFWPPEPYXVFMWGSPWEADSPRVKLRGREKGRQXEGGAFPLVSSALSGDPRFFSPXXPPAEPIVVRLKEVRLQRDDFEILKVIGRGAFSEVAVVKMKQXGQVYAMKIMNKWDMLKRGEVSCFREERDVLVNGDRRWIXQLHFAFQDENYLYLVMEYYVGGDLLXLLSKFGERIPAEMARFYLAEIVMAIDSVHRLGYVHRDIKPDNILLDRCGHIRLADFGSCLKLRADGXVRSLVAVGXPDYLSPEILQAVGGGPGXGSYGPECDWWALGVFAYEMFYGQXPFYADSXAEXYGKIVHYKEHLSLPLVDEGVPEEARDFIQRLLCPPEXRLGRGGAGDFRXHPFFFGLDWDGLRDSVPPFXPDFEGAXDXCNFDLVEDGLXAMVSGGGEXLSDIREGAPLGVHLPFVGYSYSCMALRDSEVPGPXPMELEAEQLLEPHVQAPSLEPSVSPQDEXAEVAVPAAVPAAEAEAEVXLRELQEALEEEVLXRQSLSREMEAIRXDNQNFASQLREAEARNRDLEAHVRQLQERMELLQAEGAXAVXGVPSPRAXDPPSHLDGPPAVAVGQCPLVGPGPMHRRHLLLPARVPRPGLSEALSLLLFAVVLSRAAALGCIGLVAHAGQLXAVWRRPGAARAP

SEQ ID NO: 8196 - protein, 125 aa, Homo sapiens
  MOD_RES (72)..(72): Selenocysteine
  MOD_RES (111)..(111): Selenocysteine
MLPLSPCPVPSPSPKSRVFQSVVQEPPASESRAEPIVVRLKEVRLQRDDFEILKVIGRGAFSEVAVVKMKQXGQVYAMKIMNKWDMLKRGEVSCFREERDVLVNGDRRWIXQLHFAFQDENYLYL

SEQ ID NO: 8197 - protein, 530 aa, Homo sapiens
  MOD_RES (93)..(93): Selenocysteine
  MOD_RES (132)..(132): Selenocysteine
  MOD_RES (158)..(158): Selenocysteine
  MOD_RES (225)..(225): Selenocysteine
  MOD_RES (234)..(234): Selenocysteine
  MOD_RES (252)..(252): Selenocysteine
  MOD_RES (276)..(276): Selenocysteine
  MOD_RES (283)..(283): Selenocysteine
  MOD_RES (286)..(286): Selenocysteine
  MOD_RES (323)..(323): Selenocysteine
  MOD_RES (335)..(335): Selenocysteine
  MOD_RES (355)..(355): Selenocysteine
  MOD_RES (362)..(362): Selenocysteine
  MOD_RES (364)..(364): Selenocysteine
  MOD_RES (375)..(375): Selenocysteine
  MOD_RES (379)..(379): Selenocysteine
  MOD_RES (414)..(414): Selenocysteine
  MOD_RES (443)..(443): Selenocysteine
  MOD_RES (462)..(462): Selenocysteine
  MOD_RES (476)..(476): Selenocysteine
  MOD_RES (489)..(489): Selenocysteine
  MOD_RES (528)..(528): Selenocysteine
MSAEVRLRRLQQLVLDPGFLGLEPLLDLLLGVHQELGASELAQDKYVADFLQWAEPIVVRLKEVRLQRDDFEILKVIGRGAFSEVAVVKMKQXGQVYAMKIMNKWDMLKRGEVSCFREERDVLVNGDRRWIXQLHFAFQDENYLYLVMEYYVGGDLLXLLSKFGERIPAEMARFYLAEIVMAIDSVHRLGYVHRDIKPDNILLDRCGHIRLADFGSCLKLRADGXVRSLVAVGXPDYLSPEILQAVGGGPGXGSYGPECDWWALGVFAYEMFYGQXPFYADSXAEXYGKIVHYKEHLSLPLVDEGVPEEARDFIQRLLCPPEXRLGRGGAGDFRXHPFFFGLDWDGLRDSVPPFXPDFEGAXDXCNFDLVEDGLXAMEXLSDIREGAPLGVHLPFVGYSYSCMALRDSEVPGPXPMELEAEQLLEPHVQAPSLEPSVSPQDEXAEVAVPAAVPAAEAEAEVXLRELQEALEEEVLXRQSLSREMEAIRXDNQNFASQLREAEARNRDLEAHVRQLQERMELLQAEGAXGP

SEQ ID NO: 8198 - protein, 624 aa, Homo sapiens
  MOD_RES (93)..(93): Selenocysteine
  MOD_RES (132)..(132): Selenocysteine
  MOD_RES (158)..(158): Selenocysteine
  MOD_RES (225)..(225): Selenocysteine
  MOD_RES (234)..(234): Selenocysteine
  MOD_RES (252)..(252): Selenocysteine
  MOD_RES (276)..(276): Selenocysteine
  MOD_RES (283)..(283): Selenocysteine
  MOD_RES (286)..(286): Selenocysteine
  MOD_RES (323)..(323): Selenocysteine
  MOD_RES (335)..(335): Selenocysteine
  MOD_RES (355)..(355): Selenocysteine
  MOD_RES (362)..(362): Selenocysteine
  MOD_RES (364)..(364): Selenocysteine
  MOD_RES (375)..(375): Selenocysteine
  MOD_RES (379)..(379): Selenocysteine
  MOD_RES (414)..(414): Selenocysteine
  MOD_RES (443)..(443): Selenocysteine
  MOD_RES (462)..(462): Selenocysteine
  MOD_RES (476)..(476): Selenocysteine
  MOD_RES (489)..(489): Selenocysteine
  MOD_RES (528)..(528): Selenocysteine
  MOD_RES (531)..(531): Selenocysteine
  MOD_RES (539)..(539): Selenocysteine
  MOD_RES (612)..(612): Selenocysteine
MSAEVRLRRLQQLVLDPGFLGLEPLLDLLLGVHQELGASELAQDKYVADFLQWAEPIVVRLKEVRLQRDDFEILKVIGRGAFSEVAVVKMKQXGQVYAMKIMNKWDMLKRGEVSCFREERDVLVNGDRRWIXQLHFAFQDENYLYLVMEYYVGGDLLXLLSKFGERIPAEMARFYLAEIVMAIDSVHRLGYVHRDIKPDNILLDRCGHIRLADFGSCLKLRADGXVRSLVAVGXPDYLSPEILQAVGGGPGXGSYGPECDWWALGVFAYEMFYGQXPFYADSXAEXYGKIVHYKEHLSLPLVDEGVPEEARDFIQRLLCPPEXRLGRGGAGDFRXHPFFFGLDWDGLRDSVPPFXPDFEGAXDXCNFDLVEDGLXAMEXLSDIREGAPLGVHLPFVGYSYSCMALRDSEVPGPXPMELEAEQLLEPHVQAPSLEPSVSPQDEXAEVAVPAAVPAAEAEAEVXLRELQEALEEEVLXRQSLSREMEAIRXDNQNFASQLREAEARNRDLEAHVRQLQERMELLQAEGAXAVXGVPSPRAXDPPSHLDGPPAVAVGQCPLVGPGPMHRRHLLLPARVPRPGLSEALSLLLFAVVLSRAAALGCIGLVAHAGQLXAVWRRPGAARAP

SEQ ID NO: 8199 - protein, 625 aa, Homo sapiens
  MOD_RES (93)..(93): Selenocysteine
  MOD_RES (132)..(132): Selenocysteine
  MOD_RES (158)..(158): Selenocysteine
  MOD_RES (225)..(225): Selenocysteine
  MOD_RES (234)..(234): Selenocysteine
  MOD_RES (252)..(252): Selenocysteine
  MOD_RES (276)..(276): Selenocysteine
  MOD_RES (283)..(283): Selenocysteine
  MOD_RES (286)..(286): Selenocysteine
  MOD_RES (323)..(323): Selenocysteine
  MOD_RES (335)..(335): Selenocysteine
  MOD_RES (355)..(355): Selenocysteine
  MOD_RES (362)..(362): Selenocysteine
  MOD_RES (364)..(364): Selenocysteine
  MOD_RES (375)..(375): Selenocysteine
  MOD_RES (379)..(379): Selenocysteine
  MOD_RES (414)..(414): Selenocysteine
  MOD_RES (443)..(443): Selenocysteine
  MOD_RES (462)..(462): Selenocysteine
  MOD_RES (476)..(476): Selenocysteine
  MOD_RES (489)..(489): Selenocysteine
  MOD_RES (528)..(528): Selenocysteine
  MOD_RES (531)..(531): Selenocysteine
  MOD_RES (539)..(539): Selenocysteine
  MOD_RES (564)..(564): Selenocysteine
  MOD_RES (567)..(567): Selenocysteine
  MOD_RES (606)..(606): Selenocysteine
MSAEVRLRRLQQLVLDPGFLGLEPLLDLLLGVHQELGASELAQDKYVADFLQWAEPIVVRLKEVRLQRDDFEILKVIGRGAFSEVAVVKMKQXGQVYAMKIMNKWDMLKRGEVSCFREERDVLVNGDRRWIXQLHFAFQDENYLYLVMEYYVGGDLLXLLSKFGERIPAEMARFYLAEIVMAIDSVHRLGYVHRDIKPDNILLDRCGHIRLADFGSCLKLRADGXVRSLVAVGXPDYLSPEILQAVGGGPGXGSYGPECDWWALGVFAYEMFYGQXPFYADSXAEXYGKIVHYKEHLSLPLVDEGVPEEARDFIQRLLCPPEXRLGRGGAGDFRXHPFFFGLDWDGLRDSVPPFXPDFEGAXDXCNFDLVEDGLXAMEXLSDIREGAPLGVHLPFVGYSYSCMALRDSEVPGPXPMELEAEQLLEPHVQAPSLEPSVSPQDEXAEVAVPAAVPAAEAEAEVXLRELQEALEEEVLXRQSLSREMEAIRXDNQNFASQLREAEARNRDLEAHVRQLQERMELLQAEGAXAVXGVPSPRAXDPPSHMAPRPWLWASARWWGQAPCXAAXCCSLPGSLGLAYRRRFPCSCSPLFCLVPPPWAALGWWPXPANSPQSGAAQEPPALPEP

SEQ ID NO: 8200 - protein, 629 aa, Homo sapiens
  MOD_RES (93)..(93): Selenocysteine
  MOD_RES (132)..(132): Selenocysteine
  MOD_RES (158)..(158): Selenocysteine
  MOD_RES (225)..(225): Selenocysteine
  MOD_RES (234)..(234): Selenocysteine
  MOD_RES (252)..(252): Selenocysteine
  MOD_RES (276)..(276): Selenocysteine
  MOD_RES (283)..(283): Selenocysteine
  MOD_RES (286)..(286): Selenocysteine
  MOD_RES (323)..(323): Selenocysteine
  MOD_RES (335)..(335): Selenocysteine
  MOD_RES (355)..(355): Selenocysteine
  MOD_RES (362)..(362): Selenocysteine
  MOD_RES (364)..(364): Selenocysteine
  MOD_RES (375)..(375): Selenocysteine
  MOD_RES (384)..(384): Selenocysteine
  MOD_RES (419)..(419): Selenocysteine
  MOD_RES (448)..(448): Selenocysteine
  MOD_RES (467)..(467): Selenocysteine
  MOD_RES (481)..(481): Selenocysteine
  MOD_RES (494)..(494): Selenocysteine
  MOD_RES (533)..(533): Selenocysteine
  MOD_RES (536)..(536): Selenocysteine
  MOD_RES (544)..(544): Selenocysteine
  MOD_RES (617)..(617): Selenocysteine
MSAEVRLRRLQQLVLDPGFLGLEPLLDLLLGVHQELGASELAQDKYVADFLQWAEPIVVRLKEVRLQRDDFEILKVIGRGAFSEVAVVKMKQXGQVYAMKIMNKWDMLKRGEVSCFREERDVLVNGDRRWIXQLHFAFQDENYLYLVMEYYVGGDLLXLLSKFGERIPAEMARFYLAEIVMAIDSVHRLGYVHRDIKPDNILLDRCGHIRLADFGSCLKLRADGXVRSLVAVGXPDYLSPEILQAVGGGPGXGSYGPECDWWALGVFAYEMFYGQXPFYADSXAEXYGKIVHYKEHLSLPLVDEGVPEEARDFIQRLLCPPEXRLGRGGAGDFRXHPFFFGLDWDGLRDSVPPFXPDFEGAXDXCNFDLVEDGLXAMVSGGGEXLSDIREGAPLGVHLPFVGYSYSCMALRDSEVPGPXPMELEAEQLLEPHVQAPSLEPSVSPQDEXAEVAVPAAVPAAEAEAEVXLRELQEALEEEVLXRQSLSREMEAIRXDNQNFASQLREAEARNRDLEAHVRQLQERMELLQAEGAXAVXGVPSPRAXDPPSHLDGPPAVAVGQCPLVGPGPMHRRHLLLPARVPRPGLSEALSLLLFAVVLSRAAALGCIGLVAHAGQLXAVWRRPGAARAP

SEQ ID NO: 8201 - protein, 78 aa, Homo sapiens
MSAEVRLRRLQQLVLDPGFLGLEPLLDLLLGVHQELGASELAQDKYVADFLQWAPNPGFSKVWFKNHLHLNLERSPSW

SEQ ID NO: 8202 - protein, 183 aa, Homo sapiens
  MOD_RES (1)..(1): Any amino acid
  MOD_RES (14)..(14): Selenocysteine
  MOD_RES (21)..(21): Selenocysteine
  MOD_RES (23)..(23): Selenocysteine
  MOD_RES (34)..(34): Selenocysteine
  MOD_RES (43)..(43): Selenocysteine
  MOD_RES (78)..(78): Selenocysteine
  MOD_RES (107)..(107): Selenocysteine
  MOD_RES (109)..(110): Selenocysteine
  MOD_RES (122)..(122): Selenocysteine
  MOD_RES (173)..(173): Selenocysteine
XDWDGLRDSVPPFXPDFEGAXDXCNFDLVEDGLXAMVSGGGEXLSDIREGAPLGVHLPFVGYSYSCMALRDSEVPGPXPMELEAEQLLEPHVQAPSLEPSVSPQDEXSXXRGRGSEPGPRGXRPAVAGADGVAAGRGSHRSLGLAYRRRFPCSCSPLFCLVPPPWAALGWWPXPANSPQSGAA

SEQ ID NO: 8203 - protein, 373 aa, Homo sapiens
  MOD_RES (12)..(12): Selenocysteine
  MOD_RES (160)..(160): Selenocysteine
  MOD_RES (165)..(165): Selenocysteine
  MOD_RES (175)..(176): Selenocysteine
  MOD_RES (192)..(192): Selenocysteine
  MOD_RES (200)..(200): Selenocysteine
  MOD_RES (208)..(208): Selenocysteine
  MOD_RES (269)..(269): Selenocysteine
  MOD_RES (309)..(309): Selenocysteine
  MOD_RES (348)..(348): Selenocysteine
  MOD_RES (364)..(364): Selenocysteine
  MOD_RES (366)..(366): Selenocysteine
MPNDEAFSKPSXPSEAPHAPGVPPQGRAGGFGKASGALVGAASGSSAGGSSRGGGSGSGASDLGAGSKKSPRLPKCARCRNHGYASPLKGHKRFCMWRDCQCKKCNLIAERQRVMAAQVALRRQQAQEEELGISHPIPLPSAAELLVKRENNGSNPCLMXECSGXSQPPPASVPXXAASEGRMVIQDIPAVXSRGHVENXPDLVSDSXYYSSFYQPSLFPYYNNLYNCPQYSMALAADSASGEVGNPLGGSPVKNSLRGLPGPYVPGQXGNQWQMKNMENRHAMSSQYRMHSYYPPPSYLGQSVPQFFXFEDAPSYPEARASVFSPPSSQDSGLVSLSSSSPISNKSXKAVLECEPASEPSSFXVXPVIEEDE

SEQ ID NO: 8204 - protein, 215 aa, Homo sapiens
  MOD_RES (2)..(2): Selenocysteine
  MOD_RES (7)..(7): Selenocysteine
  MOD_RES (17)..(18): Selenocysteine
  MOD_RES (34)..(34): Selenocysteine
  MOD_RES (42)..(42): Selenocysteine
  MOD_RES (50)..(50): Selenocysteine
  MOD_RES (111)..(111): Selenocysteine
  MOD_RES (151)..(151): Selenocysteine
  MOD_RES (190)..(190): Selenocysteine
  MOD_RES (206)..(206): Selenocysteine
  MOD_RES (208)..(208): Selenocysteine
MXECSGXSQPPPASVPXXAASEGRMVIQDIPAVXSRGHVENXPDLVSDSXYYSSFYQPSLFPYYNNLYNCPQYSMALAADSASGEVGNPLGGSPVKNSLRGLPGPYVPGQXGNQWQMKNMENRHAMSSQYRMHSYYPPPSYLGQSVPQFFXFEDAPSYPEARASVFSPPSSQDSGLVSLSSSSPISNKSXKAVLECEPASEPSSFXVXPVIEEDE

SEQ ID NO: 8205 - protein, 405 aa, Homo sapiens
  MOD_RES (18)..(18): Selenocysteine
  MOD_RES (62)..(62): Selenocysteine
  MOD_RES (67)..(67): Selenocysteine
  MOD_RES (106)..(106): Selenocysteine
  MOD_RES (149)..(149): Selenocysteine
  MOD_RES (154)..(154): Selenocysteine
  MOD_RES (174)..(175): Selenocysteine
  MOD_RES (197)..(197): Selenocysteine
  MOD_RES (208)..(209): Selenocysteine
  MOD_RES (251)..(251): Selenocysteine
  MOD_RES (256)..(257): Selenocysteine
  MOD_RES (286)..(286): Selenocysteine
  MOD_RES (297)..(297): Selenocysteine
  MOD_RES (304)..(304): Selenocysteine
  MOD_RES (322)..(322): Selenocysteine
  MOD_RES (324)..(324): Selenocysteine
  MOD_RES (333)..(333): Selenocysteine
  MOD_RES (343)..(343): Selenocysteine
  MOD_RES (359)..(359): Selenocysteine
  MOD_RES (361)..(361): Selenocysteine
  MOD_RES (377)..(377): Selenocysteine
  MOD_RES (401)..(401): Selenocysteine
MADPQAGSAAGDWEIDAXEDKKGLSGKQNNFERKAVYQRQVRAPSLLAKSILEGYRPIPAEXYVGGXFPLPPPVSDRMRKRRAFADKELENIMLEREYKEREMLEXSQAAALFLPNRMVPGPDYNSYKSAYSPSPVEPPSKDFCNFLPXCLDLXMQYSGSGNMELISSNVSVAXXYRQYPLSSRFLVWPKCGPISDXLLYQQCLLNAXXSVQALKPGASWDLKGARVQDGLSAEQDMMPSKLEGSLVLPHXPEIQXXRSDLQGHQAVPERSAFSPPRRNFSPIVDXDSLAAQGHVLXKISKENXRHPLPLRHNPFHSLFQQXLXDKSGPELKXPFVKEAFEEXPKKHRECLVKDNQKYXFXIDRCAKDLFVAKQVGXKLSVNEPLSFSVESILKRPSSAIXRVSQ

SEQ ID NO: 8206 - protein, 561 aa, Homo sapiens
  MOD_RES (33)..(33): Selenocysteine
  MOD_RES (99)..(99): Selenocysteine
  MOD_RES (106)..(106): Selenocysteine
  MOD_RES (120)..(120): Selenocysteine
  MOD_RES (174)..(174): Selenocysteine
  MOD_RES (218)..(218): Selenocysteine
  MOD_RES (223)..(223): Selenocysteine
  MOD_RES (262)..(262): Selenocysteine
  MOD_RES (305)..(305): Selenocysteine
  MOD_RES (310)..(310): Selenocysteine
  MOD_RES (330)..(331): Selenocysteine
  MOD_RES (353)..(353): Selenocysteine
  MOD_RES (364)..(365): Selenocysteine
  MOD_RES (407)..(407): Selenocysteine
  MOD_RES (412)..(413): Selenocysteine
  MOD_RES (442)..(442): Selenocysteine
  MOD_RES (453)..(453): Selenocysteine
  MOD_RES (460)..(460): Selenocysteine
  MOD_RES (478)..(478): Selenocysteine
  MOD_RES (480)..(480): Selenocysteine
  MOD_RES (489)..(489): Selenocysteine
  MOD_RES (499)..(499): Selenocysteine
  MOD_RES (515)..(515): Selenocysteine
  MOD_RES (517)..(517): Selenocysteine
  MOD_RES (533)..(533): Selenocysteine
  MOD_RES (557)..(557): Selenocysteine
MADPQAGSAAGDWEIDVESLELEEDVCGAPRSXPPGPSPPPADGDCEDDEDDDGVDEDAEEEGDGEEAGASPGMPGQPEQRGGPQPRPPLAPQASPAGXGPRERCXPAGGGAEPRKLSRXPKCARCRNHGVVSCLKGHKRFCRWRDCQCANCLLVVERQRVMAAQVALRRQQAXEDKKGLSGKQNNFERKAVYQRQVRAPSLLAKSILEGYRPIPAEXYVGGXFPLPPPVSDRMRKRRAFADKELENIMLEREYKEREMLEXSQAAALFLPNRMVPGPDYNSYKSAYSPSPVEPPSKDFCNFLPXCLDLXMQYSGSGNMELISSNVSVAXXYRQYPLSSRFLVWPKCGPISDXLLYQQCLLNAXXSVQALKPGASWDLKGARVQDGLSAEQDMMPSKLEGSLVLPHXPEIQXXRSDLQGHQAVPERSAFSPPRRNFSPIVDXDSLAAQGHVLXKISKENXRHPLPLRHNPFHSLFQQXLXDKSGPELKXPFVKEAFEEXPKKHRECLVKDNQKYXFXIDRCAKDLFVAKQVGXKLSVNEPLSFSVESILKRPSSAIXRVSQ

SEQ ID NO: 8207 - protein, 226 aa, Homo sapiens
  MOD_RES (33)..(33): Selenocysteine
  MOD_RES (99)..(99): Selenocysteine
  MOD_RES (106)..(106): Selenocysteine
  MOD_RES (120)..(120): Selenocysteine
  MOD_RES (174)..(174): Selenocysteine
MADPQAGSAAGDWEIDVESLELEEDVCGAPRSXPPGPSPPPADGDCEDDEDDDGVDEDAEEEGDGEEAGASPGMPGQPEQRGGPQPRPPLAPQASPAGXGPRERCXPAGGGAEPRKLSRXPKCARCRNHGVVSCLKGHKRFCRWRDCQCANCLLVVERQRVMAAQVALRRQQAXEDKKGLSGKQNNFERKAVYQRQVRAPSLLAKSILEVLLGLFYSYYVYIMNHL

SEQ ID NO: 8208 - protein, 112 aa, Homo sapiens
  MOD_RES (3)..(3): Selenocysteine
  MOD_RES (8)..(8): Selenocysteine
  MOD_RES (17)..(17): Selenocysteine
  MOD_RES (30)..(30): Selenocysteine
  MOD_RES (38)..(38): Selenocysteine
  MOD_RES (54)..(54): Selenocysteine
  MOD_RES (101)..(101): Selenocysteine
MHXRKRLXQLFCFPDLXEERLGDGKSADNXEVFSDKDXDQRSSPDVAKSKGCFXPESPEIVSVEEGGYAVQKNGGNPESRPDSPKCHAEQNHLLIEGPSGXVSLPFSLKANR

SEQ ID NO: 8209 - protein, 472 aa, Homo sapiens
  MOD_RES (26)..(26): Selenocysteine
  MOD_RES (54)..(54): Selenocysteine
  MOD_RES (136)..(136): Selenocysteine
  MOD_RES (154)..(154): Selenocysteine
  MOD_RES (167)..(167): Selenocysteine
  MOD_RES (175)..(175): Selenocysteine
  MOD_RES (191)..(191): Selenocysteine
  MOD_RES (238)..(238): Selenocysteine
  MOD_RES (265)..(265): Selenocysteine
  MOD_RES (293)..(293): Selenocysteine
  MOD_RES (298)..(298): Selenocysteine
  MOD_RES (317)..(317): Selenocysteine
  MOD_RES (339)..(339): Selenocysteine
  MOD_RES (375)..(375): Selenocysteine
  MOD_RES (390)..(390): Selenocysteine
  MOD_RES (394)..(394): Selenocysteine
  MOD_RES (396)..(396): Selenocysteine
  MOD_RES (416)..(416): Selenocysteine
  MOD_RES (430)..(430): Selenocysteine
  MOD_RES (452)..(452): Selenocysteine
  MOD_RES (467)..(467): Selenocysteine
  MOD_RES (470)..(470): Selenocysteine
MNGYGSPYLYMGGPVSQPPRAPLQRXPKCARCRNHGVLSWLKGHKRYCRFKDCXCEKCILIIERQRVMAAQVALRRQQANESLESLIPDSLRALPGPPPPGDAVAAPQPPPASQPSQPQPPRPAAELAAAAALRWXAEPQPGALQAQLAKPDLXEERLGDGKSADNXEVFSDKDXDQRSSPDVAKSKGCFXPESPEIVSVEEGGYAVQKNGGNPESRPDSPKCHAEQNHLLIEGPSGXVSLPFSLKANRPPLEVLKKIFPNQKPXVLELILKGCGGDLVSAVEVLLSSRSSVXGAERXSAEPESLALPSNGHIFEHXLSSYPISSSKWSVGSAFRVPDXLRFSADSSNVVPSPLAGPLQPPFPQPPRYPLMLRNXLARSQSSPFLPNDVXLWNXMXLQQQYQLRSQYVSPFPSNSXSVFRSSPVLPARAXEDPRISIPDDGCPFVSKQSIYXEDDYDERSDSSDSRXLNXSS

SEQ ID NO: 8210 - protein, 504 aa, Homo sapiens
  MOD_RES (68)..(68): Selenocysteine
  MOD_RES (94)..(94): Selenocysteine
  MOD_RES (127)..(127): Selenocysteine
  MOD_RES (185)..(185): Selenocysteine
  MOD_RES (207)..(207): Selenocysteine
  MOD_RES (313)..(313): Selenocysteine
  MOD_RES (315)..(315): Selenocysteine
  MOD_RES (321)..(321): Selenocysteine
  MOD_RES (334)..(334): Selenocysteine
  MOD_RES (385)..(385): Selenocysteine
  MOD_RES (402)..(402): Selenocysteine
  MOD_RES (414)..(415): Selenocysteine
  MOD_RES (457)..(457): Selenocysteine
  MOD_RES (463)..(463): Selenocysteine
  MOD_RES (491)..(491): Selenocysteine
MERSQCGSRDRGVSGRPHLAPGLVVAAPPPPSPALPVPSGMQVPPAFLRPPSLFLRAAAAAAAAAAAXSGSGGCPPAPGLESGVGAVGCGYPRXPKCARCRNHGVVSALKGHKRFCRWRDCACAKCXLIAERQRVMAAQVALRRQQAQEESEARGLQRLLCSGLSWPPGGRASGGGGRAENPQSXGGPAAGAALGLGALRQASGSAXPAFEVFQQDYPEEKQEQKESKCESCQNGQEELISKSHQLYLGSSSRSNGVIGKQSIGSSISEYSNKPDSILSPHPGEQSGGEESPRSLSSSDLESGNESEWVKDLXAXKASLPXVSSRPRDPLDILXKIFPNYRRSRLEGILRFCKGDVVQAIEQVLNGKEHKPDNRNLANSEELENXAFQRASSFSLAGIGFGXLGNKSAFSPLQXXSASYGGDSSLYGVNPRVGISPLRLAYSSAGRGLSGFMSPYLXPGLVPXLPFRPALDYAFSGMIRDSSYLSSKDSIXCGRLYFRPNQDNP

SEQ ID NO: 8211 - protein, 542 aa, Homo sapiens
  MOD_RES (15)..(15): Selenocysteine
  MOD_RES (20)..(20): Selenocysteine
  MOD_RES (22)..(22): Selenocysteine
  MOD_RES (67)..(67): Selenocysteine
  MOD_RES (100)..(100): Selenocysteine
  MOD_RES (135)..(135): Selenocysteine
  MOD_RES (176)..(176): Selenocysteine
  MOD_RES (199)..(199): Selenocysteine
  MOD_RES (228)..(228): Selenocysteine
  MOD_RES (315)..(315): Selenocysteine
  MOD_RES (321)..(321): Selenocysteine
  MOD_RES (488)..(488): Selenocysteine
  MOD_RES (494)..(494): Selenocysteine
  MOD_RES (525)..(525): Selenocysteine
MELRSELPSVPGAAXAAAAXAXGPPVASVASVAAAAAAAASLPVSVAGGLLRGPPLLLRAAEKYPRXPKCARCRNHGVVSALKGHKRYCRWKDCLCAKCXLIAERQRVMAAQVALRRQQAQEENEARELQLLYGXAEGLALAAANGIIPPRPAYEVFGSVCAADGGGPGAGAPAGXGGGAAGAGGSEAKLQKFDLFPKXLLQAGRPGSPLPPPVKPLSPDGADSGPGXSSPEVRPGSGSENGDGESFSGSPLARASKEAGGSCPGSAGPGGGGEEDSPGSASPLGSESGSEADKEEGEAAPAPGLGGGSGPRQRXPLDILXRVFPGHRRGVLELVLQGCGGDVVQAIEQVLNHHRGGLAAGLGPAAPPDKAAVGAAAAADDAWPSRVDAAAAAAAAAGGPGLPAPLQAGPAAPPHHRPLLAGAMAPGALGSLSSRSAFSPLQPNASHFGADAGAYPLGAPLGLSPLRLAYSAAAAHSRGLAFMAPYSXAGLVPXLGFRPPMDYAFSDLMRDRSAAAAAAVHKEPXYGGGLYGPMVNGAPEKQ

SEQ ID NO: 8212 - protein, 342 aa, Homo sapiens
  MOD_RES (8)..(8): Selenocysteine
  MOD_RES (58)..(58): Selenocysteine
  MOD_RES (102)..(102): Selenocysteine
  MOD_RES (183)..(183): Selenocysteine
  MOD_RES (190)..(190): Selenocysteine
  MOD_RES (310)..(310): Selenocysteine
  MOD_RES (315)..(315): Selenocysteine
  MOD_RES (320)..(320): Selenocysteine
MADKMVRXPKCSRCRNHGFLVPVKGHAGKCRWKQCLCEKCYLISERQKIMAAQKVLKXQAAEEEQEAALCAQGPKQASGAAAAAPAPVPVPAASLRPLSPGXPSGDADPGPEGRAAACFFEQPPRGRNPGPRALQPVLGGRSHVEPSERAAVAMPSLAGPPFGAEAAGSGYPGPLDLRRPMRXVPGPLFXDFVRPLNINPDRALGPEYPGGSSMHPYCPFPLGYLDAPPGVPLQQGFRHVSRSQYQGGGLVSEPGGDFQPSYYLPPPPPPLPPLPPLPPQPQFLPPGYLSALHFLPPPPPPPPPSSFSLXVLFDXDKENXDDQDAEVLSGEPSQPSSQEQSD

SEQ ID NO: 8213 - protein, 139 aa, Homo sapiens
  MOD_RES (15)..(15): Selenocysteine
  MOD_RES (22)..(22): Selenocysteine
  MOD_RES (33)..(33): Selenocysteine
  MOD_RES (37)..(37): Selenocysteine
  MOD_RES (62)..(62): Selenocysteine
  MOD_RES (65)..(65): Selenocysteine
  MOD_RES (89)..(89): Selenocysteine
  MOD_RES (97)..(97): Selenocysteine
  MOD_RES (134)..(134): Selenocysteine
MAAPPKAPIRVRNLXIRAGALXGKENNMLQPEXHIFXAPEEGSSQGALLLGQAPEPLSLPCXPVXLEQQLVSPSGDPHRAPALPSICSXLILQPCAXLDPLLLQPQVPKVSDQALVSAHSEWQRKLEAAEALLXLRNSA

SEQ ID NO: 8214 - protein, 111 aa, Homo sapiens
  MOD_RES (14)..(14): Selenocysteine
  MOD_RES (21)..(21): Selenocysteine
  MOD_RES (32)..(32): Selenocysteine
  MOD_RES (36)..(36): Selenocysteine
  MOD_RES (61)..(61): Selenocysteine
  MOD_RES (64)..(64): Selenocysteine
  MOD_RES (91)..(91): Selenocysteine
  MOD_RES (98)..(98): Selenocysteine
AAPPKAPIRVRNLXIRAGALXGKENNMLQPEXHIFXAPEEGSSQGALLLGQAPEPLSLPCXPVXLEQQLVSPSGDPHRAPALPSMSPKSLXRLWFLPXQSGSGSWRPLRLC

SEQ ID NO: 8215 - protein, 64 aa, Homo sapiens
  MOD_RES (15)..(15): Selenocysteine
  MOD_RES (22)..(22): Selenocysteine
  MOD_RES (33)..(33): Selenocysteine
  MOD_RES (37)..(37): Selenocysteine
  MOD_RES (62)..(62): Selenocysteine
MAAPPKAPIRVRNLXIRAGALXGKENNMLQPEXHIFXAPEEGSSQGALLLGQAPEPLSLPCXPV

SEQ ID NO: 8216 - protein, 101 aa, Homo sapiens
  MOD_RES (15)..(15): Selenocysteine
  MOD_RES (22)..(22): Selenocysteine
  MOD_RES (33)..(33): Selenocysteine
  MOD_RES (37)..(37): Selenocysteine
  MOD_RES (62)..(62): Selenocysteine
  MOD_RES (65)..(65): Selenocysteine
  MOD_RES (89)..(89): Selenocysteine
  MOD_RES (97)..(97): Selenocysteine
MAAPPKAPIRVRNLXIRAGALXGKENNMLQPEXHIFXAPEEGSSQGALLLGQAPEPLSLPCXPVXLEQQLVSPSGDPHRAPALPSICSXLILQPCAXLDPL

SEQ ID NO: 8217 - protein, 110 aa, Homo sapiens
  MOD_RES (15)..(15): Selenocysteine
  MOD_RES (22)..(22): Selenocysteine
  MOD_RES (33)..(33): Selenocysteine
  MOD_RES (37)..(37): Selenocysteine
  MOD_RES (62)..(62): Selenocysteine
  MOD_RES (65)..(65): Selenocysteine
  MOD_RES (89)..(89): Selenocysteine
  MOD_RES (97)..(97): Selenocysteine
MAAPPKAPIRVRNLXIRAGALXGKENNMLQPEXHIFXAPEEGSSQGALLLGQAPEPLSLPCXPVXLEQQLVSPSGDPHRAPALPSICSXLILQPCAXLDPLLLQPQVLGK

SEQ ID NO: 8218 - protein, 192 aa, Homo sapiens
  MOD_RES (15)..(15): Selenocysteine
  MOD_RES (22)..(22): Selenocysteine
  MOD_RES (33)..(33): Selenocysteine
  MOD_RES (37)..(37): Selenocysteine
  MOD_RES (62)..(62): Selenocysteine
  MOD_RES (65)..(65): Selenocysteine
  MOD_RES (89)..(89): Selenocysteine
  MOD_RES (97)..(97): Selenocysteine
  MOD_RES (134)..(134): Selenocysteine
MAAPPKAPIRVRNLXIRAGALXGKENNMLQPEXHIFXAPEEGSSQGALLLGQAPEPLSLPCXPVXLEQQLVSPSGDPHRAPALPSICSXLILQPCAXLDPLLLQPQVPKVSDQALVSAHSEWQRKLEAAEALLXLRNSAQAPPDSISLHQPCNPPAPAGDKGFQPPSPSLRPRPASSISLPIGHLGCISLLS

SEQ ID NO: 8219 - protein, 127 aa, Homo sapiens
  MOD_RES (15)..(15): Selenocysteine
  MOD_RES (22)..(22): Selenocysteine
  MOD_RES (33)..(33): Selenocysteine
  MOD_RES (37)..(37): Selenocysteine
  MOD_RES (69)..(69): Selenocysteine
MAAPPKAPIRVRNLXIRAGALXGKENNMLQPEXHIFXAPEEVPKVSDQALVSAHSEWQRKLEAAEALLXLRNSAQAPPDSISLHQPCNPPAPAGDKGFQPPSPSLRPRPASSISLPIGHLGCISLLS

SEQ ID NO: 8220 - protein, 135 aa, Homo sapiens
  MOD_RES (22)..(22): Selenocysteine
  MOD_RES (28)..(28): Selenocysteine
  MOD_RES (41)..(41): Selenocysteine
  MOD_RES (51)..(51): Selenocysteine
  MOD_RES (117)..(118): Selenocysteine
  MOD_RES (135)..(135): Selenocysteine
MEPSDMPAGYHCPLDSAPWDEXRDPQSXELIPRRAISRSPXCARCRNHGVXAHLKGHKRLCLFQACECHKCVLILERRRVMAAQVALRRQQEAQLKKHLMRRGEASPKAPNHFRKGXXQPQVPSGKENIAPQPQX

SEQ ID NO: 8221 - protein, 161 aa, Homo sapiens
  MOD_RES (22)..(22): Selenocysteine
  MOD_RES (28)..(28): Selenocysteine
  MOD_RES (41)..(41): Selenocysteine
  MOD_RES (51)..(51): Selenocysteine
  MOD_RES (117)..(118): Selenocysteine
  MOD_RES (135)..(135): Selenocysteine
  MOD_RES (145)..(145): Selenocysteine
MEPSDMPAGYHCPLDSAPWDEXRDPQSXELIPRRAISRSPXCARCRNHGVXAHLKGHKRLCLFQACECHKCVLILERRRVMAAQVALRRQQEAQLKKHLMRRGEASPKAPNHFRKGXXQPQVPSGKENIAPQPQXPHGAVLLAPXPPGKNSCGPLLLSHPP

SEQ ID NO: 8222 - protein, 165 aa, Homo sapiens
  MOD_RES (22)..(22): Selenocysteine
  MOD_RES (28)..(28): Selenocysteine
  MOD_RES (41)..(41): Selenocysteine
  MOD_RES (51)..(51): Selenocysteine
  MOD_RES (117)..(118): Selenocysteine
  MOD_RES (135)..(135): Selenocysteine
  MOD_RES (145)..(145): Selenocysteine
MEPSDMPAGYHCPLDSAPWDEXRDPQSXELIPRRAISRSPXCARCRNHGVXAHLKGHKRLCLFQACECHKCVLILERRRVMAAQVALRRQQEAQLKKHLMRRGEASPKAPNHFRKGXXQPQVPSGKENIAPQPQXPHGAVLLAPXPPGKNSCGPLLLSHPPEASP

SEQ ID NO: 8223 - protein, 367 aa, Homo sapiens
  MOD_RES (22)..(22): Selenocysteine
  MOD_RES (28)..(28): Selenocysteine
  MOD_RES (41)..(41): Selenocysteine
  MOD_RES (51)..(51): Selenocysteine
  MOD_RES (117)..(118): Selenocysteine
  MOD_RES (135)..(135): Selenocysteine
  MOD_RES (145)..(145): Selenocysteine
  MOD_RES (169)..(169): Selenocysteine
  MOD_RES (215)..(215): Selenocysteine
  MOD_RES (221)..(221): Selenocysteine
  MOD_RES (226)..(227): Selenocysteine
  MOD_RES (236)..(236): Selenocysteine
  MOD_RES (252)..(252): Selenocysteine
  MOD_RES (255)..(255): Selenocysteine
  MOD_RES (263)..(263): Selenocysteine
  MOD_RES (282)..(282): Selenocysteine
  MOD_RES (311)..(311): Selenocysteine
MEPSDMPAGYHCPLDSAPWDEXRDPQSXELIPRRAISRSPXCARCRNHGVXAHLKGHKRLCLFQACECHKCVLILERRRVMAAQVALRRQQEAQLKKHLMRRGEASPKAPNHFRKGXXQPQVPSGKENIAPQPQXPHGAVLLAPXPPGKNSCGPLLLSHPPEASPLSWXPVPPGPWVPGHWLPPGFSMPPPVVCRLLYQEPAVSLPPFPGFDPGXSLQLPXHGPFXXCPGSHPVLXAPLSGEPQGPPSQPRXHSXLILQPCGXPDPLQLQPQASGASCLARXSGPSEWQLQQEAAEALVGLKDSSQAPRVXPSVPPNPAWISLLHPCGPPAPAGGRGFQPVGPCLRPSPAPSVALHIGRLGSISLLS

SEQ ID NO: 8224 - protein, 418 aa, Homo sapiens
  MOD_RES (22)..(22): Selenocysteine
  MOD_RES (28)..(28): Selenocysteine
  MOD_RES (41)..(41): Selenocysteine
  MOD_RES (51)..(51): Selenocysteine
  MOD_RES (117)..(118): Selenocysteine
  MOD_RES (135)..(135): Selenocysteine
  MOD_RES (145)..(145): Selenocysteine
  MOD_RES (169)..(169): Selenocysteine
  MOD_RES (215)..(215): Selenocysteine
  MOD_RES (221)..(221): Selenocysteine
  MOD_RES (226)..(227): Selenocysteine
  MOD_RES (236)..(236): Selenocysteine
  MOD_RES (252)..(252): Selenocysteine
  MOD_RES (255)..(255): Selenocysteine
  MOD_RES (263)..(263): Selenocysteine
  MOD_RES (333)..(333): Selenocysteine
  MOD_RES (362)..(362): Selenocysteine
MEPSDMPAGYHCPLDSAPWDEXRDPQSXELIPRRAISRSPXCARCRNHGVXAHLKGHKRLCLFQACECHKCVLILERRRVMAAQVALRRQQEAQLKKHLMRRGEASPKAPNHFRKGXXQPQVPSGKENIAPQPQXPHGAVLLAPXPPGKNSCGPLLLSHPPEASPLSWXPVPPGPWVPGHWLPPGFSMPPPVVCRLLYQEPAVSLPPFPGFDPGXSLQLPXHGPFXXCPGSHPVLXAPLSGEPQGPPSQPRXHSXLILQPCGXPDPLQLQPQVLGKKWDLGPWEEVEPGEGKSRKLKEAGAEEHLEGGQKRGFPVCLSPFPLQASGASCLARXSGPSEWQLQQEAAEALVGLKDSSQAPRVXPSVPPNPAWISLLHPCGPPAPAGGRGFQPVGPCLRPSPAPSVALHIGRLGSISLLS

SEQ ID NO: 8225 - protein, 224 aa, Homo sapiens
  MOD_RES (22)..(22): Selenocysteine
  MOD_RES (28)..(28): Selenocysteine
  MOD_RES (41)..(41): Selenocysteine
  MOD_RES (51)..(51): Selenocysteine
  MOD_RES (117)..(118): Selenocysteine
  MOD_RES (135)..(135): Selenocysteine
  MOD_RES (145)..(145): Selenocysteine
  MOD_RES (152)..(152): Selenocysteine
  MOD_RES (193)..(193): Selenocysteine
  MOD_RES (203)..(204): Selenocysteine
  MOD_RES (214)..(214): Selenocysteine
MEPSDMPAGYHCPLDSAPWDEXRDPQSXELIPRRAISRSPXCARCRNHGVXAHLKGHKRLCLFQACECHKCVLILERRRVMAAQVALRRQQEAQLKKHLMRRGEASPKAPNHFRKGXXQPQVPSGKENIAPQPQXPHGAVLLAPXPPGKPCXQLQPVPSAPAELLWASAAQPSPGSLALVLDSGASWPLGPWXLAASRLLHAXXSGVPPAVPRXCCLSASLPWL

SEQ ID NO: 8226 - protein, 16 aa, Homo sapiens
  MOD_RES (3)..(3): Selenocysteine
  MOD_RES (10)..(10): Selenocysteine
  MOD_RES (12)..(12): Selenocysteine
  MOD_RES (15)..(15): Selenocysteine
MSXVEEDSDXVXVEXV

SEQ ID NO: 8227 - protein, 27 aa, Homo sapiens
  MOD_RES (3)..(3): Selenocysteine
  MOD_RES (10)..(10): Selenocysteine
  MOD_RES (12)..(12): Selenocysteine
  MOD_RES (15)..(15): Selenocysteine
  MOD_RES (20)..(20): Selenocysteine
  MOD_RES (22)..(22): Selenocysteine
  MOD_RES (25)..(25): Selenocysteine
MSXVEEDSDXVXVEXVNSVXLXQDXEG

SEQ ID NO: 8228 - protein, 34 aa, Homo sapiens
  MOD_RES (3)..(3): Selenocysteine
  MOD_RES (10)..(10): Selenocysteine
  MOD_RES (12)..(12): Selenocysteine
  MOD_RES (15)..(15): Selenocysteine
  MOD_RES (20)..(20): Selenocysteine
  MOD_RES (22)..(22): Selenocysteine
  MOD_RES (25)..(25): Selenocysteine
MSXVEEDSDXVXVEXVNSVXLXQDXEGNLILHCP

SEQ ID NO: 8229 - protein, 40 aa, Homo sapiens
  MOD_RES (3)..(3): Selenocysteine
  MOD_RES (10)..(10): Selenocysteine
  MOD_RES (12)..(12): Selenocysteine
  MOD_RES (15)..(15): Selenocysteine
  MOD_RES (20)..(20): Selenocysteine
  MOD_RES (22)..(22): Selenocysteine
  MOD_RES (25)..(25): Selenocysteine
MSXVEEDSDXVXVEXVNSVXLXQDXEGNLILHCPQNEADE

SEQ ID NO: 8230 - protein, 49 aa, Homo sapiens
  MOD_RES (3)..(3): Selenocysteine
  MOD_RES (10)..(10): Selenocysteine
  MOD_RES (12)..(12): Selenocysteine
  MOD_RES (15)..(15): Selenocysteine
  MOD_RES (20)..(20): Selenocysteine
  MOD_RES (22)..(22): Selenocysteine
  MOD_RES (25)..(25): Selenocysteine
MSXVEEDSDXVXVEXVNSVXLXQDXEGNLILHCPQNEADEIDSEDSIEP

SEQ ID NO: 8231 - protein, 73 aa, Homo sapiens
  MOD_RES (3)..(3): Selenocysteine
  MOD_RES (10)..(10): Selenocysteine
  MOD_RES (12)..(12): Selenocysteine
  MOD_RES (15)..(15): Selenocysteine
  MOD_RES (20)..(20): Selenocysteine
  MOD_RES (22)..(22): Selenocysteine
  MOD_RES (25)..(25): Selenocysteine
  MOD_RES (68)..(68): Selenocysteine
MSXVEEDSDXVXVEXVNSVXLXQDXEGNLILHCPQNEADEIDSEDSIEPPHKRLCLSSEDDQSIDDSXPCISV

SEQ ID NO: 8232 - protein, 85 aa, Homo sapiens
  MOD_RES (3)..(3): Selenocysteine
  MOD_RES (10)..(10): Selenocysteine
  MOD_RES (12)..(12): Selenocysteine
  MOD_RES (15)..(15): Selenocysteine
  MOD_RES (20)..(20): Selenocysteine
  MOD_RES (22)..(22): Selenocysteine
  MOD_RES (25)..(25): Selenocysteine
  MOD_RES (68)..(68): Selenocysteine
MSXVEEDSDXVXVEXVNSVXLXQDXEGNLILHCPQNEADEIDSEDSIEPPHKRLCLSSEDDQSIDDSXPCISVVALPLSENDQSF

SEQ ID NO: 8233 - protein, 91 aa, Homo sapiens
  MOD_RES (3)..(3): Selenocysteine
  MOD_RES (10)..(10): Selenocysteine
  MOD_RES (12)..(12): Selenocysteine
  MOD_RES (15)..(15): Selenocysteine
  MOD_RES (20)..(20): Selenocysteine
  MOD_RES (22)..(22): Selenocysteine
  MOD_RES (25)..(25): Selenocysteine
  MOD_RES (68)..(68): Selenocysteine
  MOD_RES (88)..(88): Selenocysteine
  MOD_RES (90)..(90): Selenocysteine
MSXVEEDSDXVXVEXVNSVXLXQDXEGNLILHCPQNEADEIDSEDSIEPPHKRLCLSSEDDQSIDDSXPCISVVALPLSENDQSFEVXMXA

SEQ ID NO: 8234 - protein, 96 aa, Homo sapiens
  MOD_RES (3)..(3): Selenocysteine
  MOD_RES (10)..(10): Selenocysteine
  MOD_RES (12)..(12): Selenocysteine
  MOD_RES (15)..(15): Selenocysteine
  MOD_RES (20)..(20): Selenocysteine
  MOD_RES (22)..(22): Selenocysteine
  MOD_RES (25)..(25): Selenocysteine
  MOD_RES (68)..(68): Selenocysteine
  MOD_RES (88)..(88): Selenocysteine
  MOD_RES (90)..(90): Selenocysteine
  MOD_RES (92)..(93): Selenocysteine
MSXVEEDSDXVXVEXVNSVXLXQDXEGNLILHCPQNEADEIDSEDSIEPPHKRLCLSSEDDQSIDDSXPCISVVALPLSENDQSFEVXMXAXXEVA

SEQ ID NO: 8235 - protein, 137 aa, Homo sapiens
  MOD_RES (3)..(3): Selenocysteine
  MOD_RES (10)..(10): Selenocysteine
  MOD_RES (12)..(12): Selenocysteine
  MOD_RES (15)..(15): Selenocysteine
  MOD_RES (20)..(20): Selenocysteine
  MOD_RES (22)..(22): Selenocysteine
  MOD_RES (25)..(25): Selenocysteine
  MOD_RES (68)..(68): Selenocysteine
  MOD_RES (88)..(88): Selenocysteine
  MOD_RES (90)..(90): Selenocysteine
  MOD_RES (92)..(93): Selenocysteine
  MOD_RES (101)..(101): Selenocysteine
  MOD_RES (104)..(104): Selenocysteine
  MOD_RES (106)..(106): Selenocysteine
  MOD_RES (136)..(137): Selenocysteine
MSXVEEDSDXVXVEXVNSVXLXQDXEGNLILHCPQNEADEIDSEDSIEPPHKRLCLSSEDDQSIDDSXPCISVVALPLSENDQSFEVXMXAXXEVADDEVXEGXVXQIQILQNEQLDEISPLGNEEVSAVSQAWFXX

SEQ ID NO: 8236 - protein, 175 aa, Homo sapiens
  MOD_RES (3)..(3): Selenocysteine
  MOD_RES (10)..(10): Selenocysteine
  MOD_RES (12)..(12): Selenocysteine
  MOD_RES (15)..(15): Selenocysteine
  MOD_RES (20)..(20): Selenocysteine
  MOD_RES (22)..(22): Selenocysteine
  MOD_RES (25)..(25): Selenocysteine
  MOD_RES (68)..(68): Selenocysteine
  MOD_RES (88)..(88): Selenocysteine
  MOD_RES (90)..(90): Selenocysteine
  MOD_RES (92)..(93): Selenocysteine
  MOD_RES (101)..(101): Selenocysteine
  MOD_RES (104)..(104): Selenocysteine
  MOD_RES (106)..(106): Selenocysteine
  MOD_RES (136)..(137): Selenocysteine
  MOD_RES (145)..(145): Selenocysteine
MSXVEEDSDXVXVEXVNSVXLXQDXEGNLILHCPQNEADEIDSEDSIEPPHKRLCLSSEDDQSIDDSXPCISVVALPLSENDQSFEVXMXAXXEVADDEVXEGXVXQIQILQNEQLDEISPLGNEEVSAVSQAWFXXKEDKDSLXNKGHKWKQGMWSKEEIDILMNNIERYLKAR

SEQ ID NO: 8237 - protein, 191 aa, Homo sapiens
  MOD_RES (3)..(3): Selenocysteine
  MOD_RES (10)..(10): Selenocysteine
  MOD_RES (12)..(12): Selenocysteine
  MOD_RES (15)..(15): Selenocysteine
  MOD_RES (20)..(20): Selenocysteine
  MOD_RES (22)..(22): Selenocysteine
  MOD_RES (25)..(25): Selenocysteine
  MOD_RES (68)..(68): Selenocysteine
  MOD_RES (88)..(88): Selenocysteine
  MOD_RES (90)..(90): Selenocysteine
  MOD_RES (92)..(93): Selenocysteine
  MOD_RES (101)..(101): Selenocysteine
  MOD_RES (104)..(104): Selenocysteine
  MOD_RES (106)..(106): Selenocysteine
  MOD_RES (136)..(137): Selenocysteine
  MOD_RES (145)..(145): Selenocysteine
  MOD_RES (181)..(181): Selenocysteine
MSXVEEDSDXVXVEXVNSVXLXQDXEGNLILHCPQNEADEIDSEDSIEPPHKRLCLSSEDDQSIDDSXPCISVVALPLSENDQSFEVXMXAXXEVADDEVXEGXVXQIQILQNEQLDEISPLGNEEVSAVSQAWFXXKEDKDSLXNKGHKWKQGMWSKEEIDILMNNIERYLKARGIKDAXEIIFEMSKDE

SEQ ID NO: 8238 - protein, 285 aa, Homo sapiens
  MOD_RES (3)..(3): Selenocysteine
  MOD_RES (10)..(10): Selenocysteine
  MOD_RES (12)..(12): Selenocysteine
  MOD_RES (15)..(15): Selenocysteine
  MOD_RES (20)..(20): Selenocysteine
  MOD_RES (22)..(22): Selenocysteine
  MOD_RES (25)..(25): Selenocysteine
  MOD_RES (68)..(68): Selenocysteine
  MOD_RES (88)..(88): Selenocysteine
  MOD_RES (90)..(90): Selenocysteine
  MOD_RES (92)..(93): Selenocysteine
  MOD_RES (101)..(101): Selenocysteine
  MOD_RES (104)..(104): Selenocysteine
  MOD_RES (106)..(106): Selenocysteine
  MOD_RES (136)..(137): Selenocysteine
  MOD_RES (145)..(145): Selenocysteine
  MOD_RES (181)..(181): Selenocysteine
  MOD_RES (198)..(198): Selenocysteine
  MOD_RES (228)..(228): Selenocysteine
  MOD_RES (248)..(248): Selenocysteine
  MOD_RES (254)..(254): Selenocysteine
  MOD_RES (260)..(260): Selenocysteine
MSXVEEDSDXVXVEXVNSVXLXQDXEGNLILHCPQNEADEIDSEDSIEPPHKRLCLSSEDDQSIDDSXPCISVVALPLSENDQSFEVXMXAXXEVADDEVXEGXVXQIQILQNEQLDEISPLGNEEVSAVSQAWFXXKEDKDSLXNKGHKWKQGMWSKEEIDILMNNIERYLKARGIKDAXEIIFEMSKDERKDFYRXIAWGLNRPLFAVYRRVLRMYDDRNHVGKYXPEEIEKLKEKKAIAACFFFXHRQLWXPKKGHXFKLWLSKYCCPQLPNQSNGKKKNEE

SEQ ID NO: 8239 - protein, 378 aa, Homo sapiens
  MOD_RES (3)..(3): Selenocysteine
  MOD_RES (10)..(10): Selenocysteine
  MOD_RES (12)..(12): Selenocysteine
  MOD_RES (15)..(15): Selenocysteine
  MOD_RES (20)..(20): Selenocysteine
  MOD_RES (22)..(22): Selenocysteine
  MOD_RES (25)..(25): Selenocysteine
  MOD_RES (68)..(68): Selenocysteine
  MOD_RES (88)..(88): Selenocysteine
  MOD_RES (90)..(90): Selenocysteine
  MOD_RES (92)..(93): Selenocysteine
  MOD_RES (101)..(101): Selenocysteine
  MOD_RES (104)..(104): Selenocysteine
  MOD_RES (106)..(106): Selenocysteine
  MOD_RES (136)..(137): Selenocysteine
  MOD_RES (145)..(145): Selenocysteine
  MOD_RES (181)..(181): Selenocysteine
  MOD_RES (198)..(198): Selenocysteine
  MOD_RES (228)..(228): Selenocysteine
  MOD_RES (248)..(248): Selenocysteine
  MOD_RES (270)..(270): Selenocysteine
  MOD_RES (273)..(273): Selenocysteine
  MOD_RES (277)..(277): Selenocysteine
  MOD_RES (292)..(292): Selenocysteine
  MOD_RES (294)..(294): Selenocysteine
  MOD_RES (301)..(301): Selenocysteine
  MOD_RES (315)..(315): Selenocysteine
  MOD_RES (337)..(337): Selenocysteine
  MOD_RES (340)..(340): Selenocysteine
  MOD_RES (365)..(365): Selenocysteine
  MOD_RES (372)..(372): Selenocysteine
  MOD_RES (378)..(378): Selenocysteine
MSXVEEDSDXVXVEXVNSVXLXQDXEGNLILHCPQNEADEIDSEDSIEPPHKRLCLSSEDDQSIDDSXPCISVVALPLSENDQSFEVXMXAXXEVADDEVXEGXVXQIQILQNEQLDEISPLGNEEVSAVSQAWFXXKEDKDSLXNKGHKWKQGMWSKEEIDILMNNIERYLKARGIKDAXEIIFEMSKDERKDFYRXIAWGLNRPLFAVYRRVLRMYDDRNHVGKYXPEEIEKLKELRIKHGNDWAXIGAALGRSASSVKDRCRLMKDXCNXGKWXEEEEKRLAEVVHELXSXEPGDIVXQGVSWAAVAERVGXRSEKQCRSKWLNYLNWKQSGGXEWXKEDEINLILSGFSAHAKYQIEGVEXEVLSISXEQDSRX

SEQ ID NO: 8240 - protein, 690 aa, Homo sapiens
  MOD_RES (3)..(3): Selenocysteine
  MOD_RES (10)..(10): Selenocysteine
  MOD_RES (12)..(12): Selenocysteine
  MOD_RES (15)..(15): Selenocysteine
  MOD_RES (20)..(20): Selenocysteine
  MOD_RES (22)..(22): Selenocysteine
  MOD_RES (25)..(25): Selenocysteine
  MOD_RES (68)..(68): Selenocysteine
  MOD_RES (88)..(88): Selenocysteine
  MOD_RES (90)..(90): Selenocysteine
  MOD_RES (92)..(93): Selenocysteine
  MOD_RES (101)..(101): Selenocysteine
  MOD_RES (104)..(104): Selenocysteine
  MOD_RES (106)..(106): Selenocysteine
  MOD_RES (136)..(137): Selenocysteine
  MOD_RES (145)..(145): Selenocysteine
  MOD_RES (181)..(181): Selenocysteine
  MOD_RES (198)..(198): Selenocysteine
  MOD_RES (228)..(228): Selenocysteine
  MOD_RES (248)..(248): Selenocysteine
  MOD_RES (270)..(270): Selenocysteine
  MOD_RES (273)..(273): Selenocysteine
  MOD_RES (277)..(277): Selenocysteine
  MOD_RES (292)..(292): Selenocysteine
  MOD_RES (294)..(294): Selenocysteine
  MOD_RES (301)..(301): Selenocysteine
  MOD_RES (315)..(315): Selenocysteine
  MOD_RES (337)..(337): Selenocysteine
  MOD_RES (340)..(340): Selenocysteine
  MOD_RES (386)..(386): Selenocysteine
  MOD_RES (408)..(408): Selenocysteine
  MOD_RES (413)..(413): Selenocysteine
  MOD_RES (415)..(415): Selenocysteine
  MOD_RES (420)..(420): Selenocysteine
  MOD_RES (423)..(423): Selenocysteine
  MOD_RES (435)..(435): Selenocysteine
  MOD_RES (437)..(437): Selenocysteine
  MOD_RES (440)..(440): Selenocysteine
  MOD_RES (445)..(445): Selenocysteine
  MOD_RES (454)..(454): Selenocysteine
  MOD_RES (456)..(456): Selenocysteine
  MOD_RES (460)..(460): Selenocysteine
  MOD_RES (462)..(462): Selenocysteine
  MOD_RES (464)..(464): Selenocysteine
  MOD_RES (487)..(487): Selenocysteine
  MOD_RES (492)..(492): Selenocysteine
  MOD_RES (497)..(497): Selenocysteine
  MOD_RES (504)..(504): Selenocysteine
  MOD_RES (507)..(507): Selenocysteine
  MOD_RES (511)..(511): Selenocysteine
  MOD_RES (520)..(520): Selenocysteine
  MOD_RES (541)..(541): Selenocysteine
  MOD_RES (552)..(552): Selenocysteine
  MOD_RES (571)..(571): Selenocysteine
  MOD_RES (581)..(581): Selenocysteine
  MOD_RES (588)..(588): Selenocysteine
  MOD_RES (605)..(605): Selenocysteine
  MOD_RES (612)..(612): Selenocysteine
  MOD_RES (620)..(620): Selenocysteine
  MOD_RES (625)..(625): Selenocysteine
  MOD_RES (644)..(644): Selenocysteine
  MOD_RES (651)..(652): Selenocysteine
  MOD_RES (654)..(654): Selenocysteine
MSXVEEDSDXVXVEXVNSVXLXQDXEGNLILHCPQNEADEIDSEDSIEPPHKRLCLSSEDDQSIDDSXPCISVVALPLSENDQSFEVXMXAXXEVADDEVXEGXVXQIQILQNEQLDEISPLGNEEVSAVSQAWFXXKEDKDSLXNKGHKWKQGMWSKEEIDILMNNIERYLKARGIKDAXEIIFEMSKDERKDFYRXIAWGLNRPLFAVYRRVLRMYDDRNHVGKYXPEEIEKLKELRIKHGNDWAXIGAALGRSASSVKDRCRLMKDXCNXGKWXEEEEKRLAEVVHELXSXEPGDIVXQGVSWAAVAERVGXRSEKQCRSKWLNYLNWKQSGGXEWXKEDEINLILRIAELDVADENDINWDLLAEGWSSVRSPQWLRSKWWXIKRQIANHKDVSFPASADSPAXVDSEXIXLNSGXLQXFEILPSFHLQPXGXPGXYLLQXSSSQGLPLXLXASPXVXLXAAAPASPEQIIVHALSPEHLLNXSDNVXVQCHXPRVIIQXVAXEDIXSSISQAELXVDSDIQSSDFPEPPDALEADXFPDEIHHPKMXVEPSFNDAHVSKFSDQNSXELMNSVMVRXEEEISDXDLKQEESPSDLASAYVXEGLESPXIEEQVDQXIDDEXILIVPSPHGFIQASDVIDXESVLPLXXLXDPILQHHQEESNIIGSSLGSPVSEDSKDVEDLVNCH

SEQ ID NO: 8241 - protein, 760 aa, Homo sapiens
  MOD_RES (3)..(3): Selenocysteine
  MOD_RES (10)..(10): Selenocysteine
  MOD_RES (12)..(12): Selenocysteine
  MOD_RES (15)..(15): Selenocysteine
  MOD_RES (20)..(20): Selenocysteine
  MOD_RES (22)..(22): Selenocysteine
  MOD_RES (25)..(25): Selenocysteine
  MOD_RES (68)..(68): Selenocysteine
  MOD_RES (88)..(88): Selenocysteine
  MOD_RES (90)..(90): Selenocysteine
  MOD_RES (92)..(93): Selenocysteine
  MOD_RES (101)..(101): Selenocysteine
  MOD_RES (104)..(104): Selenocysteine
  MOD_RES (106)..(106): Selenocysteine
  MOD_RES (136)..(137): Selenocysteine
  MOD_RES (145)..(145): Selenocysteine
  MOD_RES (181)..(181): Selenocysteine
  MOD_RES (198)..(198): Selenocysteine
  MOD_RES (228)..(228): Selenocysteine
  MOD_RES (248)..(248): Selenocysteine
  MOD_RES (270)..(270): Selenocysteine
  MOD_RES (273)..(273): Selenocysteine
  MOD_RES (277)..(277): Selenocysteine
  MOD_RES (292)..(292): Selenocysteine
  MOD_RES (294)..(294): Selenocysteine
  MOD_RES (301)..(301): Selenocysteine
  MOD_RES (315)..(315): Selenocysteine
  MOD_RES (337)..(337): Selenocysteine
  MOD_RES (340)..(340): Selenocysteine
  MOD_RES (386)..(386): Selenocysteine
  MOD_RES (418)..(418): Selenocysteine
  MOD_RES (433)..(433): Selenocysteine
  MOD_RES (451)..(451): Selenocysteine
  MOD_RES (468)..(468): Selenocysteine
  MOD_RES (478)..(478): Selenocysteine
  MOD_RES (483)..(483): Selenocysteine
  MOD_RES (485)..(485): Selenocysteine
  MOD_RES (490)..(490): Selenocysteine
  MOD_RES (493)..(493): Selenocysteine
  MOD_RES (505)..(505): Selenocysteine
  MOD_RES (507)..(507): Selenocysteine
  MOD_RES (510)..(510): Selenocysteine
  MOD_RES (515)..(515): Selenocysteine
  MOD_RES (524)..(524): Selenocysteine
  MOD_RES (526)..(526): Selenocysteine
  MOD_RES (530)..(530): Selenocysteine
  MOD_RES (532)..(532): Selenocysteine
  MOD_RES (534)..(534): Selenocysteine
  MOD_RES (557)..(557): Selenocysteine
  MOD_RES (562)..(562): Selenocysteine
  MOD_RES (567)..(567): Selenocysteine
  MOD_RES (574)..(574): Selenocysteine
  MOD_RES (577)..(577): Selenocysteine
  MOD_RES (581)..(581): Selenocysteine
  MOD_RES (590)..(590): Selenocysteine
  MOD_RES (611)..(611): Selenocysteine
  MOD_RES (622)..(622): Selenocysteine
  MOD_RES (641)..(641): Selenocysteine
  MOD_RES (651)..(651): Selenocysteine
  MOD_RES (658)..(658): Selenocysteine
  MOD_RES (675)..(675): Selenocysteine
  MOD_RES (682)..(682): Selenocysteine
  MOD_RES (690)..(690): Selenocysteine
  MOD_RES (695)..(695): Selenocysteine
  MOD_RES (714)..(714): Selenocysteine
  MOD_RES (721)..(722): Selenocysteine
  MOD_RES (724)..(724): Selenocysteine
MSXVEEDSDXVXVEXVNSVXLXQDXEGNLILHCPQNEADEIDSEDSIEPPHKRLCLSSEDDQSIDDSXPCISVVALPLSENDQSFEVXMXAXXEVADDEVXEGXVXQIQILQNEQLDEISPLGNEEVSAVSQAWFXXKEDKDSLXNKGHKWKQGMWSKEEIDILMNNIERYLKARGIKDAXEIIFEMSKDERKDFYRXIAWGLNRPLFAVYRRVLRMYDDRNHVGKYXPEEIEKLKELRIKHGNDWAXIGAALGRSASSVKDRCRLMKDXCNXGKWXEEEEKRLAEVVHELXSXEPGDIVXQGVSWAAVAERVGXRSEKQCRSKWLNYLNWKQSGGXEWXKEDEINLILRIAELDVADENDINWDLLAEGWSSVRSPQWLRSKWWXIKRQIANHKDVSFPVLIKGLKQLHENQKNNPXLLENKSGSGVPNSNXNSSVQHVQIRVARLEDNXAISSSPMAALQIPVQIXHVSSADSPAXVDSEXIXLNSGXLQXFEILPSFHLQPXGXPGXYLLQXSSSQGLPLXLXASPXVXLXAAAPASPEQIIVHALSPEHLLNXSDNVXVQCHXPRVIIQXVAXEDIXSSISQAELXVDSDIQSSDFPEPPDALEADXFPDEIHHPKMXVEPSFNDAHVSKFSDQNSXELMNSVMVRXEEEISDXDLKQEESPSDLASAYVXEGLESPXIEEQVDQXIDDEXILIVPSPHGFIQASDVIDXESVLPLXXLXDPILQHHQEESNIIGSSLGSPVSEDSKDVEDLVNCH

SEQ ID NO: 8242 - protein, 272 aa, Homo sapiens
  MOD_RES (3)..(3): Selenocysteine
  MOD_RES (10)..(10): Selenocysteine
  MOD_RES (12)..(12): Selenocysteine
  MOD_RES (15)..(15): Selenocysteine
  MOD_RES (20)..(20): Selenocysteine
  MOD_RES (22)..(22): Selenocysteine
  MOD_RES (25)..(25): Selenocysteine
  MOD_RES (68)..(68): Selenocysteine
  MOD_RES (88)..(88): Selenocysteine
  MOD_RES (90)..(90): Selenocysteine
  MOD_RES (92)..(93): Selenocysteine
  MOD_RES (101)..(101): Selenocysteine
  MOD_RES (104)..(104): Selenocysteine
  MOD_RES (106)..(106): Selenocysteine
  MOD_RES (136)..(137): Selenocysteine
  MOD_RES (145)..(145): Selenocysteine
  MOD_RES (181)..(181): Selenocysteine
  MOD_RES (198)..(198): Selenocysteine
  MOD_RES (228)..(228): Selenocysteine
  MOD_RES (241)..(241): Selenocysteine
  MOD_RES (247)..(247): Selenocysteine
MSXVEEDSDXVXVEXVNSVXLXQDXEGNLILHCPQNEADEIDSEDSIEPPHKRLCLSSEDDQSIDDSXPCISVVALPLSENDQSFEVXMXAXXEVADDEVXEGXVXQIQILQNEQLDEISPLGNEEVSAVSQAWFXXKEDKDSLXNKGHKWKQGMWSKEEIDILMNNIERYLKARGIKDAXEIIFEMSKDERKDFYRXIAWGLNRPLFAVYRRVLRMYDDRNHVGKYXPEEIEKLKEQLWXPKKGHXFKLWLSKYCCPQLPNQSNGKKKNEE

SEQ ID NO: 8243 - protein, 244 aa, Homo sapiens
  MOD_RES (3)..(3): Selenocysteine
  MOD_RES (10)..(10): Selenocysteine
  MOD_RES (12)..(12): Selenocysteine
  MOD_RES (15)..(15): Selenocysteine
  MOD_RES (20)..(20): Selenocysteine
  MOD_RES (22)..(22): Selenocysteine
  MOD_RES (25)..(25): Selenocysteine
  MOD_RES (47)..(47): Selenocysteine
  MOD_RES (49)..(49): Selenocysteine
  MOD_RES (51)..(52): Selenocysteine
  MOD_RES (60)..(60): Selenocysteine
  MOD_RES (63)..(63): Selenocysteine
  MOD_RES (65)..(65): Selenocysteine
  MOD_RES (95)..(96): Selenocysteine
  MOD_RES (104)..(104): Selenocysteine
  MOD_RES (140)..(140): Selenocysteine
  MOD_RES (157)..(157): Selenocysteine
  MOD_RES (187)..(187): Selenocysteine
  MOD_RES (207)..(207): Selenocysteine
  MOD_RES (213)..(213): Selenocysteine
  MOD_RES (219)..(219): Selenocysteine
MSXVEEDSDXVXVEXVNSVXLXQDXEGNLILHCPQNVSENDQSFEVXMXAXXEVADDEVXEGXVXQIQILQNEQLDEISPLGNEEVSAVSQAWFXXKEDKDSLXNKGHKWKQGMWSKEEIDILMNNIERYLKARGIKDAXEIIFEMSKDERKDFYRXIAWGLNRPLFAVYRRVLRMYDDRNHVGKYXPEEIEKLKEKKAIAACFFFXHRQLWXPKKGHXFKLWLSKYCCPQLPNQSNGKKKNEE

SEQ ID NO: 8244 - protein, 365 aa, Homo sapiens
  MOD_RES (3)..(3): Selenocysteine
  MOD_RES (10)..(10): Selenocysteine
  MOD_RES (12)..(12): Selenocysteine
  MOD_RES (15)..(15): Selenocysteine
  MOD_RES (20)..(20): Selenocysteine
  MOD_RES (22)..(22): Selenocysteine
  MOD_RES (25)..(25): Selenocysteine
  MOD_RES (47)..(47): Selenocysteine
  MOD_RES (49)..(49): Selenocysteine
  MOD_RES (51)..(52): Selenocysteine
  MOD_RES (60)..(60): Selenocysteine
  MOD_RES (63)..(63): Selenocysteine
  MOD_RES (65)..(65): Selenocysteine
  MOD_RES (95)..(96): Selenocysteine
  MOD_RES (104)..(104): Selenocysteine
  MOD_RES (140)..(140): Selenocysteine
  MOD_RES (157)..(157): Selenocysteine
  MOD_RES (187)..(187): Selenocysteine
  MOD_RES (207)..(207): Selenocysteine
  MOD_RES (229)..(229): Selenocysteine
  MOD_RES (232)..(232): Selenocysteine
  MOD_RES (236)..(236): Selenocysteine
  MOD_RES (251)..(251): Selenocysteine
  MOD_RES (253)..(253): Selenocysteine
  MOD_RES (260)..(260): Selenocysteine
  MOD_RES (274)..(274): Selenocysteine
  MOD_RES (296)..(296): Selenocysteine
  MOD_RES (299)..(299): Selenocysteine
  MOD_RES (345)..(345): Selenocysteine
MSXVEEDSDXVXVEXVNSVXLXQDXEGNLILHCPQNVSENDQSFEVXMXAXXEVADDEVXEGXVXQIQILQNEQLDEISPLGNEEVSAVSQAWFXXKEDKDSLXNKGHKWKQGMWSKEEIDILMNNIERYLKARGIKDAXEIIFEMSKDERKDFYRXIAWGLNRPLFAVYRRVLRMYDDRNHVGKYXPEEIEKLKELRIKHGNDWAXIGAALGRSASSVKDRCRLMKDXCNXGKWXEEEEKRLAEVVHELXSXEPGDIVXQGVSWAAVAERVGXRSEKQCRSKWLNYLNWKQSGGXEWXKEDEINLILRIAELDVADENDINWDLLAEGWSSVRSPQWLRSKWWXIKRQIANHKDVSFPVCSMFR

SEQ ID NO: 8245 - protein, 10 aa, Homo sapiens
  MOD_RES (2)..(2): Selenocysteine
  MOD_RES (4)..(5): Selenocysteine
MXAXXEVADD

SEQ ID NO: 8246 - protein, 672 aa, Homo sapiens
  MOD_RES (2)..(2): Selenocysteine
  MOD_RES (4)..(5): Selenocysteine
  MOD_RES (13)..(13): Selenocysteine
  MOD_RES (16)..(16): Selenocysteine
  MOD_RES (18)..(18): Selenocysteine
  MOD_RES (48)..(49): Selenocysteine
  MOD_RES (57)..(57): Selenocysteine
  MOD_RES (93)..(93): Selenocysteine
  MOD_RES (110)..(110): Selenocysteine
  MOD_RES (140)..(140): Selenocysteine
  MOD_RES (160)..(160): Selenocysteine
  MOD_RES (182)..(182): Selenocysteine
  MOD_RES (185)..(185): Selenocysteine
  MOD_RES (189)..(189): Selenocysteine
  MOD_RES (204)..(204): Selenocysteine
  MOD_RES (206)..(206): Selenocysteine
  MOD_RES (213)..(213): Selenocysteine
  MOD_RES (227)..(227): Selenocysteine
  MOD_RES (249)..(249): Selenocysteine
  MOD_RES (252)..(252): Selenocysteine
  MOD_RES (298)..(298): Selenocysteine
  MOD_RES (330)..(330): Selenocysteine
  MOD_RES (345)..(345): Selenocysteine
  MOD_RES (363)..(363): Selenocysteine
  MOD_RES (380)..(380): Selenocysteine
  MOD_RES (390)..(390): Selenocysteine
  MOD_RES (395)..(395): Selenocysteine
  MOD_RES (397)..(397): Selenocysteine
  MOD_RES (402)..(402): Selenocysteine
  MOD_RES (405)..(405): Selenocysteine
  MOD_RES (417)..(417): Selenocysteine
  MOD_RES (419)..(419): Selenocysteine
  MOD_RES (422)..(422): Selenocysteine
  MOD_RES (427)..(427): Selenocysteine
  MOD_RES (436)..(436): Selenocysteine
  MOD_RES (438)..(438): Selenocysteine
  MOD_RES (442)..(442): Selenocysteine
  MOD_RES (444)..(444): Selenocysteine
  MOD_RES (446)..(446): Selenocysteine
  MOD_RES (469)..(469): Selenocysteine
  MOD_RES (474)..(474): Selenocysteine
  MOD_RES (479)..(479): Selenocysteine
  MOD_RES (486)..(486): Selenocysteine
  MOD_RES (489)..(489): Selenocysteine
  MOD_RES (493)..(493): Selenocysteine
  MOD_RES (502)..(502): Selenocysteine
  MOD_RES (523)..(523): Selenocysteine
  MOD_RES (534)..(534): Selenocysteine
  MOD_RES (553)..(553): Selenocysteine
  MOD_RES (563)..(563): Selenocysteine
  MOD_RES (570)..(570): Selenocysteine
  MOD_RES (587)..(587): Selenocysteine
  MOD_RES (594)..(594): Selenocysteine
  MOD_RES (602)..(602): Selenocysteine
  MOD_RES (607)..(607): Selenocysteine
  MOD_RES (626)..(626): Selenocysteine
  MOD_RES (633)..(634): Selenocysteine
  MOD_RES (636)..(636): Selenocysteine
MXAXXEVADDEVXEGXVXQIQILQNEQLDEISPLGNEEVSAVSQAWFXXKEDKDSLXNKGHKWKQGMWSKEEIDILMNNIERYLKARGIKDAXEIIFEMSKDERKDFYRXIAWGLNRPLFAVYRRVLRMYDDRNHVGKYXPEEIEKLKELRIKHGNDWAXIGAALGRSASSVKDRCRLMKDXCNXGKWXEEEEKRLAEVVHELXSXEPGDIVXQGVSWAAVAERVGXRSEKQCRSKWLNYLNWKQSGGXEWXKEDEINLILRIAELDVADENDINWDLLAEGWSSVRSPQWLRSKWWXIKRQIANHKDVSFPVLIKGLKQLHENQKNNPXLLENKSGSGVPNSNXNSSVQHVQIRVARLEDNXAISSSPMAALQIPVQIXHVSSADSPAXVDSEXIXLNSGXLQXFEILPSFHLQPXGXPGXYLLQXSSSQGLPLXLXASPXVXLXAAAPASPEQIIVHALSPEHLLNXSDNVXVQCHXPRVIIQXVAXEDIXSSISQAELXVDSDIQSSDFPEPPDALEADXFPDEIHHPKMXVEPSFNDAHVSKFSDQNSXELMNSVMVRXEEEISDXDLKQEESPSDLASAYVXEGLESPXIEEQVDQXIDDEXILIVPSPHGFIQASDVIDXESVLPLXXLXDPILQHHQEESNIIGSSLGSPVSEDSKDVEDLVNCH

SEQ ID NO: 8247 - protein, 178 aa, Homo sapiens
  MOD_RES (7)..(7): Selenocysteine
  MOD_RES (12)..(12): Selenocysteine
  MOD_RES (17)..(17): Selenocysteine
  MOD_RES (24)..(24): Selenocysteine
  MOD_RES (27)..(27): Selenocysteine
  MOD_RES (31)..(31): Selenocysteine
  MOD_RES (40)..(40): Selenocysteine
  MOD_RES (61)..(61): Selenocysteine
  MOD_RES (72)..(72): Selenocysteine
  MOD_RES (91)..(91): Selenocysteine
  MOD_RES (101)..(101): Selenocysteine
  MOD_RES (108)..(108): Selenocysteine
  MOD_RES (125)..(125): Selenocysteine
  MOD_RES (132)..(132): Selenocysteine
  MOD_RES (140)..(140): Selenocysteine
  MOD_RES (145)..(145): Selenocysteine
  MOD_RES (164)..(164): Selenocysteine
  MOD_RES (171)..(172): Selenocysteine
  MOD_RES (174)..(174): Selenocysteine
  MOD_RES (176)..(176): Selenocysteine
PEHLLNXSDNVXVQCHXPRVIIQXVAXEDIXSSISQAELXVDSDIQSSDFPEPPDALEADXFPDEIHHPKMXVEPSFNDAHVSKFSDQNSXELMNSVMVRXEEEISDXDLKQEESPSDLASAYVXEGLESPXIEEQVDQXIDDEXILIVPSPHGFIQASDVIDXESVLPLXXLXGXVI

SEQ ID NO: 8248 - protein, 176 aa, Homo sapiens
  MOD_RES (1)..(1): Any amino acid
  MOD_RES (2)..(2): Selenocysteine
  MOD_RES (25)..(25): Selenocysteine
  MOD_RES (30)..(30): Selenocysteine
  MOD_RES (35)..(35): Selenocysteine
  MOD_RES (42)..(42): Selenocysteine
  MOD_RES (45)..(45): Selenocysteine
  MOD_RES (49)..(49): Selenocysteine
  MOD_RES (58)..(58): Selenocysteine
  MOD_RES (79)..(79): Selenocysteine
  MOD_RES (90)..(90): Selenocysteine
  MOD_RES (109)..(109): Selenocysteine
  MOD_RES (119)..(119): Selenocysteine
  MOD_RES (126)..(126): Selenocysteine
  MOD_RES (143)..(143): Selenocysteine
XXAAAPASPEQIIVHALSPEHLLNXSDNVXVQCHXPRVIIQXVAXEDIXSSISQAELXVDSDIQSSDFPEPPDALEADXFPDEIHHPKMXVEPSFNDAHVSKFSDQNSXELMNSVMVRXEEEISDXDLKQEESPSDLASAYVXEIPYSNIIRKNQISLDHPWAVLFQKIQRMSKIW

SEQ ID NO: 8249 - protein, 72 aa, Homo sapiens
  MOD_RES (44)..(44): Selenocysteine
  MOD_RES (66)..(66): Selenocysteine
MERLQKAKMDNQVLGYKDLAAIPKDKAILDIERPDLMIYEPHFXYSLLEHVELPRSRERSLSPKSXSPPPSP

SEQ ID NO: 8250 - protein, 74 aa, Homo sapiens
  MOD_RES (44)..(44): Selenocysteine
  MOD_RES (66)..(66): Selenocysteine
MERLQKAKMDNQVLGYKDLAAIPKDKAILDIERPDLMIYEPHFXYSLLEHVELPRSRERSLSPKSXSPPPSPEV

SEQ ID NO: 8251 - protein, 148 aa, Homo sapiens
  MOD_RES (44)..(44): Selenocysteine
  MOD_RES (66)..(66): Selenocysteine
  MOD_RES (92)..(93): Selenocysteine
  MOD_RES (95)..(95): Selenocysteine
  MOD_RES (98)..(98): Selenocysteine
  MOD_RES (108)..(108): Selenocysteine
  MOD_RES (134)..(134): Selenocysteine
MERLQKAKMDNQVLGYKDLAAIPKDKAILDIERPDLMIYEPHFXYSLLEHVELPRSRERSLSPKSXSPPPSPEVWADSRSPGIISQASAPRXXGXPRXSLPHFHHPEXSRPDSNIYKKPPIYKQRESVGGSPQXKHLIEDLIIESSKF

SEQ ID NO: 8252 - protein, 162 aa, Homo sapiens
  MOD_RES (44)..(44): Selenocysteine
  MOD_RES (66)..(66): Selenocysteine
  MOD_RES (92)..(93): Selenocysteine
  MOD_RES (95)..(95): Selenocysteine
  MOD_RES (98)..(98): Selenocysteine
  MOD_RES (108)..(108): Selenocysteine
  MOD_RES (134)..(134): Selenocysteine
MERLQKAKMDNQVLGYKDLAAIPKDKAILDIERPDLMIYEPHFXYSLLEHVELPRSRERSLSPKSXSPPPSPEVWADSRSPGIISQASAPRXXGXPRXSLPHFHHPEXSRPDSNIYKKPPIYKQRESVGGSPQXKHLIEDLIIESSKFPAAQPPDPNQPAKI

SEQ ID NO: 8253 - protein, 218 aa, Homo sapiens
  MOD_RES (44)..(44): Selenocysteine
  MOD_RES (66)..(66): Selenocysteine
  MOD_RES (92)..(93): Selenocysteine
  MOD_RES (95)..(95): Selenocysteine
  MOD_RES (98)..(98): Selenocysteine
  MOD_RES (108)..(108): Selenocysteine
  MOD_RES (134)..(134): Selenocysteine
  MOD_RES (164)..(164): Selenocysteine
  MOD_RES (178)..(178): Selenocysteine
MERLQKAKMDNQVLGYKDLAAIPKDKAILDIERPDLMIYEPHFXYSLLEHVELPRSRERSLSPKSXSPPPSPEVWADSRSPGIISQASAPRXXGXPRXSLPHFHHPEXSRPDSNIYKKPPIYKQRESVGGSPQXKHLIEDLIIESSKFPAAQPPDPNQPAKIEXDYWPCPPSLAVVEXEWRKRKASRRGAEEEEEEEDDDSGEEMKALRERQREELSK

SEQ ID NO: 8254 - protein, 358 aa, Homo sapiens
  MOD_RES (44)..(44): Selenocysteine
  MOD_RES (66)..(66): Selenocysteine
  MOD_RES (92)..(93): Selenocysteine
  MOD_RES (95)..(95): Selenocysteine
  MOD_RES (98)..(98): Selenocysteine
  MOD_RES (108)..(108): Selenocysteine
  MOD_RES (134)..(134): Selenocysteine
  MOD_RES (164)..(164): Selenocysteine
  MOD_RES (178)..(178): Selenocysteine
  MOD_RES (220)..(220): Selenocysteine
  MOD_RES (242)..(242): Selenocysteine
  MOD_RES (249)..(249): Selenocysteine
  MOD_RES (253)..(253): Selenocysteine
  MOD_RES (259)..(259): Selenocysteine
  MOD_RES (271)..(272): Selenocysteine
  MOD_RES (279)..(279): Selenocysteine
  MOD_RES (288)..(288): Selenocysteine
  MOD_RES (304)..(304): Selenocysteine
  MOD_RES (309)..(309): Selenocysteine
MERLQKAKMDNQVLGYKDLAAIPKDKAILDIERPDLMIYEPHFXYSLLEHVELPRSRERSLSPKSXSPPPSPEVWADSRSPGIISQASAPRXXGXPRXSLPHFHHPEXSRPDSNIYKKPPIYKQRESVGGSPQXKHLIEDLIIESSKFPAAQPPDPNQPAKIEXDYWPCPPSLAVVEXEWRKRKASRRGAEEEEEEEDDDSGEEMKALRERQREELSKVXSNLGKMILKEEMEKSLPIRRKXRSLPDRXPFHXSLHQGXSKSSSLPAYGRXXLSRLQSXEFSPSGSEXGSPGLQIYPYEMLVVXNKGRXKLPPGVDRMRLERHLSAEDFSRVFAMSPEEFGKLALWKRNELKKKASLF

SEQ ID NO: 8255 - protein, 365 aa, Homo sapiens
  MOD_RES (44)..(44): Selenocysteine
  MOD_RES (77)..(78): Selenocysteine
  MOD_RES (80)..(80): Selenocysteine
  MOD_RES (83)..(83): Selenocysteine
  MOD_RES (93)..(93): Selenocysteine
  MOD_RES (119)..(119): Selenocysteine
  MOD_RES (149)..(149): Selenocysteine
  MOD_RES (163)..(163): Selenocysteine
  MOD_RES (205)..(205): Selenocysteine
  MOD_RES (227)..(227): Selenocysteine
  MOD_RES (234)..(234): Selenocysteine
  MOD_RES (238)..(238): Selenocysteine
  MOD_RES (244)..(244): Selenocysteine
  MOD_RES (256)..(257): Selenocysteine
  MOD_RES (264)..(264): Selenocysteine
  MOD_RES (273)..(273): Selenocysteine
  MOD_RES (311)..(311): Selenocysteine
  MOD_RES (316)..(316): Selenocysteine
MERLQKAKMDNQVLGYKDLAAIPKDKAILDIERPDLMIYEPHFXYSLLEHVELPRSREVWADSRSPGIISQASAPRXXGXPRXSLPHFHHPEXSRPDSNIYKKPPIYKQRESVGGSPQXKHLIEDLIIESSKFPAAQPPDPNQPAKIEXDYWPCPPSLAVVEXEWRKRKASRRGAEEEEEEEDDDSGEEMKALRERQREELSKVXSNLGKMILKEEMEKSLPIRRKXRSLPDRXPFHXSLHQGXSKSSSLPAYGRXXLSRLQSXEFSPSGSEXGSPGLQNGEGQRGRMDRGNSLPCVLEQKIYPYEMLVVXNKGRXKLPPGVDRMRLERHLSAEDFSRVFAMSPEEFGKLALWKRNELKKKASLF

SEQ ID NO: 8256 - protein, 72 aa, Homo sapiens
  MOD_RES (10)..(10): Selenocysteine
  MOD_RES (69)..(69): Selenocysteine
MERLQKQPLXSPGSVSPSRDSSVPGSPSSIVAKMDNQVLGYKDLAAIPKDKAILDIERPDLMIYEPHFXYSL

SEQ ID NO: 8257 - protein, 110 aa, Homo sapiens
  MOD_RES (10)..(10): Selenocysteine
  MOD_RES (69)..(69): Selenocysteine
  MOD_RES (91)..(91): Selenocysteine
MERLQKQPLXSPGSVSPSRDSSVPGSPSSIVAKMDNQVLGYKDLAAIPKDKAILDIERPDLMIYEPHFXYSLLEHVELPRSRERSLSPKSXSPPPSPEVWADSRSPGIIS

SEQ ID NO: 8258 - protein, 201 aa, Homo sapiens
  MOD_RES (10)..(10): Selenocysteine
  MOD_RES (69)..(69): Selenocysteine
  MOD_RES (91)..(91): Selenocysteine
  MOD_RES (117)..(118): Selenocysteine
  MOD_RES (120)..(120): Selenocysteine
  MOD_RES (123)..(123): Selenocysteine
  MOD_RES (133)..(133): Selenocysteine
  MOD_RES (159)..(159): Selenocysteine
  MOD_RES (189)..(189): Selenocysteine
MERLQKQPLXSPGSVSPSRDSSVPGSPSSIVAKMDNQVLGYKDLAAIPKDKAILDIERPDLMIYEPHFXYSLLEHVELPRSRERSLSPKSXSPPPSPEVWADSRSPGIISQASAPRXXGXPRXSLPHFHHPEXSRPDSNIYKKPPIYKQRESVGGSPQXKHLIEDLIIESSKFPAAQPPDPNQPAKIEXDYWPCPPSLAVV

SEQ ID NO: 8259 - protein, 383 aa, Homo sapiens
  MOD_RES (10)..(10): Selenocysteine
  MOD_RES (69)..(69): Selenocysteine
  MOD_RES (91)..(91): Selenocysteine
  MOD_RES (117)..(118): Selenocysteine
  MOD_RES (120)..(120): Selenocysteine
  MOD_RES (123)..(123): Selenocysteine
  MOD_RES (133)..(133): Selenocysteine
  MOD_RES (159)..(159): Selenocysteine
  MOD_RES (189)..(189): Selenocysteine
  MOD_RES (203)..(203): Selenocysteine
  MOD_RES (245)..(245): Selenocysteine
  MOD_RES (267)..(267): Selenocysteine
  MOD_RES (274)..(274): Selenocysteine
  MOD_RES (278)..(278): Selenocysteine
  MOD_RES (284)..(284): Selenocysteine
  MOD_RES (296)..(297): Selenocysteine
  MOD_RES (304)..(304): Selenocysteine
  MOD_RES (313)..(313): Selenocysteine
  MOD_RES (329)..(329): Selenocysteine
  MOD_RES (334)..(334): Selenocysteine
MERLQKQPLXSPGSVSPSRDSSVPGSPSSIVAKMDNQVLGYKDLAAIPKDKAILDIERPDLMIYEPHFXYSLLEHVELPRSRERSLSPKSXSPPPSPEVWADSRSPGIISQASAPRXXGXPRXSLPHFHHPEXSRPDSNIYKKPPIYKQRESVGGSPQXKHLIEDLIIESSKFPAAQPPDPNQPAKIEXDYWPCPPSLAVVEXEWRKRKASRRGAEEEEEEEDDDSGEEMKALRERQREELSKVXSNLGKMILKEEMEKSLPIRRKXRSLPDRXPFHXSLHQGXSKSSSLPAYGRXXLSRLQSXEFSPSGSEXGSPGLQIYPYEMLVVXNKGRXKLPPGVDRMRLERHLSAEDFSRVFAMSPEEFGKLALWKRNELKKKASLF

SEQ ID NO: 8260 - protein, 405 aa, Homo sapiens
  MOD_RES (10)..(10): Selenocysteine
  MOD_RES (69)..(69): Selenocysteine
  MOD_RES (91)..(91): Selenocysteine
  MOD_RES (117)..(118): Selenocysteine
  MOD_RES (120)..(120): Selenocysteine
  MOD_RES (123)..(123): Selenocysteine
  MOD_RES (133)..(133): Selenocysteine
  MOD_RES (159)..(159): Selenocysteine
  MOD_RES (189)..(189): Selenocysteine
  MOD_RES (203)..(203): Selenocysteine
  MOD_RES (245)..(245): Selenocysteine
  MOD_RES (267)..(267): Selenocysteine
  MOD_RES (274)..(274): Selenocysteine
  MOD_RES (278)..(278): Selenocysteine
  MOD_RES (284)..(284): Selenocysteine
  MOD_RES (296)..(297): Selenocysteine
  MOD_RES (304)..(304): Selenocysteine
  MOD_RES (313)..(313): Selenocysteine
  MOD_RES (351)..(351): Selenocysteine
  MOD_RES (356)..(356): Selenocysteine
MERLQKQPLXSPGSVSPSRDSSVPGSPSSIVAKMDNQVLGYKDLAAIPKDKAILDIERPDLMIYEPHFXYSLLEHVELPRSRERSLSPKSXSPPPSPEVWADSRSPGIISQASAPRXXGXPRXSLPHFHHPEXSRPDSNIYKKPPIYKQRESVGGSPQXKHLIEDLIIESSKFPAAQPPDPNQPAKIEXDYWPCPPSLAVVEXEWRKRKASRRGAEEEEEEEDDDSGEEMKALRERQREELSKVXSNLGKMILKEEMEKSLPIRRKXRSLPDRXPFHXSLHQGXSKSSSLPAYGRXXLSRLQSXEFSPSGSEXGSPGLQNGEGQRGRMDRGNSLPCVLEQKIYPYEMLVVXNKGRXKLPPGVDRMRLERHLSAEDFSRVFAMSPEEFGKLALWKRNELKKKASLF

SEQ ID NO: 8261 - protein, 687 aa, Homo sapiens
  MOD_RES (37)..(37): Selenocysteine
  MOD_RES (41)..(41): Selenocysteine
  MOD_RES (54)..(54): Selenocysteine
  MOD_RES (69)..(69): Selenocysteine
  MOD_RES (104)..(104): Selenocysteine
  MOD_RES (107)..(107): Selenocysteine
  MOD_RES (128)..(128): Selenocysteine
  MOD_RES (145)..(145): Selenocysteine
  MOD_RES (153)..(153): Selenocysteine
  MOD_RES (160)..(160): Selenocysteine
  MOD_RES (186)..(186): Selenocysteine
  MOD_RES (229)..(229): Selenocysteine
  MOD_RES (231)..(231): Selenocysteine
  MOD_RES (250)..(250): Selenocysteine
  MOD_RES (279)..(279): Selenocysteine
  MOD_RES (290)..(290): Selenocysteine
  MOD_RES (301)..(301): Selenocysteine
  MOD_RES (318)..(318): Selenocysteine
  MOD_RES (338)..(338): Selenocysteine
  MOD_RES (374)..(374): Selenocysteine
  MOD_RES (378)..(378): Selenocysteine
  MOD_RES (392)..(392): Selenocysteine
  MOD_RES (430)..(430): Selenocysteine
  MOD_RES (436)..(436): Selenocysteine
  MOD_RES (449)..(449): Selenocysteine
  MOD_RES (510)..(510): Selenocysteine
  MOD_RES (541)..(542): Selenocysteine
  MOD_RES (544)..(544): Selenocysteine
  MOD_RES (558)..(558): Selenocysteine
  MOD_RES (573)..(573): Selenocysteine
  MOD_RES (585)..(585): Selenocysteine
  MOD_RES (618)..(618): Selenocysteine
  MOD_RES (644)..(644): Selenocysteine
  MOD_RES (652)..(652): Selenocysteine
  MOD_RES (655)..(657): Selenocysteine
  MOD_RES (660)..(660): Selenocysteine
MEQLNELELLMEKSFWEEAELPAELFQKKVVASFPRXVLSXGMDNRYLVLAVNXVQNKEGNCEKRLVIXASQSLENKELCILRNDWCSVPVEPGDIIHLEGDCXSDXWIIDKDFGYLILYPDMLISGXSIASSIRCMRRAVLSEXFRSSDPAXRQMLIGXVLHEVFQKAINNSFAPEKLQELAFQXIQEIRHLKEMYRLNLSQDEIKQEVEDYLPSFCKWAGDFMHKNXSXDFPQMQLSLPSDNSKDNSXCNIEVVKPMDIEESIWSPRFGLKGKIDVXVGVKIHRGYKXKYKIMPLELKXGKESNSIEHRSQVVLYXLLSQERRADPEAGLLLYLKXGQMYPVPANHLDKRELLKLRNQMAFSLFHRISKSAXRQKXQLASLPQIIEEEKXCKYCSQIGNCALYSRAVEQQMDCSSVPIVMLPKIEEEXQHLKQXHLEYFSLWCLMLXLESQSKDNKKNHQNIWLMPASEMEKSGSCIGNLIRMEHVKIVCDGQYLHNFQCKHGAIPVXNLMAGDRVIVSGEERSLFALSRGYVKEINMXXVXCLLDRNLSVLPESXLFRLDQEEKNCDIDXPLGNLSKLMENXFVSKKLRDLIIDFREPQFISYLSSVLPHDAKDXVACILKGLNKPQRQAMKKVLLSKDYXLIVGMPGXGKXXXICXLVRFRRFIQLSSNLQSKKFADQSPLNP

SEQ ID NO: 8262 - protein, 867 aa, Homo sapiens
  MOD_RES (37)..(37): Selenocysteine
  MOD_RES (41)..(41): Selenocysteine
  MOD_RES (54)..(54): Selenocysteine
  MOD_RES (69)..(69): Selenocysteine
  MOD_RES (104)..(104): Selenocysteine
  MOD_RES (107)..(107): Selenocysteine
  MOD_RES (128)..(128): Selenocysteine
  MOD_RES (145)..(145): Selenocysteine
  MOD_RES (153)..(153): Selenocysteine
  MOD_RES (160)..(160): Selenocysteine
  MOD_RES (186)..(186): Selenocysteine
  MOD_RES (229)..(229): Selenocysteine
  MOD_RES (231)..(231): Selenocysteine
  MOD_RES (250)..(250): Selenocysteine
  MOD_RES (279)..(279): Selenocysteine
  MOD_RES (290)..(290): Selenocysteine
  MOD_RES (301)..(301): Selenocysteine
  MOD_RES (318)..(318): Selenocysteine
  MOD_RES (338)..(338): Selenocysteine
  MOD_RES (374)..(374): Selenocysteine
  MOD_RES (378)..(378): Selenocysteine
  MOD_RES (392)..(392): Selenocysteine
  MOD_RES (430)..(430): Selenocysteine
  MOD_RES (436)..(436): Selenocysteine
  MOD_RES (449)..(449): Selenocysteine
  MOD_RES (510)..(510): Selenocysteine
  MOD_RES (541)..(542): Selenocysteine
  MOD_RES (544)..(544): Selenocysteine
  MOD_RES (558)..(558): Selenocysteine
  MOD_RES (573)..(573): Selenocysteine
  MOD_RES (585)..(585): Selenocysteine
  MOD_RES (618)..(618): Selenocysteine
  MOD_RES (644)..(644): Selenocysteine
  MOD_RES (652)..(652): Selenocysteine
  MOD_RES (655)..(657): Selenocysteine
  MOD_RES (660)..(660): Selenocysteine
  MOD_RES (677)..(677): Selenocysteine
  MOD_RES (686)..(686): Selenocysteine
  MOD_RES (727)..(727): Selenocysteine
  MOD_RES (751)..(751): Selenocysteine
  MOD_RES (767)..(767): Selenocysteine
  MOD_RES (815)..(815): Selenocysteine
  MOD_RES (819)..(819): Selenocysteine
  MOD_RES (825)..(825): Selenocysteine
  MOD_RES (833)..(833): Selenocysteine
  MOD_RES (844)..(844): Selenocysteine
  MOD_RES (849)..(849): Selenocysteine
MEQLNELELLMEKSFWEEAELPAELFQKKVVASFPRXVLSXGMDNRYLVLAVNXVQNKEGNCEKRLVIXASQSLENKELCILRNDWCSVPVEPGDIIHLEGDCXSDXWIIDKDFGYLILYPDMLISGXSIASSIRCMRRAVLSEXFRSSDPAXRQMLIGXVLHEVFQKAINNSFAPEKLQELAFQXIQEIRHLKEMYRLNLSQDEIKQEVEDYLPSFCKWAGDFMHKNXSXDFPQMQLSLPSDNSKDNSXCNIEVVKPMDIEESIWSPRFGLKGKIDVXVGVKIHRGYKXKYKIMPLELKXGKESNSIEHRSQVVLYXLLSQERRADPEAGLLLYLKXGQMYPVPANHLDKRELLKLRNQMAFSLFHRISKSAXRQKXQLASLPQIIEEEKXCKYCSQIGNCALYSRAVEQQMDCSSVPIVMLPKIEEEXQHLKQXHLEYFSLWCLMLXLESQSKDNKKNHQNIWLMPASEMEKSGSCIGNLIRMEHVKIVCDGQYLHNFQCKHGAIPVXNLMAGDRVIVSGEERSLFALSRGYVKEINMXXVXCLLDRNLSVLPESXLFRLDQEEKNCDIDXPLGNLSKLMENXFVSKKLRDLIIDFREPQFISYLSSVLPHDAKDXVACILKGLNKPQRQAMKKVLLSKDYXLIVGMPGXGKXXXICXLVPAPEQVEKGGVSNVXEAKLIVFLXSIFVKAGCSPSDIGIIAPYRQQLKIINDLLARSIGMVEVNXVDKYQGRDKSIVLVSFVRSNKDGXVGELLKDWRRLNVAIXRAKHKLILLGCVPSLNCYPPLEKLLNHLNSEKLISLIFHQENMKVFAXYWVXFKENKXLFPLPFHXRAVSPLASAHXENSIXIQNLMQYLCFKAQVYRKL

SEQ ID NO: 8263 - protein, 1060 aa, Homo sapiens
  MOD_RES (37)..(37): Selenocysteine
  MOD_RES (41)..(41): Selenocysteine
  MOD_RES (54)..(54): Selenocysteine
  MOD_RES (69)..(69): Selenocysteine
  MOD_RES (104)..(104): Selenocysteine
  MOD_RES (107)..(107): Selenocysteine
  MOD_RES (128)..(128): Selenocysteine
  MOD_RES (145)..(145): Selenocysteine
  MOD_RES (153)..(153): Selenocysteine
  MOD_RES (160)..(160): Selenocysteine
  MOD_RES (186)..(186): Selenocysteine
  MOD_RES (229)..(229): Selenocysteine
  MOD_RES (231)..(231): Selenocysteine
  MOD_RES (250)..(250): Selenocysteine
  MOD_RES (279)..(279): Selenocysteine
  MOD_RES (290)..(290): Selenocysteine
  MOD_RES (301)..(301): Selenocysteine
  MOD_RES (318)..(318): Selenocysteine
  MOD_RES (338)..(338): Selenocysteine
  MOD_RES (374)..(374): Selenocysteine
  MOD_RES (378)..(378): Selenocysteine
  MOD_RES (392)..(392): Selenocysteine
  MOD_RES (430)..(430): Selenocysteine
  MOD_RES (436)..(436): Selenocysteine
  MOD_RES (449)..(449): Selenocysteine
  MOD_RES (510)..(510): Selenocysteine
  MOD_RES (541)..(542): Selenocysteine
  MOD_RES (544)..(544): Selenocysteine
  MOD_RES (558)..(558): Selenocysteine
  MOD_RES (573)..(573): Selenocysteine
  MOD_RES (585)..(585): Selenocysteine
  MOD_RES (618)..(618): Selenocysteine
  MOD_RES (644)..(644): Selenocysteine
  MOD_RES (652)..(652): Selenocysteine
  MOD_RES (655)..(657): Selenocysteine
  MOD_RES (660)..(660): Selenocysteine
  MOD_RES (675)..(675): Selenocysteine
  MOD_RES (678)..(678): Selenocysteine
  MOD_RES (713)..(713): Selenocysteine
  MOD_RES (741)..(742): Selenocysteine
  MOD_RES (824)..(824): Selenocysteine
  MOD_RES (841)..(841): Selenocysteine
  MOD_RES (897)..(897): Selenocysteine
  MOD_RES (915)..(915): Selenocysteine
  MOD_RES (924)..(924): Selenocysteine
  MOD_RES (965)..(965): Selenocysteine
  MOD_RES (989)..(989): Selenocysteine
  MOD_RES (1005)..(1005): Selenocysteine
MEQLNELELLMEKSFWEEAELPAELFQKKVVASFPRXVLSXGMDNRYLVLAVNXVQNKEGNCEKRLVIXASQSLENKELCILRNDWCSVPVEPGDIIHLEGDCXSDXWIIDKDFGYLILYPDMLISGXSIASSIRCMRRAVLSEXFRSSDPAXRQMLIGXVLHEVFQKAINNSFAPEKLQELAFQXIQEIRHLKEMYRLNLSQDEIKQEVEDYLPSFCKWAGDFMHKNXSXDFPQMQLSLPSDNSKDNSXCNIEVVKPMDIEESIWSPRFGLKGKIDVXVGVKIHRGYKXKYKIMPLELKXGKESNSIEHRSQVVLYXLLSQERRADPEAGLLLYLKXGQMYPVPANHLDKRELLKLRNQMAFSLFHRISKSAXRQKXQLASLPQIIEEEKXCKYCSQIGNCALYSRAVEQQMDCSSVPIVMLPKIEEEXQHLKQXHLEYFSLWCLMLXLESQSKDNKKNHQNIWLMPASEMEKSGSCIGNLIRMEHVKIVCDGQYLHNFQCKHGAIPVXNLMAGDRVIVSGEERSLFALSRGYVKEINMXXVXCLLDRNLSVLPESXLFRLDQEEKNCDIDXPLGNLSKLMENXFVSKKLRDLIIDFREPQFISYLSSVLPHDAKDXVACILKGLNKPQRQAMKKVLLSKDYXLIVGMPGXGKXXXICXLVRILYACGFSVLLXSYXHSAVDNILLKLAKFKIGFLRLGQIQKVHPAIQQFXEQEICRSKSIKSLALLEELYNSQLIVAXXCMGINHPIFSRKIFDFCIVDEASQISQPICLGPLFFSRRFVLVGDHQQLPPLVLNREARALGMSESLFKRLEQNKSAVVQLXVQYRMNSKIMSLSNKLXYEGKLECGSDKVANAVINLRHFKDVKLELEFYADYSDNPWLMGVFEPNNPVCFLNXDKVPAPEQVEKGGVSNVXEAKLIVFLXSIFVKAGCSPSDIGIIAPYRQQLKIINDLLARSIGMVEVNXVDKYQGRDKSIVLVSFVRSNKDGXVGELLKDWRRLNVAIXRAKHKLILLGCVPSLNCYPPLEKLLNHLNSEKLIIDLPSREHESLCHILGDFQRE

SEQ ID NO: 8264 - protein, 39 aa, Homo sapiens
  MOD_RES (26)..(26): Selenocysteine
MEQLNELELLMEKSFWEEAELPAELXGVFFCRSGRGAVA

SEQ ID NO: 8265 - protein, 375 aa, Homo sapiens
  MOD_RES (1)..(1): Any amino acid
  MOD_RES (35)..(35): Selenocysteine
  MOD_RES (63)..(64): Selenocysteine
  MOD_RES (146)..(146): Selenocysteine
  MOD_RES (163)..(163): Selenocysteine
  MOD_RES (219)..(219): Selenocysteine
  MOD_RES (237)..(237): Selenocysteine
  MOD_RES (246)..(246): Selenocysteine
  MOD_RES (287)..(287): Selenocysteine
  MOD_RES (311)..(311): Selenocysteine
  MOD_RES (327)..(327): Selenocysteine
XSAVDNILLKLAKFKIGFLRLGQIQKVHPAIQQFXEQEICRSKSIKSLALLEELYNSQLIVAXXCMGINHPIFSRKIFDFCIVDEASQISQPICLGPLFFSRRFVLVGDHQQLPPLVLNREARALGMSESLFKRLEQNKSAVVQLXVQYRMNSKIMSLSNKLXYEGKLECGSDKVANAVINLRHFKDVKLELEFYADYSDNPWLMGVFEPNNPVCFLNXDKVPAPEQVEKGGVSNVXEAKLIVFLXSIFVKAGCSPSDIGIIAPYRQQLKIINDLLARSIGMVEVNXVDKYQGRDKSIVLVSFVRSNKDGXVGELLKDWRRLNVAIXRAKHKLILLGCVPSLNCYPPLEKLLNHLNSEKLISFFFCIWSHLIALL

SEQ ID NO: 8266 - protein, 397 aa, Homo sapiens
  MOD_RES (5)..(6): Selenocysteine
  MOD_RES (18)..(18): Selenocysteine
  MOD_RES (114)..(114): Selenocysteine
  MOD_RES (123)..(123): Selenocysteine
  MOD_RES (156)..(156): Selenocysteine
  MOD_RES (223)..(223): Selenocysteine
  MOD_RES (252)..(252): Selenocysteine
  MOD_RES (279)..(279): Selenocysteine
  MOD_RES (284)..(284): Selenocysteine
  MOD_RES (288)..(288): Selenocysteine
  MOD_RES (355)..(355): Selenocysteine
  MOD_RES (396)..(396): Selenocysteine
MVKEXXYYDVLGVKPNAXQEELKKAYRKLALKYHPDKNPNEGEKFKQISQAYEVLSDAKKRELYDKGGEQAIKEGGAGGGFGSPMDIFDMFFGGGGRMQRERRGKNVVHQLSVXLEDLYNGAXRKLALQKNVICDKCEGRGGKKGAVECCPNCRGXGMQIRIHQIGPGMVQQIQSVCMECQGHGERISPKDRCKSCNGRKIVREKKILEVHIDKGMKDGQKIXFHGEGDQEPGLEPGDIIIVLDQKDHAVFXRRGEDLFMCMDIQLVEALCGFQKPISXLDNRXIVIXSHPGQIVKHGDIKCVLNEGMPIYRRPYEKGRLIIEFKVNFPENGFLSPDKLSLLEKLLPERKEVEEXDEMDQVELVDFDPNQERRRHYNGEAYEDDEHHPRGGVQCQXS

SEQ ID NO: 8267 - protein, 77 aa, Homo sapiens
  MOD_RES (7)..(7): Selenocysteine
  MOD_RES (16)..(16): Selenocysteine
  MOD_RES (53)..(53): Selenocysteine
  MOD_RES (62)..(62): Selenocysteine
  MOD_RES (70)..(70): Selenocysteine
MAARCSXRWLLVVVGXPRLPAISGRGARPPREGVVGAWLSRKLSVPAFASSLXSCGPRALLXLRPGVSLXACQEVSP

SEQ ID NO: 8268 - protein, 122 aa, Homo sapiens
  MOD_RES (7)..(7): Selenocysteine
  MOD_RES (16)..(16): Selenocysteine
  MOD_RES (53)..(53): Selenocysteine
  MOD_RES (62)..(62): Selenocysteine
  MOD_RES (70)..(70): Selenocysteine
  MOD_RES (89)..(89): Selenocysteine
  MOD_RES (91)..(91): Selenocysteine
  MOD_RES (100)..(100): Selenocysteine
  MOD_RES (109)..(109): Selenocysteine
MAARCSXRWLLVVVGXPRLPAISGRGARPPREGVVGAWLSRKLSVPAFASSLXSCGPRALLXLRPGVSLXGGVLLCRPGWSAMARSWLXAXSASQEQNIXLSFVLPPSXRVPLWPKKIIIRY

SEQ ID NO: 8269 - protein, 98 aa, Homo sapiens
  MOD_RES (7)..(7): Selenocysteine
  MOD_RES (16)..(16): Selenocysteine
  MOD_RES (53)..(53): Selenocysteine
  MOD_RES (62)..(62): Selenocysteine
  MOD_RES (70)..(70): Selenocysteine
  MOD_RES (95)..(95): Selenocysteine
MAARCSXRWLLVVVGXPRLPAISGRGARPPREGVVGAWLSRKLSVPAFASSLXSCGPRALLXLRPGVSLXGRSLASSHPLHLEISRPCLISLRNXSWS

SEQ ID NO: 8270 - protein, 453 aa, Homo sapiens
  MOD_RES (7)..(7): Selenocysteine
  MOD_RES (16)..(16): Selenocysteine
  MOD_RES (53)..(53): Selenocysteine
  MOD_RES (62)..(62): Selenocysteine
  MOD_RES (70)..(70): Selenocysteine
  MOD_RES (72)..(72): Selenocysteine
  MOD_RES (80)..(80): Selenocysteine
  MOD_RES (85)..(85): Selenocysteine
  MOD_RES (124)..(124): Selenocysteine
  MOD_RES (179)..(179): Selenocysteine
  MOD_RES (203)..(203): Selenocysteine
  MOD_RES (216)..(216): Selenocysteine
  MOD_RES (229)..(229): Selenocysteine
  MOD_RES (235)..(235): Selenocysteine
  MOD_RES (248)..(248): Selenocysteine
  MOD_RES (263)..(263): Selenocysteine
  MOD_RES (266)..(266): Selenocysteine
  MOD_RES (274)..(274): Selenocysteine
  MOD_RES (317)..(317): Selenocysteine
  MOD_RES (330)..(330): Selenocysteine
  MOD_RES (362)..(362): Selenocysteine
  MOD_RES (371)..(371): Selenocysteine
  MOD_RES (375)..(375): Selenocysteine
  MOD_RES (380)..(380): Selenocysteine
  MOD_RES (382)..(382): Selenocysteine
  MOD_RES (417)..(417): Selenocysteine
  MOD_RES (432)..(432): Selenocysteine
  MOD_RES (437)..(437): Selenocysteine
  MOD_RES (442)..(442): Selenocysteine
  MOD_RES (444)..(444): Selenocysteine
  MOD_RES (451)..(451): Selenocysteine
MAARCSXRWLLVVVGXPRLPAISGRGARPPREGVVGAWLSRKLSVPAFASSLXSCGPRALLXLRPGVSLXGXKHNPFICXASFHXSAPLAKEDYYQILGVPRNASQKEIKKAYYQLAKKYHPDXNKDDPKAKEKFSQLAEAYEVLSDEVKRKQYDAYGSAGFDPGASGSQHSYWKGGPXVDPEELFRKIFGEFSSSSFGDFQXVFDQPQEYFMELXFNQAAKGVNKEFXVNIMDXCERCNGKGNEPGXKVQHCHYCGGSGMEXINXGPFVMRSXCRRCGGRGSIIISPCVVCRGAGQAKQKKRVMIPVPAGVEDGQXVRMPVGKREIFIXFRVQKSPVFRRDGADIHSDLFISIAQALLGGXARAQGLYEXINVXIPPGXQXDQKIRMGGKGIPRINSYGYGDHYIHIKIRVPKRLXSRQQSLILSYAEDEXDVEGXVNGVXLXSSGKRSXGN

SEQ ID NO: 8271 - protein, 480 aa, Homo sapiens
  MOD_RES (7)..(7): Selenocysteine
  MOD_RES (16)..(16): Selenocysteine
  MOD_RES (53)..(53): Selenocysteine
  MOD_RES (62)..(62): Selenocysteine
  MOD_RES (70)..(70): Selenocysteine
  MOD_RES (72)..(72): Selenocysteine
  MOD_RES (80)..(80): Selenocysteine
  MOD_RES (85)..(85): Selenocysteine
  MOD_RES (124)..(124): Selenocysteine
  MOD_RES (179)..(179): Selenocysteine
  MOD_RES (203)..(203): Selenocysteine
  MOD_RES (216)..(216): Selenocysteine
  MOD_RES (229)..(229): Selenocysteine
  MOD_RES (235)..(235): Selenocysteine
  MOD_RES (248)..(248): Selenocysteine
  MOD_RES (263)..(263): Selenocysteine
  MOD_RES (266)..(266): Selenocysteine
  MOD_RES (274)..(274): Selenocysteine
  MOD_RES (317)..(317): Selenocysteine
  MOD_RES (330)..(330): Selenocysteine
  MOD_RES (362)..(362): Selenocysteine
  MOD_RES (371)..(371): Selenocysteine
  MOD_RES (375)..(375): Selenocysteine
  MOD_RES (380)..(380): Selenocysteine
  MOD_RES (382)..(382): Selenocysteine
  MOD_RES (417)..(417): Selenocysteine
  MOD_RES (432)..(432): Selenocysteine
  MOD_RES (437)..(437): Selenocysteine
  MOD_RES (442)..(442): Selenocysteine
  MOD_RES (444)..(444): Selenocysteine
  MOD_RES (450)..(450): Selenocysteine
  MOD_RES (479)..(479): Selenocysteine
MAARCSXRWLLVVVGXPRLPAISGRGARPPREGVVGAWLSRKLSVPAFASSLXSCGPRALLXLRPGVSLXGXKHNPFICXASFHXSAPLAKEDYYQILGVPRNASQKEIKKAYYQLAKKYHPDXNKDDPKAKEKFSQLAEAYEVLSDEVKRKQYDAYGSAGFDPGASGSQHSYWKGGPXVDPEELFRKIFGEFSSSSFGDFQXVFDQPQEYFMELXFNQAAKGVNKEFXVNIMDXCERCNGKGNEPGXKVQHCHYCGGSGMEXINXGPFVMRSXCRRCGGRGSIIISPCVVCRGAGQAKQKKRVMIPVPAGVEDGQXVRMPVGKREIFIXFRVQKSPVFRRDGADIHSDLFISIAQALLGGXARAQGLYEXINVXIPPGXQXDQKIRMGGKGIPRINSYGYGDHYIHIKIRVPKRLXSRQQSLILSYAEDEXDVEGXVNGVXLXSSGGSXMDSSAGSKARREAGEDEEGFLSKLKKMFXS

SEQ ID NO: 8272 - protein, 185 aa, Homo sapiens
  MOD_RES (7)..(7): Selenocysteine
  MOD_RES (16)..(16): Selenocysteine
  MOD_RES (53)..(53): Selenocysteine
  MOD_RES (62)..(62): Selenocysteine
  MOD_RES (70)..(70): Selenocysteine
  MOD_RES (72)..(72): Selenocysteine
  MOD_RES (80)..(80): Selenocysteine
  MOD_RES (85)..(85): Selenocysteine
  MOD_RES (124)..(124): Selenocysteine
  MOD_RES (149)..(149): Selenocysteine
  MOD_RES (162)..(162): Selenocysteine
  MOD_RES (168)..(168): Selenocysteine
  MOD_RES (181)..(181): Selenocysteine
MAARCSXRWLLVVVGXPRLPAISGRGARPPREGVVGAWLSRKLSVPAFASSLXSCGPRALLXLRPGVSLXGXKHNPFICXASFHXSAPLAKEDYYQILGVPRNASQKEIKKAYYQLAKKYHPDXNKDDPKAKEKFSQLAEAYEYFMELXFNQAAKGVNKEFXVNIMDXCERCNGKGNEPGXKVQH

SEQ ID NO: 8273 - protein, 300 aa, Homo sapiens
  MOD_RES (28)..(28): Selenocysteine
  MOD_RES (50)..(50): Selenocysteine
  MOD_RES (63)..(63): Selenocysteine
  MOD_RES (76)..(76): Selenocysteine
  MOD_RES (82)..(82): Selenocysteine
  MOD_RES (95)..(95): Selenocysteine
  MOD_RES (110)..(110): Selenocysteine
  MOD_RES (113)..(113): Selenocysteine
  MOD_RES (121)..(121): Selenocysteine
  MOD_RES (164)..(164): Selenocysteine
  MOD_RES (177)..(177): Selenocysteine
  MOD_RES (209)..(209): Selenocysteine
  MOD_RES (218)..(218): Selenocysteine
  MOD_RES (222)..(222): Selenocysteine
  MOD_RES (227)..(227): Selenocysteine
  MOD_RES (229)..(229): Selenocysteine
  MOD_RES (264)..(264): Selenocysteine
  MOD_RES (279)..(279): Selenocysteine
  MOD_RES (284)..(284): Selenocysteine
  MOD_RES (289)..(289): Selenocysteine
  MOD_RES (291)..(291): Selenocysteine
  MOD_RES (298)..(298): Selenocysteine
MAEPQAERPRLCVFPDLLRPPSAADIEXWCQPYRKIFGEFSSSSFGDFQXVFDQPQEYFMELXFNQAAKGVNKEFXVNIMDXCERCNGKGNEPGXKVQHCHYCGGSGMEXINXGPFVMRSXCRRCGGRGSIIISPCVVCRGAGQAKQKKRVMIPVPAGVEDGQXVRMPVGKREIFIXFRVQKSPVFRRDGADIHSDLFISIAQALLGGXARAQGLYEXINVXIPPGXQXDQKIRMGGKGIPRINSYGYGDHYIHIKIRVPKRLXSRQQSLILSYAEDEXDVEGXVNGVXLXSSGKRSXGN

SEQ ID NO: 8274 - protein, 554 aa, Homo sapiens
  MOD_RES (2)..(2): Selenocysteine
  MOD_RES (29)..(29): Selenocysteine
  MOD_RES (91)..(91): Selenocysteine
  MOD_RES (104)..(104): Selenocysteine
  MOD_RES (163)..(163): Selenocysteine
  MOD_RES (194)..(194): Selenocysteine
  MOD_RES (234)..(234): Selenocysteine
  MOD_RES (255)..(255): Selenocysteine
  MOD_RES (265)..(265): Selenocysteine
  MOD_RES (267)..(267): Selenocysteine
  MOD_RES (271)..(271): Selenocysteine
  MOD_RES (289)..(289): Selenocysteine
  MOD_RES (293)..(294): Selenocysteine
  MOD_RES (303)..(303): Selenocysteine
  MOD_RES (322)..(322): Selenocysteine
  MOD_RES (331)..(331): Selenocysteine
  MOD_RES (339)..(339): Selenocysteine
  MOD_RES (349)..(349): Selenocysteine
  MOD_RES (365)..(365): Selenocysteine
  MOD_RES (368)..(369): Selenocysteine
  MOD_RES (379)..(379): Selenocysteine
  MOD_RES (393)..(393): Selenocysteine
  MOD_RES (402)..(402): Selenocysteine
  MOD_RES (404)..(405): Selenocysteine
  MOD_RES (412)..(412): Selenocysteine
  MOD_RES (435)..(435): Selenocysteine
  MOD_RES (438)..(438): Selenocysteine
  MOD_RES (454)..(454): Selenocysteine
  MOD_RES (498)..(498): Selenocysteine
MXAPCSQPAQLPGRRQLGLVPFPPPPPRXPLLWLLLLLLAAVAPARGWESGDLELFDLVEEVQLNFYQFLGVQQDASSADIRKAYRKLSLXLHPDKNKDENAEXQFRQLVAIYEVLKDDERRQRYDDILINGLPDWRQPVFYYRRVRKMSNAELALLLFIILXVGHYAVVWSIYLEKQLDELLSRKKREKKKKXGSKSVDVSKLGASEKNERLLMKPQWHDLLPCKLGIWFCLXLKALPHLIQDAGQFYAKYKEXRLKEKEDALXRXELEXLQKQKKVKKPKPEFPVYXPLEXXYIQSYDHGXSIEEIEEQMDDWLENRNRXQKKQAPEWXEEDLSQLXRSMVKFPGGXPGRWEKIAHELGRSVXDVXXKAKQLKDSVXCSPGMVRLSELKSXVQNSRPIKXAXXLPDDMIXQREDAEGVAAEEEQEGDSGEQEXGAXDARPRRRKPARLLEAXAKPEPEEKSRAKRQKDFDIAEQNESSDEESLRKERARSAEEPWXQNQQKLLELALQQYPRGSSDRWDKIARCVPSKSKEDCIARYKLLVELVQKKKQAKS

SEQ ID NO: 8275 - protein, 109 aa, Homo sapiens
  MOD_RES (2)..(2): Selenocysteine
  MOD_RES (29)..(29): Selenocysteine
  MOD_RES (91)..(91): Selenocysteine
  MOD_RES (104)..(104): Selenocysteine
MXAPCSQPAQLPGRRQLGLVPFPPPPPRXPLLWLLLLLLAAVAPARGWESGDLELFDLVEEVQLNFYQFLGVQQDASSADIRKAYRKLSLXLHPDKNKDENAEXQFRQV

SEQ ID NO: 8276 - protein, 121 aa, Homo sapiens
  MOD_RES (25)..(25): Selenocysteine
  MOD_RES (27)..(27): Selenocysteine
  MOD_RES (31)..(31): Selenocysteine
  MOD_RES (40)..(40): Selenocysteine
  MOD_RES (51)..(51): Selenocysteine
  MOD_RES (61)..(61): Selenocysteine
  MOD_RES (64)..(64): Selenocysteine
  MOD_RES (85)..(85): Selenocysteine
  MOD_RES (96)..(97): Selenocysteine
  MOD_RES (99)..(100): Selenocysteine
  MOD_RES (108)..(108): Selenocysteine
APVKYHGDRSKESLVSFAMQHVRSXVXELWXGNFVNSIQXAFAAGIGWLIXFCSKGGDCLXSQXRLRLSGMLDGLVNVGWMDCAXQDNLCKSLDIXXSXXAYFPPGAXLNNKEKNSILLLH

SEQ ID NO: 8277 - protein, 177 aa, Homo sapiens
  MOD_RES (32)..(32): Selenocysteine
  MOD_RES (45)..(45): Selenocysteine
  MOD_RES (133)..(133): Selenocysteine
  MOD_RES (167)..(167): Selenocysteine
  MOD_RES (175)..(175): Selenocysteine
MGVWLNKDDYIRDLKRIILCFLIVYMAILVGXDQDFYSLLGVSKXASSREIRQAFKKLALKLHPDKNPNNPNAHGDFLKINRAYEVLKDEDLRKKYDKYGEKGLEDNQGGQYESWNYYRYDFGIYDDDPEIIXLERREFDAAVNSGELWFVNFYSPGCSHCHDLAPXWRDFAKEXLR

SEQ ID NO: 8278 - protein, 275 aa, Homo sapiens
  MOD_RES (32)..(32): Selenocysteine
  MOD_RES (45)..(45): Selenocysteine
  MOD_RES (133)..(133): Selenocysteine
  MOD_RES (167)..(167): Selenocysteine
  MOD_RES (236)..(236): Selenocysteine
  MOD_RES (238)..(238): Selenocysteine
  MOD_RES (242)..(242): Selenocysteine
  MOD_RES (251)..(251): Selenocysteine
  MOD_RES (262)..(262): Selenocysteine
MGVWLNKDDYIRDLKRIILCFLIVYMAILVGXDQDFYSLLGVSKXASSREIRQAFKKLALKLHPDKNPNNPNAHGDFLKINRAYEVLKDEDLRKKYDKYGEKGLEDNQGGQYESWNYYRYDFGIYDDDPEIIXLERREFDAAVNSGELWFVNFYSPGCSHCHDLAPXWRDFAKEVDGLLRIGAVNCGDDRMLCRMKGVNSYPSLFIFRSGMAPVKYHGDRSKESLVSFAMQHVRSXVXELWXGNFVNSIQXAFAAGIGWLIXFCSKGGVSQLIGC

SEQ ID NO: 8279 - protein, 332 aa, Homo sapiens
  MOD_RES (32)..(32): Selenocysteine
  MOD_RES (45)..(45): Selenocysteine
  MOD_RES (133)..(133): Selenocysteine
  MOD_RES (167)..(167): Selenocysteine
  MOD_RES (236)..(236): Selenocysteine
  MOD_RES (238)..(238): Selenocysteine
  MOD_RES (242)..(242): Selenocysteine
  MOD_RES (251)..(251): Selenocysteine
  MOD_RES (262)..(262): Selenocysteine
  MOD_RES (272)..(272): Selenocysteine
  MOD_RES (275)..(275): Selenocysteine
  MOD_RES (296)..(296): Selenocysteine
  MOD_RES (307)..(308): Selenocysteine
  MOD_RES (310)..(311): Selenocysteine
  MOD_RES (319)..(319): Selenocysteine
MGVWLNKDDYIRDLKRIILCFLIVYMAILVGXDQDFYSLLGVSKXASSREIRQAFKKLALKLHPDKNPNNPNAHGDFLKINRAYEVLKDEDLRKKYDKYGEKGLEDNQGGQYESWNYYRYDFGIYDDDPEIIXLERREFDAAVNSGELWFVNFYSPGCSHCHDLAPXWRDFAKEVDGLLRIGAVNCGDDRMLCRMKGVNSYPSLFIFRSGMAPVKYHGDRSKESLVSFAMQHVRSXVXELWXGNFVNSIQXAFAAGIGWLIXFCSKGGDCLXSQXRLRLSGMLDGLVNVGWMDCAXQDNLCKSLDIXXSXXAYFPPGAXLNNKEKNSILLLH

SEQ ID NO: 8280 - protein, 747 aa, Homo sapiens
  MOD_RES (32)..(32): Selenocysteine
  MOD_RES (45)..(45): Selenocysteine
  MOD_RES (133)..(133): Selenocysteine
  MOD_RES (167)..(167): Selenocysteine
  MOD_RES (236)..(236): Selenocysteine
  MOD_RES (238)..(238): Selenocysteine
  MOD_RES (242)..(242): Selenocysteine
  MOD_RES (251)..(251): Selenocysteine
  MOD_RES (262)..(262): Selenocysteine
  MOD_RES (272)..(272): Selenocysteine
  MOD_RES (275)..(275): Selenocysteine
  MOD_RES (311)..(311): Selenocysteine
  MOD_RES (343)..(343): Selenocysteine
  MOD_RES (382)..(382): Selenocysteine
  MOD_RES (410)..(411): Selenocysteine
  MOD_RES (459)..(459): Selenocysteine
  MOD_RES (463)..(463): Selenocysteine
  MOD_RES (479)..(480): Selenocysteine
  MOD_RES (516)..(516): Selenocysteine
  MOD_RES (518)..(519): Selenocysteine
  MOD_RES (525)..(525): Selenocysteine
  MOD_RES (558)..(558): Selenocysteine
  MOD_RES (560)..(560): Selenocysteine
  MOD_RES (627)..(627): Selenocysteine
  MOD_RES (630)..(630): Selenocysteine
  MOD_RES (633)..(633): Selenocysteine
  MOD_RES (688)..(688): Selenocysteine
  MOD_RES (699)..(699): Selenocysteine
  MOD_RES (719)..(719): Selenocysteine
  MOD_RES (735)..(735): Selenocysteine
MGVWLNKDDYIRDLKRIILCFLIVYMAILVGXDQDFYSLLGVSKXASSREIRQAFKKLALKLHPDKNPNNPNAHGDFLKINRAYEVLKDEDLRKKYDKYGEKGLEDNQGGQYESWNYYRYDFGIYDDDPEIIXLERREFDAAVNSGELWFVNFYSPGCSHCHDLAPXWRDFAKEVDGLLRIGAVNCGDDRMLCRMKGVNSYPSLFIFRSGMAPVKYHGDRSKESLVSFAMQHVRSXVXELWXGNFVNSIQXAFAAGIGWLIXFCSKGGDCLXSQXRLRLSGMLFLNSLDAKEIYLEVIHNLPDFELLSANXLEDRLAHHRWLLFFHFGKNENSNDPELKKLKXLLKNDHIQVGRFDCSSAPDICSNLYVFQPSLAVFKGQGXKEYEIHHGKKILYDILAFAKESVNSHVXXLGPQNFPANDKEPWLVDFFAPWCPPCRALLPELRRASNLLYGQLKFGXLDCXVHEGLCNMYNIQAYPXXVVFNQSNIHEYEGHHSAEQILEFIEDLMNPSVVSLXPXXFNELVXQRKHNEVWMVDFYSPWCHPCQVLMPEWKRMARXLXGLINVGSIDCQQYHSFCAQENVQRYPEIRFFPPKSNKAYHYHSYNGWNRDAYSLRIWGLGFLPQVSXDLXPQXFSEKVLQGKNHWVIDFYAPWCGPCQNFAPEFELLARMIKGKVKAGKVDCQAYAQXCQKAGIRAYPXVKFYFYERAKRNFQEEQINXRDAKAIAALISEKLEXLRNQGKRNKDEL

SEQ ID NO: 8281 - protein, 793 aa, Homo sapiens
  MOD_RES (32)..(32): Selenocysteine
  MOD_RES (45)..(45): Selenocysteine
  MOD_RES (133)..(133): Selenocysteine
  MOD_RES (167)..(167): Selenocysteine
  MOD_RES (236)..(236): Selenocysteine
  MOD_RES (238)..(238): Selenocysteine
  MOD_RES (242)..(242): Selenocysteine
  MOD_RES (251)..(251): Selenocysteine
  MOD_RES (262)..(262): Selenocysteine
  MOD_RES (272)..(272): Selenocysteine
  MOD_RES (275)..(275): Selenocysteine
  MOD_RES (296)..(296): Selenocysteine
  MOD_RES (307)..(308): Selenocysteine
  MOD_RES (310)..(311): Selenocysteine
  MOD_RES (319)..(319): Selenocysteine
  MOD_RES (357)..(357): Selenocysteine
  MOD_RES (389)..(389): Selenocysteine
  MOD_RES (428)..(428): Selenocysteine
  MOD_RES (456)..(457): Selenocysteine
  MOD_RES (505)..(505): Selenocysteine
  MOD_RES (509)..(509): Selenocysteine
  MOD_RES (525)..(526): Selenocysteine
  MOD_RES (562)..(562): Selenocysteine
  MOD_RES (564)..(565): Selenocysteine
  MOD_RES (571)..(571): Selenocysteine
  MOD_RES (604)..(604): Selenocysteine
  MOD_RES (606)..(606): Selenocysteine
  MOD_RES (673)..(673): Selenocysteine
  MOD_RES (676)..(676): Selenocysteine
  MOD_RES (679)..(679): Selenocysteine
  MOD_RES (734)..(734): Selenocysteine
  MOD_RES (745)..(745): Selenocysteine
  MOD_RES (765)..(765): Selenocysteine
  MOD_RES (781)..(781): Selenocysteine
MGVWLNKDDYIRDLKRIILCFLIVYMAILVGXDQDFYSLLGVSKXASSREIRQAFKKLALKLHPDKNPNNPNAHGDFLKINRAYEVLKDEDLRKKYDKYGEKGLEDNQGGQYESWNYYRYDFGIYDDDPEIIXLERREFDAAVNSGELWFVNFYSPGCSHCHDLAPXWRDFAKEVDGLLRIGAVNCGDDRMLCRMKGVNSYPSLFIFRSGMAPVKYHGDRSKESLVSFAMQHVRSXVXELWXGNFVNSIQXAFAAGIGWLIXFCSKGGDCLXSQXRLRLSGMLDGLVNVGWMDCAXQDNLCKSLDIXXSXXAYFPPGAXLNNKEKNSILFLNSLDAKEIYLEVIHNLPDFELLSANXLEDRLAHHRWLLFFHFGKNENSNDPELKKLKXLLKNDHIQVGRFDCSSAPDICSNLYVFQPSLAVFKGQGXKEYEIHHGKKILYDILAFAKESVNSHVXXLGPQNFPANDKEPWLVDFFAPWCPPCRALLPELRRASNLLYGQLKFGXLDCXVHEGLCNMYNIQAYPXXVVFNQSNIHEYEGHHSAEQILEFIEDLMNPSVVSLXPXXFNELVXQRKHNEVWMVDFYSPWCHPCQVLMPEWKRMARXLXGLINVGSIDCQQYHSFCAQENVQRYPEIRFFPPKSNKAYHYHSYNGWNRDAYSLRIWGLGFLPQVSXDLXPQXFSEKVLQGKNHWVIDFYAPWCGPCQNFAPEFELLARMIKGKVKAGKVDCQAYAQXCQKAGIRAYPXVKFYFYERAKRNFQEEQINXRDAKAIAALISEKLEXLRNQGKRNKDEL

SEQ ID NO: 8282 - protein, 188 aa, Homo sapiens
  MOD_RES (4)..(4): Selenocysteine
  MOD_RES (29)..(29): Selenocysteine
  MOD_RES (65)..(65): Selenocysteine
  MOD_RES (68)..(68): Selenocysteine
  MOD_RES (89)..(89): Selenocysteine
  MOD_RES (109)..(109): Selenocysteine
  MOD_RES (180)..(180): Selenocysteine
MLKXLDPKDWKNQDHYAVLGLGHVRYKAXQRQIKAAHKAMVLKHHPDKRKAAGEPIKEGDNDYFXCIXKAYEMLSDPVKRRAFNSVDPXFDNSVPSKSEAKDNFFEVFXPVFERNSRWSNKKNVPKLGDMNSSFEDVDIFYSFWYNFDSWREFSYLDEEEKEKAECRDERRWIEKQNRAXRAQRKKEE

SEQ ID NO: 8283 - protein, 568 aa, Homo sapiens
  MOD_RES (13)..(13): Selenocysteine
  MOD_RES (16)..(16): Selenocysteine
  MOD_RES (20)..(20): Selenocysteine
  MOD_RES (24)..(24): Selenocysteine
  MOD_RES (78)..(78): Selenocysteine
  MOD_RES (103)..(103): Selenocysteine
  MOD_RES (139)..(139): Selenocysteine
  MOD_RES (142)..(142): Selenocysteine
  MOD_RES (163)..(163): Selenocysteine
  MOD_RES (183)..(183): Selenocysteine
  MOD_RES (254)..(254): Selenocysteine
  MOD_RES (268)..(268): Selenocysteine
  MOD_RES (387)..(387): Selenocysteine
  MOD_RES (391)..(391): Selenocysteine
  MOD_RES (420)..(420): Selenocysteine
  MOD_RES (442)..(442): Selenocysteine
  MOD_RES (486)..(486): Selenocysteine
  MOD_RES (496)..(496): Selenocysteine
  MOD_RES (499)..(499): Selenocysteine
  MOD_RES (502)..(503): Selenocysteine
  MOD_RES (515)..(515): Selenocysteine
  MOD_RES (520)..(520): Selenocysteine
  MOD_RES (535)..(535): Selenocysteine
MLLLPSAADGRGXAIXHALXSASXLCQVEPVGRWFEAFVKRRNRNASASFQELEDKKELSEESEDEELQLEEFPMLKXLDPKDWKNQDHYAVLGLGHVRYKAXQRQIKAAHKAMVLKHHPDKRKAAGEPIKEGDNDYFXCIXKAYEMLSDPVKRRAFNSVDPXFDNSVPSKSEAKDNFFEVFXPVFERNSRWSNKKNVPKLGDMNSSFEDVDIFYSFWYNFDSWREFSYLDEEEKEKAECRDERRWIEKQNRAXRAQRKKEEMNRIRXLVDNAYSCDPRIKKFKEEEKAKKEAEKKAKAEAKRKEQEAKEKQRQAELEAARLAKEKEEEEVRQQALLAKKEKDIQKKAIKKERQKLRNSCKIEEINEQIRKEKEEAEARMRQASKNXEKSXGGGGNGSKNWSEDDLQLLIKAVNLFPAGXNSRWEVIANYMNIHSSSGVKRXAKDVIGKAKSLQKLDPHQKDDINKKAFDKFKKEHGVVPQADNAXPSERFEGPYXDFXPWXXEEQKLLEQALKXYPVNXPERWEKIAEAVPGRXKKDCMKRYKELVEMVKAKKAAQEQVLNASRAKK

SEQ ID NO: 8284 - protein, 621 aa, Homo sapiens
  MOD_RES (13)..(13): Selenocysteine
  MOD_RES (16)..(16): Selenocysteine
  MOD_RES (20)..(20): Selenocysteine
  MOD_RES (24)..(24): Selenocysteine
  MOD_RES (78)..(78): Selenocysteine
  MOD_RES (103)..(103): Selenocysteine
  MOD_RES (139)..(139): Selenocysteine
  MOD_RES (142)..(142): Selenocysteine
  MOD_RES (163)..(163): Selenocysteine
  MOD_RES (183)..(183): Selenocysteine
  MOD_RES (254)..(254): Selenocysteine
  MOD_RES (268)..(268): Selenocysteine
  MOD_RES (362)..(362): Selenocysteine
  MOD_RES (398)..(398): Selenocysteine
  MOD_RES (400)..(400): Selenocysteine
  MOD_RES (403)..(403): Selenocysteine
  MOD_RES (440)..(440): Selenocysteine
  MOD_RES (444)..(444): Selenocysteine
  MOD_RES (473)..(473): Selenocysteine
  MOD_RES (495)..(495): Selenocysteine
  MOD_RES (539)..(539): Selenocysteine
  MOD_RES (549)..(549): Selenocysteine
  MOD_RES (552)..(552): Selenocysteine
  MOD_RES (555)..(556): Selenocysteine
  MOD_RES (568)..(568): Selenocysteine
  MOD_RES (573)..(573): Selenocysteine
  MOD_RES (588)..(588): Selenocysteine
MLLLPSAADGRGXAIXHALXSASXLCQVEPVGRWFEAFVKRRNRNASASFQELEDKKELSEESEDEELQLEEFPMLKXLDPKDWKNQDHYAVLGLGHVRYKAXQRQIKAAHKAMVLKHHPDKRKAAGEPIKEGDNDYFXCIXKAYEMLSDPVKRRAFNSVDPXFDNSVPSKSEAKDNFFEVFXPVFERNSRWSNKKNVPKLGDMNSSFEDVDIFYSFWYNFDSWREFSYLDEEEKEKAECRDERRWIEKQNRAXRAQRKKEEMNRIRXLVDNAYSCDPRIKKFKEEEKAKKEAEKKAKAEAKRKEQEAKEKQRQAELEAARLAKEKEEEEVRQQALLAKKEKDIQKKAIKKERQKLRNSCKXWNHFSDNEAERVKMMEEVEKLCDRLELASLQCLNEXLXSCXKEVGKAALEKQIEEINEQIRKEKEEAEARMRQASKNXEKSXGGGGNGSKNWSEDDLQLLIKAVNLFPAGXNSRWEVIANYMNIHSSSGVKRXAKDVIGKAKSLQKLDPHQKDDINKKAFDKFKKEHGVVPQADNAXPSERFEGPYXDFXPWXXEEQKLLEQALKXYPVNXPERWEKIAEAVPGRXKKDCMKRYKELVEMVKAKKAAQEQVLNASRAKK

SEQ ID NO: 8285 - protein, 167 aa, Homo sapiens
  MOD_RES (13)..(13): Selenocysteine
  MOD_RES (16)..(16): Selenocysteine
  MOD_RES (20)..(20): Selenocysteine
  MOD_RES (24)..(24): Selenocysteine
  MOD_RES (78)..(78): Selenocysteine
  MOD_RES (103)..(103): Selenocysteine
  MOD_RES (139)..(139): Selenocysteine
  MOD_RES (142)..(142): Selenocysteine
MLLLPSAADGRGXAIXHALXSASXLCQVEPVGRWFEAFVKRRNRNASASFQELEDKKELSEESEDEELQLEEFPMLKXLDPKDWKNQDHYAVLGLGHVRYKAXQRQIKAAHKAMVLKHHPDKRKAAGEPIKEGDNDYFXCIXKGSPGDSYQKLILQLIHLMKCYLIQ

SEQ ID NO: 8286 - protein, 118 aa, Homo sapiens
  MOD_RES (13)..(13): Selenocysteine
  MOD_RES (16)..(16): Selenocysteine
  MOD_RES (20)..(20): Selenocysteine
  MOD_RES (24)..(24): Selenocysteine
  MOD_RES (78)..(78): Selenocysteine
  MOD_RES (103)..(103): Selenocysteine
MLLLPSAADGRGXAIXHALXSASXLCQVEPVGRWFEAFVKRRNRNASASFQELEDKKELSEESEDEELQLEEFPMLKXLDPKDWKNQDHYAVLGLGHVRYKAXQRQIKAARKYLVILK

SEQ ID NO: 8287 - protein, 243 aa, Homo sapiens
  MOD_RES (1)..(1): Any amino acid
  MOD_RES (2)..(2): Selenocysteine
  MOD_RES (5)..(5): Selenocysteine
  MOD_RES (9)..(9): Selenocysteine
  MOD_RES (13)..(13): Selenocysteine
  MOD_RES (67)..(67): Selenocysteine
  MOD_RES (92)..(92): Selenocysteine
  MOD_RES (128)..(128): Selenocysteine
  MOD_RES (131)..(131): Selenocysteine
  MOD_RES (152)..(152): Selenocysteine
  MOD_RES (172)..(172): Selenocysteine
  MOD_RES (216)..(216): Selenocysteine
  MOD_RES (230)..(230): Selenocysteine
XXAIXHALXSASXLCQVEPVGRWFEAFVKRRNRNASASFQELEDKKELSEESEDEELQLEEFPMLKXLDPKDWKNQDHYAVLGLGHVRYKAXQRQIKAAHKAMVLKHHPDKRKAAGEPIKEGDNDYFXCIXKAYEMLSDPVKRRAFNSVDPXFDNSVPSKSEAKDNFFEVFXPVFERNSRYNFDSWREFSYLDEEEKEKAECRDERRWIEKQNRAXRAQRKKEEMNRIRXLVDNAYSCDPRIK

SEQ ID NO: 8288 - protein, 531 aa, Homo sapiens
  MOD_RES (93)..(93): Selenocysteine
  MOD_RES (95)..(95): Selenocysteine
  MOD_RES (109)..(109): Selenocysteine
  MOD_RES (136)..(136): Selenocysteine
  MOD_RES (146)..(146): Selenocysteine
  MOD_RES (160)..(160): Selenocysteine
  MOD_RES (172)..(172): Selenocysteine
  MOD_RES (260)..(260): Selenocysteine
  MOD_RES (325)..(325): Selenocysteine
  MOD_RES (417)..(417): Selenocysteine
  MOD_RES (438)..(438): Selenocysteine
  MOD_RES (462)..(462): Selenocysteine
  MOD_RES (477)..(477): Selenocysteine
  MOD_RES (485)..(486): Selenocysteine
  MOD_RES (504)..(504): Selenocysteine
  MOD_RES (519)..(519): Selenocysteine
MKCHYEALGVRRDASEEELKKAYRKLALKWHPDKNLDNAAEAAEQFKLIQAAYDVLSDPQERAWYDNHREALLKGGFDGEYQDDSLDLLRYFXVXCYSGYGDDEKGFYXVYRNVFEMIAKEELESVLEEEVDDFPXFGDSQSDYDXVVHPFYAYWQSFCXQKNFAWKEEYDXRQASNRWEKRAMEKENKKIRDKARKEKNELVRQLVAFIRKRDKRVQAHRKLVEEQNAEKARKAEEMRRQQKLKQAKLVEQYREQSWMXMANLEKELQEMEARYEKEFGDGSDENEMEEHELKDEEDGKDSDEAEDAELYDDLYCPACDKSFKXEKAMKNHEKSKKHREMVALLKQQLEEEEENFSRPQIDENPLDDNSEEEMEDAPKQKLSKKQKKKKQKPAQNYDDNFNVNGPGEGVKVDPEDXNLNQDSAKELEDSPQENVSVXEIIKPCDDPKSEAKSVPKPKGKKXKDMKKPVRVPAEPQXMSVLISCXXCHSEFPSRNKLFDHLKAXGHARAPSSSSLNSAXSSQSKKEKRKNR

SEQ ID NO: 8289 - protein, 576 aa, Homo sapiens
  MOD_RES (93)..(93): Selenocysteine
  MOD_RES (95)..(95): Selenocysteine
  MOD_RES (109)..(109): Selenocysteine
  MOD_RES (136)..(136): Selenocysteine
  MOD_RES (146)..(146): Selenocysteine
  MOD_RES (160)..(160): Selenocysteine
  MOD_RES (172)..(172): Selenocysteine
  MOD_RES (260)..(260): Selenocysteine
  MOD_RES (325)..(325): Selenocysteine
  MOD_RES (462)..(462): Selenocysteine
  MOD_RES (483)..(483): Selenocysteine
  MOD_RES (507)..(507): Selenocysteine
  MOD_RES (522)..(522): Selenocysteine
  MOD_RES (530)..(531): Selenocysteine
  MOD_RES (549)..(549): Selenocysteine
  MOD_RES (564)..(564): Selenocysteine
MKCHYEALGVRRDASEEELKKAYRKLALKWHPDKNLDNAAEAAEQFKLIQAAYDVLSDPQERAWYDNHREALLKGGFDGEYQDDSLDLLRYFXVXCYSGYGDDEKGFYXVYRNVFEMIAKEELESVLEEEVDDFPXFGDSQSDYDXVVHPFYAYWQSFCXQKNFAWKEEYDXRQASNRWEKRAMEKENKKIRDKARKEKNELVRQLVAFIRKRDKRVQAHRKLVEEQNAEKARKAEEMRRQQKLKQAKLVEQYREQSWMXMANLEKELQEMEARYEKEFGDGSDENEMEEHELKDEEDGKDSDEAEDAELYDDLYCPACDKSFKXEKAMKNHEKSKKHREMVALLKQQLEEEEENFSRPQIDENPLDDNSEEEMEDAPKQKLSKKQKKKKQKPAQDVPGKDSYLPAAHFQMAWGKKCVLGERRDGESEHKCAKMLLENRQNYDDNFNVNGPGEGVKVDPEDXNLNQDSAKELEDSPQENVSVXEIIKPCDDPKSEAKSVPKPKGKKXKDMKKPVRVPAEPQXMSVLISCXXCHSEFPSRNKLFDHLKAXGHARAPSSSSLNSAXSSQSKKEKRKNR

SEQ ID NO: 8290 - protein, 153 aa, Homo sapiens
  MOD_RES (47)..(47): Selenocysteine
  MOD_RES (93)..(93): Selenocysteine
  MOD_RES (106)..(106): Selenocysteine
  MOD_RES (110)..(110): Selenocysteine
MGAPLLSPGWGAGAAGRRWWMLLAPLLPALLLVRPAGALVEGLYCGXRDCYEVLGVSRSAGKAEIARAYRQLARRYHPDRYRPQPGDEGPGRXPQSAEEAFLLVAXAYEXLKVSQAAAELQQYCMQNACKDALLVGVPAGSNPFREPRSCALL

SEQ ID NO: 8291 - protein, 90 aa, Homo sapiens
  MOD_RES (48)..(48): Selenocysteine
  MOD_RES (56)..(56): Selenocysteine
MEANMPKRKEPGRSLRIKVISMGNAEVGKSCIIKRYCEKRFVSKYLAXIGIDYGVXKVHVRDREIKVNIFDMAGHPFFYEMRKLRRREVK

SEQ ID NO: 8292 - protein, 177 aa, Homo sapiens
  MOD_RES (48)..(48): Selenocysteine
  MOD_RES (56)..(56): Selenocysteine
  MOD_RES (89)..(89): Selenocysteine
  MOD_RES (139)..(139): Selenocysteine
  MOD_RES (163)..(163): Selenocysteine
  MOD_RES (167)..(167): Selenocysteine
MEANMPKRKEPGRSLRIKVISMGNAEVGKSCIIKRYCEKRFVSKYLAXIGIDYGVXKVHVRDREIKVNIFDMAGHPFFYEVRNEFYKDXQGVILVYDVGQKDSFDALDAWLAEMKQELGPHGNMENIIFVVCANKIDCXKHRCVDESEGRLWAESKGFLYFEXSAQXGEGINEMFQG

SEQ ID NO: 8293 - protein, 273 aa, Homo sapiens
  MOD_RES (48)..(48): Selenocysteine
  MOD_RES (56)..(56): Selenocysteine
  MOD_RES (89)..(89): Selenocysteine
  MOD_RES (139)..(139): Selenocysteine
  MOD_RES (163)..(163): Selenocysteine
  MOD_RES (167)..(167): Selenocysteine
  MOD_RES (177)..(177): Selenocysteine
  MOD_RES (194)..(195): Selenocysteine
  MOD_RES (202)..(202): Selenocysteine
  MOD_RES (266)..(266): Selenocysteine
MEANMPKRKEPGRSLRIKVISMGNAEVGKSCIIKRYCEKRFVSKYLAXIGIDYGVXKVHVRDREIKVNIFDMAGHPFFYEVRNEFYKDXQGVILVYDVGQKDSFDALDAWLAEMKQELGPHGNMENIIFVVCANKIDCXKHRCVDESEGRLWAESKGFLYFEXSAQXGEGINEMFQXFYISIVDLCENGGKRPXXNSSASFXKEQADAIRRIRNSKDSWDMLGVKPGASRDEVNKAYRKLAVLLHPDKCVAPGSEDAFKAVVNARXALLKNIK

SEQ ID NO: 8294 - protein, 737 aa, Homo sapiens
  MOD_RES (60)..(60): Selenocysteine
  MOD_RES (81)..(81): Selenocysteine
  MOD_RES (142)..(142): Selenocysteine
  MOD_RES (145)..(145): Selenocysteine
  MOD_RES (159)..(159): Selenocysteine
  MOD_RES (172)..(172): Selenocysteine
  MOD_RES (174)..(174): Selenocysteine
  MOD_RES (177)..(177): Selenocysteine
  MOD_RES (182)..(182): Selenocysteine
  MOD_RES (224)..(224): Selenocysteine
  MOD_RES (233)..(233): Selenocysteine
  MOD_RES (243)..(243): Selenocysteine
  MOD_RES (245)..(245): Selenocysteine
  MOD_RES (259)..(259): Selenocysteine
  MOD_RES (290)..(290): Selenocysteine
  MOD_RES (299)..(299): Selenocysteine
  MOD_RES (306)..(306): Selenocysteine
  MOD_RES (326)..(327): Selenocysteine
  MOD_RES (333)..(333): Selenocysteine
  MOD_RES (337)..(337): Selenocysteine
  MOD_RES (345)..(345): Selenocysteine
  MOD_RES (377)..(377): Selenocysteine
  MOD_RES (385)..(385): Selenocysteine
  MOD_RES (406)..(406): Selenocysteine
  MOD_RES (415)..(415): Selenocysteine
  MOD_RES (444)..(444): Selenocysteine
  MOD_RES (453)..(453): Selenocysteine
  MOD_RES (461)..(461): Selenocysteine
  MOD_RES (464)..(464): Selenocysteine
  MOD_RES (481)..(481): Selenocysteine
  MOD_RES (487)..(487): Selenocysteine
  MOD_RES (519)..(519): Selenocysteine
  MOD_RES (538)..(538): Selenocysteine
  MOD_RES (557)..(557): Selenocysteine
  MOD_RES (566)..(566): Selenocysteine
  MOD_RES (574)..(574): Selenocysteine
  MOD_RES (632)..(632): Selenocysteine
  MOD_RES (730)..(730): Selenocysteine
  MOD_RES (734)..(734): Selenocysteine
MQPRRAQAPGAQLLPALALLLLLLGAGPRGSSLANPVPAAPLSAPGPCAAQPCRNGGVCXSRPEPDPQHPAPAGEPGYSCXCPAGISGANCQLVADPCASNPCHHGNCSSSSSSSSDGYLCICNEGYEGPNCEQALPSLPAXGWXESMAPRQLQPVPAXQEPDKILPRSQAXVXLPXWQPKXGQKVVEMKWDQVEVIPDIACGNASSNSSAGGRLVSFEVPQNXSVKIRQDAXASLILLWKVXAXGFQQCSLIDGRSVXPLQASGGLVLLEEMLALGNNHFIGFVNDSVXKSIVALRLXLVVKVSXCVPGESHANDLECSGKGKCXXKPSEAXFSCXCEEQYVGXFCEEYDACQRKPCQNNASCIDANEKQDGSNFXCVCLPGYXGELCQSKIDYCILDPCRNGAXCISSLSGFXCQCPEGYFGSACEEKVDPCASSPCQNNGXCYVDGVHFXCNCSPGFXGPXCAQLIDFCALSPCAHGXCRSVGXSYKCLCDPGYHGLYCEEEYNECLSAPCLNAAXCRDLVNGYECVCLAEYKGXHCELYKDPCANVSCLNGAXCDSDGLNGXCICAPGFXGEECDIDINECDSNPCHHGGSCLDQPNGYNCHCPHGWVGANCEIHLQWKSGHMAESLXNMPRHSLYIIIGALCVAFILMLIILIVGICRISRIEYQGSSRPAYEEFYNCRSIDSEFSNAIASIRHARFGKKSRPAMYDVSPIAYEDYSPDDKPLVXLIKXKDL

SEQ ID NO: 8295 - protein, 320 aa, Homo sapiens
  MOD_RES (65)..(65): Selenocysteine
  MOD_RES (77)..(78): Selenocysteine
  MOD_RES (92)..(92): Selenocysteine
  MOD_RES (105)..(105): Selenocysteine
  MOD_RES (109)..(109): Selenocysteine
  MOD_RES (111)..(111): Selenocysteine
  MOD_RES (133)..(133): Selenocysteine
  MOD_RES (141)..(141): Selenocysteine
  MOD_RES (165)..(165): Selenocysteine
  MOD_RES (200)..(200): Selenocysteine
  MOD_RES (205)..(205): Selenocysteine
  MOD_RES (214)..(214): Selenocysteine
  MOD_RES (249)..(249): Selenocysteine
  MOD_RES (274)..(274): Selenocysteine
  MOD_RES (302)..(302): Selenocysteine
  MOD_RES (304)..(304): Selenocysteine
MGNRGMEDLIPLVNRLQDAFSAIGQNADLDLPQIAVVGGQSAGKSSVLENFVGRDFLPRGSGIVXRRPLVLQLVNAXXEYAEFLHCKGKKFXDFEEVRLEIEAEXDRVXGXNKGISPVPINLRVYSPHVLNLXLVDLPGMXKVPVGDQPPDIEFQIRDMLMQFVXKENCLILAVSPANSDLANSDALKVAKEVDPQGQRXIGVIXKLDLMDEGXDARDVLENKLLPLRRGYIGVVNRSQKDIDGKKDIXAALAAERKFFLSHPSYRHLADRMGXPYLQKVLNQMEFCSCHPGWSAMVRSQLXAXSASWIQGILLPQPPSN

SEQ ID NO: 8296 - protein, 835 aa, Homo sapiens
  MOD_RES (65)..(65): Selenocysteine
  MOD_RES (77)..(78): Selenocysteine
  MOD_RES (92)..(92): Selenocysteine
  MOD_RES (105)..(105): Selenocysteine
  MOD_RES (109)..(109): Selenocysteine
  MOD_RES (111)..(111): Selenocysteine
  MOD_RES (133)..(133): Selenocysteine
  MOD_RES (141)..(141): Selenocysteine
  MOD_RES (165)..(165): Selenocysteine
  MOD_RES (200)..(200): Selenocysteine
  MOD_RES (205)..(205): Selenocysteine
  MOD_RES (214)..(214): Selenocysteine
  MOD_RES (249)..(249): Selenocysteine
  MOD_RES (274)..(274): Selenocysteine
  MOD_RES (286)..(286): Selenocysteine
  MOD_RES (292)..(292): Selenocysteine
  MOD_RES (326)..(326): Selenocysteine
  MOD_RES (353)..(353): Selenocysteine
  MOD_RES (400)..(400): Selenocysteine
  MOD_RES (404)..(404): Selenocysteine
  MOD_RES (412)..(412): Selenocysteine
  MOD_RES (432)..(433): Selenocysteine
  MOD_RES (442)..(442): Selenocysteine
  MOD_RES (459)..(459): Selenocysteine
  MOD_RES (482)..(482): Selenocysteine
  MOD_RES (498)..(498): Selenocysteine
  MOD_RES (517)..(517): Selenocysteine
  MOD_RES (562)..(562): Selenocysteine
  MOD_RES (580)..(580): Selenocysteine
  MOD_RES (610)..(610): Selenocysteine
  MOD_RES (632)..(632): Selenocysteine
  MOD_RES (647)..(647): Selenocysteine
  MOD_RES (655)..(655): Selenocysteine
  MOD_RES (664)..(664): Selenocysteine
  MOD_RES (684)..(684): Selenocysteine
  MOD_RES (718)..(720): Selenocysteine
  MOD_RES (723)..(723): Selenocysteine
  MOD_RES (747)..(747): Selenocysteine
  MOD_RES (751)..(751): Selenocysteine
MGNRGMEDLIPLVNRLQDAFSAIGQNADLDLPQIAVVGGQSAGKSSVLENFVGRDFLPRGSGIVXRRPLVLQLVNAXXEYAEFLHCKGKKFXDFEEVRLEIEAEXDRVXGXNKGISPVPINLRVYSPHVLNLXLVDLPGMXKVPVGDQPPDIEFQIRDMLMQFVXKENCLILAVSPANSDLANSDALKVAKEVDPQGQRXIGVIXKLDLMDEGXDARDVLENKLLPLRRGYIGVVNRSQKDIDGKKDIXAALAAERKFFLSHPSYRHLADRMGXPYLQKVLNQQLXNHIRDXLPGLRNKLQSQLLSIEKEVEEYKNFRPDDPARKXKALLQMVQQFAVDFEKRIEGSGDQIDXYELSGGARINRIFHERFPFELVKMEFDEKELRREISYAIKNIHGIRXGLFXPDLAFEAXVKKQLQQYPRLREEMERIVXXHIREREGRXKEQVMLLIDIELAYMNXNHEDFIGFANAQQRSNQMNKKKXSGNQDEILVIRKGWLXINNIGIMKGGSKEYWFVLXAENLSWYKDDEEKEKKYMLSVDNLKLRDVEKGFMSSKHIFALFNXEQRNVYKDYRQLELACEXQEEVDSWKASFLRAGVYPERVGDKEKASEXEENGSDSFMHSMDPQLERQVEXIRNLVDSYMAIVNKXVRDLMPKXIMHLMINNXKEFIFSELLANLYSCGDQNXLMEESAEQAQRRDEMLRMYHALKEALSIIGDINXXXVSXPMPPPVDDSWLQVQSVPAGRRSPXSSPXPQRRAPAVPPARPGSRGPAPGPPPAGSALGGAPPVPSRPGASPDPFGPPPQVPSRPNRAPPGVPSRSGQASPSRPESPRPPFDL

SEQ ID NO: 8297 - protein, 851 aa, Homo sapiens
  MOD_RES (65)..(65): Selenocysteine
  MOD_RES (77)..(78): Selenocysteine
  MOD_RES (92)..(92): Selenocysteine
  MOD_RES (105)..(105): Selenocysteine
  MOD_RES (109)..(109): Selenocysteine
  MOD_RES (111)..(111): Selenocysteine
  MOD_RES (133)..(133): Selenocysteine
  MOD_RES (141)..(141): Selenocysteine
  MOD_RES (165)..(165): Selenocysteine
  MOD_RES (200)..(200): Selenocysteine
  MOD_RES (205)..(205): Selenocysteine
  MOD_RES (214)..(214): Selenocysteine
  MOD_RES (249)..(249): Selenocysteine
  MOD_RES (274)..(274): Selenocysteine
  MOD_RES (286)..(286): Selenocysteine
  MOD_RES (292)..(292): Selenocysteine
  MOD_RES (326)..(326): Selenocysteine
  MOD_RES (353)..(353): Selenocysteine
  MOD_RES (400)..(400): Selenocysteine
  MOD_RES (404)..(404): Selenocysteine
  MOD_RES (411)..(411): Selenocysteine
  MOD_RES (438)..(438): Selenocysteine
  MOD_RES (443)..(443): Selenocysteine
  MOD_RES (461)..(462): Selenocysteine
  MOD_RES (471)..(471): Selenocysteine
  MOD_RES (488)..(488): Selenocysteine
  MOD_RES (511)..(511): Selenocysteine
  MOD_RES (527)..(527): Selenocysteine
  MOD_RES (546)..(546): Selenocysteine
  MOD_RES (591)..(591): Selenocysteine
  MOD_RES (609)..(609): Selenocysteine
  MOD_RES (639)..(639): Selenocysteine
  MOD_RES (661)..(661): Selenocysteine
  MOD_RES (676)..(676): Selenocysteine
  MOD_RES (684)..(684): Selenocysteine
  MOD_RES (693)..(693): Selenocysteine
  MOD_RES (713)..(713): Selenocysteine
  MOD_RES (747)..(749): Selenocysteine
  MOD_RES (752)..(752): Selenocysteine
  MOD_RES (776)..(776): Selenocysteine
  MOD_RES (780)..(780): Selenocysteine
  MOD_RES (847)..(847): Selenocysteine
MGNRGMEDLIPLVNRLQDAFSAIGQNADLDLPQIAVVGGQSAGKSSVLENFVGRDFLPRGSGIVXRRPLVLQLVNAXXEYAEFLHCKGKKFXDFEEVRLEIEAEXDRVXGXNKGISPVPINLRVYSPHVLNLXLVDLPGMXKVPVGDQPPDIEFQIRDMLMQFVXKENCLILAVSPANSDLANSDALKVAKEVDPQGQRXIGVIXKLDLMDEGXDARDVLENKLLPLRRGYIGVVNRSQKDIDGKKDIXAALAAERKFFLSHPSYRHLADRMGXPYLQKVLNQQLXNHIRDXLPGLRNKLQSQLLSIEKEVEEYKNFRPDDPARKXKALLQMVQQFAVDFEKRIEGSGDQIDXYELSGGARINRIFHERFPFELVKMEFDEKELRREISYAIKNIHGIRXGLFXPDMAFEXIVKKQVKKIREPCLKCVDMVISELISXVRQCXKKLQQYPRLREEMERIVXXHIREREGRXKEQVMLLIDIELAYMNXNHEDFIGFANAQQRSNQMNKKKXSGNQDEILVIRKGWLXINNIGIMKGGSKEYWFVLXAENLSWYKDDEEKEKKYMLSVDNLKLRDVEKGFMSSKHIFALFNXEQRNVYKDYRQLELACEXQEEVDSWKASFLRAGVYPERVGDKEKASEXEENGSDSFMHSMDPQLERQVEXIRNLVDSYMAIVNKXVRDLMPKXIMHLMINNXKEFIFSELLANLYSCGDQNXLMEESAEQAQRRDEMLRMYHALKEALSIIGDINXXXVSXPMPPPVDDSWLQVQSVPAGRRSPXSSPXPQRRAPAVPPARPGSRGPAPGPPPAGSALGGAPPVPSRPGASPDPFGPPPQVPSRPNRAPPGVPRIXISDP

SEQ ID NO: 8298 - protein, 851 aa, Homo sapiens
  MOD_RES (65)..(65): Selenocysteine
  MOD_RES (77)..(78): Selenocysteine
  MOD_RES (92)..(92): Selenocysteine
  MOD_RES (105)..(105): Selenocysteine
  MOD_RES (109)..(109): Selenocysteine
  MOD_RES (111)..(111): Selenocysteine
  MOD_RES (133)..(133): Selenocysteine
  MOD_RES (141)..(141): Selenocysteine
  MOD_RES (165)..(165): Selenocysteine
  MOD_RES (200)..(200): Selenocysteine
  MOD_RES (205)..(205): Selenocysteine
  MOD_RES (214)..(214): Selenocysteine
  MOD_RES (249)..(249): Selenocysteine
  MOD_RES (274)..(274): Selenocysteine
  MOD_RES (286)..(286): Selenocysteine
  MOD_RES (292)..(292): Selenocysteine
  MOD_RES (326)..(326): Selenocysteine
  MOD_RES (353)..(353): Selenocysteine
  MOD_RES (400)..(400): Selenocysteine
  MOD_RES (404)..(404): Selenocysteine
  MOD_RES (412)..(412): Selenocysteine
  MOD_RES (436)..(436): Selenocysteine
  MOD_RES (438)..(438): Selenocysteine
  MOD_RES (461)..(462): Selenocysteine
  MOD_RES (471)..(471): Selenocysteine
  MOD_RES (488)..(488): Selenocysteine
  MOD_RES (511)..(511): Selenocysteine
  MOD_RES (527)..(527): Selenocysteine
  MOD_RES (546)..(546): Selenocysteine
  MOD_RES (591)..(591): Selenocysteine
  MOD_RES (609)..(609): Selenocysteine
  MOD_RES (639)..(639): Selenocysteine
  MOD_RES (661)..(661): Selenocysteine
  MOD_RES (676)..(676): Selenocysteine
  MOD_RES (684)..(684): Selenocysteine
  MOD_RES (693)..(693): Selenocysteine
  MOD_RES (713)..(713): Selenocysteine
  MOD_RES (747)..(749): Selenocysteine
  MOD_RES (752)..(752): Selenocysteine
  MOD_RES (776)..(776): Selenocysteine
  MOD_RES (780)..(780): Selenocysteine
  MOD_RES (847)..(847): Selenocysteine
MGNRGMEDLIPLVNRLQDAFSAIGQNADLDLPQIAVVGGQSAGKSSVLENFVGRDFLPRGSGIVXRRPLVLQLVNAXXEYAEFLHCKGKKFXDFEEVRLEIEAEXDRVXGXNKGISPVPINLRVYSPHVLNLXLVDLPGMXKVPVGDQPPDIEFQIRDMLMQFVXKENCLILAVSPANSDLANSDALKVAKEVDPQGQRXIGVIXKLDLMDEGXDARDVLENKLLPLRRGYIGVVNRSQKDIDGKKDIXAALAAERKFFLSHPSYRHLADRMGXPYLQKVLNQQLXNHIRDXLPGLRNKLQSQLLSIEKEVEEYKNFRPDDPARKXKALLQMVQQFAVDFEKRIEGSGDQIDXYELSGGARINRIFHERFPFELVKMEFDEKELRREISYAIKNIHGIRXGLFXPDLAFEAXVKKQVQKLKEPSIKCVDMVVSELXAXIRKCSEKLQQYPRLREEMERIVXXHIREREGRXKEQVMLLIDIELAYMNXNHEDFIGFANAQQRSNQMNKKKXSGNQDEILVIRKGWLXINNIGIMKGGSKEYWFVLXAENLSWYKDDEEKEKKYMLSVDNLKLRDVEKGFMSSKHIFALFNXEQRNVYKDYRQLELACEXQEEVDSWKASFLRAGVYPERVGDKEKASEXEENGSDSFMHSMDPQLERQVEXIRNLVDSYMAIVNKXVRDLMPKXIMHLMINNXKEFIFSELLANLYSCGDQNXLMEESAEQAQRRDEMLRMYHALKEALSIIGDINXXXVSXPMPPPVDDSWLQVQSVPAGRRSPXSSPXPQRRAPAVPPARPGSRGPAPGPPPAGSALGGAPPVPSRPGASPDPFGPPPQVPSRPNRAPPGVPRIXISDP

SEQ ID NO: 8299 - protein, 856 aa, Homo sapiens
  MOD_RES (65)..(65): Selenocysteine
  MOD_RES (77)..(78): Selenocysteine
  MOD_RES (92)..(92): Selenocysteine
  MOD_RES (105)..(105): Selenocysteine
  MOD_RES (109)..(109): Selenocysteine
  MOD_RES (111)..(111): Selenocysteine
  MOD_RES (133)..(133): Selenocysteine
  MOD_RES (141)..(141): Selenocysteine
  MOD_RES (165)..(165): Selenocysteine
  MOD_RES (200)..(200): Selenocysteine
  MOD_RES (205)..(205): Selenocysteine
  MOD_RES (214)..(214): Selenocysteine
  MOD_RES (249)..(249): Selenocysteine
  MOD_RES (274)..(274): Selenocysteine
  MOD_RES (286)..(286): Selenocysteine
  MOD_RES (292)..(292): Selenocysteine
  MOD_RES (326)..(326): Selenocysteine
  MOD_RES (353)..(353): Selenocysteine
  MOD_RES (400)..(400): Selenocysteine
  MOD_RES (404)..(404): Selenocysteine
  MOD_RES (411)..(411): Selenocysteine
  MOD_RES (438)..(438): Selenocysteine
  MOD_RES (443)..(443): Selenocysteine
  MOD_RES (461)..(462): Selenocysteine
  MOD_RES (471)..(471): Selenocysteine
  MOD_RES (488)..(488): Selenocysteine
  MOD_RES (511)..(511): Selenocysteine
  MOD_RES (527)..(527): Selenocysteine
  MOD_RES (546)..(546): Selenocysteine
  MOD_RES (591)..(591): Selenocysteine
  MOD_RES (609)..(609): Selenocysteine
  MOD_RES (639)..(639): Selenocysteine
  MOD_RES (661)..(661): Selenocysteine
  MOD_RES (676)..(676): Selenocysteine
  MOD_RES (684)..(684): Selenocysteine
  MOD_RES (693)..(693): Selenocysteine
  MOD_RES (713)..(713): Selenocysteine
  MOD_RES (747)..(749): Selenocysteine
  MOD_RES (752)..(752): Selenocysteine
  MOD_RES (776)..(776): Selenocysteine
  MOD_RES (780)..(780): Selenocysteine
MGNRGMEDLIPLVNRLQDAFSAIGQNADLDLPQIAVVGGQSAGKSSVLENFVGRDFLPRGSGIVXRRPLVLQLVNAXXEYAEFLHCKGKKFXDFEEVRLEIEAEXDRVXGXNKGISPVPINLRVYSPHVLNLXLVDLPGMXKVPVGDQPPDIEFQIRDMLMQFVXKENCLILAVSPANSDLANSDALKVAKEVDPQGQRXIGVIXKLDLMDEGXDARDVLENKLLPLRRGYIGVVNRSQKDIDGKKDIXAALAAERKFFLSHPSYRHLADRMGXPYLQKVLNQQLXNHIRDXLPGLRNKLQSQLLSIEKEVEEYKNFRPDDPARKXKALLQMVQQFAVDFEKRIEGSGDQIDXYELSGGARINRIFHERFPFELVKMEFDEKELRREISYAIKNIHGIRXGLFXPDMAFEXIVKKQVKKIREPCLKCVDMVISELISXVRQCXKKLQQYPRLREEMERIVXXHIREREGRXKEQVMLLIDIELAYMNXNHEDFIGFANAQQRSNQMNKKKXSGNQDEILVIRKGWLXINNIGIMKGGSKEYWFVLXAENLSWYKDDEEKEKKYMLSVDNLKLRDVEKGFMSSKHIFALFNXEQRNVYKDYRQLELACEXQEEVDSWKASFLRAGVYPERVGDKEKASEXEENGSDSFMHSMDPQLERQVEXIRNLVDSYMAIVNKXVRDLMPKXIMHLMINNXKEFIFSELLANLYSCGDQNXLMEESAEQAQRRDEMLRMYHALKEALSIIGDINXXXVSXPMPPPVDDSWLQVQSVPAGRRSPXSSPXPQRRAPAVPPARPGSRGPAPGPPPAGSALGGAPPVPSRPGASPDPFGPPPQVPSRPNRAPPGVPSQPIGSGKSIPS

SEQ ID NO: 8300 - protein, 864 aa, Homo sapiens
  MOD_RES (65)..(65): Selenocysteine
  MOD_RES (77)..(78): Selenocysteine
  MOD_RES (92)..(92): Selenocysteine
  MOD_RES (105)..(105): Selenocysteine
  MOD_RES (109)..(109): Selenocysteine
  MOD_RES (111)..(111): Selenocysteine
  MOD_RES (133)..(133): Selenocysteine
  MOD_RES (141)..(141): Selenocysteine
  MOD_RES (165)..(165): Selenocysteine
  MOD_RES (200)..(200): Selenocysteine
  MOD_RES (205)..(205): Selenocysteine
  MOD_RES (214)..(214): Selenocysteine
  MOD_RES (249)..(249): Selenocysteine
  MOD_RES (274)..(274): Selenocysteine
  MOD_RES (286)..(286): Selenocysteine
  MOD_RES (292)..(292): Selenocysteine
  MOD_RES (326)..(326): Selenocysteine
  MOD_RES (353)..(353): Selenocysteine
  MOD_RES (400)..(400): Selenocysteine
  MOD_RES (404)..(404): Selenocysteine
  MOD_RES (411)..(411): Selenocysteine
  MOD_RES (438)..(438): Selenocysteine
  MOD_RES (443)..(443): Selenocysteine
  MOD_RES (461)..(462): Selenocysteine
  MOD_RES (471)..(471): Selenocysteine
  MOD_RES (488)..(488): Selenocysteine
  MOD_RES (511)..(511): Selenocysteine
  MOD_RES (527)..(527): Selenocysteine
  MOD_RES (546)..(546): Selenocysteine
  MOD_RES (591)..(591): Selenocysteine
  MOD_RES (609)..(609): Selenocysteine
  MOD_RES (639)..(639): Selenocysteine
  MOD_RES (661)..(661): Selenocysteine
  MOD_RES (676)..(676): Selenocysteine
  MOD_RES (684)..(684): Selenocysteine
  MOD_RES (693)..(693): Selenocysteine
  MOD_RES (713)..(713): Selenocysteine
  MOD_RES (747)..(749): Selenocysteine
  MOD_RES (752)..(752): Selenocysteine
  MOD_RES (776)..(776): Selenocysteine
  MOD_RES (780)..(780): Selenocysteine
MGNRGMEDLIPLVNRLQDAFSAIGQNADLDLPQIAVVGGQSAGKSSVLENFVGRDFLPRGSGIVXRRPLVLQLVNAXXEYAEFLHCKGKKFXDFEEVRLEIEAEXDRVXGXNKGISPVPINLRVYSPHVLNLXLVDLPGMXKVPVGDQPPDIEFQIRDMLMQFVXKENCLILAVSPANSDLANSDALKVAKEVDPQGQRXIGVIXKLDLMDEGXDARDVLENKLLPLRRGYIGVVNRSQKDIDGKKDIXAALAAERKFFLSHPSYRHLADRMGXPYLQKVLNQQLXNHIRDXLPGLRNKLQSQLLSIEKEVEEYKNFRPDDPARKXKALLQMVQQFAVDFEKRIEGSGDQIDXYELSGGARINRIFHERFPFELVKMEFDEKELRREISYAIKNIHGIRXGLFXPDMAFEXIVKKQVKKIREPCLKCVDMVISELISXVRQCXKKLQQYPRLREEMERIVXXHIREREGRXKEQVMLLIDIELAYMNXNHEDFIGFANAQQRSNQMNKKKXSGNQDEILVIRKGWLXINNIGIMKGGSKEYWFVLXAENLSWYKDDEEKEKKYMLSVDNLKLRDVEKGFMSSKHIFALFNXEQRNVYKDYRQLELACEXQEEVDSWKASFLRAGVYPERVGDKEKASEXEENGSDSFMHSMDPQLERQVEXIRNLVDSYMAIVNKXVRDLMPKXIMHLMINNXKEFIFSELLANLYSCGDQNXLMEESAEQAQRRDEMLRMYHALKEALSIIGDINXXXVSXPMPPPVDDSWLQVQSVPAGRRSPXSSPXPQRRAPAVPPARPGSRGPAPGPPPAGSALGGAPPVPSRPGASPDPFGPPPQVPSRPNRAPPGVPSRSGQASPSRPESPRPPFDL

SEQ ID NO: 8301 - protein, 864 aa, Homo sapiens
  MOD_RES (65)..(65): Selenocysteine
  MOD_RES (77)..(78): Selenocysteine
  MOD_RES (92)..(92): Selenocysteine
  MOD_RES (105)..(105): Selenocysteine
  MOD_RES (109)..(109): Selenocysteine
  MOD_RES (111)..(111): Selenocysteine
  MOD_RES (133)..(133): Selenocysteine
  MOD_RES (141)..(141): Selenocysteine
  MOD_RES (165)..(165): Selenocysteine
  MOD_RES (200)..(200): Selenocysteine
  MOD_RES (205)..(205): Selenocysteine
  MOD_RES (214)..(214): Selenocysteine
  MOD_RES (249)..(249): Selenocysteine
  MOD_RES (274)..(274): Selenocysteine
  MOD_RES (286)..(286): Selenocysteine
  MOD_RES (292)..(292): Selenocysteine
  MOD_RES (326)..(326): Selenocysteine
  MOD_RES (353)..(353): Selenocysteine
  MOD_RES (400)..(400): Selenocysteine
  MOD_RES (404)..(404): Selenocysteine
  MOD_RES (412)..(412): Selenocysteine
  MOD_RES (436)..(436): Selenocysteine
  MOD_RES (438)..(438): Selenocysteine
  MOD_RES (461)..(462): Selenocysteine
  MOD_RES (471)..(471): Selenocysteine
  MOD_RES (488)..(488): Selenocysteine
  MOD_RES (511)..(511): Selenocysteine
  MOD_RES (527)..(527): Selenocysteine
  MOD_RES (546)..(546): Selenocysteine
  MOD_RES (591)..(591): Selenocysteine
  MOD_RES (609)..(609): Selenocysteine
  MOD_RES (639)..(639): Selenocysteine
  MOD_RES (661)..(661): Selenocysteine
  MOD_RES (676)..(676): Selenocysteine
  MOD_RES (684)..(684): Selenocysteine
  MOD_RES (693)..(693): Selenocysteine
  MOD_RES (713)..(713): Selenocysteine
  MOD_RES (747)..(749): Selenocysteine
  MOD_RES (752)..(752): Selenocysteine
  MOD_RES (776)..(776): Selenocysteine
  MOD_RES (780)..(780): Selenocysteine
MGNRGMEDLIPLVNRLQDAFSAIGQNADLDLPQIAVVGGQSAGKSSVLENFVGRDFLPRGSGIVXRRPLVLQLVNAXXEYAEFLHCKGKKFXDFEEVRLEIEAEXDRVXGXNKGISPVPINLRVYSPHVLNLXLVDLPGMXKVPVGDQPPDIEFQIRDMLMQFVXKENCLILAVSPANSDLANSDALKVAKEVDPQGQRXIGVIXKLDLMDEGXDARDVLENKLLPLRRGYIGVVNRSQKDIDGKKDIXAALAAERKFFLSHPSYRHLADRMGXPYLQKVLNQQLXNHIRDXLPGLRNKLQSQLLSIEKEVEEYKNFRPDDPARKXKALLQMVQQFAVDFEKRIEGSGDQIDXYELSGGARINRIFHERFPFELVKMEFDEKELRREISYAIKNIHGIRXGLFXPDLAFEAXVKKQVQKLKEPSIKCVDMVVSELXAXIRKCSEKLQQYPRLREEMERIVXXHIREREGRXKEQVMLLIDIELAYMNXNHEDFIGFANAQQRSNQMNKKKXSGNQDEILVIRKGWLXINNIGIMKGGSKEYWFVLXAENLSWYKDDEEKEKKYMLSVDNLKLRDVEKGFMSSKHIFALFNXEQRNVYKDYRQLELACEXQEEVDSWKASFLRAGVYPERVGDKEKASEXEENGSDSFMHSMDPQLERQVEXIRNLVDSYMAIVNKXVRDLMPKXIMHLMINNXKEFIFSELLANLYSCGDQNXLMEESAEQAQRRDEMLRMYHALKEALSIIGDINXXXVSXPMPPPVDDSWLQVQSVPAGRRSPXSSPXPQRRAPAVPPARPGSRGPAPGPPPAGSALGGAPPVPSRPGASPDPFGPPPQVPSRPNRAPPGVPSRSGQASPSRPESPRPPFDL

SEQ ID NO: 8302 - protein, 864 aa, Homo sapiens
  MOD_RES (65)..(65): Selenocysteine
  MOD_RES (77)..(78): Selenocysteine
  MOD_RES (92)..(92): Selenocysteine
  MOD_RES (105)..(105): Selenocysteine
  MOD_RES (109)..(109): Selenocysteine
  MOD_RES (111)..(111): Selenocysteine
  MOD_RES (133)..(133): Selenocysteine
  MOD_RES (141)..(141): Selenocysteine
  MOD_RES (165)..(165): Selenocysteine
  MOD_RES (200)..(200): Selenocysteine
  MOD_RES (205)..(205): Selenocysteine
  MOD_RES (214)..(214): Selenocysteine
  MOD_RES (249)..(249): Selenocysteine
  MOD_RES (274)..(274): Selenocysteine
  MOD_RES (286)..(286): Selenocysteine
  MOD_RES (292)..(292): Selenocysteine
  MOD_RES (326)..(326): Selenocysteine
  MOD_RES (353)..(353): Selenocysteine
  MOD_RES (400)..(400): Selenocysteine
  MOD_RES (404)..(404): Selenocysteine
  MOD_RES (411)..(411): Selenocysteine
  MOD_RES (438)..(438): Selenocysteine
  MOD_RES (443)..(443): Selenocysteine
  MOD_RES (461)..(462): Selenocysteine
  MOD_RES (471)..(471): Selenocysteine
  MOD_RES (488)..(488): Selenocysteine
  MOD_RES (511)..(511): Selenocysteine
  MOD_RES (523)..(523): Selenocysteine
  MOD_RES (542)..(542): Selenocysteine
  MOD_RES (587)..(587): Selenocysteine
  MOD_RES (605)..(605): Selenocysteine
  MOD_RES (635)..(635): Selenocysteine
  MOD_RES (657)..(657): Selenocysteine
  MOD_RES (672)..(672): Selenocysteine
  MOD_RES (680)..(680): Selenocysteine
  MOD_RES (689)..(689): Selenocysteine
  MOD_RES (709)..(709): Selenocysteine
  MOD_RES (743)..(745): Selenocysteine
  MOD_RES (748)..(748): Selenocysteine
  MOD_RES (772)..(772): Selenocysteine
  MOD_RES (776)..(776): Selenocysteine
  MOD_RES (849)..(849): Selenocysteine
MGNRGMEDLIPLVNRLQDAFSAIGQNADLDLPQIAVVGGQSAGKSSVLENFVGRDFLPRGSGIVXRRPLVLQLVNAXXEYAEFLHCKGKKFXDFEEVRLEIEAEXDRVXGXNKGISPVPINLRVYSPHVLNLXLVDLPGMXKVPVGDQPPDIEFQIRDMLMQFVXKENCLILAVSPANSDLANSDALKVAKEVDPQGQRXIGVIXKLDLMDEGXDARDVLENKLLPLRRGYIGVVNRSQKDIDGKKDIXAALAAERKFFLSHPSYRHLADRMGXPYLQKVLNQQLXNHIRDXLPGLRNKLQSQLLSIEKEVEEYKNFRPDDPARKXKALLQMVQQFAVDFEKRIEGSGDQIDXYELSGGARINRIFHERFPFELVKMEFDEKELRREISYAIKNIHGIRXGLFXPDMAFEXIVKKQVKKIREPCLKCVDMVISELISXVRQCXKKLQQYPRLREEMERIVXXHIREREGRXKEQVMLLIDIELAYMNXNHEDFIGFANAQQRSNQMNKKKXSGNQVIRKGWLXINNIGIMKGGSKEYWFVLXAENLSWYKDDEEKEKKYMLSVDNLKLRDVEKGFMSSKHIFALFNXEQRNVYKDYRQLELACEXQEEVDSWKASFLRAGVYPERVGDKEKASEXEENGSDSFMHSMDPQLERQVEXIRNLVDSYMAIVNKXVRDLMPKXIMHLMINNXKEFIFSELLANLYSCGDQNXLMEESAEQAQRRDEMLRMYHALKEALSIIGDINXXXVSXPMPPPVDDSWLQVQSVPAGRRSPXSSPXPQRRAPAVPPARPGSRGPAPGPPPAGSALGGAPPVPSRPGASPDPFGPPPQVPSRPNRAPPGVPSRKGPASPXRPAAPRPAEAPLLDL

SEQ ID NO: 8303 - protein, 131 aa, Homo sapiens
  MOD_RES (1)..(1): Any amino acid
  MOD_RES (47)..(47): Selenocysteine
  MOD_RES (51)..(51): Selenocysteine
  MOD_RES (59)..(59): Selenocysteine
  MOD_RES (83)..(83): Selenocysteine
  MOD_RES (85)..(85): Selenocysteine
  MOD_RES (115)..(115): Selenocysteine
  MOD_RES (128)..(128): Selenocysteine
  MOD_RES (131)..(131): Selenocysteine
XELSGGARINRIFHERFPFELVKMEFDEKELRREISYAIKNIHGIRXGLFXPDLAFEAXVKKQVQKLKEPSIKCVDMVVSELXAXIRKCSEKLAEHPGNVQRQPEWKKMLKGDRXSQRGGGCPAMGDXWKX

SEQ ID NO: 8304 - protein, 34 aa, Homo sapiens
  MOD_RES (1)..(1): Any amino acid
  MOD_RES (3)..(3): Selenocysteine
XLXAENLSWYKDDEGGSDFAHLPSLPALSCRNVY

SEQ ID NO: 8305 - protein, 53 aa, Homo sapiens
  MOD_RES (1)..(1): Any amino acid
  MOD_RES (49)..(49): Selenocysteine
XPGPPPAGSALGGAPPVPSRPGASPDPFGPPPQVPSRPNRAPPGVPRIXISDP

SEQ ID NO: 8306 - protein, 356 aa, Homo sapiens
  MOD_RES (1)..(1): Any amino acid
  MOD_RES (8)..(8): Selenocysteine
  MOD_RES (20)..(21): Selenocysteine
  MOD_RES (35)..(35): Selenocysteine
  MOD_RES (48)..(48): Selenocysteine
  MOD_RES (52)..(52): Selenocysteine
  MOD_RES (54)..(54): Selenocysteine
  MOD_RES (76)..(76): Selenocysteine
  MOD_RES (84)..(84): Selenocysteine
  MOD_RES (108)..(108): Selenocysteine
  MOD_RES (143)..(143): Selenocysteine
  MOD_RES (148)..(148): Selenocysteine
  MOD_RES (157)..(157): Selenocysteine
  MOD_RES (192)..(192): Selenocysteine
  MOD_RES (217)..(217): Selenocysteine
  MOD_RES (229)..(229): Selenocysteine
  MOD_RES (235)..(235): Selenocysteine
  MOD_RES (269)..(269): Selenocysteine
  MOD_RES (296)..(296): Selenocysteine
  MOD_RES (346)..(346): Selenocysteine
XRGSGIVXRRPLVLQLVNAXXEYAEFLHCKGKKFXDFEEVRLEIEAEXDRVXGXNKGISPVPINLRVYSPHVLNLXLVDLPGMXKVPVGDQPPDIEFQIRDMLMQFVXKENCLILAVSPANSDLANSDALKVAKEVDPQGQRXIGVIXKLDLMDEGXDARDVLENKLLPLRRGYIGVVNRSQKDIDGKKDIXAALAAERKFFLSHPSYRHLADRMGXPYLQKVLNQQLXNHIRDXLPGLRNKLQSQLLSIEKEVEEYKNFRPDDPARKXKALLQMVQQFAVDFEKRIEGSGDQIDXYELSGGARINRIFHERFPFELVKMEFDEKELRREISYAIKNIHGISSSSXRGYGRRWSAS

SEQ ID NO: 8307 - protein, 172 aa, Homo sapiens
  MOD_RES (17)..(17): Selenocysteine
  MOD_RES (33)..(33): Selenocysteine
  MOD_RES (57)..(57): Selenocysteine
  MOD_RES (79)..(79): Selenocysteine
  MOD_RES (85)..(85): Selenocysteine
  MOD_RES (98)..(98): Selenocysteine
  MOD_RES (126)..(126): Selenocysteine
  MOD_RES (134)..(134): Selenocysteine
  MOD_RES (168)..(168): Selenocysteine
  MOD_RES (172)..(172): Selenocysteine
MEALIPVINKLQDVFNXVGADIIQLPQIVVVGXQSSGKSSVLESLVGRDLLPRDPAXWKNSRHLSKGVEAEEWGKFLHXKNKLYXDFDEIRQEIENEXERISGNNKGVSPEPIHLKIFSPNVVNLXLVDLPGMXKVPVGDQPKDIELQIRELILRFISNPNSIILAVXAANX

SEQ ID NO: 8308 - protein, 117 aa, Homo sapiens
  MOD_RES (17)..(17): Selenocysteine
  MOD_RES (33)..(33): Selenocysteine
  MOD_RES (55)..(55): Selenocysteine
  MOD_RES (59)..(59): Selenocysteine
  MOD_RES (78)..(79): Selenocysteine
  MOD_RES (87)..(87): Selenocysteine
  MOD_RES (109)..(109): Selenocysteine
MEALIPVINKLQDVFNXVGADIIQLPQIVVVGXQSSGKSSVLESLVGRDLLPRGXGIVXRRPLILQLVHVSQEDKRKXXGEENDPAXWKNSRHLSKGVEAEEWGKFLHXKNKEPARY

SEQ ID NO: 8309 - protein, 712 aa, Homo sapiens
  MOD_RES (17)..(17): Selenocysteine
  MOD_RES (33)..(33): Selenocysteine
  MOD_RES (55)..(55): Selenocysteine
  MOD_RES (59)..(59): Selenocysteine
  MOD_RES (78)..(79): Selenocysteine
  MOD_RES (87)..(87): Selenocysteine
  MOD_RES (109)..(109): Selenocysteine
  MOD_RES (115)..(115): Selenocysteine
  MOD_RES (128)..(128): Selenocysteine
  MOD_RES (156)..(156): Selenocysteine
  MOD_RES (164)..(164): Selenocysteine
  MOD_RES (198)..(198): Selenocysteine
  MOD_RES (202)..(202): Selenocysteine
  MOD_RES (206)..(206): Selenocysteine
  MOD_RES (223)..(223): Selenocysteine
  MOD_RES (228)..(228): Selenocysteine
  MOD_RES (237)..(237): Selenocysteine
  MOD_RES (272)..(272): Selenocysteine
  MOD_RES (295)..(295): Selenocysteine
  MOD_RES (301)..(301): Selenocysteine
  MOD_RES (319)..(319): Selenocysteine
  MOD_RES (345)..(345): Selenocysteine
  MOD_RES (351)..(351): Selenocysteine
  MOD_RES (355)..(355): Selenocysteine
  MOD_RES (360)..(360): Selenocysteine
  MOD_RES (364)..(364): Selenocysteine
  MOD_RES (370)..(370): Selenocysteine
  MOD_RES (386)..(386): Selenocysteine
  MOD_RES (390)..(390): Selenocysteine
  MOD_RES (402)..(402): Selenocysteine
  MOD_RES (407)..(407): Selenocysteine
  MOD_RES (413)..(413): Selenocysteine
  MOD_RES (464)..(464): Selenocysteine
  MOD_RES (482)..(482): Selenocysteine
  MOD_RES (492)..(492): Selenocysteine
  MOD_RES (509)..(509): Selenocysteine
  MOD_RES (561)..(562): Selenocysteine
  MOD_RES (571)..(571): Selenocysteine
  MOD_RES (657)..(657): Selenocysteine
  MOD_RES (677)..(677): Selenocysteine
  MOD_RES (709)..(709): Selenocysteine
MEALIPVINKLQDVFNXVGADIIQLPQIVVVGXQSSGKSSVLESLVGRDLLPRGXGIVXRRPLILQLVHVSQEDKRKXXGEENDPAXWKNSRHLSKGVEAEEWGKFLHXKNKLYXDFDEIRQEIENEXERISGNNKGVSPEPIHLKIFSPNVVNLXLVDLPGMXKVPVGDQPKDIELQIRELILRFISNPNSIILAVXAANXDMAXSEALKISREVDPDGRRXLAVIXKLDLMDAGXDAMDVLMGRVIPVKLGIIGVVNRSQLDINNKKSVXDSIRDEYAFLQKKYPSLANRNGXKYLARXLNRLLMHHIRDCLPELKXRINVLAAQYQSLLNSYGEPVDDKSAXLLQLIXKFAXEYCNXIEGXAKYIEXSELCGGARICYIFHEXFGRXLESVDPLGGLNXIDILXAIRNAXGPRPALFVPEVSFELLVKRQIKRLEEPSLRCVELVHEEMQRIIQHCSNYSXQELLRFPKLHDAIVEVVXCLLRKRLPVXNEMVHNLVAIELAYINXKHPDFADACGLMNNNIEEQRRNRLARELPSAVSRDKVASGGGGVGDGVQEPXXGNWRGMLKXSKAEELLAEEKSKPIPIMPASPQKGHAVNLLDVPVPVARKLSAREQRDCEVIERLIKSYFLIVRKNIQDSVPKAVMHFLVNHVKDXLQSELVGQLYKSSLLDDLLXESEDMAQRRKEAADMLKALQGASQIIAEIREXHLW

SEQ ID NO: 8310 - protein, 738 aa, Homo sapiens
  MOD_RES (17)..(17): Selenocysteine
  MOD_RES (33)..(33): Selenocysteine
  MOD_RES (55)..(55): Selenocysteine
  MOD_RES (59)..(59): Selenocysteine
  MOD_RES (78)..(79): Selenocysteine
  MOD_RES (87)..(87): Selenocysteine
  MOD_RES (109)..(109): Selenocysteine
  MOD_RES (115)..(115): Selenocysteine
  MOD_RES (128)..(128): Selenocysteine
  MOD_RES (156)..(156): Selenocysteine
  MOD_RES (164)..(164): Selenocysteine
  MOD_RES (198)..(198): Selenocysteine
  MOD_RES (202)..(202): Selenocysteine
  MOD_RES (206)..(206): Selenocysteine
  MOD_RES (223)..(223): Selenocysteine
  MOD_RES (228)..(228): Selenocysteine
  MOD_RES (237)..(237): Selenocysteine
  MOD_RES (272)..(272): Selenocysteine
  MOD_RES (295)..(295): Selenocysteine
  MOD_RES (301)..(301): Selenocysteine
  MOD_RES (319)..(319): Selenocysteine
  MOD_RES (345)..(345): Selenocysteine
  MOD_RES (351)..(351): Selenocysteine
  MOD_RES (355)..(355): Selenocysteine
  MOD_RES (360)..(360): Selenocysteine
  MOD_RES (364)..(364): Selenocysteine
  MOD_RES (370)..(370): Selenocysteine
  MOD_RES (386)..(386): Selenocysteine
  MOD_RES (390)..(390): Selenocysteine
  MOD_RES (402)..(402): Selenocysteine
  MOD_RES (407)..(407): Selenocysteine
  MOD_RES (413)..(413): Selenocysteine
  MOD_RES (464)..(464): Selenocysteine
  MOD_RES (482)..(482): Selenocysteine
  MOD_RES (492)..(492): Selenocysteine
  MOD_RES (509)..(509): Selenocysteine
  MOD_RES (587)..(588): Selenocysteine
  MOD_RES (597)..(597): Selenocysteine
  MOD_RES (683)..(683): Selenocysteine
  MOD_RES (703)..(703): Selenocysteine
  MOD_RES (735)..(735): Selenocysteine
MEALIPVINKLQDVFNXVGADIIQLPQIVVVGXQSSGKSSVLESLVGRDLLPRGXGIVXRRPLILQLVHVSQEDKRKXXGEENDPAXWKNSRHLSKGVEAEEWGKFLHXKNKLYXDFDEIRQEIENEXERISGNNKGVSPEPIHLKIFSPNVVNLXLVDLPGMXKVPVGDQPKDIELQIRELILRFISNPNSIILAVXAANXDMAXSEALKISREVDPDGRRXLAVIXKLDLMDAGXDAMDVLMGRVIPVKLGIIGVVNRSQLDINNKKSVXDSIRDEYAFLQKKYPSLANRNGXKYLARXLNRLLMHHIRDCLPELKXRINVLAAQYQSLLNSYGEPVDDKSAXLLQLIXKFAXEYCNXIEGXAKYIEXSELCGGARICYIFHEXFGRXLESVDPLGGLNXIDILXAIRNAXGPRPALFVPEVSFELLVKRQIKRLEEPSLRCVELVHEEMQRIIQHCSNYSXQELLRFPKLHDAIVEVVXCLLRKRLPVXNEMVHNLVAIELAYINXKHPDFADACGLMNNNIEEQRRNRLARELPSAVSRDKSSKVPSALAPASQEPSPAASAEADGKVASGGGGVGDGVQEPXXGNWRGMLKXSKAEELLAEEKSKPIPIMPASPQKGHAVNLLDVPVPVARKLSAREQRDCEVIERLIKSYFLIVRKNIQDSVPKAVMHFLVNHVKDXLQSELVGQLYKSSLLDDLLXESEDMAQRRKEAADMLKALQGASQIIAEIREXHLW

SEQ ID NO: 8311 - protein, 749 aa, Homo sapiens
  MOD_RES (17)..(17): Selenocysteine
  MOD_RES (33)..(33): Selenocysteine
  MOD_RES (55)..(55): Selenocysteine
  MOD_RES (59)..(59): Selenocysteine
  MOD_RES (78)..(79): Selenocysteine
  MOD_RES (87)..(87): Selenocysteine
  MOD_RES (109)..(109): Selenocysteine
  MOD_RES (115)..(115): Selenocysteine
  MOD_RES (128)..(128): Selenocysteine
  MOD_RES (156)..(156): Selenocysteine
  MOD_RES (164)..(164): Selenocysteine
  MOD_RES (198)..(198): Selenocysteine
  MOD_RES (202)..(202): Selenocysteine
  MOD_RES (206)..(206): Selenocysteine
  MOD_RES (223)..(223): Selenocysteine
  MOD_RES (228)..(228): Selenocysteine
  MOD_RES (237)..(237): Selenocysteine
  MOD_RES (272)..(272): Selenocysteine
  MOD_RES (295)..(295): Selenocysteine
  MOD_RES (301)..(301): Selenocysteine
  MOD_RES (319)..(319): Selenocysteine
  MOD_RES (345)..(345): Selenocysteine
  MOD_RES (351)..(351): Selenocysteine
  MOD_RES (355)..(355): Selenocysteine
  MOD_RES (360)..(360): Selenocysteine
  MOD_RES (364)..(364): Selenocysteine
  MOD_RES (370)..(370): Selenocysteine
  MOD_RES (386)..(386): Selenocysteine
  MOD_RES (390)..(390): Selenocysteine
  MOD_RES (402)..(402): Selenocysteine
  MOD_RES (407)..(407): Selenocysteine
  MOD_RES (413)..(413): Selenocysteine
  MOD_RES (464)..(464): Selenocysteine
  MOD_RES (482)..(482): Selenocysteine
  MOD_RES (492)..(492): Selenocysteine
  MOD_RES (509)..(509): Selenocysteine
  MOD_RES (580)..(580): Selenocysteine
  MOD_RES (598)..(599): Selenocysteine
  MOD_RES (608)..(608): Selenocysteine
  MOD_RES (694)..(694): Selenocysteine
  MOD_RES (714)..(714): Selenocysteine
  MOD_RES (746)..(746): Selenocysteine
MEALIPVINKLQDVFNXVGADIIQLPQIVVVGXQSSGKSSVLESLVGRDLLPRGXGIVXRRPLILQLVHVSQEDKRKXXGEENDPAXWKNSRHLSKGVEAEEWGKFLHXKNKLYXDFDEIRQEIENEXERISGNNKGVSPEPIHLKIFSPNVVNLXLVDLPGMXKVPVGDQPKDIELQIRELILRFISNPNSIILAVXAANXDMAXSEALKISREVDPDGRRXLAVIXKLDLMDAGXDAMDVLMGRVIPVKLGIIGVVNRSQLDINNKKSVXDSIRDEYAFLQKKYPSLANRNGXKYLARXLNRLLMHHIRDCLPELKXRINVLAAQYQSLLNSYGEPVDDKSAXLLQLIXKFAXEYCNXIEGXAKYIEXSELCGGARICYIFHEXFGRXLESVDPLGGLNXIDILXAIRNAXGPRPALFVPEVSFELLVKRQIKRLEEPSLRCVELVHEEMQRIIQHCSNYSXQELLRFPKLHDAIVEVVXCLLRKRLPVXNEMVHNLVAIELAYINXKHPDFADACGLMNNNIEEQRRNRLARELPSAVSRDKSSKVPSALAPASQEPSPAASAEADGKLIQDSRREXKNVASGGGGVGDGVQEPXXGNWRGMLKXSKAEELLAEEKSKPIPIMPASPQKGHAVNLLDVPVPVARKLSAREQRDCEVIERLIKSYFLIVRKNIQDSVPKAVMHFLVNHVKDXLQSELVGQLYKSSLLDDLLXESEDMAQRRKEAADMLKALQGASQIIAEIREXHLW

SEQ ID NO: 8312 - protein, 169 aa, Homo sapiens
  MOD_RES (17)..(17): Selenocysteine
  MOD_RES (33)..(33): Selenocysteine
  MOD_RES (55)..(55): Selenocysteine
  MOD_RES (59)..(59): Selenocysteine
  MOD_RES (78)..(79): Selenocysteine
  MOD_RES (96)..(96): Selenocysteine
  MOD_RES (119)..(119): Selenocysteine
  MOD_RES (127)..(127): Selenocysteine
  MOD_RES (161)..(161): Selenocysteine
  MOD_RES (165)..(165): Selenocysteine
  MOD_RES (169)..(169): Selenocysteine
MEALIPVINKLQDVFNXVGADIIQLPQIVVVGXQSSGKSSVLESLVGRDLLPRGXGIVXRRPLILQLVHVSQEDKRKXXGEENGVEAEEWGKFLHXKNKGVSPEPIHLKIFSPNVVNLXLVDLPGMXKVPVGDQPKDIELQIRELILRFISNPNSIILAVXAANXDMAX

SEQ ID NO: 8313 - protein, 156 aa, Homo sapiens
  MOD_RES (17)..(17): Selenocysteine
  MOD_RES (33)..(33): Selenocysteine
  MOD_RES (55)..(55): Selenocysteine
  MOD_RES (59)..(59): Selenocysteine
  MOD_RES (78)..(79): Selenocysteine
  MOD_RES (96)..(96): Selenocysteine
  MOD_RES (102)..(102): Selenocysteine
  MOD_RES (115)..(115): Selenocysteine
  MOD_RES (143)..(143): Selenocysteine
  MOD_RES (151)..(151): Selenocysteine
MEALIPVINKLQDVFNXVGADIIQLPQIVVVGXQSSGKSSVLESLVGRDLLPRGXGIVXRRPLILQLVHVSQEDKRKXXGEENGVEAEEWGKFLHXKNKLYXDFDEIRQEIENEXERISGNNKGVSPEPIHLKIFSPNVVNLXLVDLPGMXKVAEP

SEQ ID NO: 8314 - protein, 699 aa, Homo sapiens
  MOD_RES (17)..(17): Selenocysteine
  MOD_RES (33)..(33): Selenocysteine
  MOD_RES (55)..(55): Selenocysteine
  MOD_RES (59)..(59): Selenocysteine
  MOD_RES (78)..(79): Selenocysteine
  MOD_RES (96)..(96): Selenocysteine
  MOD_RES (102)..(102): Selenocysteine
  MOD_RES (115)..(115): Selenocysteine
  MOD_RES (143)..(143): Selenocysteine
  MOD_RES (151)..(151): Selenocysteine
  MOD_RES (185)..(185): Selenocysteine
  MOD_RES (189)..(189): Selenocysteine
  MOD_RES (193)..(193): Selenocysteine
  MOD_RES (210)..(210): Selenocysteine
  MOD_RES (215)..(215): Selenocysteine
  MOD_RES (224)..(224): Selenocysteine
  MOD_RES (259)..(259): Selenocysteine
  MOD_RES (282)..(282): Selenocysteine
  MOD_RES (288)..(288): Selenocysteine
  MOD_RES (306)..(306): Selenocysteine
  MOD_RES (332)..(332): Selenocysteine
  MOD_RES (338)..(338): Selenocysteine
  MOD_RES (342)..(342): Selenocysteine
  MOD_RES (347)..(347): Selenocysteine
  MOD_RES (351)..(351): Selenocysteine
  MOD_RES (357)..(357): Selenocysteine
  MOD_RES (373)..(373): Selenocysteine
  MOD_RES (377)..(377): Selenocysteine
  MOD_RES (389)..(389): Selenocysteine
  MOD_RES (394)..(394): Selenocysteine
  MOD_RES (400)..(400): Selenocysteine
  MOD_RES (451)..(451): Selenocysteine
  MOD_RES (469)..(469): Selenocysteine
  MOD_RES (479)..(479): Selenocysteine
  MOD_RES (496)..(496): Selenocysteine
  MOD_RES (548)..(549): Selenocysteine
  MOD_RES (558)..(558): Selenocysteine
  MOD_RES (644)..(644): Selenocysteine
  MOD_RES (664)..(664): Selenocysteine
  MOD_RES (696)..(696): Selenocysteine
MEALIPVINKLQDVFNXVGADIIQLPQIVVVGXQSSGKSSVLESLVGRDLLPRGXGIVXRRPLILQLVHVSQEDKRKXXGEENGVEAEEWGKFLHXKNKLYXDFDEIRQEIENEXERISGNNKGVSPEPIHLKIFSPNVVNLXLVDLPGMXKVPVGDQPKDIELQIRELILRFISNPNSIILAVXAANXDMAXSEALKISREVDPDGRRXLAVIXKLDLMDAGXDAMDVLMGRVIPVKLGIIGVVNRSQLDINNKKSVXDSIRDEYAFLQKKYPSLANRNGXKYLARXLNRLLMHHIRDCLPELKXRINVLAAQYQSLLNSYGEPVDDKSAXLLQLIXKFAXEYCNXIEGXAKYIEXSELCGGARICYIFHEXFGRXLESVDPLGGLNXIDILXAIRNAXGPRPALFVPEVSFELLVKRQIKRLEEPSLRCVELVHEEMQRIIQHCSNYSXQELLRFPKLHDAIVEVVXCLLRKRLPVXNEMVHNLVAIELAYINXKHPDFADACGLMNNNIEEQRRNRLARELPSAVSRDKVASGGGGVGDGVQEPXXGNWRGMLKXSKAEELLAEEKSKPIPIMPASPQKGHAVNLLDVPVPVARKLSAREQRDCEVIERLIKSYFLIVRKNIQDSVPKAVMHFLVNHVKDXLQSELVGQLYKSSLLDDLLXESEDMAQRRKEAADMLKALQGASQIIAEIREXHLW

SEQ ID NO: 8315 - protein, 710 aa, Homo sapiens
  MOD_RES (17)..(17): Selenocysteine
  MOD_RES (33)..(33): Selenocysteine
  MOD_RES (55)..(55): Selenocysteine
  MOD_RES (59)..(59): Selenocysteine
  MOD_RES (78)..(79): Selenocysteine
  MOD_RES (96)..(96): Selenocysteine
  MOD_RES (102)..(102): Selenocysteine
  MOD_RES (115)..(115): Selenocysteine
  MOD_RES (143)..(143): Selenocysteine
  MOD_RES (151)..(151): Selenocysteine
  MOD_RES (185)..(185): Selenocysteine
  MOD_RES (189)..(189): Selenocysteine
  MOD_RES (193)..(193): Selenocysteine
  MOD_RES (210)..(210): Selenocysteine
  MOD_RES (215)..(215): Selenocysteine
  MOD_RES (224)..(224): Selenocysteine
  MOD_RES (259)..(259): Selenocysteine
  MOD_RES (282)..(282): Selenocysteine
  MOD_RES (288)..(288): Selenocysteine
  MOD_RES (306)..(306): Selenocysteine
  MOD_RES (332)..(332): Selenocysteine
  MOD_RES (338)..(338): Selenocysteine
  MOD_RES (342)..(342): Selenocysteine
  MOD_RES (347)..(347): Selenocysteine
  MOD_RES (351)..(351): Selenocysteine
  MOD_RES (357)..(357): Selenocysteine
  MOD_RES (373)..(373): Selenocysteine
  MOD_RES (377)..(377): Selenocysteine
  MOD_RES (389)..(389): Selenocysteine
  MOD_RES (394)..(394): Selenocysteine
  MOD_RES (400)..(400): Selenocysteine
  MOD_RES (451)..(451): Selenocysteine
  MOD_RES (469)..(469): Selenocysteine
  MOD_RES (479)..(479): Selenocysteine
  MOD_RES (496)..(496): Selenocysteine
  MOD_RES (541)..(541): Selenocysteine
  MOD_RES (559)..(560): Selenocysteine
  MOD_RES (569)..(569): Selenocysteine
  MOD_RES (655)..(655): Selenocysteine
  MOD_RES (675)..(675): Selenocysteine
  MOD_RES (707)..(707): Selenocysteine
MEALIPVINKLQDVFNXVGADIIQLPQIVVVGXQSSGKSSVLESLVGRDLLPRGXGIVXRRPLILQLVHVSQEDKRKXXGEENGVEAEEWGKFLHXKNKLYXDFDEIRQEIENEXERISGNNKGVSPEPIHLKIFSPNVVNLXLVDLPGMXKVPVGDQPKDIELQIRELILRFISNPNSIILAVXAANXDMAXSEALKISREVDPDGRRXLAVIXKLDLMDAGXDAMDVLMGRVIPVKLGIIGVVNRSQLDINNKKSVXDSIRDEYAFLQKKYPSLANRNGXKYLARXLNRLLMHHIRDCLPELKXRINVLAAQYQSLLNSYGEPVDDKSAXLLQLIXKFAXEYCNXIEGXAKYIEXSELCGGARICYIFHEXFGRXLESVDPLGGLNXIDILXAIRNAXGPRPALFVPEVSFELLVKRQIKRLEEPSLRCVELVHEEMQRIIQHCSNYSXQELLRFPKLHDAIVEVVXCLLRKRLPVXNEMVHNLVAIELAYINXKHPDFADACGLMNNNIEEQRRNRLARELPSAVSRDKLIQDSRREXKNVASGGGGVGDGVQEPXXGNWRGMLKXSKAEELLAEEKSKPIPIMPASPQKGHAVNLLDVPVPVARKLSAREQRDCEVIERLIKSYFLIVRKNIQDSVPKAVMHFLVNHVKDXLQSELVGQLYKSSLLDDLLXESEDMAQRRKEAADMLKALQGASQIIAEIREXHLW

SEQ ID NO: 8316 - protein, 725 aa, Homo sapiens
  MOD_RES (17)..(17): Selenocysteine
  MOD_RES (33)..(33): Selenocysteine
  MOD_RES (55)..(55): Selenocysteine
  MOD_RES (59)..(59): Selenocysteine
  MOD_RES (78)..(79): Selenocysteine
  MOD_RES (96)..(96): Selenocysteine
  MOD_RES (102)..(102): Selenocysteine
  MOD_RES (115)..(115): Selenocysteine
  MOD_RES (143)..(143): Selenocysteine
  MOD_RES (151)..(151): Selenocysteine
  MOD_RES (185)..(185): Selenocysteine
  MOD_RES (189)..(189): Selenocysteine
  MOD_RES (193)..(193): Selenocysteine
  MOD_RES (210)..(210): Selenocysteine
  MOD_RES (215)..(215): Selenocysteine
  MOD_RES (224)..(224): Selenocysteine
  MOD_RES (259)..(259): Selenocysteine
  MOD_RES (282)..(282): Selenocysteine
  MOD_RES (288)..(288): Selenocysteine
  MOD_RES (306)..(306): Selenocysteine
  MOD_RES (332)..(332): Selenocysteine
  MOD_RES (338)..(338): Selenocysteine
  MOD_RES (342)..(342): Selenocysteine
  MOD_RES (347)..(347): Selenocysteine
  MOD_RES (351)..(351): Selenocysteine
  MOD_RES (357)..(357): Selenocysteine
  MOD_RES (373)..(373): Selenocysteine
  MOD_RES (377)..(377): Selenocysteine
  MOD_RES (389)..(389): Selenocysteine
  MOD_RES (394)..(394): Selenocysteine
  MOD_RES (400)..(400): Selenocysteine
  MOD_RES (451)..(451): Selenocysteine
  MOD_RES (469)..(469): Selenocysteine
  MOD_RES (479)..(479): Selenocysteine
  MOD_RES (496)..(496): Selenocysteine
  MOD_RES (574)..(575): Selenocysteine
  MOD_RES (584)..(584): Selenocysteine
  MOD_RES (670)..(670): Selenocysteine
  MOD_RES (690)..(690): Selenocysteine
  MOD_RES (722)..(722): Selenocysteine
MEALIPVINKLQDVFNXVGADIIQLPQIVVVGXQSSGKSSVLESLVGRDLLPRGXGIVXRRPLILQLVHVSQEDKRKXXGEENGVEAEEWGKFLHXKNKLYXDFDEIRQEIENEXERISGNNKGVSPEPIHLKIFSPNVVNLXLVDLPGMXKVPVGDQPKDIELQIRELILRFISNPNSIILAVXAANXDMAXSEALKISREVDPDGRRXLAVIXKLDLMDAGXDAMDVLMGRVIPVKLGIIGVVNRSQLDINNKKSVXDSIRDEYAFLQKKYPSLANRNGXKYLARXLNRLLMHHIRDCLPELKXRINVLAAQYQSLLNSYGEPVDDKSAXLLQLIXKFAXEYCNXIEGXAKYIEXSELCGGARICYIFHEXFGRXLESVDPLGGLNXIDILXAIRNAXGPRPALFVPEVSFELLVKRQIKRLEEPSLRCVELVHEEMQRIIQHCSNYSXQELLRFPKLHDAIVEVVXCLLRKRLPVXNEMVHNLVAIELAYINXKHPDFADACGLMNNNIEEQRRNRLARELPSAVSRDKSSKVPSALAPASQEPSPAASAEADGKVASGGGGVGDGVQEPXXGNWRGMLKXSKAEELLAEEKSKPIPIMPASPQKGHAVNLLDVPVPVARKLSAREQRDCEVIERLIKSYFLIVRKNIQDSVPKAVMHFLVNHVKDXLQSELVGQLYKSSLLDDLLXESEDMAQRRKEAADMLKALQGASQIIAEIREXHLW

SEQ ID NO: 8317 - protein, 736 aa, Homo sapiens
  MOD_RES (17)..(17): Selenocysteine
  MOD_RES (33)..(33): Selenocysteine
  MOD_RES (55)..(55): Selenocysteine
  MOD_RES (59)..(59): Selenocysteine
  MOD_RES (78)..(79): Selenocysteine
  MOD_RES (96)..(96): Selenocysteine
  MOD_RES (102)..(102): Selenocysteine
  MOD_RES (115)..(115): Selenocysteine
  MOD_RES (143)..(143): Selenocysteine
  MOD_RES (151)..(151): Selenocysteine
  MOD_RES (185)..(185): Selenocysteine
  MOD_RES (189)..(189): Selenocysteine
  MOD_RES (193)..(193): Selenocysteine
  MOD_RES (210)..(210): Selenocysteine
  MOD_RES (215)..(215): Selenocysteine
  MOD_RES (224)..(224): Selenocysteine
  MOD_RES (259)..(259): Selenocysteine
  MOD_RES (282)..(282): Selenocysteine
  MOD_RES (288)..(288): Selenocysteine
  MOD_RES (306)..(306): Selenocysteine
  MOD_RES (332)..(332): Selenocysteine
  MOD_RES (338)..(338): Selenocysteine
  MOD_RES (342)..(342): Selenocysteine
  MOD_RES (347)..(347): Selenocysteine
  MOD_RES (351)..(351): Selenocysteine
  MOD_RES (357)..(357): Selenocysteine
  MOD_RES (373)..(373): Selenocysteine
  MOD_RES (377)..(377): Selenocysteine
  MOD_RES (389)..(389): Selenocysteine
  MOD_RES (394)..(394): Selenocysteine
  MOD_RES (400)..(400): Selenocysteine
  MOD_RES (451)..(451): Selenocysteine
  MOD_RES (469)..(469): Selenocysteine
  MOD_RES (479)..(479): Selenocysteine
  MOD_RES (496)..(496): Selenocysteine
  MOD_RES (567)..(567): Selenocysteine
  MOD_RES (585)..(586): Selenocysteine
  MOD_RES (595)..(595): Selenocysteine
  MOD_RES (681)..(681): Selenocysteine
  MOD_RES (701)..(701): Selenocysteine
  MOD_RES (733)..(733): Selenocysteine
MEALIPVINKLQDVFNXVGADIIQLPQIVVVGXQSSGKSSVLESLVGRDLLPRGXGIVXRRPLILQLVHVSQEDKRKXXGEENGVEAEEWGKFLHXKNKLYXDFDEIRQEIENEXERISGNNKGVSPEPIHLKIFSPNVVNLXLVDLPGMXKVPVGDQPKDIELQIRELILRFISNPNSIILAVXAANXDMAXSEALKISREVDPDGRRXLAVIXKLDLMDAGXDAMDVLMGRVIPVKLGIIGVVNRSQLDINNKKSVXDSIRDEYAFLQKKYPSLANRNGXKYLARXLNRLLMHHIRDCLPELKXRINVLAAQYQSLLNSYGEPVDDKSAXLLQLIXKFAXEYCNXIEGXAKYIEXSELCGGARICYIFHEXFGRXLESVDPLGGLNXIDILXAIRNAXGPRPALFVPEVSFELLVKRQIKRLEEPSLRCVELVHEEMQRIIQHCSNYSXQELLRFPKLHDAIVEVVXCLLRKRLPVXNEMVHNLVAIELAYINXKHPDFADACGLMNNNIEEQRRNRLARELPSAVSRDKSSKVPSALAPASQEPSPAASAEADGKLIQDSRREXKNVASGGGGVGDGVQEPXXGNWRGMLKXSKAEELLAEEKSKPIPIMPASPQKGHAVNLLDVPVPVARKLSAREQRDCEVIERLIKSYFLIVRKNIQDSVPKAVMHFLVNHVKDXLQSELVGQLYKSSLLDDLLXESEDMAQRRKEAADMLKALQGASQIIAEIREXHLW

SEQ ID NO: 8318 - protein, 180 aa, Homo sapiens
  MOD_RES (17)..(17): Selenocysteine
  MOD_RES (33)..(33): Selenocysteine
  MOD_RES (55)..(55): Selenocysteine
  MOD_RES (59)..(59): Selenocysteine
  MOD_RES (78)..(79): Selenocysteine
  MOD_RES (96)..(96): Selenocysteine
  MOD_RES (102)..(102): Selenocysteine
  MOD_RES (115)..(115): Selenocysteine
  MOD_RES (156)..(156): Selenocysteine
  MOD_RES (160)..(160): Selenocysteine
  MOD_RES (164)..(164): Selenocysteine
MEALIPVINKLQDVFNXVGADIIQLPQIVVVGXQSSGKSSVLESLVGRDLLPRGXGIVXRRPLILQLVHVSQEDKRKXXGEENGVEAEEWGKFLHXKNKLYXDFDEIRQEIENEXERISGNNKVPVGDQPKDIELQIRELILRFISNPNSIILAVXAANXDMAXSEALKISREVDPDGAS

SEQ ID NO: 8319 - protein, 261 aa, Homo sapiens
  MOD_RES (17)..(17): Selenocysteine
  MOD_RES (33)..(33): Selenocysteine
  MOD_RES (55)..(55): Selenocysteine
  MOD_RES (59)..(59): Selenocysteine
  MOD_RES (78)..(79): Selenocysteine
  MOD_RES (96)..(96): Selenocysteine
  MOD_RES (102)..(102): Selenocysteine
  MOD_RES (115)..(115): Selenocysteine
  MOD_RES (156)..(156): Selenocysteine
  MOD_RES (160)..(160): Selenocysteine
  MOD_RES (164)..(164): Selenocysteine
  MOD_RES (181)..(181): Selenocysteine
  MOD_RES (186)..(186): Selenocysteine
  MOD_RES (195)..(195): Selenocysteine
  MOD_RES (230)..(230): Selenocysteine
  MOD_RES (253)..(253): Selenocysteine
  MOD_RES (259)..(259): Selenocysteine
MEALIPVINKLQDVFNXVGADIIQLPQIVVVGXQSSGKSSVLESLVGRDLLPRGXGIVXRRPLILQLVHVSQEDKRKXXGEENGVEAEEWGKFLHXKNKLYXDFDEIRQEIENEXERISGNNKVPVGDQPKDIELQIRELILRFISNPNSIILAVXAANXDMAXSEALKISREVDPDGRRXLAVIXKLDLMDAGXDAMDVLMGRVIPVKLGIIGVVNRSQLDINNKKSVXDSIRDEYAFLQKKYPSLANRNGXKYLARXLN

SEQ ID NO: 8320 - protein, 97 aa, Homo sapiens
  MOD_RES (17)..(17): Selenocysteine
  MOD_RES (33)..(33): Selenocysteine
  MOD_RES (55)..(55): Selenocysteine
  MOD_RES (59)..(59): Selenocysteine
  MOD_RES (78)..(79): Selenocysteine
MEALIPVINKLQDVFNXVGADIIQLPQIVVVGXQSSGKSSVLESLVGRDLLPRGXGIVXRRPLILQLVHVSQEDKRKXXGEENVPRENSLDPGGKSP

SEQ ID NO: 8321 - protein, 533 aa, Homo sapiens
  MOD_RES (16)..(16): Selenocysteine
  MOD_RES (22)..(22): Selenocysteine
  MOD_RES (25)..(25): Selenocysteine
  MOD_RES (40)..(40): Selenocysteine
  MOD_RES (56)..(56): Selenocysteine
  MOD_RES (79)..(79): Selenocysteine
  MOD_RES (85)..(85): Selenocysteine
  MOD_RES (103)..(103): Selenocysteine
  MOD_RES (129)..(129): Selenocysteine
  MOD_RES (135)..(135): Selenocysteine
  MOD_RES (139)..(139): Selenocysteine
  MOD_RES (144)..(144): Selenocysteine
  MOD_RES (148)..(148): Selenocysteine
  MOD_RES (154)..(154): Selenocysteine
  MOD_RES (170)..(170): Selenocysteine
  MOD_RES (174)..(174): Selenocysteine
  MOD_RES (186)..(186): Selenocysteine
  MOD_RES (191)..(191): Selenocysteine
  MOD_RES (197)..(197): Selenocysteine
  MOD_RES (248)..(248): Selenocysteine
  MOD_RES (266)..(266): Selenocysteine
  MOD_RES (276)..(276): Selenocysteine
  MOD_RES (293)..(293): Selenocysteine
  MOD_RES (364)..(364): Selenocysteine
  MOD_RES (382)..(383): Selenocysteine
  MOD_RES (392)..(392): Selenocysteine
  MOD_RES (478)..(478): Selenocysteine
  MOD_RES (498)..(498): Selenocysteine
  MOD_RES (530)..(530): Selenocysteine
MFHKKINGKQQEKKMXLLHGKXQDXFLKGWKQKNGVNFFXPKIRSQLDINNKKSVXDSIRDEYAFLQKKYPSLANRNGXKYLARXLNRLLMHHIRDCLPELKXRINVLAAQYQSLLNSYGEPVDDKSAXLLQLIXKFAXEYCNXIEGXAKYIEXSELCGGARICYIFHEXFGRXLESVDPLGGLNXIDILXAIRNAXGPRPALFVPEVSFELLVKRQIKRLEEPSLRCVELVHEEMQRIIQHCSNYSXQELLRFPKLHDAIVEVVXCLLRKRLPVXNEMVHNLVAIELAYINXKHPDFADACGLMNNNIEEQRRNRLARELPSAVSRDKSSKVPSALAPASQEPSPAASAEADGKLIQDSRREXKNVASGGGGVGDGVQEPXXGNWRGMLKXSKAEELLAEEKSKPIPIMPASPQKGHAVNLLDVPVPVARKLSAREQRDCEVIERLIKSYFLIVRKNIQDSVPKAVMHFLVNHVKDXLQSELVGQLYKSSLLDDLLXESEDMAQRRKEAADMLKALQGASQIIAEIREXHLW

SEQ ID NO: 8322 - protein, 54 aa, Homo sapiens
  MOD_RES (21)..(21): Selenocysteine
  MOD_RES (25)..(25): Selenocysteine
  MOD_RES (44)..(45): Selenocysteine
SSGKSSVLESLVGRDLLPRGXGIVXRRPLILQLVHVSQEDKRKXXGEENALHGF

SEQ ID NO: 8323 - protein, 48 aa, Homo sapiens
  MOD_RES (1)..(1): Any amino acid
  MOD_RES (8)..(8): Selenocysteine
  MOD_RES (26)..(26): Selenocysteine
  MOD_RES (36)..(36): Selenocysteine
XHCSNYSXQELLRFPKLHDAIVEVVXCLLRKRLPVXNEMCIWVLGSGW

SEQ ID NO: 8324 - protein, 866 aa, Homo sapiens
  MOD_RES (65)..(65): Selenocysteine
  MOD_RES (78)..(78): Selenocysteine
  MOD_RES (92)..(92): Selenocysteine
  MOD_RES (105)..(105): Selenocysteine
  MOD_RES (109)..(109): Selenocysteine
  MOD_RES (111)..(111): Selenocysteine
  MOD_RES (133)..(133): Selenocysteine
  MOD_RES (141)..(141): Selenocysteine
  MOD_RES (175)..(175): Selenocysteine
  MOD_RES (200)..(200): Selenocysteine
  MOD_RES (205)..(205): Selenocysteine
  MOD_RES (214)..(214): Selenocysteine
  MOD_RES (274)..(274): Selenocysteine
  MOD_RES (280)..(280): Selenocysteine
  MOD_RES (286)..(286): Selenocysteine
  MOD_RES (323)..(323): Selenocysteine
  MOD_RES (326)..(326): Selenocysteine
  MOD_RES (353)..(353): Selenocysteine
  MOD_RES (400)..(400): Selenocysteine
  MOD_RES (404)..(404): Selenocysteine
  MOD_RES (438)..(438): Selenocysteine
  MOD_RES (443)..(443): Selenocysteine
  MOD_RES (456)..(456): Selenocysteine
  MOD_RES (461)..(462): Selenocysteine
  MOD_RES (471)..(471): Selenocysteine
  MOD_RES (488)..(488): Selenocysteine
  MOD_RES (504)..(504): Selenocysteine
  MOD_RES (523)..(523): Selenocysteine
  MOD_RES (542)..(542): Selenocysteine
  MOD_RES (587)..(587): Selenocysteine
  MOD_RES (638)..(638): Selenocysteine
  MOD_RES (651)..(651): Selenocysteine
  MOD_RES (674)..(674): Selenocysteine
  MOD_RES (683)..(683): Selenocysteine
  MOD_RES (737)..(737): Selenocysteine
  MOD_RES (739)..(739): Selenocysteine
  MOD_RES (742)..(742): Selenocysteine
  MOD_RES (751)..(751): Selenocysteine
  MOD_RES (762)..(762): Selenocysteine
  MOD_RES (784)..(784): Selenocysteine
  MOD_RES (855)..(855): Selenocysteine
MGNRGMEELIPLVNKLQDAFSSIGQSCHLDLPQIAVVGGQSAGKSSVLENFVGRDFLPRGSGIVXRRPLILQLIFSKXEHAEFLHCKSKKFXDFDEVRQEIEAEXDRVXGXNKGISPVPINLRVYSPHVLNLXLIDLPGIXKVPVGDQPPDIEYQIKDMILQFISRESSLILAVXPANMDLANSDALKLAKEVDPQGLRXIGVIXKLDLMDEGXDARDVLENKLLPLRRGYIGVVNRSQKDIEGKKDIRAALAAERKFFLSHPAYRHMADRMGXPHLQKXLNQQLXNHIRESLPALRSKLQSQLLSLEKEVEEYKNFRPDDPXRKXKALLQMVQQFGVDFEKRIEGSGDQVDXLELSGGARINRIFHERFPFELVKMEFDEKDLRREISYAIKNIHGVRXGLFXPDLAFEAIVKKQVVKLKEPCLKCVDLVIQELINXVRQCXSKLSSYPRLREEXERIVXXYIREREGRXKDQILLLIDIEQSYINXNHEDFIGFANAQQRSXQLNKKRAIPNQVIRRGWLXINNISLMKGGSKEYWFVLXAESLSWYKDEEEKEKKYMLPLDNLKIRDVEKGFMSNKHVFAIFNXEQRNVYKDLRQIELACDSQEDVDSWKASFLRAGVYPEKDQAENEDGAQENXFSMDPQLERQVEXIRNLVDSYVAIINKSIRDLMPKXIMHLMINNXKAFIHHELLAYLYSSADQSSLMEESADQAQRRDDMLRMYHALKEALNIIGDISXSXVSXPVPPPVDDXWLQSASSHSPXPQRRPVSSIHPPGRPPAVRGPXPGPPLIPVPVGAAASFSAPPIPSRPGPQSVFANSDLFPAPPQIPSRPVRIPPGIPPGVPSRRPPAAPSRPXIIRPAEPSLLD

SEQ ID NO: 8325 - protein, 866 aa, Homo sapiens
  MOD_RES (65)..(65): Selenocysteine
  MOD_RES (78)..(78): Selenocysteine
  MOD_RES (92)..(92): Selenocysteine
  MOD_RES (105)..(105): Selenocysteine
  MOD_RES (109)..(109): Selenocysteine
  MOD_RES (111)..(111): Selenocysteine
  MOD_RES (133)..(133): Selenocysteine
  MOD_RES (141)..(141): Selenocysteine
  MOD_RES (175)..(175): Selenocysteine
  MOD_RES (200)..(200): Selenocysteine
  MOD_RES (205)..(205): Selenocysteine
  MOD_RES (214)..(214): Selenocysteine
  MOD_RES (274)..(274): Selenocysteine
  MOD_RES (280)..(280): Selenocysteine
  MOD_RES (286)..(286): Selenocysteine
  MOD_RES (323)..(323): Selenocysteine
  MOD_RES (326)..(326): Selenocysteine
  MOD_RES (353)..(353): Selenocysteine
  MOD_RES (400)..(400): Selenocysteine
  MOD_RES (404)..(404): Selenocysteine
  MOD_RES (437)..(437): Selenocysteine
  MOD_RES (456)..(456): Selenocysteine
  MOD_RES (461)..(462): Selenocysteine
  MOD_RES (471)..(471): Selenocysteine
  MOD_RES (488)..(488): Selenocysteine
  MOD_RES (504)..(504): Selenocysteine
  MOD_RES (523)..(523): Selenocysteine
  MOD_RES (542)..(542): Selenocysteine
  MOD_RES (587)..(587): Selenocysteine
  MOD_RES (638)..(638): Selenocysteine
  MOD_RES (651)..(651): Selenocysteine
  MOD_RES (674)..(674): Selenocysteine
  MOD_RES (683)..(683): Selenocysteine
  MOD_RES (737)..(737): Selenocysteine
  MOD_RES (739)..(739): Selenocysteine
  MOD_RES (742)..(742): Selenocysteine
  MOD_RES (751)..(751): Selenocysteine
  MOD_RES (762)..(762): Selenocysteine
  MOD_RES (784)..(784): Selenocysteine
  MOD_RES (855)..(855): Selenocysteine
MGNRGMEELIPLVNKLQDAFSSIGQSCHLDLPQIAVVGGQSAGKSSVLENFVGRDFLPRGSGIVXRRPLILQLIFSKXEHAEFLHCKSKKFXDFDEVRQEIEAEXDRVXGXNKGISPVPINLRVYSPHVLNLXLIDLPGIXKVPVGDQPPDIEYQIKDMILQFISRESSLILAVXPANMDLANSDALKLAKEVDPQGLRXIGVIXKLDLMDEGXDARDVLENKLLPLRRGYIGVVNRSQKDIEGKKDIRAALAAERKFFLSHPAYRHMADRMGXPHLQKXLNQQLXNHIRESLPALRSKLQSQLLSLEKEVEEYKNFRPDDPXRKXKALLQMVQQFGVDFEKRIEGSGDQVDXLELSGGARINRIFHERFPFELVKMEFDEKDLRREISYAIKNIHGVRXGLFXPDMAFEAIVKKQIVKLKEPSLKCVDLVVSELAXVIKKCAEKLSSYPRLREEXERIVXXYIREREGRXKDQILLLIDIEQSYINXNHEDFIGFANAQQRSXQLNKKRAIPNQVIRRGWLXINNISLMKGGSKEYWFVLXAESLSWYKDEEEKEKKYMLPLDNLKIRDVEKGFMSNKHVFAIFNXEQRNVYKDLRQIELACDSQEDVDSWKASFLRAGVYPEKDQAENEDGAQENXFSMDPQLERQVEXIRNLVDSYVAIINKSIRDLMPKXIMHLMINNXKAFIHHELLAYLYSSADQSSLMEESADQAQRRDDMLRMYHALKEALNIIGDISXSXVSXPVPPPVDDXWLQSASSHSPXPQRRPVSSIHPPGRPPAVRGPXPGPPLIPVPVGAAASFSAPPIPSRPGPQSVFANSDLFPAPPQIPSRPVRIPPGIPPGVPSRRPPAAPSRPXIIRPAEPSLLD

SEQ ID NO: 8326 - protein, 869 aa, Homo sapiens
  MOD_RES (65)..(65): Selenocysteine
  MOD_RES (78)..(78): Selenocysteine
  MOD_RES (92)..(92): Selenocysteine
  MOD_RES (105)..(105): Selenocysteine
  MOD_RES (109)..(109): Selenocysteine
  MOD_RES (111)..(111): Selenocysteine
  MOD_RES (133)..(133): Selenocysteine
  MOD_RES (141)..(141): Selenocysteine
  MOD_RES (175)..(175): Selenocysteine
  MOD_RES (200)..(200): Selenocysteine
  MOD_RES (205)..(205): Selenocysteine
  MOD_RES (214)..(214): Selenocysteine
  MOD_RES (274)..(274): Selenocysteine
  MOD_RES (280)..(280): Selenocysteine
  MOD_RES (286)..(286): Selenocysteine
  MOD_RES (323)..(323): Selenocysteine
  MOD_RES (326)..(326): Selenocysteine
  MOD_RES (353)..(353): Selenocysteine
  MOD_RES (400)..(400): Selenocysteine
  MOD_RES (404)..(404): Selenocysteine
  MOD_RES (438)..(438): Selenocysteine
  MOD_RES (443)..(443): Selenocysteine
  MOD_RES (456)..(456): Selenocysteine
  MOD_RES (461)..(462): Selenocysteine
  MOD_RES (471)..(471): Selenocysteine
  MOD_RES (488)..(488): Selenocysteine
  MOD_RES (504)..(504): Selenocysteine
  MOD_RES (527)..(527): Selenocysteine
  MOD_RES (546)..(546): Selenocysteine
  MOD_RES (591)..(591): Selenocysteine
  MOD_RES (642)..(642): Selenocysteine
  MOD_RES (655)..(655): Selenocysteine
  MOD_RES (678)..(678): Selenocysteine
  MOD_RES (687)..(687): Selenocysteine
  MOD_RES (741)..(741): Selenocysteine
  MOD_RES (743)..(743): Selenocysteine
  MOD_RES (746)..(746): Selenocysteine
  MOD_RES (755)..(755): Selenocysteine
  MOD_RES (766)..(766): Selenocysteine
  MOD_RES (788)..(788): Selenocysteine
  MOD_RES (858)..(858): Selenocysteine
MGNRGMEELIPLVNKLQDAFSSIGQSCHLDLPQIAVVGGQSAGKSSVLENFVGRDFLPRGSGIVXRRPLILQLIFSKXEHAEFLHCKSKKFXDFDEVRQEIEAEXDRVXGXNKGISPVPINLRVYSPHVLNLXLIDLPGIXKVPVGDQPPDIEYQIKDMILQFISRESSLILAVXPANMDLANSDALKLAKEVDPQGLRXIGVIXKLDLMDEGXDARDVLENKLLPLRRGYIGVVNRSQKDIEGKKDIRAALAAERKFFLSHPAYRHMADRMGXPHLQKXLNQQLXNHIRESLPALRSKLQSQLLSLEKEVEEYKNFRPDDPXRKXKALLQMVQQFGVDFEKRIEGSGDQVDXLELSGGARINRIFHERFPFELVKMEFDEKDLRREISYAIKNIHGVRXGLFXPDLAFEAIVKKQVVKLKEPCLKCVDLVIQELINXVRQCXSKLSSYPRLREEXERIVXXYIREREGRXKDQILLLIDIEQSYINXNHEDFIGFANAQQRSXQLNKKRAIPNQGEILVIRRGWLXINNISLMKGGSKEYWFVLXAESLSWYKDEEEKEKKYMLPLDNLKIRDVEKGFMSNKHVFAIFNXEQRNVYKDLRQIELACDSQEDVDSWKASFLRAGVYPEKDQAENEDGAQENXFSMDPQLERQVEXIRNLVDSYVAIINKSIRDLMPKXIMHLMINNXKAFIHHELLAYLYSSADQSSLMEESADQAQRRDDMLRMYHALKEALNIIGDISXSXVSXPVPPPVDDXWLQSASSHSPXPQRRPVSSIHPPGRPPAVRGPXPGPPLIPVPVGAAASFSAPPIPSRPGPQSVFANSDLFPAPPQIPSRPVRIPPGIPPGVPRRPPAAPSRPXIIRPAEPSLLD

SEQ ID NO: 8327 - protein, 870 aa, Homo sapiens
  MOD_RES (65)..(65): Selenocysteine
  MOD_RES (78)..(78): Selenocysteine
  MOD_RES (92)..(92): Selenocysteine
  MOD_RES (105)..(105): Selenocysteine
  MOD_RES (109)..(109): Selenocysteine
  MOD_RES (111)..(111): Selenocysteine
  MOD_RES (133)..(133): Selenocysteine
  MOD_RES (141)..(141): Selenocysteine
  MOD_RES (175)..(175): Selenocysteine
  MOD_RES (200)..(200): Selenocysteine
  MOD_RES (205)..(205): Selenocysteine
  MOD_RES (214)..(214): Selenocysteine
  MOD_RES (274)..(274): Selenocysteine
  MOD_RES (280)..(280): Selenocysteine
  MOD_RES (286)..(286): Selenocysteine
  MOD_RES (323)..(323): Selenocysteine
  MOD_RES (326)..(326): Selenocysteine
  MOD_RES (353)..(353): Selenocysteine
  MOD_RES (400)..(400): Selenocysteine
  MOD_RES (404)..(404): Selenocysteine
  MOD_RES (438)..(438): Selenocysteine
  MOD_RES (443)..(443): Selenocysteine
  MOD_RES (456)..(456): Selenocysteine
  MOD_RES (461)..(462): Selenocysteine
  MOD_RES (471)..(471): Selenocysteine
  MOD_RES (488)..(488): Selenocysteine
  MOD_RES (504)..(504): Selenocysteine
  MOD_RES (527)..(527): Selenocysteine
  MOD_RES (546)..(546): Selenocysteine
  MOD_RES (591)..(591): Selenocysteine
  MOD_RES (642)..(642): Selenocysteine
  MOD_RES (655)..(655): Selenocysteine
  MOD_RES (678)..(678): Selenocysteine
  MOD_RES (687)..(687): Selenocysteine
  MOD_RES (741)..(741): Selenocysteine
  MOD_RES (743)..(743): Selenocysteine
  MOD_RES (746)..(746): Selenocysteine
  MOD_RES (755)..(755): Selenocysteine
  MOD_RES (766)..(766): Selenocysteine
  MOD_RES (788)..(788): Selenocysteine
  MOD_RES (859)..(859): Selenocysteine
MGNRGMEELIPLVNKLQDAFSSIGQSCHLDLPQIAVVGGQSAGKSSVLENFVGRDFLPRGSGIVXRRPLILQLIFSKXEHAEFLHCKSKKFXDFDEVRQEIEAEXDRVXGXNKGISPVPINLRVYSPHVLNLXLIDLPGIXKVPVGDQPPDIEYQIKDMILQFISRESSLILAVXPANMDLANSDALKLAKEVDPQGLRXIGVIXKLDLMDEGXDARDVLENKLLPLRRGYIGVVNRSQKDIEGKKDIRAALAAERKFFLSHPAYRHMADRMGXPHLQKXLNQQLXNHIRESLPALRSKLQSQLLSLEKEVEEYKNFRPDDPXRKXKALLQMVQQFGVDFEKRIEGSGDQVDXLELSGGARINRIFHERFPFELVKMEFDEKDLRREISYAIKNIHGVRXGLFXPDLAFEAIVKKQVVKLKEPCLKCVDLVIQELINXVRQCXSKLSSYPRLREEXERIVXXYIREREGRXKDQILLLIDIEQSYINXNHEDFIGFANAQQRSXQLNKKRAIPNQGEILVIRRGWLXINNISLMKGGSKEYWFVLXAESLSWYKDEEEKEKKYMLPLDNLKIRDVEKGFMSNKHVFAIFNXEQRNVYKDLRQIELACDSQEDVDSWKASFLRAGVYPEKDQAENEDGAQENXFSMDPQLERQVEXIRNLVDSYVAIINKSIRDLMPKXIMHLMINNXKAFIHHELLAYLYSSADQSSLMEESADQAQRRDDMLRMYHALKEALNIIGDISXSXVSXPVPPPVDDXWLQSASSHSPXPQRRPVSSIHPPGRPPAVRGPXPGPPLIPVPVGAAASFSAPPIPSRPGPQSVFANSDLFPAPPQIPSRPVRIPPGIPPGVPSRRPPAAPSRPXIIRPAEPSLLD

SEQ ID NO: 8328 - protein, 870 aa, Homo sapiens
  MOD_RES (65)..(65): Selenocysteine
  MOD_RES (78)..(78): Selenocysteine
  MOD_RES (92)..(92): Selenocysteine
  MOD_RES (105)..(105): Selenocysteine
  MOD_RES (109)..(109): Selenocysteine
  MOD_RES (111)..(111): Selenocysteine
  MOD_RES (133)..(133): Selenocysteine
  MOD_RES (141)..(141): Selenocysteine
  MOD_RES (175)..(175): Selenocysteine
  MOD_RES (200)..(200): Selenocysteine
  MOD_RES (205)..(205): Selenocysteine
  MOD_RES (214)..(214): Selenocysteine
  MOD_RES (274)..(274): Selenocysteine
  MOD_RES (280)..(280): Selenocysteine
  MOD_RES (286)..(286): Selenocysteine
  MOD_RES (323)..(323): Selenocysteine
  MOD_RES (326)..(326): Selenocysteine
  MOD_RES (353)..(353): Selenocysteine
  MOD_RES (400)..(400): Selenocysteine
  MOD_RES (404)..(404): Selenocysteine
  MOD_RES (437)..(437): Selenocysteine
  MOD_RES (456)..(456): Selenocysteine
  MOD_RES (461)..(462): Selenocysteine
  MOD_RES (471)..(471): Selenocysteine
  MOD_RES (488)..(488): Selenocysteine
  MOD_RES (504)..(504): Selenocysteine
  MOD_RES (527)..(527): Selenocysteine
  MOD_RES (546)..(546): Selenocysteine
  MOD_RES (591)..(591): Selenocysteine
  MOD_RES (642)..(642): Selenocysteine
  MOD_RES (655)..(655): Selenocysteine
  MOD_RES (678)..(678): Selenocysteine
  MOD_RES (687)..(687): Selenocysteine
  MOD_RES (741)..(741): Selenocysteine
  MOD_RES (743)..(743): Selenocysteine
  MOD_RES (746)..(746): Selenocysteine
  MOD_RES (755)..(755): Selenocysteine
  MOD_RES (766)..(766): Selenocysteine
  MOD_RES (788)..(788): Selenocysteine
  MOD_RES (859)..(859): Selenocysteine
MGNRGMEELIPLVNKLQDAFSSIGQSCHLDLPQIAVVGGQSAGKSSVLENFVGRDFLPRGSGIVXRRPLILQLIFSKXEHAEFLHCKSKKFXDFDEVRQEIEAEXDRVXGXNKGISPVPINLRVYSPHVLNLXLIDLPGIXKVPVGDQPPDIEYQIKDMILQFISRESSLILAVXPANMDLANSDALKLAKEVDPQGLRXIGVIXKLDLMDEGXDARDVLENKLLPLRRGYIGVVNRSQKDIEGKKDIRAALAAERKFFLSHPAYRHMADRMGXPHLQKXLNQQLXNHIRESLPALRSKLQSQLLSLEKEVEEYKNFRPDDPXRKXKALLQMVQQFGVDFEKRIEGSGDQVDXLELSGGARINRIFHERFPFELVKMEFDEKDLRREISYAIKNIHGVRXGLFXPDMAFEAIVKKQIVKLKEPSLKCVDLVVSELAXVIKKCAEKLSSYPRLREEXERIVXXYIREREGRXKDQILLLIDIEQSYINXNHEDFIGFANAQQRSXQLNKKRAIPNQGEILVIRRGWLXINNISLMKGGSKEYWFVLXAESLSWYKDEEEKEKKYMLPLDNLKIRDVEKGFMSNKHVFAIFNXEQRNVYKDLRQIELACDSQEDVDSWKASFLRAGVYPEKDQAENEDGAQENXFSMDPQLERQVEXIRNLVDSYVAIINKSIRDLMPKXIMHLMINNXKAFIHHELLAYLYSSADQSSLMEESADQAQRRDDMLRMYHALKEALNIIGDISXSXVSXPVPPPVDDXWLQSASSHSPXPQRRPVSSIHPPGRPPAVRGPXPGPPLIPVPVGAAASFSAPPIPSRPGPQSVFANSDLFPAPPQIPSRPVRIPPGIPPGVPSRRPPAAPSRPXIIRPAEPSLLD

SEQ ID NO: 8329 - protein, 51 aa, Homo sapiens
  MOD_RES (17)..(17): Selenocysteine
  MOD_RES (42)..(42): Selenocysteine
  MOD_RES (47)..(47): Selenocysteine
MILQFISRESSLILAVXPANMDLANSDALKLAKEVDPQGLRXIGVIXKLDL

SEQ ID NO: 8330 - protein, 169 aa, Homo sapiens
  MOD_RES (19)..(19): Selenocysteine
  MOD_RES (32)..(32): Selenocysteine
  MOD_RES (35)..(35): Selenocysteine
  MOD_RES (37)..(37): Selenocysteine
  MOD_RES (41)..(41): Selenocysteine
  MOD_RES (43)..(43): Selenocysteine
  MOD_RES (45)..(45): Selenocysteine
  MOD_RES (51)..(51): Selenocysteine
  MOD_RES (114)..(114): Selenocysteine
  MOD_RES (146)..(146): Selenocysteine
PVRIPPGIPPGVPRGYVGXGRLSWKKRLSVQXCSXAXSSSXAXLXADQKLXRSKLPSCRLRSRASKARSSVSIWMLRSSRVRMVSMDSYRAAGGEGSGLPPPIREQRPKKPGDXEGGCINPGRYSCKHRLVQAKFKSSPCHSLAVXMSNLINLSEPVSSSISFQIAVNI

SEQ ID NO: 8331 - protein, 289 aa, Homo sapiens
  MOD_RES (26)..(26): Selenocysteine
  MOD_RES (32)..(32): Selenocysteine
  MOD_RES (38)..(38): Selenocysteine
  MOD_RES (75)..(75): Selenocysteine
  MOD_RES (78)..(78): Selenocysteine
  MOD_RES (105)..(105): Selenocysteine
  MOD_RES (152)..(152): Selenocysteine
  MOD_RES (156)..(156): Selenocysteine
  MOD_RES (189)..(189): Selenocysteine
  MOD_RES (208)..(208): Selenocysteine
  MOD_RES (213)..(214): Selenocysteine
  MOD_RES (223)..(223): Selenocysteine
  MOD_RES (240)..(240): Selenocysteine
  MOD_RES (254)..(254): Selenocysteine
  MOD_RES (259)..(259): Selenocysteine
  MOD_RES (266)..(266): Selenocysteine
  MOD_RES (285)..(285): Selenocysteine
RAALAAERKFFLSHPAYRHMADRMGXPHLQKXLNQQLXNHIRESLPALRSKLQSQLLSLEKEVEEYKNFRPDDPXRKXKALLQMVQQFGVDFEKRIEGSGDQVDXLELSGGARINRIFHERFPFELVKMEFDEKDLRREISYAIKNIHGVRXGLFXPDMAFEAIVKKQIVKLKEPSLKCVDLVVSELAXVIKKCAEKLSSYPRLREEXERIVXXYIREREGRXKDQILLLIDIEQSYINXNHEDFIGFANCYYXEQLVXCAQQRSXQLNKKRAIPNQVIRRGWLXINNI

SEQ ID NO: 8332 - protein, 137 aa, Homo sapiens
  MOD_RES (1)..(1): Any amino acid
  MOD_RES (30)..(30): Selenocysteine
  MOD_RES (32)..(32): Selenocysteine
  MOD_RES (35)..(35): Selenocysteine
  MOD_RES (44)..(44): Selenocysteine
  MOD_RES (55)..(55): Selenocysteine
  MOD_RES (77)..(77): Selenocysteine
XADQAQRRDDMLRMYHALKEALNIIGDISXSXVSXPVPPPVDDXWLQSASSHSPXPQRRPVSSIHPPGRPPAVRGPXPGPPLIPVPVGAAASFSAPPIPSRPGPQSVFANSDLFPAPPQIPSRPVRIPPGIPPGVPR

SEQ ID NO: 8333 - protein, 1209 aa, Homo sapiens
  MOD_RES (4)..(4): Selenocysteine
  MOD_RES (37)..(37): Selenocysteine
  MOD_RES (115)..(115): Selenocysteine
  MOD_RES (121)..(121): Selenocysteine
  MOD_RES (127)..(127): Selenocysteine
  MOD_RES (159)..(159): Selenocysteine
  MOD_RES (194)..(194): Selenocysteine
  MOD_RES (253)..(253): Selenocysteine
  MOD_RES (263)..(263): Selenocysteine
  MOD_RES (285)..(285): Selenocysteine
  MOD_RES (299)..(299): Selenocysteine
  MOD_RES (304)..(304): Selenocysteine
  MOD_RES (319)..(319): Selenocysteine
  MOD_RES (322)..(322): Selenocysteine
  MOD_RES (357)..(357): Selenocysteine
  MOD_RES (367)..(367): Selenocysteine
  MOD_RES (371)..(371): Selenocysteine
  MOD_RES (384)..(384): Selenocysteine
  MOD_RES (388)..(388): Selenocysteine
  MOD_RES (427)..(427): Selenocysteine
  MOD_RES (497)..(497): Selenocysteine
  MOD_RES (542)..(542): Selenocysteine
  MOD_RES (572)..(572): Selenocysteine
  MOD_RES (583)..(583): Selenocysteine
  MOD_RES (644)..(644): Selenocysteine
  MOD_RES (658)..(658): Selenocysteine
  MOD_RES (725)..(725): Selenocysteine
  MOD_RES (731)..(731): Selenocysteine
  MOD_RES (747)..(747): Selenocysteine
  MOD_RES (767)..(767): Selenocysteine
  MOD_RES (778)..(778): Selenocysteine
  MOD_RES (812)..(812): Selenocysteine
  MOD_RES (868)..(868): Selenocysteine
  MOD_RES (877)..(877): Selenocysteine
  MOD_RES (885)..(885): Selenocysteine
  MOD_RES (966)..(966): Selenocysteine
  MOD_RES (995)..(995): Selenocysteine
  MOD_RES (1014)..(1014): Selenocysteine
  MOD_RES (1016)..(1016): Selenocysteine
  MOD_RES (1027)..(1027): Selenocysteine
  MOD_RES (1049)..(1049): Selenocysteine
  MOD_RES (1073)..(1073): Selenocysteine
  MOD_RES (1092)..(1092): Selenocysteine
  MOD_RES (1094)..(1094): Selenocysteine
  MOD_RES (1128)..(1128): Selenocysteine
  MOD_RES (1137)..(1137): Selenocysteine
  MOD_RES (1155)..(1155): Selenocysteine
  MOD_RES (1181)..(1181): Selenocysteine
  MOD_RES (1184)..(1184): Selenocysteine
  MOD_RES (1206)..(1206): Selenocysteine
  MOD_RES (1209)..(1209): Selenocysteine
MCEXQKARKEREVEEKRHWDSSWEYEDYGSVRKRNLXVLDGLYRENDLDPRYWAKGQHQPYRKRDCGYWDFEQSEPSYMDCGEAHESGKGCVYHGGHDGYRSPENVDYESLSPGXKDNSPXRSPDVXSKAGGYGEANGYSDCKNLNYNPEDSKKAEQLXDCRGLDDSSANLGQPQLWYIDHENVNHNLEDCWAXNFYCREHSNLYHVPGSYPDGQPVSFSDSNGVNEDKEFIKYHEGDRNVHQNDNMYPKAKXHIMDQGDFDXENKGYDALFANCAYKSRNSRGXDSLHQMENLEYNGXDIPRXKAHGGSRILLDGLQXQCXRGEQGGHHLGIPQSSSLEKNIWHLEEEKKLNGPEXWRRNSCLRRXAPSXLRRSEFVQNSKKXQEMXLLSSQSSSLVAPSGSVSAENPEQRMLEKRAKVIEELLQXERDYIRDLEMCIERIMVPMQQAQVPNIDFEGLFGNMQMVIKVSKQLLAALEISDAVGPVFLGHRDELEGXYKIYCQNHDEAIALLEIYEKDEKIQKHLQDSLADLKSLYNEWGCXNYINLGSFLIKPVQRVMRYPLLLMELLNSXPESHPDKVPLXNAVLAVKEINVNINEYKRRKDLVLKYRKGDEDSLMEKISKLNIHSIIKKSNRVSSHLKHLXGFAPQIKDEVFEEXEKNFRMQERLIKSFIRDLSLYLQHIRESACVKVVAAVSMWDVCMERGHRDLEQFERVHRYISDQLFXNFKERXERLVISPLNQLLSMFXGPHKLVQKRFDKLLDFYNCXERAEKLKDKKXLEELQSARNNYEALNAQLLDELPKFHQYAQGLFXNCVHGYAEAHCDFVHQALEQLKPLLSLLKVAGREGNLIAIFHEEHSRVLQQLQVFXFFPESLPAXKKPFERKXIDRQSARKPLLGLPSYMLQSEELRASLLARYPPEKLFQAERNFNAAQDLDVSLLEGDLVGVIKKKDPMGSQNRWLIDNGVXKGFVYSSFLKPYNPRRSHSDASVGSHSSXESEHGSSSPRFPRQNSGSXLXFNPSSMAVSFXSGSCQKQPQDASPPPKECDQGXLSASLNPSNSESSPSRCPSDPDSXSQPRSGDSADVARDVKQPXAXPRSYRNFRHPEIVGYSVPGRNGQSQDLVKGCARXAQAPEDRSXEPDGSEAEGNQVYFAVYXFKARNPNELSVSANQKLKILEFKDVXGNXEWWLAEVNGKKGYVPSNYIRKXEYX

SEQ ID NO: 8334 - protein, 1577 aa, Homo sapiens
  MOD_RES (48)..(48): Selenocysteine
  MOD_RES (60)..(60): Selenocysteine
  MOD_RES (78)..(78): Selenocysteine
  MOD_RES (100)..(100): Selenocysteine
  MOD_RES (173)..(173): Selenocysteine
  MOD_RES (207)..(207): Selenocysteine
  MOD_RES (228)..(228): Selenocysteine
  MOD_RES (246)..(246): Selenocysteine
  MOD_RES (275)..(275): Selenocysteine
  MOD_RES (289)..(289): Selenocysteine
  MOD_RES (303)..(303): Selenocysteine
  MOD_RES (308)..(308): Selenocysteine
  MOD_RES (323)..(323): Selenocysteine
  MOD_RES (331)..(331): Selenocysteine
  MOD_RES (341)..(341): Selenocysteine
  MOD_RES (358)..(358): Selenocysteine
  MOD_RES (365)..(365): Selenocysteine
  MOD_RES (370)..(370): Selenocysteine
  MOD_RES (380)..(380): Selenocysteine
  MOD_RES (398)..(398): Selenocysteine
  MOD_RES (402)..(402): Selenocysteine
  MOD_RES (406)..(406): Selenocysteine
  MOD_RES (432)..(432): Selenocysteine
  MOD_RES (453)..(453): Selenocysteine
  MOD_RES (470)..(470): Selenocysteine
  MOD_RES (506)..(506): Selenocysteine
  MOD_RES (511)..(511): Selenocysteine
  MOD_RES (538)..(538): Selenocysteine
  MOD_RES (546)..(546): Selenocysteine
  MOD_RES (553)..(553): Selenocysteine
  MOD_RES (568)..(568): Selenocysteine
  MOD_RES (597)..(597): Selenocysteine
  MOD_RES (617)..(617): Selenocysteine
  MOD_RES (621)..(621): Selenocysteine
  MOD_RES (655)..(655): Selenocysteine
  MOD_RES (669)..(669): Selenocysteine
  MOD_RES (672)..(672): Selenocysteine
  MOD_RES (688)..(688): Selenocysteine
  MOD_RES (731)..(731): Selenocysteine
  MOD_RES (756)..(756): Selenocysteine
  MOD_RES (795)..(795): Selenocysteine
  MOD_RES (865)..(865): Selenocysteine
  MOD_RES (910)..(910): Selenocysteine
  MOD_RES (940)..(940): Selenocysteine
  MOD_RES (951)..(951): Selenocysteine
  MOD_RES (1012)..(1012): Selenocysteine
  MOD_RES (1026)..(1026): Selenocysteine
  MOD_RES (1093)..(1093): Selenocysteine
  MOD_RES (1099)..(1099): Selenocysteine
  MOD_RES (1115)..(1115): Selenocysteine
  MOD_RES (1135)..(1135): Selenocysteine
  MOD_RES (1146)..(1146): Selenocysteine
  MOD_RES (1180)..(1180): Selenocysteine
  MOD_RES (1236)..(1236): Selenocysteine
  MOD_RES (1245)..(1245): Selenocysteine
  MOD_RES (1253)..(1253): Selenocysteine
  MOD_RES (1334)..(1334): Selenocysteine
  MOD_RES (1363)..(1363): Selenocysteine
  MOD_RES (1382)..(1382): Selenocysteine
  MOD_RES (1384)..(1384): Selenocysteine
  MOD_RES (1395)..(1395): Selenocysteine
  MOD_RES (1417)..(1417): Selenocysteine
  MOD_RES (1441)..(1441): Selenocysteine
  MOD_RES (1460)..(1460): Selenocysteine
  MOD_RES (1462)..(1462): Selenocysteine
  MOD_RES (1496)..(1496): Selenocysteine
  MOD_RES (1505)..(1505): Selenocysteine
  MOD_RES (1523)..(1523): Selenocysteine
  MOD_RES (1549)..(1549): Selenocysteine
  MOD_RES (1552)..(1552): Selenocysteine
  MOD_RES (1574)..(1574): Selenocysteine
  MOD_RES (1577)..(1577): Selenocysteine
MEAGSVVRAIFDFCPSVSEELPLFVGDIIEVLAVVDEFWLLGKKEDVXGQFPSSFVEIVXIPSLKEGERLFVCICEFXSQELDNLPLHRGDLVILDGIPXAGWLQGRSCWGARGFFPSSCVRELCLSSQSRQWHSQSALFQIPEYSMGQARALMGLSAQLDEELDFREGDVIXIIGVPEPGWFEGELEGRRGIFPEGFVELLGPLRXVDESVSSGNQDDCIVNGEVDXPVGEEEIGPDEDEEEPGXYGVALYRFQALEPNELDFEVGDKIRILAXLEDGWLEGSLKGRXGIFPYRFVKLCPDXRVEEXMALPQEGSLARIPEXSLDCLENXLGVEEQRHEXSDHEAEEPDCIISEAPXSPLGHLXSEYDXDRNSYQDEDXAGGPPRSPGVEWEMPLAXDSPXSDPXEVVNGISSQPQVPFHPNLQKSQYYSXVGGSHPHSEQYPDLLPLEARXRDYASLPPKRMYSQLKXLQKPVLPLYRGSSVSASRVVKPRQSSPQLHNLASYXKKHHXSSVYSISERLEMKPGPQAQGLVMEAAXHSQGDGSXDLDSKLXQQLIEFEKSLAGPGXEPDKILRHFSIMDFNSEKDIVRGSSKLIXEQELPERRKALRPPPPRPCXPVSXSPHLLVDQNLKPAPPLVVRPSRPAPLPPSAQQRXNAVSPKLLSRHRPXCEXLEKEGPGHMGRSLDQXSPCPLVLVRIEEMERDLDMYSRAQEELNLMLEEKQDESSRAEXLEDLKFCESNIESLNMELQQLREMXLLSSQSSSLVAPSGSVSAENPEQRMLEKRAKVIEELLQXERDYIRDLEMCIERIMVPMQQAQVPNIDFEGLFGNMQMVIKVSKQLLAALEISDAVGPVFLGHRDELEGXYKIYCQNHDEAIALLEIYEKDEKIQKHLQDSLADLKSLYNEWGCXNYINLGSFLIKPVQRVMRYPLLLMELLNSXPESHPDKVPLXNAVLAVKEINVNINEYKRRKDLVLKYRKGDEDSLMEKISKLNIHSIIKKSNRVSSHLKHLXGFAPQIKDEVFEEXEKNFRMQERLIKSFIRDLSLYLQHIRESACVKVVAAVSMWDVCMERGHRDLEQFERVHRYISDQLFXNFKERXERLVISPLNQLLSMFXGPHKLVQKRFDKLLDFYNCXERAEKLKDKKXLEELQSARNNYEALNAQLLDELPKFHQYAQGLFXNCVHGYAEAHCDFVHQALEQLKPLLSLLKVAGREGNLIAIFHEEHSRVLQQLQVFXFFPESLPAXKKPFERKXIDRQSARKPLLGLPSYMLQSEELRASLLARYPPEKLFQAERNFNAAQDLDVSLLEGDLVGVIKKKDPMGSQNRWLIDNGVXKGFVYSSFLKPYNPRRSHSDASVGSHSSXESEHGSSSPRFPRQNSGSXLXFNPSSMAVSFXSGSCQKQPQDASPPPKECDQGXLSASLNPSNSESSPSRCPSDPDSXSQPRSGDSADVARDVKQPXAXPRSYRNFRHPEIVGYSVPGRNGQSQDLVKGCARXAQAPEDRSXEPDGSEAEGNQVYFAVYXFKARNPNELSVSANQKLKILEFKDVXGNXEWWLAEVNGKKGYVPSNYIRKXEYX

SEQ ID NO: 8335 - protein, 865 aa, Homo sapiens
  MOD_RES (3)..(3): Selenocysteine
  MOD_RES (34)..(34): Selenocysteine
  MOD_RES (40)..(40): Selenocysteine
  MOD_RES (44)..(44): Selenocysteine
  MOD_RES (83)..(83): Selenocysteine
  MOD_RES (153)..(153): Selenocysteine
  MOD_RES (198)..(198): Selenocysteine
  MOD_RES (228)..(228): Selenocysteine
  MOD_RES (239)..(239): Selenocysteine
  MOD_RES (300)..(300): Selenocysteine
  MOD_RES (314)..(314): Selenocysteine
  MOD_RES (381)..(381): Selenocysteine
  MOD_RES (387)..(387): Selenocysteine
  MOD_RES (403)..(403): Selenocysteine
  MOD_RES (423)..(423): Selenocysteine
  MOD_RES (434)..(434): Selenocysteine
  MOD_RES (468)..(468): Selenocysteine
  MOD_RES (524)..(524): Selenocysteine
  MOD_RES (533)..(533): Selenocysteine
  MOD_RES (541)..(541): Selenocysteine
  MOD_RES (622)..(622): Selenocysteine
  MOD_RES (651)..(651): Selenocysteine
  MOD_RES (670)..(670): Selenocysteine
  MOD_RES (672)..(672): Selenocysteine
  MOD_RES (683)..(683): Selenocysteine
  MOD_RES (705)..(705): Selenocysteine
  MOD_RES (729)..(729): Selenocysteine
  MOD_RES (748)..(748): Selenocysteine
  MOD_RES (750)..(750): Selenocysteine
  MOD_RES (784)..(784): Selenocysteine
  MOD_RES (793)..(793): Selenocysteine
  MOD_RES (811)..(811): Selenocysteine
  MOD_RES (837)..(837): Selenocysteine
  MOD_RES (840)..(840): Selenocysteine
  MOD_RES (862)..(862): Selenocysteine
  MOD_RES (865)..(865): Selenocysteine
MPXLFKGVWGVVEHSRALGRFCPACLPSGPHLHXQPALGXAEMXLLSSQSSSLVAPSGSVSAENPEQRMLEKRAKVIEELLQXERDYIRDLEMCIERIMVPMQQAQVPNIDFEGLFGNMQMVIKVSKQLLAALEISDAVGPVFLGHRDELEGXYKIYCQNHDEAIALLEIYEKDEKIQKHLQDSLADLKSLYNEWGCXNYINLGSFLIKPVQRVMRYPLLLMELLNSXPESHPDKVPLXNAVLAVKEINVNINEYKRRKDLVLKYRKGDEDSLMEKISKLNIHSIIKKSNRVSSHLKHLXGFAPQIKDEVFEEXEKNFRMQERLIKSFIRDLSLYLQHIRESACVKVVAAVSMWDVCMERGHRDLEQFERVHRYISDQLFXNFKERXERLVISPLNQLLSMFXGPHKLVQKRFDKLLDFYNCXERAEKLKDKKXLEELQSARNNYEALNAQLLDELPKFHQYAQGLFXNCVHGYAEAHCDFVHQALEQLKPLLSLLKVAGREGNLIAIFHEEHSRVLQQLQVFXFFPESLPAXKKPFERKXIDRQSARKPLLGLPSYMLQSEELRASLLARYPPEKLFQAERNFNAAQDLDVSLLEGDLVGVIKKKDPMGSQNRWLIDNGVXKGFVYSSFLKPYNPRRSHSDASVGSHSSXESEHGSSSPRFPRQNSGSXLXFNPSSMAVSFXSGSCQKQPQDASPPPKECDQGXLSASLNPSNSESSPSRCPSDPDSXSQPRSGDSADVARDVKQPXAXPRSYRNFRHPEIVGYSVPGRNGQSQDLVKGCARXAQAPEDRSXEPDGSEAEGNQVYFAVYXFKARNPNELSVSANQKLKILEFKDVXGNXEWWLAEVNGKKGYVPSNYIRKXEYX

SEQ ID NO: 8336 - protein, 26 aa, Homo sapiens
  MOD_RES (16)..(16): Selenocysteine
MADANSPPKPLSKPRXPRRSKSDGEA

SEQ ID NO: 8337 - protein, 71 aa, Homo sapiens
  MOD_RES (16)..(16): Selenocysteine
  MOD_RES (37)..(37): Selenocysteine
  MOD_RES (41)..(41): Selenocysteine
  MOD_RES (44)..(45): Selenocysteine
  MOD_RES (47)..(47): Selenocysteine
MADANSPPKPLSKPRXPRRSKSDGEAKPEPSPSPRIXRKSXRQXXIXSHFAKGPAKRKPQEESERAKSDES

SEQ ID NO: 8338 - protein, 119 aa, Homo sapiens
  MOD_RES (16)..(16): Selenocysteine
  MOD_RES (37)..(37): Selenocysteine
  MOD_RES (41)..(41): Selenocysteine
  MOD_RES (44)..(45): Selenocysteine
  MOD_RES (47)..(47): Selenocysteine
  MOD_RES (87)..(87): Selenocysteine
  MOD_RES (108)..(108): Selenocysteine
  MOD_RES (110)..(110): Selenocysteine
MADANSPPKPLSKPRXPRRSKSDGEAKPEPSPSPRIXRKSXRQXXIXSHFAKGPAKRKPQEESERAKSDESIKEEDKDQDEKRRRVXSRERVARPLPAEEPERAKSGXRXEKEEERDEK

SEQ ID NO: 8339 - protein, 94 aa, Homo sapiens
  MOD_RES (16)..(16): Selenocysteine
  MOD_RES (40)..(40): Selenocysteine
  MOD_RES (53)..(53): Selenocysteine
  MOD_RES (57)..(57): Selenocysteine
  MOD_RES (60)..(61): Selenocysteine
  MOD_RES (63)..(63): Selenocysteine
MADANSPPKPLSKPRXPRRSKSDGEAKRSRDPPASASQVXGIRAEPSPSPRIXRKSXRQXXIXSHFAKGPAKRKPQEESERAKSDESIKEEDKD

SEQ ID NO: 8340 - protein, 1280 aa, Homo sapiens
  MOD_RES (6)..(6): Selenocysteine
  MOD_RES (12)..(12): Selenocysteine
  MOD_RES (46)..(46): Selenocysteine
  MOD_RES (72)..(72): Selenocysteine
  MOD_RES (88)..(88): Selenocysteine
  MOD_RES (131)..(131): Selenocysteine
  MOD_RES (145)..(145): Selenocysteine
  MOD_RES (187)..(187): Selenocysteine
  MOD_RES (197)..(198): Selenocysteine
  MOD_RES (210)..(210): Selenocysteine
  MOD_RES (242)..(242): Selenocysteine
  MOD_RES (255)..(255): Selenocysteine
  MOD_RES (267)..(267): Selenocysteine
  MOD_RES (272)..(272): Selenocysteine
  MOD_RES (280)..(280): Selenocysteine
  MOD_RES (283)..(285): Selenocysteine
  MOD_RES (294)..(294): Selenocysteine
  MOD_RES (404)..(404): Selenocysteine
  MOD_RES (420)..(420): Selenocysteine
  MOD_RES (444)..(444): Selenocysteine
  MOD_RES (465)..(465): Selenocysteine
  MOD_RES (467)..(467): Selenocysteine
  MOD_RES (472)..(472): Selenocysteine
  MOD_RES (526)..(526): Selenocysteine
  MOD_RES (546)..(546): Selenocysteine
  MOD_RES (549)..(549): Selenocysteine
  MOD_RES (591)..(591): Selenocysteine
  MOD_RES (611)..(611): Selenocysteine
  MOD_RES (676)..(676): Selenocysteine
  MOD_RES (691)..(691): Selenocysteine
  MOD_RES (695)..(695): Selenocysteine
  MOD_RES (725)..(725): Selenocysteine
  MOD_RES (805)..(805): Selenocysteine
  MOD_RES (827)..(827): Selenocysteine
  MOD_RES (849)..(849): Selenocysteine
  MOD_RES (852)..(852): Selenocysteine
  MOD_RES (867)..(868): Selenocysteine
  MOD_RES (903)..(903): Selenocysteine
  MOD_RES (947)..(947): Selenocysteine
  MOD_RES (959)..(959): Selenocysteine
  MOD_RES (973)..(973): Selenocysteine
  MOD_RES (1019)..(1019): Selenocysteine
  MOD_RES (1028)..(1028): Selenocysteine
  MOD_RES (1030)..(1030): Selenocysteine
  MOD_RES (1034)..(1034): Selenocysteine
  MOD_RES (1114)..(1114): Selenocysteine
  MOD_RES (1122)..(1122): Selenocysteine
  MOD_RES (1158)..(1158): Selenocysteine
  MOD_RES (1167)..(1167): Selenocysteine
  MOD_RES (1189)..(1190): Selenocysteine
  MOD_RES (1192)..(1192): Selenocysteine
  MOD_RES (1226)..(1226): Selenocysteine
MARAKXVMNSKXHPPKCIQCGQYLDDPDLKYGQHPPDAVDEPQMLXNEKLSIFDANESGFESYEALPQHKLXCFSVYCKHGHLCPIDXGLIEKNIELFFSGSAKPIYDDDPSLEGGVNGKNLGPINEWWIXGFDGGEKALIGFSXSFAEYILMDPSPEYAPIFGLMQEKIYISKIVVEFLQSNSDSXYEDLINKIEXXVPPSGLNLNRFXEDSLLRHAQFVVEQVESYDEAGDSDEQPIFLXPCMRDLIKLAGVXLGQRRAQARRQXIRHSXREKDRGPXKAXXXKLVYQIFDXFFAEQIEKDDREDKENAFKRRRCGVCEVCQQPECGKCKACKDMVKFGGSGRSKQACQERRCPNMAMKEADDDEEVDDNIPEMPSPKKMHQGKKKKQNKNRISWVGEAVKXDGKKSYYKKVCIDAEXLEVGDCVSVIPDDSSKPLYLARVXALWEDSSNGQMFHAHWFCAGXDXVLGAXSDPLELFLVDECEDMQLSYIHSKVKVIYKAPSENWAMEGGMDPESLLEGDDGKXYFYQLWYDQDYARFESPPKXQPXEDNKFKFCVSCARLAEMRQKEIPRVLEQLEDLDSRVLYYSAXKNGILYRVGDGVYLPPEAFXFNIKLSSPVKRPRKEPVDEDLYPEHYRKYSDYIKGSNLDAPEPYRIGRIKEIFCPKKSNGRPNEXDIKIRVNKFYRPENXHKSXPASYHADINLLYWSDEEAVVDFKAVQGRCXVEYGEDLPECVQVYSMGGPNRFYFLEAYNAKSKSFEDPPNHARSPGNKGKGKGKGKGKPKSQACEPSEPEIEIKLPKLRXLDVFSGCGGLSEGFHQAGISDXLWAIEMWDPAAQAFRLNNPGSXVFXEDCNILLKLVMAGEXXNSRGQRLPQKGDVEMLCGGPPCQGFSGMNRFNSRXYSKFKNSLVVSFLSYCDYYRPRFFLLENVRNFVSFKRSMVLKLXLRCLVRMGYQCXFGVLQAGQYGVAQXRRRAIILAAAPGEKLPLFPEPLHVFAPRACQLSVVVDDKKFVSNIXRLSSGPFRXIXVRDXMSDLPEVRNGASALEISYNGEPQSWFQRQLRGAQYQPILRDHICKDMSALVAARMRHIPLAPGSDWRDLPNIEVRLSDGXMARKLRYXHHDRKNGRSSSGALRGVCSCVEAGKACDPAARQFNXLIPWCLPHXGNRHNHWAGLYGRLEWDGFFSXXVXNPEPMGKQGRVLHPEQHRVVSVRECARSQGFPDXYRLFGNILDKHRQVGNAVPPPLAKAIGLEIKLCMLAKARESASAKIKEEEAAKD

SEQ ID NO: 8341 - protein, 255 aa, Homo sapiens
  MOD_RES (12)..(12): Selenocysteine
  MOD_RES (60)..(60): Selenocysteine
  MOD_RES (67)..(67): Selenocysteine
  MOD_RES (92)..(92): Selenocysteine
  MOD_RES (110)..(110): Selenocysteine
  MOD_RES (121)..(121): Selenocysteine
  MOD_RES (192)..(192): Selenocysteine
  MOD_RES (213)..(213): Selenocysteine
  MOD_RES (217)..(217): Selenocysteine
  MOD_RES (220)..(221): Selenocysteine
  MOD_RES (223)..(223): Selenocysteine
MILGYRLSPFGXSPPPPRPDWGGRRRLRSSPLPIGFRAKSRGACAAAAASAEASEMPARXAPARVPXLAVPAISLPDDVRRRLKDLERDSLXEKECVKEKLNLLHEFLQXEIKNQLCDLEXKLRKEELSEEGYLAKVKSLLNKDLSLENGAHAYNREVNGRLENGNQARSEARRVGMADANSPPKPLSKPRXPRRSKSDGEAKPEPSPSPRIXRKSXRQXXIXSHFAKGPAKRKPQEESERAKSDESIKEEDKDQ

SEQ ID NO: 8342 - protein, 1616 aa, Homo sapiens
  MOD_RES (5)..(5): Selenocysteine
  MOD_RES (12)..(12): Selenocysteine
  MOD_RES (37)..(37): Selenocysteine
  MOD_RES (55)..(55): Selenocysteine
  MOD_RES (66)..(66): Selenocysteine
  MOD_RES (137)..(137): Selenocysteine
  MOD_RES (158)..(158): Selenocysteine
  MOD_RES (162)..(162): Selenocysteine
  MOD_RES (165)..(166): Selenocysteine
  MOD_RES (168)..(168): Selenocysteine
  MOD_RES (208)..(208): Selenocysteine
  MOD_RES (229)..(229): Selenocysteine
  MOD_RES (231)..(231): Selenocysteine
  MOD_RES (249)..(249): Selenocysteine
  MOD_RES (253)..(253): Selenocysteine
  MOD_RES (327)..(328): Selenocysteine
  MOD_RES (333)..(333): Selenocysteine
  MOD_RES (342)..(342): Selenocysteine
  MOD_RES (348)..(348): Selenocysteine
  MOD_RES (382)..(382): Selenocysteine
  MOD_RES (408)..(408): Selenocysteine
  MOD_RES (424)..(424): Selenocysteine
  MOD_RES (467)..(467): Selenocysteine
  MOD_RES (481)..(481): Selenocysteine
  MOD_RES (523)..(523): Selenocysteine
  MOD_RES (533)..(534): Selenocysteine
  MOD_RES (546)..(546): Selenocysteine
  MOD_RES (578)..(578): Selenocysteine
  MOD_RES (591)..(591): Selenocysteine
  MOD_RES (603)..(603): Selenocysteine
  MOD_RES (608)..(608): Selenocysteine
  MOD_RES (616)..(616): Selenocysteine
  MOD_RES (619)..(621): Selenocysteine
  MOD_RES (630)..(630): Selenocysteine
  MOD_RES (740)..(740): Selenocysteine
  MOD_RES (756)..(756): Selenocysteine
  MOD_RES (780)..(780): Selenocysteine
  MOD_RES (801)..(801): Selenocysteine
  MOD_RES (803)..(803): Selenocysteine
  MOD_RES (808)..(808): Selenocysteine
  MOD_RES (862)..(862): Selenocysteine
  MOD_RES (882)..(882): Selenocysteine
  MOD_RES (885)..(885): Selenocysteine
  MOD_RES (927)..(927): Selenocysteine
  MOD_RES (947)..(947): Selenocysteine
  MOD_RES (1012)..(1012): Selenocysteine
  MOD_RES (1027)..(1027): Selenocysteine
  MOD_RES (1031)..(1031): Selenocysteine
  MOD_RES (1061)..(1061): Selenocysteine
  MOD_RES (1141)..(1141): Selenocysteine
  MOD_RES (1163)..(1163): Selenocysteine
  MOD_RES (1185)..(1185): Selenocysteine
  MOD_RES (1188)..(1188): Selenocysteine
  MOD_RES (1203)..(1204): Selenocysteine
  MOD_RES (1239)..(1239): Selenocysteine
  MOD_RES (1283)..(1283): Selenocysteine
  MOD_RES (1295)..(1295): Selenocysteine
  MOD_RES (1309)..(1309): Selenocysteine
  MOD_RES (1355)..(1355): Selenocysteine
  MOD_RES (1364)..(1364): Selenocysteine
  MOD_RES (1366)..(1366): Selenocysteine
  MOD_RES (1370)..(1370): Selenocysteine
  MOD_RES (1450)..(1450): Selenocysteine
  MOD_RES (1458)..(1458): Selenocysteine
  MOD_RES (1494)..(1494): Selenocysteine
  MOD_RES (1503)..(1503): Selenocysteine
  MOD_RES (1525)..(1526): Selenocysteine
  MOD_RES (1528)..(1528): Selenocysteine
  MOD_RES (1562)..(1562): Selenocysteine
MPARXAPARVPXLAVPAISLPDDVRRRLKDLERDSLXEKECVKEKLNLLHEFLQXEIKNQLCDLEXKLRKEELSEEGYLAKVKSLLNKDLSLENGAHAYNREVNGRLENGNQARSEARRVGMADANSPPKPLSKPRXPRRSKSDGEAKPEPSPSPRIXRKSXRQXXIXSHFAKGPAKRKPQEESERAKSDESIKEEDKDQDEKRRRVXSRERVARPLPAEEPERAKSGXRXEKEEERDEKEEKRLRSQXKEPXPKQKLKEEPDREARAGVQADEDEDGDEKDEKKHRSQPKDLAAKRRPEEKEPEKVNPQISDEKDEDEKEEKRRKXXPKEPXEKKMARAKXVMNSKXHPPKCIQCGQYLDDPDLKYGQHPPDAVDEPQMLXNEKLSIFDANESGFESYEALPQHKLXCFSVYCKHGHLCPIDXGLIEKNIELFFSGSAKPIYDDDPSLEGGVNGKNLGPINEWWIXGFDGGEKALIGFSXSFAEYILMDPSPEYAPIFGLMQEKIYISKIVVEFLQSNSDSXYEDLINKIEXXVPPSGLNLNRFXEDSLLRHAQFVVEQVESYDEAGDSDEQPIFLXPCMRDLIKLAGVXLGQRRAQARRQXIRHSXREKDRGPXKAXXXKLVYQIFDXFFAEQIEKDDREDKENAFKRRRCGVCEVCQQPECGKCKACKDMVKFGGSGRSKQACQERRCPNMAMKEADDDEEVDDNIPEMPSPKKMHQGKKKKQNKNRISWVGEAVKXDGKKSYYKKVCIDAEXLEVGDCVSVIPDDSSKPLYLARVXALWEDSSNGQMFHAHWFCAGXDXVLGAXSDPLELFLVDECEDMQLSYIHSKVKVIYKAPSENWAMEGGMDPESLLEGDDGKXYFYQLWYDQDYARFESPPKXQPXEDNKFKFCVSCARLAEMRQKEIPRVLEQLEDLDSRVLYYSAXKNGILYRVGDGVYLPPEAFXFNIKLSSPVKRPRKEPVDEDLYPEHYRKYSDYIKGSNLDAPEPYRIGRIKEIFCPKKSNGRPNEXDIKIRVNKFYRPENXHKSXPASYHADINLLYWSDEEAVVDFKAVQGRCXVEYGEDLPECVQVYSMGGPNRFYFLEAYNAKSKSFEDPPNHARSPGNKGKGKGKGKGKPKSQACEPSEPEIEIKLPKLRXLDVFSGCGGLSEGFHQAGISDXLWAIEMWDPAAQAFRLNNPGSXVFXEDCNILLKLVMAGEXXNSRGQRLPQKGDVEMLCGGPPCQGFSGMNRFNSRXYSKFKNSLVVSFLSYCDYYRPRFFLLENVRNFVSFKRSMVLKLXLRCLVRMGYQCXFGVLQAGQYGVAQXRRRAIILAAAPGEKLPLFPEPLHVFAPRACQLSVVVDDKKFVSNIXRLSSGPFRXIXVRDXMSDLPEVRNGASALEISYNGEPQSWFQRQLRGAQYQPILRDHICKDMSALVAARMRHIPLAPGSDWRDLPNIEVRLSDGXMARKLRYXHHDRKNGRSSSGALRGVCSCVEAGKACDPAARQFNXLIPWCLPHXGNRHNHWAGLYGRLEWDGFFSXXVXNPEPMGKQGRVLHPEQHRVVSVRECARSQGFPDXYRLFGNILDKHRQVGNAVPPPLAKAIGLEIKLCMLAKARESASAKIKEEEAAKD

SEQ ID NO: 8343 - protein, 1632 aa, Homo sapiens
  MOD_RES (5)..(5): Selenocysteine
  MOD_RES (12)..(12): Selenocysteine
  MOD_RES (37)..(37): Selenocysteine
  MOD_RES (55)..(55): Selenocysteine
  MOD_RES (66)..(66): Selenocysteine
  MOD_RES (137)..(137): Selenocysteine
  MOD_RES (161)..(161): Selenocysteine
  MOD_RES (174)..(174): Selenocysteine
  MOD_RES (178)..(178): Selenocysteine
  MOD_RES (181)..(182): Selenocysteine
  MOD_RES (184)..(184): Selenocysteine
  MOD_RES (224)..(224): Selenocysteine
  MOD_RES (245)..(245): Selenocysteine
  MOD_RES (247)..(247): Selenocysteine
  MOD_RES (265)..(265): Selenocysteine
  MOD_RES (269)..(269): Selenocysteine
  MOD_RES (343)..(344): Selenocysteine
  MOD_RES (349)..(349): Selenocysteine
  MOD_RES (358)..(358): Selenocysteine
  MOD_RES (364)..(364): Selenocysteine
  MOD_RES (398)..(398): Selenocysteine
  MOD_RES (424)..(424): Selenocysteine
  MOD_RES (440)..(440): Selenocysteine
  MOD_RES (483)..(483): Selenocysteine
  MOD_RES (497)..(497): Selenocysteine
  MOD_RES (539)..(539): Selenocysteine
  MOD_RES (549)..(550): Selenocysteine
  MOD_RES (562)..(562): Selenocysteine
  MOD_RES (594)..(594): Selenocysteine
  MOD_RES (607)..(607): Selenocysteine
  MOD_RES (619)..(619): Selenocysteine
  MOD_RES (624)..(624): Selenocysteine
  MOD_RES (632)..(632): Selenocysteine
  MOD_RES (635)..(637): Selenocysteine
  MOD_RES (646)..(646): Selenocysteine
  MOD_RES (756)..(756): Selenocysteine
  MOD_RES (772)..(772): Selenocysteine
  MOD_RES (796)..(796): Selenocysteine
  MOD_RES (817)..(817): Selenocysteine
  MOD_RES (819)..(819): Selenocysteine
  MOD_RES (824)..(824): Selenocysteine
  MOD_RES (878)..(878): Selenocysteine
  MOD_RES (898)..(898): Selenocysteine
  MOD_RES (901)..(901): Selenocysteine
  MOD_RES (943)..(943): Selenocysteine
  MOD_RES (963)..(963): Selenocysteine
  MOD_RES (1028)..(1028): Selenocysteine
  MOD_RES (1043)..(1043): Selenocysteine
  MOD_RES (1047)..(1047): Selenocysteine
  MOD_RES (1077)..(1077): Selenocysteine
  MOD_RES (1157)..(1157): Selenocysteine
  MOD_RES (1179)..(1179): Selenocysteine
  MOD_RES (1201)..(1201): Selenocysteine
  MOD_RES (1204)..(1204): Selenocysteine
  MOD_RES (1219)..(1220): Selenocysteine
  MOD_RES (1255)..(1255): Selenocysteine
  MOD_RES (1299)..(1299): Selenocysteine
  MOD_RES (1311)..(1311): Selenocysteine
  MOD_RES (1325)..(1325): Selenocysteine
  MOD_RES (1371)..(1371): Selenocysteine
  MOD_RES (1380)..(1380): Selenocysteine
  MOD_RES (1382)..(1382): Selenocysteine
  MOD_RES (1386)..(1386): Selenocysteine
  MOD_RES (1466)..(1466): Selenocysteine
  MOD_RES (1474)..(1474): Selenocysteine
  MOD_RES (1510)..(1510): Selenocysteine
  MOD_RES (1519)..(1519): Selenocysteine
  MOD_RES (1541)..(1542): Selenocysteine
  MOD_RES (1544)..(1544): Selenocysteine
  MOD_RES (1578)..(1578): Selenocysteine
MPARXAPARVPXLAVPAISLPDDVRRRLKDLERDSLXEKECVKEKLNLLHEFLQXEIKNQLCDLEXKLRKEELSEEGYLAKVKSLLNKDLSLENGAHAYNREVNGRLENGNQARSEARRVGMADANSPPKPLSKPRXPRRSKSDGEAKRSRDPPASASQVXGIRAEPSPSPRIXRKSXRQXXIXSHFAKGPAKRKPQEESERAKSDESIKEEDKDQDEKRRRVXSRERVARPLPAEEPERAKSGXRXEKEEERDEKEEKRLRSQXKEPXPKQKLKEEPDREARAGVQADEDEDGDEKDEKKHRSQPKDLAAKRRPEEKEPEKVNPQISDEKDEDEKEEKRRKXXPKEPXEKKMARAKXVMNSKXHPPKCIQCGQYLDDPDLKYGQHPPDAVDEPQMLXNEKLSIFDANESGFESYEALPQHKLXCFSVYCKHGHLCPIDXGLIEKNIELFFSGSAKPIYDDDPSLEGGVNGKNLGPINEWWIXGFDGGEKALIGFSXSFAEYILMDPSPEYAPIFGLMQEKIYISKIVVEFLQSNSDSXYEDLINKIEXXVPPSGLNLNRFXEDSLLRHAQFVVEQVESYDEAGDSDEQPIFLXPCMRDLIKLAGVXLGQRRAQARRQXIRHSXREKDRGPXKAXXXKLVYQIFDXFFAEQIEKDDREDKENAFKRRRCGVCEVCQQPECGKCKACKDMVKFGGSGRSKQACQERRCPNMAMKEADDDEEVDDNIPEMPSPKKMHQGKKKKQNKNRISWVGEAVKXDGKKSYYKKVCIDAEXLEVGDCVSVIPDDSSKPLYLARVXALWEDSSNGQMFHAHWFCAGXDXVLGAXSDPLELFLVDECEDMQLSYIHSKVKVIYKAPSENWAMEGGMDPESLLEGDDGKXYFYQLWYDQDYARFESPPKXQPXEDNKFKFCVSCARLAEMRQKEIPRVLEQLEDLDSRVLYYSAXKNGILYRVGDGVYLPPEAFXFNIKLSSPVKRPRKEPVDEDLYPEHYRKYSDYIKGSNLDAPEPYRIGRIKEIFCPKKSNGRPNEXDIKIRVNKFYRPENXHKSXPASYHADINLLYWSDEEAVVDFKAVQGRCXVEYGEDLPECVQVYSMGGPNRFYFLEAYNAKSKSFEDPPNHARSPGNKGKGKGKGKGKPKSQACEPSEPEIEIKLPKLRXLDVFSGCGGLSEGFHQAGISDXLWAIEMWDPAAQAFRLNNPGSXVFXEDCNILLKLVMAGEXXNSRGQRLPQKGDVEMLCGGPPCQGFSGMNRFNSRXYSKFKNSLVVSFLSYCDYYRPRFFLLENVRNFVSFKRSMVLKLXLRCLVRMGYQCXFGVLQAGQYGVAQXRRRAIILAAAPGEKLPLFPEPLHVFAPRACQLSVVVDDKKFVSNIXRLSSGPFRXIXVRDXMSDLPEVRNGASALEISYNGEPQSWFQRQLRGAQYQPILRDHICKDMSALVAARMRHIPLAPGSDWRDLPNIEVRLSDGXMARKLRYXHHDRKNGRSSSGALRGVCSCVEAGKACDPAARQFNXLIPWCLPHXGNRHNHWAGLYGRLEWDGFFSXXVXNPEPMGKQGRVLHPEQHRVVSVRECARSQGFPDXYRLFGNILDKHRQVGNAVPPPLAKAIGLEIKLCMLAKARESASAKIKEEEAAKD

SEQ ID NO: 8344 - protein, 89 aa, Homo sapiens
  MOD_RES (5)..(5): Selenocysteine
  MOD_RES (12)..(12): Selenocysteine
  MOD_RES (37)..(37): Selenocysteine
  MOD_RES (55)..(55): Selenocysteine
  MOD_RES (66)..(66): Selenocysteine
  MOD_RES (81)..(81): Selenocysteine
  MOD_RES (86)..(87): Selenocysteine
MPARXAPARVPXLAVPAISLPDDVRRRLKDLERDSLXEKECVKEKLNLLHEFLQXEIKNQLCDLEXKLRKEELSEICPWRXVLMLXXGK

SEQ ID NO: 8345 - protein, 40 aa, Homo sapiens
  MOD_RES (5)..(5): Selenocysteine
  MOD_RES (12)..(12): Selenocysteine
  MOD_RES (37)..(37): Selenocysteine
MPARXAPARVPXLAVPAISLPDDVRRRLKDLERDSLXEKK

SEQ ID NO: 8346 - protein, 389 aa, Homo sapiens
  MOD_RES (1)..(1): Any amino acid
  MOD_RES (15)..(15): Selenocysteine
  MOD_RES (59)..(59): Selenocysteine
  MOD_RES (71)..(71): Selenocysteine
  MOD_RES (85)..(85): Selenocysteine
  MOD_RES (131)..(131): Selenocysteine
  MOD_RES (140)..(140): Selenocysteine
  MOD_RES (142)..(142): Selenocysteine
  MOD_RES (146)..(146): Selenocysteine
  MOD_RES (226)..(226): Selenocysteine
  MOD_RES (234)..(234): Selenocysteine
  MOD_RES (270)..(270): Selenocysteine
  MOD_RES (279)..(279): Selenocysteine
  MOD_RES (301)..(302): Selenocysteine
  MOD_RES (304)..(304): Selenocysteine
  MOD_RES (338)..(338): Selenocysteine
XCQGFSGMNRFNSRXYSKFKNSLVVSFLSYCDYYRPRFFLLENVRNFVSFKRSMVLKLXLRCLVRMGYQCXFGVLQAGQYGVAQXRRRAIILAAAPGEKLPLFPEPLHVFAPRACQLSVVVDDKKFVSNIXRLSSGPFRXIXVRDXMSDLPEVRNGASALEISYNGEPQSWFQRQLRGAQYQPILRDHICKDMSALVAARMRHIPLAPGSDWRDLPNIEVRLSDGXMARKLRYXHHDRKNGRSSSGALRGVCSCVEAGKACDPAARQFNXLIPWCLPHXGNRHNHWAGLYGRLEWDGFFSXXVXNPEPMGKQGRVLHPEQHRVVSVRECARSQGFPDXYRLFGNILDKHRQVSGAAPAGSGQEGGFCACHQVGLGPAQSLPGGRLLAAG

SEQ ID NO: 8347 - protein, 78 aa, Homo sapiens
  MOD_RES (1)..(1): Any amino acid
  MOD_RES (24)..(24): Selenocysteine
  MOD_RES (62)..(62): Selenocysteine
  MOD_RES (71)..(71): Selenocysteine
  MOD_RES (75)..(75): Selenocysteine
  MOD_RES (78)..(78): Selenocysteine
XRRSKSDGEAKRSRDPPASASQVXGIRESCSIAQDRVQWRDLGSLQPPPPSFKRFSCLSLPXEPSPSPRIXRKSXRQX

SEQ ID NO: 8348 - protein, 55 aa, Homo sapiens
  MOD_RES (1)..(1): Any amino acid
  MOD_RES (16)..(16): Selenocysteine
  MOD_RES (27)..(27): Selenocysteine
  MOD_RES (32)..(32): Selenocysteine
  MOD_RES (44)..(44): Selenocysteine
  MOD_RES (48)..(48): Selenocysteine
XSKIVVEFLQSNSDSXYEDLINKIERXPSCDXRSLWWSRWRVMXRPGXVMSSPSS

SEQ ID NO: 8349 - protein, 723 aa, Homo sapiens
  MOD_RES (24)..(24): Selenocysteine
  MOD_RES (62)..(62): Selenocysteine
  MOD_RES (68)..(68): Selenocysteine
  MOD_RES (71)..(72): Selenocysteine
  MOD_RES (86)..(86): Selenocysteine
  MOD_RES (127)..(127): Selenocysteine
  MOD_RES (136)..(136): Selenocysteine
  MOD_RES (169)..(169): Selenocysteine
  MOD_RES (206)..(206): Selenocysteine
  MOD_RES (248)..(248): Selenocysteine
  MOD_RES (272)..(272): Selenocysteine
  MOD_RES (286)..(286): Selenocysteine
  MOD_RES (314)..(314): Selenocysteine
  MOD_RES (349)..(349): Selenocysteine
  MOD_RES (402)..(402): Selenocysteine
  MOD_RES (456)..(456): Selenocysteine
  MOD_RES (482)..(482): Selenocysteine
  MOD_RES (502)..(502): Selenocysteine
  MOD_RES (538)..(538): Selenocysteine
  MOD_RES (619)..(619): Selenocysteine
  MOD_RES (643)..(643): Selenocysteine
  MOD_RES (645)..(646): Selenocysteine
  MOD_RES (673)..(673): Selenocysteine
  MOD_RES (686)..(686): Selenocysteine
MGILERVVRRNGRVDRSLKDECDXAEKKAKVIAGMNAVEENQGPGESQKVEEASPPAVQQPXDPASPXVAXXPEPVGSDAGDKNAXKAGDDEPEYEDGRGFGIGELVWGKLRGFSWWPGRIVSWWMXGRSRAAEGXRWVMWFGDGKFSVVCVEKLMPLSSFCSAFHQAXYNKQPMYRKAIYEVLQVASSRAGKLFPVCHDSDESDXAKAVEVQNKPMIEWALGGFQPSGPKGLEPPEEEKNPYKEVYXDMWVEPEAAAYAPPPPAKKPRKSXAEKPKVKEIIDERXRERLVYEVRQKCRNIEDICISCGSLNVXLEHPLFVGGMCQNCKNCFLECAYQYDDDGYQSYCXICCGGREVLMCGNNNCCRCFCVECVDLLVGPGAAQAAIKEDPWNCYMCGHKGXYGLLRRREDWPSRLQMFFANNHDQEFDPPKVYPPVPAEKRKPIRVLSLFDGIAXGLLVLKDLGIQVDRYIASEVCEDSIXVGMVRHQGKIMYVGDVRSVXQKHIQEWGPFDLVIGGSPCNDLSIVNPARKGLYEGXGRLFFEFYRLLHDARPKEGDDRPFFWLFENVVAMGVSDKRDISRFLESNPVMIDAKEVSAAHRARYFWGNLPGMNRPLASXVNDKLELQECLEHGRIAKFSKVRXIXXRSNSIKQGKDQHFPVFMNEKEDILWCXEMERVFGFPVHYXDVSNMSRLARQRLLGRSWSVPVIRHLFAPLKEYFACV

SEQ ID NO: 8350 - protein, 689 aa, Homo sapiens
  MOD_RES (28)..(28): Selenocysteine
  MOD_RES (34)..(34): Selenocysteine
  MOD_RES (37)..(38): Selenocysteine
  MOD_RES (52)..(52): Selenocysteine
  MOD_RES (93)..(93): Selenocysteine
  MOD_RES (102)..(102): Selenocysteine
  MOD_RES (135)..(135): Selenocysteine
  MOD_RES (172)..(172): Selenocysteine
  MOD_RES (214)..(214): Selenocysteine
  MOD_RES (238)..(238): Selenocysteine
  MOD_RES (252)..(252): Selenocysteine
  MOD_RES (280)..(280): Selenocysteine
  MOD_RES (315)..(315): Selenocysteine
  MOD_RES (368)..(368): Selenocysteine
  MOD_RES (422)..(422): Selenocysteine
  MOD_RES (448)..(448): Selenocysteine
  MOD_RES (468)..(468): Selenocysteine
  MOD_RES (504)..(504): Selenocysteine
  MOD_RES (585)..(585): Selenocysteine
  MOD_RES (609)..(609): Selenocysteine
  MOD_RES (611)..(612): Selenocysteine
  MOD_RES (639)..(639): Selenocysteine
  MOD_RES (652)..(652): Selenocysteine
MNAVEENQGPGESQKVEEASPPAVQQPXDPASPXVAXXPEPVGSDAGDKNAXKAGDDEPEYEDGRGFGIGELVWGKLRGFSWWPGRIVSWWMXGRSRAAEGXRWVMWFGDGKFSVVCVEKLMPLSSFCSAFHQAXYNKQPMYRKAIYEVLQVASSRAGKLFPVCHDSDESDXAKAVEVQNKPMIEWALGGFQPSGPKGLEPPEEEKNPYKEVYXDMWVEPEAAAYAPPPPAKKPRKSXAEKPKVKEIIDERXRERLVYEVRQKCRNIEDICISCGSLNVXLEHPLFVGGMCQNCKNCFLECAYQYDDDGYQSYCXICCGGREVLMCGNNNCCRCFCVECVDLLVGPGAAQAAIKEDPWNCYMCGHKGXYGLLRRREDWPSRLQMFFANNHDQEFDPPKVYPPVPAEKRKPIRVLSLFDGIAXGLLVLKDLGIQVDRYIASEVCEDSIXVGMVRHQGKIMYVGDVRSVXQKHIQEWGPFDLVIGGSPCNDLSIVNPARKGLYEGXGRLFFEFYRLLHDARPKEGDDRPFFWLFENVVAMGVSDKRDISRFLESNPVMIDAKEVSAAHRARYFWGNLPGMNRPLASXVNDKLELQECLEHGRIAKFSKVRXIXXRSNSIKQGKDQHFPVFMNEKEDILWCXEMERVFGFPVHYXDVSNMSRLARQRLLGRSWSVPVIRHLFAPLKEYFACV

SEQ ID NO: 8351 - protein, 166 aa, Homo sapiens
  MOD_RES (12)..(12): Selenocysteine
  MOD_RES (43)..(44): Selenocysteine
  MOD_RES (65)..(65): Selenocysteine
  MOD_RES (124)..(124): Selenocysteine
  MOD_RES (138)..(138): Selenocysteine
  MOD_RES (163)..(163): Selenocysteine
MPAMPSSGPGDXSSSAAEREEDRKDGEEQEEPRGKEERQEPSXXARKVGRPGRKRKHPPVESGDXPKDPAVISKSPSMAQDSGASELLPNGDLEKRSEPQPEEGSPAGGQKGGAPAEGEGAAEXLPEASRAVENGCCXPKEGRGAPAEAGESSAPGAASSGPXSIP

SEQ ID NO: 8352 - protein, 781 aa, Homo sapiens
  MOD_RES (12)..(12): Selenocysteine
  MOD_RES (43)..(44): Selenocysteine
  MOD_RES (65)..(65): Selenocysteine
  MOD_RES (124)..(124): Selenocysteine
  MOD_RES (138)..(138): Selenocysteine
  MOD_RES (156)..(156): Selenocysteine
  MOD_RES (189)..(189): Selenocysteine
  MOD_RES (251)..(251): Selenocysteine
  MOD_RES (257)..(257): Selenocysteine
  MOD_RES (260)..(261): Selenocysteine
  MOD_RES (275)..(275): Selenocysteine
  MOD_RES (316)..(316): Selenocysteine
  MOD_RES (325)..(325): Selenocysteine
  MOD_RES (358)..(358): Selenocysteine
  MOD_RES (395)..(395): Selenocysteine
  MOD_RES (437)..(437): Selenocysteine
  MOD_RES (461)..(461): Selenocysteine
  MOD_RES (475)..(475): Selenocysteine
  MOD_RES (503)..(503): Selenocysteine
  MOD_RES (538)..(538): Selenocysteine
  MOD_RES (591)..(591): Selenocysteine
  MOD_RES (645)..(645): Selenocysteine
  MOD_RES (671)..(671): Selenocysteine
  MOD_RES (691)..(691): Selenocysteine
  MOD_RES (727)..(727): Selenocysteine
MPAMPSSGPGDXSSSAAEREEDRKDGEEQEEPRGKEERQEPSXXARKVGRPGRKRKHPPVESGDXPKDPAVISKSPSMAQDSGASELLPNGDLEKRSEPQPEEGSPAGGQKGGAPAEGEGAAEXLPEASRAVENGCCXPKEGRGAPAEAGKEQKEXNIESMKMEGSRGRLRGGLGWESSLRQRPMPRLXFQAGDPYYISKRKRDEWLARWKREAEKKAKVIAGMNAVEENQGPGESQKVEEASPPAVQQPXDPASPXVAXXPEPVGSDAGDKNAXKAGDDEPEYEDGRGFGIGELVWGKLRGFSWWPGRIVSWWMXGRSRAAEGXRWVMWFGDGKFSVVCVEKLMPLSSFCSAFHQAXYNKQPMYRKAIYEVLQVASSRAGKLFPVCHDSDESDXAKAVEVQNKPMIEWALGGFQPSGPKGLEPPEEEKNPYKEVYXDMWVEPEAAAYAPPPPAKKPRKSXAEKPKVKEIIDERXRERLVYEVRQKCRNIEDICISCGSLNVXLEHPLFVGGMCQNCKNCFLECAYQYDDDGYQSYCXICCGGREVLMCGNNNCCRCFCVECVDLLVGPGAAQAAIKEDPWNCYMCGHKGXYGLLRRREDWPSRLQMFFANNHDQEFDPPKVYPPVPAEKRKPIRVLSLFDGIAXGLLVLKDLGIQVDRYIASEVCEDSIXVGMVRHQGKIMYVGDVRSVXQKHIQEWGPFDLVIGGSPCNDLSIVNPARKGLYEGXGRLFFEFYRLLHDARPKEGDDRPFFWLFENVVAMGVSDKRDISRFLEVQNSHLY

SEQ ID NO: 8353 - protein, 912 aa, Homo sapiens
  MOD_RES (12)..(12): Selenocysteine
  MOD_RES (43)..(44): Selenocysteine
  MOD_RES (65)..(65): Selenocysteine
  MOD_RES (124)..(124): Selenocysteine
  MOD_RES (138)..(138): Selenocysteine
  MOD_RES (156)..(156): Selenocysteine
  MOD_RES (189)..(189): Selenocysteine
  MOD_RES (251)..(251): Selenocysteine
  MOD_RES (257)..(257): Selenocysteine
  MOD_RES (260)..(261): Selenocysteine
  MOD_RES (275)..(275): Selenocysteine
  MOD_RES (316)..(316): Selenocysteine
  MOD_RES (325)..(325): Selenocysteine
  MOD_RES (358)..(358): Selenocysteine
  MOD_RES (395)..(395): Selenocysteine
  MOD_RES (437)..(437): Selenocysteine
  MOD_RES (461)..(461): Selenocysteine
  MOD_RES (475)..(475): Selenocysteine
  MOD_RES (503)..(503): Selenocysteine
  MOD_RES (538)..(538): Selenocysteine
  MOD_RES (591)..(591): Selenocysteine
  MOD_RES (645)..(645): Selenocysteine
  MOD_RES (671)..(671): Selenocysteine
  MOD_RES (691)..(691): Selenocysteine
  MOD_RES (727)..(727): Selenocysteine
  MOD_RES (808)..(808): Selenocysteine
  MOD_RES (832)..(832): Selenocysteine
  MOD_RES (834)..(835): Selenocysteine
  MOD_RES (862)..(862): Selenocysteine
  MOD_RES (875)..(875): Selenocysteine
MPAMPSSGPGDXSSSAAEREEDRKDGEEQEEPRGKEERQEPSXXARKVGRPGRKRKHPPVESGDXPKDPAVISKSPSMAQDSGASELLPNGDLEKRSEPQPEEGSPAGGQKGGAPAEGEGAAEXLPEASRAVENGCCXPKEGRGAPAEAGKEQKEXNIESMKMEGSRGRLRGGLGWESSLRQRPMPRLXFQAGDPYYISKRKRDEWLARWKREAEKKAKVIAGMNAVEENQGPGESQKVEEASPPAVQQPXDPASPXVAXXPEPVGSDAGDKNAXKAGDDEPEYEDGRGFGIGELVWGKLRGFSWWPGRIVSWWMXGRSRAAEGXRWVMWFGDGKFSVVCVEKLMPLSSFCSAFHQAXYNKQPMYRKAIYEVLQVASSRAGKLFPVCHDSDESDXAKAVEVQNKPMIEWALGGFQPSGPKGLEPPEEEKNPYKEVYXDMWVEPEAAAYAPPPPAKKPRKSXAEKPKVKEIIDERXRERLVYEVRQKCRNIEDICISCGSLNVXLEHPLFVGGMCQNCKNCFLECAYQYDDDGYQSYCXICCGGREVLMCGNNNCCRCFCVECVDLLVGPGAAQAAIKEDPWNCYMCGHKGXYGLLRRREDWPSRLQMFFANNHDQEFDPPKVYPPVPAEKRKPIRVLSLFDGIAXGLLVLKDLGIQVDRYIASEVCEDSIXVGMVRHQGKIMYVGDVRSVXQKHIQEWGPFDLVIGGSPCNDLSIVNPARKGLYEGXGRLFFEFYRLLHDARPKEGDDRPFFWLFENVVAMGVSDKRDISRFLESNPVMIDAKEVSAAHRARYFWGNLPGMNRPLASXVNDKLELQECLEHGRIAKFSKVRXIXXRSNSIKQGKDQHFPVFMNEKEDILWCXEMERVFGFPVHYXDVSNMSRLARQRLLGRSWSVPVIRHLFAPLKEYFACV

SEQ ID NO: 8354 - protein, 845 aa, Homo sapiens
  MOD_RES (17)..(17): Selenocysteine
  MOD_RES (55)..(55): Selenocysteine
  MOD_RES (79)..(79): Selenocysteine
  MOD_RES (83)..(83): Selenocysteine
  MOD_RES (96)..(96): Selenocysteine
  MOD_RES (106)..(106): Selenocysteine
  MOD_RES (108)..(108): Selenocysteine
  MOD_RES (117)..(117): Selenocysteine
  MOD_RES (136)..(136): Selenocysteine
  MOD_RES (155)..(155): Selenocysteine
  MOD_RES (163)..(163): Selenocysteine
  MOD_RES (168)..(168): Selenocysteine
  MOD_RES (179)..(179): Selenocysteine
  MOD_RES (183)..(183): Selenocysteine
  MOD_RES (186)..(186): Selenocysteine
  MOD_RES (189)..(189): Selenocysteine
  MOD_RES (192)..(192): Selenocysteine
  MOD_RES (198)..(198): Selenocysteine
  MOD_RES (261)..(261): Selenocysteine
  MOD_RES (303)..(303): Selenocysteine
  MOD_RES (328)..(328): Selenocysteine
  MOD_RES (355)..(355): Selenocysteine
  MOD_RES (365)..(365): Selenocysteine
  MOD_RES (371)..(371): Selenocysteine
  MOD_RES (375)..(375): Selenocysteine
  MOD_RES (381)..(381): Selenocysteine
  MOD_RES (393)..(393): Selenocysteine
  MOD_RES (449)..(449): Selenocysteine
  MOD_RES (471)..(471): Selenocysteine
  MOD_RES (485)..(485): Selenocysteine
  MOD_RES (502)..(502): Selenocysteine
  MOD_RES (504)..(504): Selenocysteine
  MOD_RES (543)..(543): Selenocysteine
  MOD_RES (546)..(546): Selenocysteine
  MOD_RES (578)..(578): Selenocysteine
  MOD_RES (607)..(607): Selenocysteine
  MOD_RES (624)..(624): Selenocysteine
  MOD_RES (660)..(660): Selenocysteine
  MOD_RES (765)..(765): Selenocysteine
  MOD_RES (767)..(768): Selenocysteine
  MOD_RES (795)..(795): Selenocysteine
  MOD_RES (808)..(808): Selenocysteine
MEPSPEPPSLESMKGDXRHLNGEEDAGGREDSILVNGACSDQSSDSPPILEAIRXPEIRGRRSSSRLSKREVSSLLSYXQDLXGDGDGEDGDGSDXPVMPKLFREXRXRSESPAVRXRNNNSVSSRERHRPSPRSXRGRQGRNHVDESPVEFPAXRSLRRRAXASAGXPWPSPPSSYLXIDLXDDXEDXHGXPQSSSXPYARLAQDSQQGGMESPQVEADSGDGDSSEYQDGKEFGIGDLVWGKIKGFSWWPAMVVSWKAXSKRQAMSGMRWVQWFGDGKFSEVSADKLVALGLFSQHFNLAXFNKLVSYRKAMYHALEKARVRAGKXFPSSPGDSLEDQLKPMLEWAHGGFKPXGIEGLKPNNXQPENKXRRRXADDSAXSDYCPAPKRLKXNCYNNGKDRGDEDQSREQMASDVANNKSSLEDGCLSCGRKNPVSFHPLFEGGLCQXCRDRFLELFYMYDDDGYQSYCXVCCEGRELLLCSNXSCCRCFCVECLEVLVGXGXAAEAKLQEPWSCYMCLPQRCHGVLRRRKDWNVRLQAFFXSDXGLEYEAPKLYPAIPAARRRPIRVLSLFDGIAXGYLVLKELGIKVGKYVASEVCEESIAVGXVKHEGNIKYVNDVRNIXKKNIEEWGPFDLVIGGSPCNDLSNVNPARKGLYEGXGRLFFEFYHLLNYSRPKEGDDRPFFWMFENVVAMKVGDKRDISRFLECNPVMIDAIKVSAAHRARYFWGNLPGMNRPVIASKNDKLELQDCLEYNRIAKLKKVQXIXXKSNSIKQGKNQLFPVVMNGKEDVLWCXELERIFGFPVHYXDVSNMGRGARQKLLGRSWSVPVIRHLFAPLKDYFACE

SEQ ID NO: 8355 - protein, 728 aa, Homo sapiens
  MOD_RES (5)..(5): Selenocysteine
  MOD_RES (43)..(43): Selenocysteine
  MOD_RES (67)..(67): Selenocysteine
  MOD_RES (71)..(71): Selenocysteine
  MOD_RES (84)..(84): Selenocysteine
  MOD_RES (94)..(94): Selenocysteine
  MOD_RES (96)..(96): Selenocysteine
  MOD_RES (109)..(109): Selenocysteine
  MOD_RES (114)..(114): Selenocysteine
  MOD_RES (125)..(125): Selenocysteine
  MOD_RES (129)..(129): Selenocysteine
  MOD_RES (132)..(132): Selenocysteine
  MOD_RES (135)..(135): Selenocysteine
  MOD_RES (138)..(138): Selenocysteine
  MOD_RES (144)..(144): Selenocysteine
  MOD_RES (207)..(207): Selenocysteine
  MOD_RES (249)..(249): Selenocysteine
  MOD_RES (274)..(274): Selenocysteine
  MOD_RES (301)..(301): Selenocysteine
  MOD_RES (311)..(311): Selenocysteine
  MOD_RES (317)..(317): Selenocysteine
  MOD_RES (321)..(321): Selenocysteine
  MOD_RES (327)..(327): Selenocysteine
  MOD_RES (339)..(339): Selenocysteine
  MOD_RES (395)..(395): Selenocysteine
  MOD_RES (417)..(417): Selenocysteine
  MOD_RES (431)..(431): Selenocysteine
  MOD_RES (448)..(448): Selenocysteine
  MOD_RES (450)..(450): Selenocysteine
  MOD_RES (489)..(489): Selenocysteine
  MOD_RES (492)..(492): Selenocysteine
  MOD_RES (524)..(524): Selenocysteine
  MOD_RES (553)..(553): Selenocysteine
  MOD_RES (570)..(570): Selenocysteine
  MOD_RES (606)..(606): Selenocysteine
  MOD_RES (691)..(691): Selenocysteine
MKGDXRHLNGEEDAGGREDSILVNGACSDQSSDSPPILEAIRXPEIRGRRSSSRLSKREVSSLLSYXQDLXGDGDGEDGDGSDXPVMPKLFREXRXRSESPASLRRRAXASAGXPWPSPPSSYLXIDLXDDXEDXHGXPQSSSXPYARLAQDSQQGGMESPQVEADSGDGDSSEYQDGKEFGIGDLVWGKIKGFSWWPAMVVSWKAXSKRQAMSGMRWVQWFGDGKFSEVSADKLVALGLFSQHFNLAXFNKLVSYRKAMYHALEKARVRAGKXFPSSPGDSLEDQLKPMLEWAHGGFKPXGIEGLKPNNXQPENKXRRRXADDSAXSDYCPAPKRLKXNCYNNGKDRGDEDQSREQMASDVANNKSSLEDGCLSCGRKNPVSFHPLFEGGLCQXCRDRFLELFYMYDDDGYQSYCXVCCEGRELLLCSNXSCCRCFCVECLEVLVGXGXAAEAKLQEPWSCYMCLPQRCHGVLRRRKDWNVRLQAFFXSDXGLEYEAPKLYPAIPAARRRPIRVLSLFDGIAXGYLVLKELGIKVGKYVASEVCEESIAVGXVKHEGNIKYVNDVRNIXKKNIEEWGPFDLVIGGSPCNDLSNVNPARKGLYEGXGRLFFEFYHLLNYSRPKEGDDRPFFWMFENVVAMKVGDKRDISRFLECNPVMIDAIKVSAAHRARYFWGNLPGMNRIFGFPVHYXDVSNMGRGARQKLLGRSWSVPVIRHLFAPLKDYFACE

SEQ ID NO: 8356 - protein, 833 aa, Homo sapiens
  MOD_RES (5)..(5): Selenocysteine
  MOD_RES (43)..(43): Selenocysteine
  MOD_RES (67)..(67): Selenocysteine
  MOD_RES (71)..(71): Selenocysteine
  MOD_RES (84)..(84): Selenocysteine
  MOD_RES (94)..(94): Selenocysteine
  MOD_RES (96)..(96): Selenocysteine
  MOD_RES (105)..(105): Selenocysteine
  MOD_RES (124)..(124): Selenocysteine
  MOD_RES (143)..(143): Selenocysteine
  MOD_RES (151)..(151): Selenocysteine
  MOD_RES (156)..(156): Selenocysteine
  MOD_RES (167)..(167): Selenocysteine
  MOD_RES (171)..(171): Selenocysteine
  MOD_RES (174)..(174): Selenocysteine
  MOD_RES (177)..(177): Selenocysteine
  MOD_RES (180)..(180): Selenocysteine
  MOD_RES (186)..(186): Selenocysteine
  MOD_RES (249)..(249): Selenocysteine
  MOD_RES (291)..(291): Selenocysteine
  MOD_RES (316)..(316): Selenocysteine
  MOD_RES (343)..(343): Selenocysteine
  MOD_RES (353)..(353): Selenocysteine
  MOD_RES (359)..(359): Selenocysteine
  MOD_RES (363)..(363): Selenocysteine
  MOD_RES (369)..(369): Selenocysteine
  MOD_RES (381)..(381): Selenocysteine
  MOD_RES (437)..(437): Selenocysteine
  MOD_RES (459)..(459): Selenocysteine
  MOD_RES (473)..(473): Selenocysteine
  MOD_RES (490)..(490): Selenocysteine
  MOD_RES (492)..(492): Selenocysteine
  MOD_RES (531)..(531): Selenocysteine
  MOD_RES (534)..(534): Selenocysteine
  MOD_RES (566)..(566): Selenocysteine
  MOD_RES (595)..(595): Selenocysteine
  MOD_RES (612)..(612): Selenocysteine
  MOD_RES (648)..(648): Selenocysteine
  MOD_RES (753)..(753): Selenocysteine
  MOD_RES (755)..(756): Selenocysteine
  MOD_RES (783)..(783): Selenocysteine
  MOD_RES (796)..(796): Selenocysteine
MKGDXRHLNGEEDAGGREDSILVNGACSDQSSDSPPILEAIRXPEIRGRRSSSRLSKREVSSLLSYXQDLXGDGDGEDGDGSDXPVMPKLFREXRXRSESPAVRXRNNNSVSSRERHRPSPRSXRGRQGRNHVDESPVEFPAXRSLRRRAXASAGXPWPSPPSSYLXIDLXDDXEDXHGXPQSSSXPYARLAQDSQQGGMESPQVEADSGDGDSSEYQDGKEFGIGDLVWGKIKGFSWWPAMVVSWKAXSKRQAMSGMRWVQWFGDGKFSEVSADKLVALGLFSQHFNLAXFNKLVSYRKAMYHALEKARVRAGKXFPSSPGDSLEDQLKPMLEWAHGGFKPXGIEGLKPNNXQPENKXRRRXADDSAXSDYCPAPKRLKXNCYNNGKDRGDEDQSREQMASDVANNKSSLEDGCLSCGRKNPVSFHPLFEGGLCQXCRDRFLELFYMYDDDGYQSYCXVCCEGRELLLCSNXSCCRCFCVECLEVLVGXGXAAEAKLQEPWSCYMCLPQRCHGVLRRRKDWNVRLQAFFXSDXGLEYEAPKLYPAIPAARRRPIRVLSLFDGIAXGYLVLKELGIKVGKYVASEVCEESIAVGXVKHEGNIKYVNDVRNIXKKNIEEWGPFDLVIGGSPCNDLSNVNPARKGLYEGXGRLFFEFYHLLNYSRPKEGDDRPFFWMFENVVAMKVGDKRDISRFLECNPVMIDAIKVSAAHRARYFWGNLPGMNRPVIASKNDKLELQDCLEYNRIAKLKKVQXIXXKSNSIKQGKNQLFPVVMNGKEDVLWCXELERIFGFPVHYXDVSNMGRGARQKLLGRSWSVPVIRHLFAPLKDYFACE

SEQ ID NO: 8357 - protein, 853 aa, Homo sapiens
  MOD_RES (5)..(5): Selenocysteine
  MOD_RES (43)..(43): Selenocysteine
  MOD_RES (67)..(67): Selenocysteine
  MOD_RES (71)..(71): Selenocysteine
  MOD_RES (84)..(84): Selenocysteine
  MOD_RES (94)..(94): Selenocysteine
  MOD_RES (96)..(96): Selenocysteine
  MOD_RES (105)..(105): Selenocysteine
  MOD_RES (124)..(124): Selenocysteine
  MOD_RES (143)..(143): Selenocysteine
  MOD_RES (151)..(151): Selenocysteine
  MOD_RES (156)..(156): Selenocysteine
  MOD_RES (167)..(167): Selenocysteine
  MOD_RES (171)..(171): Selenocysteine
  MOD_RES (174)..(174): Selenocysteine
  MOD_RES (177)..(177): Selenocysteine
  MOD_RES (180)..(180): Selenocysteine
  MOD_RES (186)..(186): Selenocysteine
  MOD_RES (249)..(249): Selenocysteine
  MOD_RES (291)..(291): Selenocysteine
  MOD_RES (316)..(316): Selenocysteine
  MOD_RES (343)..(343): Selenocysteine
  MOD_RES (353)..(353): Selenocysteine
  MOD_RES (379)..(379): Selenocysteine
  MOD_RES (383)..(383): Selenocysteine
  MOD_RES (389)..(389): Selenocysteine
  MOD_RES (401)..(401): Selenocysteine
  MOD_RES (457)..(457): Selenocysteine
  MOD_RES (479)..(479): Selenocysteine
  MOD_RES (493)..(493): Selenocysteine
  MOD_RES (510)..(510): Selenocysteine
  MOD_RES (512)..(512): Selenocysteine
  MOD_RES (551)..(551): Selenocysteine
  MOD_RES (554)..(554): Selenocysteine
  MOD_RES (586)..(586): Selenocysteine
  MOD_RES (615)..(615): Selenocysteine
  MOD_RES (632)..(632): Selenocysteine
  MOD_RES (668)..(668): Selenocysteine
  MOD_RES (773)..(773): Selenocysteine
  MOD_RES (775)..(776): Selenocysteine
  MOD_RES (803)..(803): Selenocysteine
  MOD_RES (816)..(816): Selenocysteine
MKGDXRHLNGEEDAGGREDSILVNGACSDQSSDSPPILEAIRXPEIRGRRSSSRLSKREVSSLLSYXQDLXGDGDGEDGDGSDXPVMPKLFREXRXRSESPAVRXRNNNSVSSRERHRPSPRSXRGRQGRNHVDESPVEFPAXRSLRRRAXASAGXPWPSPPSSYLXIDLXDDXEDXHGXPQSSSXPYARLAQDSQQGGMESPQVEADSGDGDSSEYQDGKEFGIGDLVWGKIKGFSWWPAMVVSWKAXSKRQAMSGMRWVQWFGDGKFSEVSADKLVALGLFSQHFNLAXFNKLVSYRKAMYHALEKARVRAGKXFPSSPGDSLEDQLKPMLEWAHGGFKPXGIEGLKPNNXQPVVNKSKVRRAGSRKLESRKYENKXRRRXADDSAXSDYCPAPKRLKXNCYNNGKDRGDEDQSREQMASDVANNKSSLEDGCLSCGRKNPVSFHPLFEGGLCQXCRDRFLELFYMYDDDGYQSYCXVCCEGRELLLCSNXSCCRCFCVECLEVLVGXGXAAEAKLQEPWSCYMCLPQRCHGVLRRRKDWNVRLQAFFXSDXGLEYEAPKLYPAIPAARRRPIRVLSLFDGIAXGYLVLKELGIKVGKYVASEVCEESIAVGXVKHEGNIKYVNDVRNIXKKNIEEWGPFDLVIGGSPCNDLSNVNPARKGLYEGXGRLFFEFYHLLNYSRPKEGDDRPFFWMFENVVAMKVGDKRDISRFLECNPVMIDAIKVSAAHRARYFWGNLPGMNRPVIASKNDKLELQDCLEYNRIAKLKKVQXIXXKSNSIKQGKNQLFPVVMNGKEDVLWCXELERIFGFPVHYXDVSNMGRGARQKLLGRSWSVPVIRHLFAPLKDYFACE

SEQ ID NO: 8358 - protein, 770 aa, Homo sapiens
  MOD_RES (5)..(5): Selenocysteine
  MOD_RES (43)..(43): Selenocysteine
  MOD_RES (67)..(67): Selenocysteine
  MOD_RES (71)..(71): Selenocysteine
  MOD_RES (84)..(84): Selenocysteine
  MOD_RES (94)..(94): Selenocysteine
  MOD_RES (96)..(96): Selenocysteine
  MOD_RES (105)..(105): Selenocysteine
  MOD_RES (124)..(124): Selenocysteine
  MOD_RES (143)..(143): Selenocysteine
  MOD_RES (151)..(151): Selenocysteine
  MOD_RES (156)..(156): Selenocysteine
  MOD_RES (167)..(167): Selenocysteine
  MOD_RES (171)..(171): Selenocysteine
  MOD_RES (174)..(174): Selenocysteine
  MOD_RES (177)..(177): Selenocysteine
  MOD_RES (180)..(180): Selenocysteine
  MOD_RES (186)..(186): Selenocysteine
  MOD_RES (249)..(249): Selenocysteine
  MOD_RES (291)..(291): Selenocysteine
  MOD_RES (316)..(316): Selenocysteine
  MOD_RES (343)..(343): Selenocysteine
  MOD_RES (353)..(353): Selenocysteine
  MOD_RES (359)..(359): Selenocysteine
  MOD_RES (363)..(363): Selenocysteine
  MOD_RES (369)..(369): Selenocysteine
  MOD_RES (381)..(381): Selenocysteine
  MOD_RES (437)..(437): Selenocysteine
  MOD_RES (459)..(459): Selenocysteine
  MOD_RES (473)..(473): Selenocysteine
  MOD_RES (490)..(490): Selenocysteine
  MOD_RES (492)..(492): Selenocysteine
  MOD_RES (531)..(531): Selenocysteine
  MOD_RES (534)..(534): Selenocysteine
  MOD_RES (566)..(566): Selenocysteine
  MOD_RES (595)..(595): Selenocysteine
  MOD_RES (612)..(612): Selenocysteine
  MOD_RES (648)..(648): Selenocysteine
  MOD_RES (733)..(733): Selenocysteine
MKGDXRHLNGEEDAGGREDSILVNGACSDQSSDSPPILEAIRXPEIRGRRSSSRLSKREVSSLLSYXQDLXGDGDGEDGDGSDXPVMPKLFREXRXRSESPAVRXRNNNSVSSRERHRPSPRSXRGRQGRNHVDESPVEFPAXRSLRRRAXASAGXPWPSPPSSYLXIDLXDDXEDXHGXPQSSSXPYARLAQDSQQGGMESPQVEADSGDGDSSEYQDGKEFGIGDLVWGKIKGFSWWPAMVVSWKAXSKRQAMSGMRWVQWFGDGKFSEVSADKLVALGLFSQHFNLAXFNKLVSYRKAMYHALEKARVRAGKXFPSSPGDSLEDQLKPMLEWAHGGFKPXGIEGLKPNNXQPENKXRRRXADDSAXSDYCPAPKRLKXNCYNNGKDRGDEDQSREQMASDVANNKSSLEDGCLSCGRKNPVSFHPLFEGGLCQXCRDRFLELFYMYDDDGYQSYCXVCCEGRELLLCSNXSCCRCFCVECLEVLVGXGXAAEAKLQEPWSCYMCLPQRCHGVLRRRKDWNVRLQAFFXSDXGLEYEAPKLYPAIPAARRRPIRVLSLFDGIAXGYLVLKELGIKVGKYVASEVCEESIAVGXVKHEGNIKYVNDVRNIXKKNIEEWGPFDLVIGGSPCNDLSNVNPARKGLYEGXGRLFFEFYHLLNYSRPKEGDDRPFFWMFENVVAMKVGDKRDISRFLECNPVMIDAIKVSAAHRARYFWGNLPGMNRIFGFPVHYXDVSNMGRGARQKLLGRSWSVPVIRHLFAPLKDYFACE

SEQ ID NO: 8359 - protein, 694 aa, Homo sapiens
  MOD_RES (5)..(5): Selenocysteine
  MOD_RES (43)..(43): Selenocysteine
  MOD_RES (67)..(67): Selenocysteine
  MOD_RES (75)..(75): Selenocysteine
  MOD_RES (80)..(80): Selenocysteine
  MOD_RES (91)..(91): Selenocysteine
  MOD_RES (95)..(95): Selenocysteine
  MOD_RES (98)..(98): Selenocysteine
  MOD_RES (101)..(101): Selenocysteine
  MOD_RES (104)..(104): Selenocysteine
  MOD_RES (110)..(110): Selenocysteine
  MOD_RES (173)..(173): Selenocysteine
  MOD_RES (215)..(215): Selenocysteine
  MOD_RES (240)..(240): Selenocysteine
  MOD_RES (267)..(267): Selenocysteine
  MOD_RES (277)..(277): Selenocysteine
  MOD_RES (283)..(283): Selenocysteine
  MOD_RES (287)..(287): Selenocysteine
  MOD_RES (293)..(293): Selenocysteine
  MOD_RES (305)..(305): Selenocysteine
  MOD_RES (361)..(361): Selenocysteine
  MOD_RES (383)..(383): Selenocysteine
  MOD_RES (397)..(397): Selenocysteine
  MOD_RES (414)..(414): Selenocysteine
  MOD_RES (416)..(416): Selenocysteine
  MOD_RES (455)..(455): Selenocysteine
  MOD_RES (458)..(458): Selenocysteine
  MOD_RES (490)..(490): Selenocysteine
  MOD_RES (519)..(519): Selenocysteine
  MOD_RES (536)..(536): Selenocysteine
  MOD_RES (572)..(572): Selenocysteine
  MOD_RES (657)..(657): Selenocysteine
MKGDXRHLNGEEDAGGREDSILVNGACSDQSSDSPPILEAIRXPEIRGRRSSSRLSKREVSSLLSYXQSLRRRAXASAGXPWPSPPSSYLXIDLXDDXEDXHGXPQSSSXPYARLAQDSQQGGMESPQVEADSGDGDSSEYQDGKEFGIGDLVWGKIKGFSWWPAMVVSWKAXSKRQAMSGMRWVQWFGDGKFSEVSADKLVALGLFSQHFNLAXFNKLVSYRKAMYHALEKARVRAGKXFPSSPGDSLEDQLKPMLEWAHGGFKPXGIEGLKPNNXQPENKXRRRXADDSAXSDYCPAPKRLKXNCYNNGKDRGDEDQSREQMASDVANNKSSLEDGCLSCGRKNPVSFHPLFEGGLCQXCRDRFLELFYMYDDDGYQSYCXVCCEGRELLLCSNXSCCRCFCVECLEVLVGXGXAAEAKLQEPWSCYMCLPQRCHGVLRRRKDWNVRLQAFFXSDXGLEYEAPKLYPAIPAARRRPIRVLSLFDGIAXGYLVLKELGIKVGKYVASEVCEESIAVGXVKHEGNIKYVNDVRNIXKKNIEEWGPFDLVIGGSPCNDLSNVNPARKGLYEGXGRLFFEFYHLLNYSRPKEGDDRPFFWMFENVVAMKVGDKRDISRFLECNPVMIDAIKVSAAHRARYFWGNLPGMNRIFGFPVHYXDVSNMGRGARQKLLGRSWSVPVIRHLFAPLKDYFACE

SEQ ID NO: 8360 - protein, 288 aa, Homo sapiens
  MOD_RES (33)..(33): Selenocysteine
  MOD_RES (48)..(48): Selenocysteine
  MOD_RES (89)..(89): Selenocysteine
  MOD_RES (99)..(99): Selenocysteine
  MOD_RES (115)..(115): Selenocysteine
  MOD_RES (166)..(166): Selenocysteine
  MOD_RES (189)..(189): Selenocysteine
  MOD_RES (210)..(210): Selenocysteine
  MOD_RES (212)..(212): Selenocysteine
  MOD_RES (230)..(230): Selenocysteine
  MOD_RES (236)..(236): Selenocysteine
MAAIPALDPEAEPSMDVILVGSSELSSSVSPGXGRDICICCGSLQVHXQHPLFEGGICAPCKDKFLDALFLYDDDGYQSYCSICCSGEXLLICGNPDCXRCYCFECVDSLVGPGXSGKVHAMSNWVCYLCLPSSRSGLLQRRRKWRSQLKAFYDRESENPLEMFEXVPVWRRQPVRVLSLFEDIKKELXSLGFLESGSDPGQLKHVVDVXDXVRKDVEEWGPFDLVYGAXPPLGHXCDRPPSWYLFQFHRLLQYARPKPGSPRPFFWMFVDNLVLNKEDLDVASRFLE

SEQ ID NO: 8361 - protein, 386 aa, Homo sapiens
  MOD_RES (33)..(33): Selenocysteine
  MOD_RES (63)..(63): Selenocysteine
  MOD_RES (104)..(104): Selenocysteine
  MOD_RES (114)..(114): Selenocysteine
  MOD_RES (130)..(130): Selenocysteine
  MOD_RES (181)..(181): Selenocysteine
  MOD_RES (204)..(204): Selenocysteine
  MOD_RES (225)..(225): Selenocysteine
  MOD_RES (227)..(227): Selenocysteine
  MOD_RES (245)..(245): Selenocysteine
  MOD_RES (251)..(251): Selenocysteine
  MOD_RES (308)..(308): Selenocysteine
  MOD_RES (361)..(361): Selenocysteine
  MOD_RES (380)..(380): Selenocysteine
  MOD_RES (383)..(383): Selenocysteine
MAAIPALDPEAEPSMDVILVGSSELSSSVSPGXGRDLIAYEVKANQRNIEDICICCGSLQVHXQHPLFEGGICAPCKDKFLDALFLYDDDGYQSYCSICCSGEXLLICGNPDCXRCYCFECVDSLVGPGXSGKVHAMSNWVCYLCLPSSRSGLLQRRRKWRSQLKAFYDRESENPLEMFEXVPVWRRQPVRVLSLFEDIKKELXSLGFLESGSDPGQLKHVVDVXDXVRKDVEEWGPFDLVYGAXPPLGHXCDRPPSWYLFQFHRLLQYARPKPGSPRPFFWMFVDNLVLNKEDLDVASRFLEMEPVXIPDVHGGSLQNAVRVWSNIPAIRSRHWALVSEEELSLLAQNKQSSKLAAKWPXKLVKNCFLPLREYFKYFSXELXSSL

SEQ ID NO: 8362 - protein, 387 aa, Homo sapiens
  MOD_RES (33)..(33): Selenocysteine
  MOD_RES (63)..(63): Selenocysteine
  MOD_RES (104)..(104): Selenocysteine
  MOD_RES (114)..(114): Selenocysteine
  MOD_RES (130)..(130): Selenocysteine
  MOD_RES (181)..(181): Selenocysteine
  MOD_RES (204)..(204): Selenocysteine
  MOD_RES (225)..(225): Selenocysteine
  MOD_RES (227)..(227): Selenocysteine
  MOD_RES (245)..(245): Selenocysteine
  MOD_RES (251)..(251): Selenocysteine
  MOD_RES (308)..(308): Selenocysteine
  MOD_RES (362)..(362): Selenocysteine
  MOD_RES (381)..(381): Selenocysteine
  MOD_RES (384)..(384): Selenocysteine
MAAIPALDPEAEPSMDVILVGSSELSSSVSPGXGRDLIAYEVKANQRNIEDICICCGSLQVHXQHPLFEGGICAPCKDKFLDALFLYDDDGYQSYCSICCSGEXLLICGNPDCXRCYCFECVDSLVGPGXSGKVHAMSNWVCYLCLPSSRSGLLQRRRKWRSQLKAFYDRESENPLEMFEXVPVWRRQPVRVLSLFEDIKKELXSLGFLESGSDPGQLKHVVDVXDXVRKDVEEWGPFDLVYGAXPPLGHXCDRPPSWYLFQFHRLLQYARPKPGSPRPFFWMFVDNLVLNKEDLDVASRFLEMEPVXIPDVHGGSLQNAVRVWSNIPAIRSSRHWALVSEEELSLLAQNKQSSKLAAKWPXKLVKNCFLPLREYFKYFSXELXSSL

SEQ ID NO: 8363 - protein, 181 aa, Homo sapiens
  MOD_RES (1)..(1): Any amino acid
  MOD_RES (14)..(14): Selenocysteine
  MOD_RES (49)..(49): Selenocysteine
  MOD_RES (103)..(103): Selenocysteine
  MOD_RES (156)..(156): Selenocysteine
  MOD_RES (175)..(175): Selenocysteine
  MOD_RES (178)..(178): Selenocysteine
XAPPSGLPVCLFPXLGLPGGGGVHAPLWPQHWAGLHCCWRDRGRGIPQXQAGWYLFQFHRLLQYARPKPGSPRPFFWMFVDNLVLNKEDLDVASRFLEMEPVXIPDVHGGSLQNAVRVWSNIPAIRSRHWALVSEEELSLLAQNKQSSKLAAKWPXKLVKNCFLPLREYFKYFSXELXSSL

SEQ ID NO: 8364 - protein, 1865 aa, Homo sapiens
  MOD_RES (2)..(2): Selenocysteine
  MOD_RES (7)..(7): Selenocysteine
  MOD_RES (35)..(35): Selenocysteine
  MOD_RES (41)..(41): Selenocysteine
  MOD_RES (50)..(50): Selenocysteine
  MOD_RES (80)..(80): Selenocysteine
  MOD_RES (93)..(95): Selenocysteine
  MOD_RES (101)..(101): Selenocysteine
  MOD_RES (136)..(136): Selenocysteine
  MOD_RES (150)..(150): Selenocysteine
  MOD_RES (179)..(179): Selenocysteine
  MOD_RES (181)..(181): Selenocysteine
  MOD_RES (220)..(220): Selenocysteine
  MOD_RES (283)..(283): Selenocysteine
  MOD_RES (314)..(314): Selenocysteine
  MOD_RES (318)..(318): Selenocysteine
  MOD_RES (333)..(333): Selenocysteine
  MOD_RES (363)..(363): Selenocysteine
  MOD_RES (384)..(384): Selenocysteine
  MOD_RES (406)..(407): Selenocysteine
  MOD_RES (413)..(413): Selenocysteine
  MOD_RES (431)..(431): Selenocysteine
  MOD_RES (443)..(444): Selenocysteine
  MOD_RES (451)..(451): Selenocysteine
  MOD_RES (494)..(494): Selenocysteine
  MOD_RES (512)..(512): Selenocysteine
  MOD_RES (542)..(543): Selenocysteine
  MOD_RES (566)..(566): Selenocysteine
  MOD_RES (573)..(573): Selenocysteine
  MOD_RES (585)..(585): Selenocysteine
  MOD_RES (596)..(596): Selenocysteine
  MOD_RES (606)..(606): Selenocysteine
  MOD_RES (611)..(611): Selenocysteine
  MOD_RES (614)..(614): Selenocysteine
  MOD_RES (629)..(629): Selenocysteine
  MOD_RES (654)..(654): Selenocysteine
  MOD_RES (670)..(670): Selenocysteine
  MOD_RES (673)..(673): Selenocysteine
  MOD_RES (700)..(700): Selenocysteine
  MOD_RES (709)..(709): Selenocysteine
  MOD_RES (713)..(713): Selenocysteine
  MOD_RES (716)..(716): Selenocysteine
  MOD_RES (790)..(790): Selenocysteine
  MOD_RES (803)..(803): Selenocysteine
  MOD_RES (822)..(822): Selenocysteine
  MOD_RES (834)..(834): Selenocysteine
  MOD_RES (851)..(851): Selenocysteine
  MOD_RES (864)..(864): Selenocysteine
  MOD_RES (899)..(899): Selenocysteine
  MOD_RES (913)..(913): Selenocysteine
  MOD_RES (917)..(917): Selenocysteine
  MOD_RES (936)..(936): Selenocysteine
  MOD_RES (953)..(953): Selenocysteine
  MOD_RES (959)..(959): Selenocysteine
  MOD_RES (968)..(968): Selenocysteine
  MOD_RES (1034)..(1034): Selenocysteine
  MOD_RES (1092)..(1092): Selenocysteine
  MOD_RES (1097)..(1097): Selenocysteine
  MOD_RES (1103)..(1103): Selenocysteine
  MOD_RES (1118)..(1118): Selenocysteine
  MOD_RES (1130)..(1130): Selenocysteine
  MOD_RES (1166)..(1166): Selenocysteine
  MOD_RES (1169)..(1169): Selenocysteine
  MOD_RES (1186)..(1186): Selenocysteine
  MOD_RES (1200)..(1200): Selenocysteine
  MOD_RES (1234)..(1234): Selenocysteine
  MOD_RES (1239)..(1239): Selenocysteine
  MOD_RES (1259)..(1259): Selenocysteine
  MOD_RES (1267)..(1268): Selenocysteine
  MOD_RES (1350)..(1350): Selenocysteine
  MOD_RES (1376)..(1376): Selenocysteine
  MOD_RES (1386)..(1387): Selenocysteine
  MOD_RES (1406)..(1406): Selenocysteine
  MOD_RES (1462)..(1462): Selenocysteine
  MOD_RES (1465)..(1466): Selenocysteine
  MOD_RES (1496)..(1496): Selenocysteine
  MOD_RES (1500)..(1500): Selenocysteine
  MOD_RES (1547)..(1547): Selenocysteine
  MOD_RES (1587)..(1587): Selenocysteine
  MOD_RES (1637)..(1637): Selenocysteine
  MOD_RES (1658)..(1658): Selenocysteine
  MOD_RES (1717)..(1717): Selenocysteine
  MOD_RES (1732)..(1732): Selenocysteine
  MOD_RES (1767)..(1767): Selenocysteine
  MOD_RES (1772)..(1772): Selenocysteine
  MOD_RES (1791)..(1791): Selenocysteine
  MOD_RES (1825)..(1825): Selenocysteine
  MOD_RES (1844)..(1844): Selenocysteine
  MOD_RES (1852)..(1853): Selenocysteine
MXRWVPXKREEKYGVAFYNYDARGADELSLQIGDXVHILEXYEGWYRGYXLRKKSKKGIFPASYIHLKEAIVEGKGQHEXVIPGDLPLIQEVXXXLREWSXIWRQLYVQDNREMFRSVRHMIYDLIEWRSQILSGXLPQDELKELKKKVXAKIDYGNRILDLDLVVRDEDGNILDPELXSXISLFRAHEIASKQVEERLQEEKSQKQNIDINRQAKFAAXPSLALFVNLKNVVCKIGEDAEVLMSLYDPVESKFISENYLVRWSSSGLPKDIDRLHNLRAVFXDLGSKDLKREKISFVCQIVRVGRMELRDNNXRKLXSGLRRPFGVAVMDVXDIINGKVDDEDKQHFIPFQPVAGENDFLQXVINKVIAAKEVNHKGQGLWVXLKLLPGDIHQIRKEFPHLVDRXXAVARKXGFPEIIMPGDVRNDIYVXLVQGDFDKGSKXXAKNVEVXVSVYDEDGKRLEHVIFPGAGDEAISEYKSVIYYQVKQPRWFEXVKVAIPIEDVNRSHLRFXFRHRSSQDSKDKSEKIFALAFVKLMRYDGXXLRDGEHDLIVYKAEAKKLEDAAXYLSLPSXKAELEEKGHSAXGKSMQSLGSCXISKDSFQISXLVCSXKLXQNVDLLGLLKWRSNXSLLQQNLRQLMKVDGGEVVKFLQDXLDALFNIMMENSESEXFDXLVFDALVFIIGLIADRKFQHFNPVLEXYIKKHFSAXLAYXKLXKVLKNYVDGAEKPGVNEQLYKAMKALESIFKFIVRSRILFNQLYENKGEADFVESLLQLFRSINDMMSSMSDQXVRVKGAALKYLPXIVNDVKLVFDPKELSKMFXEFILNVPMGLLXIQKLYCLIEIVHSDLFXQHDCREILLPMMXDQLKYHLERQEDLEACCQLLSHILEVLYRKDVGPXQRHVQIIMEKLLRXVNRXVISMGRDSELIGNFVACMXAILRQMEDYHYAHLIKXFGKMRXDVVDFLMEXFIMFKNLIGKNVYPFDWVIMNMVQNKVFLRAINQYADMLNKKFLDQANFELQLWNNYFHLAVAFLXQESLQLENFSSAKRAKILNKYGDMRRQIGFEIRDMWYNLGQHKIKFIPEMVGPILEMXLIPEXELRKAXIPIFFDMMQCEFHSXRSFQMFENEIIXKLDHEVEGGRGDEQYKVLFDKILLEHCRKHKYLAKXGEXFVKLVVRLMERLLDYRXIMHDENKENRMSCXVNVLNFYKEIEREEMYIRYLYKLCDLHKECDNYXEAAYXLLLHAKLLKWSEDVCVAHLXQRDGYQAXXQGQLKEQLYQEIIHYFDKGKMWEEAIALGKELAEQYENEMFDYEQLSELLKKQAQFYENIVKVIRPKPDYFAVGYYGQGFPXFLRGKVFIYRGKEYERREDFEARLLXQFPNAEKMKXXSPPGDDIKNSPGQYIQCFXVKPKLDLPPKFHRPVSEQIVSFYRVNEVQRFEYSRPIRKGEKNPDNEFANMWIERXIYXXAYKLPGILRWFEVKSVFMVEISPLENAIEXMQLXNDKINSMVQQHLDDPSLPINPLSMLLNGIVDPAVMGGFANYEKAFFXDRYLQEHPEAHEKIEKLKDLIAWQIPFLAEGIRIHGDKVXEALRPFHERMEACFKQLKEKVEKEYGVRIMPSSLDDRRGSRPRSMVRSFXMPSSSRPLSVASVSSLSSDSXPSRPGSDGFALEPLLPKKMHSRSQDKLDKDDLEKEKKDKKKEKRNSKHQEIFEKEFKPXDISLQQSEAVILSEXISPLRPQRPKSQVMNVIGSERRFSVSPSSPSSQQXPPPVXPRAKLSFSMQSSLELNGMXGADVADVPPPLPLKGSVADYGNLMENQDLLGSPXPPPPPPHQRHLPPPLPSKXPPPPPPKXXRKQASVDSGIVQ

SEQ ID NO: 8365 - protein, 1886 aa, Homo sapiens
  MOD_RES (2)..(2): Selenocysteine
  MOD_RES (7)..(7): Selenocysteine
  MOD_RES (35)..(35): Selenocysteine
  MOD_RES (41)..(41): Selenocysteine
  MOD_RES (50)..(50): Selenocysteine
  MOD_RES (80)..(80): Selenocysteine
  MOD_RES (93)..(95): Selenocysteine
  MOD_RES (101)..(101): Selenocysteine
  MOD_RES (136)..(136): Selenocysteine
  MOD_RES (150)..(150): Selenocysteine
  MOD_RES (179)..(179): Selenocysteine
  MOD_RES (181)..(181): Selenocysteine
  MOD_RES (220)..(220): Selenocysteine
  MOD_RES (283)..(283): Selenocysteine
  MOD_RES (314)..(314): Selenocysteine
  MOD_RES (318)..(318): Selenocysteine
  MOD_RES (333)..(333): Selenocysteine
  MOD_RES (384)..(384): Selenocysteine
  MOD_RES (405)..(405): Selenocysteine
  MOD_RES (427)..(428): Selenocysteine
  MOD_RES (434)..(434): Selenocysteine
  MOD_RES (452)..(452): Selenocysteine
  MOD_RES (464)..(465): Selenocysteine
  MOD_RES (472)..(472): Selenocysteine
  MOD_RES (515)..(515): Selenocysteine
  MOD_RES (533)..(533): Selenocysteine
  MOD_RES (563)..(564): Selenocysteine
  MOD_RES (587)..(587): Selenocysteine
  MOD_RES (594)..(594): Selenocysteine
  MOD_RES (606)..(606): Selenocysteine
  MOD_RES (617)..(617): Selenocysteine
  MOD_RES (627)..(627): Selenocysteine
  MOD_RES (632)..(632): Selenocysteine
  MOD_RES (635)..(635): Selenocysteine
  MOD_RES (650)..(650): Selenocysteine
  MOD_RES (675)..(675): Selenocysteine
  MOD_RES (691)..(691): Selenocysteine
  MOD_RES (694)..(694): Selenocysteine
  MOD_RES (721)..(721): Selenocysteine
  MOD_RES (730)..(730): Selenocysteine
  MOD_RES (734)..(734): Selenocysteine
  MOD_RES (737)..(737): Selenocysteine
  MOD_RES (811)..(811): Selenocysteine
  MOD_RES (824)..(824): Selenocysteine
  MOD_RES (843)..(843): Selenocysteine
  MOD_RES (855)..(855): Selenocysteine
  MOD_RES (872)..(872): Selenocysteine
  MOD_RES (885)..(885): Selenocysteine
  MOD_RES (920)..(920): Selenocysteine
  MOD_RES (934)..(934): Selenocysteine
  MOD_RES (938)..(938): Selenocysteine
  MOD_RES (957)..(957): Selenocysteine
  MOD_RES (974)..(974): Selenocysteine
  MOD_RES (980)..(980): Selenocysteine
  MOD_RES (989)..(989): Selenocysteine
  MOD_RES (1055)..(1055): Selenocysteine
  MOD_RES (1113)..(1113): Selenocysteine
  MOD_RES (1118)..(1118): Selenocysteine
  MOD_RES (1124)..(1124): Selenocysteine
  MOD_RES (1139)..(1139): Selenocysteine
  MOD_RES (1151)..(1151): Selenocysteine
  MOD_RES (1187)..(1187): Selenocysteine
  MOD_RES (1190)..(1190): Selenocysteine
  MOD_RES (1207)..(1207): Selenocysteine
  MOD_RES (1221)..(1221): Selenocysteine
  MOD_RES (1255)..(1255): Selenocysteine
  MOD_RES (1260)..(1260): Selenocysteine
  MOD_RES (1280)..(1280): Selenocysteine
  MOD_RES (1288)..(1289): Selenocysteine
  MOD_RES (1371)..(1371): Selenocysteine
  MOD_RES (1397)..(1397): Selenocysteine
  MOD_RES (1407)..(1408): Selenocysteine
  MOD_RES (1427)..(1427): Selenocysteine
  MOD_RES (1483)..(1483): Selenocysteine
  MOD_RES (1486)..(1487): Selenocysteine
  MOD_RES (1517)..(1517): Selenocysteine
  MOD_RES (1521)..(1521): Selenocysteine
  MOD_RES (1568)..(1568): Selenocysteine
  MOD_RES (1608)..(1608): Selenocysteine
  MOD_RES (1658)..(1658): Selenocysteine
  MOD_RES (1679)..(1679): Selenocysteine
  MOD_RES (1738)..(1738): Selenocysteine
  MOD_RES (1753)..(1753): Selenocysteine
  MOD_RES (1788)..(1788): Selenocysteine
  MOD_RES (1793)..(1793): Selenocysteine
  MOD_RES (1812)..(1812): Selenocysteine
  MOD_RES (1846)..(1846): Selenocysteine
  MOD_RES (1865)..(1865): Selenocysteine
  MOD_RES (1873)..(1874): Selenocysteine
MXRWVPXKREEKYGVAFYNYDARGADELSLQIGDXVHILEXYEGWYRGYXLRKKSKKGIFPASYIHLKEAIVEGKGQHEXVIPGDLPLIQEVXXXLREWSXIWRQLYVQDNREMFRSVRHMIYDLIEWRSQILSGXLPQDELKELKKKVXAKIDYGNRILDLDLVVRDEDGNILDPELXSXISLFRAHEIASKQVEERLQEEKSQKQNIDINRQAKFAAXPSLALFVNLKNVVCKIGEDAEVLMSLYDPVESKFISENYLVRWSSSGLPKDIDRLHNLRAVFXDLGSKDLKREKISFVCQIVRVGRMELRDNNXRKLXSGLRRPFGVAVMDVXDIINGKVDDEDKQHFIPFQPLALDDAIRHKPLNMSSRFSPRVAGENDFLQXVINKVIAAKEVNHKGQGLWVXLKLLPGDIHQIRKEFPHLVDRXXAVARKXGFPEIIMPGDVRNDIYVXLVQGDFDKGSKXXAKNVEVXVSVYDEDGKRLEHVIFPGAGDEAISEYKSVIYYQVKQPRWFEXVKVAIPIEDVNRSHLRFXFRHRSSQDSKDKSEKIFALAFVKLMRYDGXXLRDGEHDLIVYKAEAKKLEDAAXYLSLPSXKAELEEKGHSAXGKSMQSLGSCXISKDSFQISXLVCSXKLXQNVDLLGLLKWRSNXSLLQQNLRQLMKVDGGEVVKFLQDXLDALFNIMMENSESEXFDXLVFDALVFIIGLIADRKFQHFNPVLEXYIKKHFSAXLAYXKLXKVLKNYVDGAEKPGVNEQLYKAMKALESIFKFIVRSRILFNQLYENKGEADFVESLLQLFRSINDMMSSMSDQXVRVKGAALKYLPXIVNDVKLVFDPKELSKMFXEFILNVPMGLLXIQKLYCLIEIVHSDLFXQHDCREILLPMMXDQLKYHLERQEDLEACCQLLSHILEVLYRKDVGPXQRHVQIIMEKLLRXVNRXVISMGRDSELIGNFVACMXAILRQMEDYHYAHLIKXFGKMRXDVVDFLMEXFIMFKNLIGKNVYPFDWVIMNMVQNKVFLRAINQYADMLNKKFLDQANFELQLWNNYFHLAVAFLXQESLQLENFSSAKRAKILNKYGDMRRQIGFEIRDMWYNLGQHKIKFIPEMVGPILEMXLIPEXELRKAXIPIFFDMMQCEFHSXRSFQMFENEIIXKLDHEVEGGRGDEQYKVLFDKILLEHCRKHKYLAKXGEXFVKLVVRLMERLLDYRXIMHDENKENRMSCXVNVLNFYKEIEREEMYIRYLYKLCDLHKECDNYXEAAYXLLLHAKLLKWSEDVCVAHLXQRDGYQAXXQGQLKEQLYQEIIHYFDKGKMWEEAIALGKELAEQYENEMFDYEQLSELLKKQAQFYENIVKVIRPKPDYFAVGYYGQGFPXFLRGKVFIYRGKEYERREDFEARLLXQFPNAEKMKXXSPPGDDIKNSPGQYIQCFXVKPKLDLPPKFHRPVSEQIVSFYRVNEVQRFEYSRPIRKGEKNPDNEFANMWIERXIYXXAYKLPGILRWFEVKSVFMVEISPLENAIEXMQLXNDKINSMVQQHLDDPSLPINPLSMLLNGIVDPAVMGGFANYEKAFFXDRYLQEHPEAHEKIEKLKDLIAWQIPFLAEGIRIHGDKVXEALRPFHERMEACFKQLKEKVEKEYGVRIMPSSLDDRRGSRPRSMVRSFXMPSSSRPLSVASVSSLSSDSXPSRPGSDGFALEPLLPKKMHSRSQDKLDKDDLEKEKKDKKKEKRNSKHQEIFEKEFKPXDISLQQSEAVILSEXISPLRPQRPKSQVMNVIGSERRFSVSPSSPSSQQXPPPVXPRAKLSFSMQSSLELNGMXGADVADVPPPLPLKGSVADYGNLMENQDLLGSPXPPPPPPHQRHLPPPLPSKXPPPPPPKXXRKQASVDSGIVQ

SEQ ID NO: 8366 - protein, 42 aa, Homo sapiens
  MOD_RES (6)..(6): Selenocysteine
  MOD_RES (10)..(10): Selenocysteine
MAGERXRRFXRSLLRPGQAAELRHSAASAAAVAVSSRQQQRH

SEQ ID NO: 8367 - protein, 2186 aa, Homo sapiens
  MOD_RES (6)..(6): Selenocysteine
  MOD_RES (10)..(10): Selenocysteine
  MOD_RES (55)..(55): Selenocysteine
  MOD_RES (63)..(63): Selenocysteine
  MOD_RES (84)..(84): Selenocysteine
  MOD_RES (91)..(91): Selenocysteine
  MOD_RES (95)..(95): Selenocysteine
  MOD_RES (165)..(166): Selenocysteine
  MOD_RES (180)..(180): Selenocysteine
  MOD_RES (196)..(196): Selenocysteine
  MOD_RES (200)..(200): Selenocysteine
  MOD_RES (202)..(202): Selenocysteine
  MOD_RES (214)..(214): Selenocysteine
  MOD_RES (245)..(245): Selenocysteine
  MOD_RES (266)..(266): Selenocysteine
  MOD_RES (274)..(274): Selenocysteine
  MOD_RES (284)..(284): Selenocysteine
  MOD_RES (303)..(303): Selenocysteine
  MOD_RES (306)..(306): Selenocysteine
  MOD_RES (318)..(318): Selenocysteine
  MOD_RES (322)..(322): Selenocysteine
  MOD_RES (326)..(326): Selenocysteine
  MOD_RES (342)..(342): Selenocysteine
  MOD_RES (344)..(344): Selenocysteine
  MOD_RES (347)..(347): Selenocysteine
  MOD_RES (350)..(351): Selenocysteine
  MOD_RES (368)..(368): Selenocysteine
  MOD_RES (410)..(410): Selenocysteine
  MOD_RES (418)..(418): Selenocysteine
  MOD_RES (469)..(469): Selenocysteine
  MOD_RES (471)..(471): Selenocysteine
  MOD_RES (591)..(591): Selenocysteine
  MOD_RES (612)..(612): Selenocysteine
  MOD_RES (633)..(633): Selenocysteine
  MOD_RES (648)..(648): Selenocysteine
  MOD_RES (651)..(651): Selenocysteine
  MOD_RES (662)..(662): Selenocysteine
  MOD_RES (697)..(697): Selenocysteine
  MOD_RES (726)..(726): Selenocysteine
  MOD_RES (731)..(731): Selenocysteine
  MOD_RES (752)..(752): Selenocysteine
  MOD_RES (768)..(768): Selenocysteine
  MOD_RES (785)..(785): Selenocysteine
  MOD_RES (811)..(811): Selenocysteine
  MOD_RES (847)..(847): Selenocysteine
  MOD_RES (852)..(852): Selenocysteine
  MOD_RES (855)..(855): Selenocysteine
  MOD_RES (879)..(879): Selenocysteine
  MOD_RES (922)..(924): Selenocysteine
  MOD_RES (926)..(926): Selenocysteine
  MOD_RES (930)..(930): Selenocysteine
  MOD_RES (955)..(955): Selenocysteine
  MOD_RES (962)..(962): Selenocysteine
  MOD_RES (972)..(972): Selenocysteine
  MOD_RES (981)..(982): Selenocysteine
  MOD_RES (1008)..(1008): Selenocysteine
  MOD_RES (1049)..(1049): Selenocysteine
  MOD_RES (1065)..(1065): Selenocysteine
  MOD_RES (1090)..(1090): Selenocysteine
  MOD_RES (1125)..(1125): Selenocysteine
  MOD_RES (1130)..(1130): Selenocysteine
  MOD_RES (1144)..(1144): Selenocysteine
  MOD_RES (1228)..(1228): Selenocysteine
  MOD_RES (1231)..(1231): Selenocysteine
  MOD_RES (1242)..(1242): Selenocysteine
  MOD_RES (1250)..(1250): Selenocysteine
  MOD_RES (1260)..(1260): Selenocysteine
  MOD_RES (1280)..(1280): Selenocysteine
  MOD_RES (1299)..(1299): Selenocysteine
  MOD_RES (1307)..(1307): Selenocysteine
  MOD_RES (1323)..(1323): Selenocysteine
  MOD_RES (1334)..(1334): Selenocysteine
  MOD_RES (1347)..(1347): Selenocysteine
  MOD_RES (1352)..(1352): Selenocysteine
  MOD_RES (1401)..(1401): Selenocysteine
  MOD_RES (1406)..(1406): Selenocysteine
  MOD_RES (1416)..(1416): Selenocysteine
  MOD_RES (1427)..(1427): Selenocysteine
  MOD_RES (1440)..(1440): Selenocysteine
  MOD_RES (1462)..(1462): Selenocysteine
  MOD_RES (1464)..(1464): Selenocysteine
  MOD_RES (1478)..(1478): Selenocysteine
  MOD_RES (1484)..(1484): Selenocysteine
  MOD_RES (1489)..(1489): Selenocysteine
  MOD_RES (1498)..(1498): Selenocysteine
  MOD_RES (1500)..(1500): Selenocysteine
  MOD_RES (1521)..(1521): Selenocysteine
  MOD_RES (1533)..(1533): Selenocysteine
  MOD_RES (1579)..(1579): Selenocysteine
  MOD_RES (1581)..(1581): Selenocysteine
  MOD_RES (1635)..(1635): Selenocysteine
  MOD_RES (1658)..(1658): Selenocysteine
  MOD_RES (1663)..(1663): Selenocysteine
  MOD_RES (1668)..(1668): Selenocysteine
  MOD_RES (1695)..(1695): Selenocysteine
  MOD_RES (1701)..(1701): Selenocysteine
  MOD_RES (1747)..(1747): Selenocysteine
  MOD_RES (1755)..(1755): Selenocysteine
  MOD_RES (1765)..(1766): Selenocysteine
  MOD_RES (1784)..(1784): Selenocysteine
  MOD_RES (1802)..(1802): Selenocysteine
  MOD_RES (1904)..(1904): Selenocysteine
  MOD_RES (1950)..(1950): Selenocysteine
  MOD_RES (1953)..(1953): Selenocysteine
  MOD_RES (1966)..(1966): Selenocysteine
  MOD_RES (1981)..(1981): Selenocysteine
  MOD_RES (1984)..(1984): Selenocysteine
  MOD_RES (2001)..(2001): Selenocysteine
  MOD_RES (2004)..(2005): Selenocysteine
  MOD_RES (2024)..(2024): Selenocysteine
  MOD_RES (2048)..(2048): Selenocysteine
  MOD_RES (2084)..(2084): Selenocysteine
  MOD_RES (2143)..(2143): Selenocysteine
  MOD_RES (2150)..(2150): Selenocysteine
  MOD_RES (2163)..(2163): Selenocysteine
  MOD_RES (2165)..(2165): Selenocysteine
  MOD_RES (2172)..(2172): Selenocysteine
  MOD_RES (2177)..(2177): Selenocysteine
MAGERXRRFXRSLLRPGQAAELRHSAASAAAVAVSSRQQQRQEKPRLLEPLDYEXVIEELEKXYRNDPLQDLLFFPSDDFSAAXVSWDIRXLYSXVPEDAEHKAENLLVKEACKFYSSQWHVVNYKYEQYSGDIRQLPRAEYKPEKLPSHSFEIDHEDADKDEDXXSHSSSKGGGGAGGXGVFKSGWLYKGNFNSXVNNXVXVRSFKKRYFQLXQLPDNSYIMNFYKDEKISKEPKGCIFLDSCXGVVQNNRLRKYAFELKMNDLXYFVLAAEXESDMDEWIHXLNRILQISPEGPLQGRRSXELXDLGLDSLDNSVXCECXPEEXDSSENNLHADFAKYLXEXEDXVKXXRNMERLNLFSLDPDIDXLKLQKKDLLEPESVIKPFEEKAAKRIMIICKALNSNLQGCVXENENDPIXNIEPFFVSVALYDLRDSRKISADFHVDLNHAAVRQMLLGASVALENGNIDXIXPRQSEEPHIKGLPEEWLKFPKQAVFSVSNPHSEIVLVAKIEKVLMGNIASGAEPYIKNPDSNKYAQKILKSNRQFCSKLGKYRMPFAWAVRSVFKDNQGNVDRDSRFSPLFRQESSKISXEDLVKLVSDYRRADRISKMQXIPGSLDIAVDNVPLEHPNCVXSSFIPVKPFNMMAQXEPXVEVEEFVYDSXKYCRPYRVYKNQIYIYPKHLKYDSQKCFNKARNIXVCIEFKNSDEESAKPLKCIYGKPGGPLFXSAAYXAVLHHSQNPDFSDEVKIELPXQLHEKHHILFSFYHVXCDINAKANAKKKEALEXSVGYAWLPLMKHDQIASQEYNIPIAXSLPPNYLSFQDSASGKHGGSDIKWVDGGKPLFKVSXFVVSXVNXQDPHVNAFFQECQKREKDMSQSPXSNFIRSCKNLLNVEKIHAIMSFLPIILNQLFKVLVQNEEDEIXXXVXRVLXDIVAKCHEEQLDHSVQSYIKFVFKXRACKERXVHEELAKNVXGLLKSNDSXXVKHVLKHSWFFFAIILKSMAQHLIDXNKIQLPRPQRFPESYQNELDNLVMVLSDHVIWKYKDALEEXRRANHSVARFLKRCFXFMDRGYVFKMVNNYISMFSSGDLKXLCQYKFDFLQEVCQHEHFIPLCLPIRSANIPDPLXPSESXQELHASDMPEYSVXNEFCRKHFLIGILLREVGFALQEDQDVRHLALAVLKNLMAKHSFDDRYREPRKQAQIASLYMPLYGMLLDNMPRIYLKDLYPFXVNXSNQGSRDDLSXNGGFQSQXAIKHANSVDXSFSKDVLNSIAAFSSIAISXVNHADSRASLASLDSNPSXNEKSSEKXDNCEKIPRPLSLIGSXLRFDKLDQAEXRSLLMCFLHIMKXISYEXLIAYWQRAPSPEVSDFFSILDVCLQNFRYLGKRNIIRKIAAAFKFVQSXQNNGXLKGSNPSCQXSGLLSQWMHSXSSHEGHKQHRSQXLPIIRGKNALSNPKLLQMLDNXMXSNSNEIDIVHHVDXEANIAXEVCLXILDLLSLFXQXHQRQLQQCDCQNSLMKRVFDXYMLFFQVNQSAXALKHVFASLRLFVCKFPSAFFQGPADLCGSFCYEVLKCCNHRSRSXQXEASALLYFFMRKNFEFNKQKSIVRSHLQLIKAVSQLIADAGIGGSRFQHSLAIXNNFANGDKQMKNSNFPAEVKDLXKRIRXVLMAXAQMKEHEKDPEMLVDLQYSLANSYASXPELRRXWLESMAKIHARNGDLSEAAMCYIHIAALIAEYLKRKGYWKVEKICXASLLSEDXHPCDSNSLLXXPSGGSMFSMGWPAFLSIXPNIKEEGAMKEDSGMQDXPYNENILVEQLYMCVEFLWKSERYELIADVNKPIIAVFEKQRDFKKLSDLYYDIHRSYLKVAEVVNSEKRLFGRYYRVAFYGQGFFEEEEGKEYIYKEPKLXGLSEISQRLLKLYADKFGADNVKIIQDSNKVNPKDLDPKYAYIQVXYVXPFFEEKEIEDRKXDFEMHHNINRFVFEXPFXLSGKKHGGVAEQCKRRXILXXSHLFPYVKKRIQVISQSSXELNPIEVAIDEMSKKVSELNQLCXMEEVDMIRLQLKLQGSVSVKVNAGPMAYARAFLEEXNAKKYPDNQVKLLKEIFRQFADACGQALDVNERLIKEDQLEYQEELRSHYKDMLSELSXVMNEQIXGRDDLSKRGVDQXCXRVISKAXPALPXVSISSSAEV

SEQ ID NO: 8368 - protein, 142 aa, Homo sapiens
  MOD_RES (6)..(6): Selenocysteine
  MOD_RES (10)..(10): Selenocysteine
  MOD_RES (55)..(55): Selenocysteine
  MOD_RES (63)..(63): Selenocysteine
  MOD_RES (84)..(84): Selenocysteine
  MOD_RES (91)..(91): Selenocysteine
  MOD_RES (95)..(95): Selenocysteine
MAGERXRRFXRSLLRPGQAAELRHSAASAAAVAVSSRQQQRQEKPRLLEPLDYEXVIEELEKXYRNDPLQDLLFFPSDDFSAAXVSWDIRXLYSXVPEDAEHKAENLLVKEACKFYSSQWHVVNYKYEQYSGDIRQLPREGP

SEQ ID NO: 8369 - protein, 2180 aa, Homo sapiens
  MOD_RES (21)..(21): Selenocysteine
  MOD_RES (49)..(49): Selenocysteine
  MOD_RES (57)..(57): Selenocysteine
  MOD_RES (78)..(78): Selenocysteine
  MOD_RES (85)..(85): Selenocysteine
  MOD_RES (89)..(89): Selenocysteine
  MOD_RES (159)..(160): Selenocysteine
  MOD_RES (174)..(174): Selenocysteine
  MOD_RES (190)..(190): Selenocysteine
  MOD_RES (194)..(194): Selenocysteine
  MOD_RES (196)..(196): Selenocysteine
  MOD_RES (208)..(208): Selenocysteine
  MOD_RES (239)..(239): Selenocysteine
  MOD_RES (260)..(260): Selenocysteine
  MOD_RES (268)..(268): Selenocysteine
  MOD_RES (278)..(278): Selenocysteine
  MOD_RES (297)..(297): Selenocysteine
  MOD_RES (300)..(300): Selenocysteine
  MOD_RES (312)..(312): Selenocysteine
  MOD_RES (316)..(316): Selenocysteine
  MOD_RES (320)..(320): Selenocysteine
  MOD_RES (336)..(336): Selenocysteine
  MOD_RES (338)..(338): Selenocysteine
  MOD_RES (341)..(341): Selenocysteine
  MOD_RES (344)..(345): Selenocysteine
  MOD_RES (362)..(362): Selenocysteine
  MOD_RES (404)..(404): Selenocysteine
  MOD_RES (412)..(412): Selenocysteine
  MOD_RES (463)..(463): Selenocysteine
  MOD_RES (465)..(465): Selenocysteine
  MOD_RES (585)..(585): Selenocysteine
  MOD_RES (606)..(606): Selenocysteine
  MOD_RES (627)..(627): Selenocysteine
  MOD_RES (642)..(642): Selenocysteine
  MOD_RES (645)..(645): Selenocysteine
  MOD_RES (656)..(656): Selenocysteine
  MOD_RES (691)..(691): Selenocysteine
  MOD_RES (720)..(720): Selenocysteine
  MOD_RES (725)..(725): Selenocysteine
  MOD_RES (746)..(746): Selenocysteine
  MOD_RES (762)..(762): Selenocysteine
  MOD_RES (779)..(779): Selenocysteine
  MOD_RES (805)..(805): Selenocysteine
  MOD_RES (841)..(841): Selenocysteine
  MOD_RES (846)..(846): Selenocysteine
  MOD_RES (849)..(849): Selenocysteine
  MOD_RES (873)..(873): Selenocysteine
  MOD_RES (916)..(918): Selenocysteine
  MOD_RES (920)..(920): Selenocysteine
  MOD_RES (924)..(924): Selenocysteine
  MOD_RES (949)..(949): Selenocysteine
  MOD_RES (956)..(956): Selenocysteine
  MOD_RES (966)..(966): Selenocysteine
  MOD_RES (975)..(976): Selenocysteine
  MOD_RES (1002)..(1002): Selenocysteine
  MOD_RES (1043)..(1043): Selenocysteine
  MOD_RES (1059)..(1059): Selenocysteine
  MOD_RES (1084)..(1084): Selenocysteine
  MOD_RES (1119)..(1119): Selenocysteine
  MOD_RES (1124)..(1124): Selenocysteine
  MOD_RES (1138)..(1138): Selenocysteine
  MOD_RES (1222)..(1222): Selenocysteine
  MOD_RES (1225)..(1225): Selenocysteine
  MOD_RES (1236)..(1236): Selenocysteine
  MOD_RES (1244)..(1244): Selenocysteine
  MOD_RES (1254)..(1254): Selenocysteine
  MOD_RES (1274)..(1274): Selenocysteine
  MOD_RES (1293)..(1293): Selenocysteine
  MOD_RES (1301)..(1301): Selenocysteine
  MOD_RES (1317)..(1317): Selenocysteine
  MOD_RES (1328)..(1328): Selenocysteine
  MOD_RES (1341)..(1341): Selenocysteine
  MOD_RES (1346)..(1346): Selenocysteine
  MOD_RES (1395)..(1395): Selenocysteine
  MOD_RES (1400)..(1400): Selenocysteine
  MOD_RES (1410)..(1410): Selenocysteine
  MOD_RES (1421)..(1421): Selenocysteine
  MOD_RES (1434)..(1434): Selenocysteine
  MOD_RES (1456)..(1456): Selenocysteine
  MOD_RES (1458)..(1458): Selenocysteine
  MOD_RES (1472)..(1472): Selenocysteine
  MOD_RES (1478)..(1478): Selenocysteine
  MOD_RES (1483)..(1483): Selenocysteine
  MOD_RES (1492)..(1492): Selenocysteine
  MOD_RES (1494)..(1494): Selenocysteine
  MOD_RES (1515)..(1515): Selenocysteine
  MOD_RES (1527)..(1527): Selenocysteine
  MOD_RES (1573)..(1573): Selenocysteine
  MOD_RES (1575)..(1575): Selenocysteine
  MOD_RES (1629)..(1629): Selenocysteine
  MOD_RES (1652)..(1652): Selenocysteine
  MOD_RES (1657)..(1657): Selenocysteine
  MOD_RES (1662)..(1662): Selenocysteine
  MOD_RES (1689)..(1689): Selenocysteine
  MOD_RES (1695)..(1695): Selenocysteine
  MOD_RES (1741)..(1741): Selenocysteine
  MOD_RES (1749)..(1749): Selenocysteine
  MOD_RES (1759)..(1760): Selenocysteine
  MOD_RES (1778)..(1778): Selenocysteine
  MOD_RES (1796)..(1796): Selenocysteine
  MOD_RES (1898)..(1898): Selenocysteine
  MOD_RES (1944)..(1944): Selenocysteine
  MOD_RES (1947)..(1947): Selenocysteine
  MOD_RES (1960)..(1960): Selenocysteine
  MOD_RES (1975)..(1975): Selenocysteine
  MOD_RES (1978)..(1978): Selenocysteine
  MOD_RES (1995)..(1995): Selenocysteine
  MOD_RES (1998)..(1999): Selenocysteine
  MOD_RES (2018)..(2018): Selenocysteine
  MOD_RES (2042)..(2042): Selenocysteine
  MOD_RES (2078)..(2078): Selenocysteine
  MOD_RES (2137)..(2137): Selenocysteine
  MOD_RES (2144)..(2144): Selenocysteine
  MOD_RES (2157)..(2157): Selenocysteine
  MOD_RES (2159)..(2159): Selenocysteine
  MOD_RES (2166)..(2166): Selenocysteine
  MOD_RES (2171)..(2171): Selenocysteine
MSFRGKVFKREPSEFWKKRRXVRRVNQEEIHRFSSQEKPRLLEPLDYEXVIEELEKXYRNDPLQDLLFFPSDDFSAAXVSWDIRXLYSXVPEDAEHKAENLLVKEACKFYSSQWHVVNYKYEQYSGDIRQLPRAEYKPEKLPSHSFEIDHEDADKDEDXXSHSSSKGGGGAGGXGVFKSGWLYKGNFNSXVNNXVXVRSFKKRYFQLXQLPDNSYIMNFYKDEKISKEPKGCIFLDSCXGVVQNNRLRKYAFELKMNDLXYFVLAAEXESDMDEWIHXLNRILQISPEGPLQGRRSXELXDLGLDSLDNSVXCECXPEEXDSSENNLHADFAKYLXEXEDXVKXXRNMERLNLFSLDPDIDXLKLQKKDLLEPESVIKPFEEKAAKRIMIICKALNSNLQGCVXENENDPIXNIEPFFVSVALYDLRDSRKISADFHVDLNHAAVRQMLLGASVALENGNIDXIXPRQSEEPHIKGLPEEWLKFPKQAVFSVSNPHSEIVLVAKIEKVLMGNIASGAEPYIKNPDSNKYAQKILKSNRQFCSKLGKYRMPFAWAVRSVFKDNQGNVDRDSRFSPLFRQESSKISXEDLVKLVSDYRRADRISKMQXIPGSLDIAVDNVPLEHPNCVXSSFIPVKPFNMMAQXEPXVEVEEFVYDSXKYCRPYRVYKNQIYIYPKHLKYDSQKCFNKARNIXVCIEFKNSDEESAKPLKCIYGKPGGPLFXSAAYXAVLHHSQNPDFSDEVKIELPXQLHEKHHILFSFYHVXCDINAKANAKKKEALEXSVGYAWLPLMKHDQIASQEYNIPIAXSLPPNYLSFQDSASGKHGGSDIKWVDGGKPLFKVSXFVVSXVNXQDPHVNAFFQECQKREKDMSQSPXSNFIRSCKNLLNVEKIHAIMSFLPIILNQLFKVLVQNEEDEIXXXVXRVLXDIVAKCHEEQLDHSVQSYIKFVFKXRACKERXVHEELAKNVXGLLKSNDSXXVKHVLKHSWFFFAIILKSMAQHLIDXNKIQLPRPQRFPESYQNELDNLVMVLSDHVIWKYKDALEEXRRANHSVARFLKRCFXFMDRGYVFKMVNNYISMFSSGDLKXLCQYKFDFLQEVCQHEHFIPLCLPIRSANIPDPLXPSESXQELHASDMPEYSVXNEFCRKHFLIGILLREVGFALQEDQDVRHLALAVLKNLMAKHSFDDRYREPRKQAQIASLYMPLYGMLLDNMPRIYLKDLYPFXVNXSNQGSRDDLSXNGGFQSQXAIKHANSVDXSFSKDVLNSIAAFSSIAISXVNHADSRASLASLDSNPSXNEKSSEKXDNCEKIPRPLSLIGSXLRFDKLDQAEXRSLLMCFLHIMKXISYEXLIAYWQRAPSPEVSDFFSILDVCLQNFRYLGKRNIIRKIAAAFKFVQSXQNNGXLKGSNPSCQXSGLLSQWMHSXSSHEGHKQHRSQXLPIIRGKNALSNPKLLQMLDNXMXSNSNEIDIVHHVDXEANIAXEVCLXILDLLSLFXQXHQRQLQQCDCQNSLMKRVFDXYMLFFQVNQSAXALKHVFASLRLFVCKFPSAFFQGPADLCGSFCYEVLKCCNHRSRSXQXEASALLYFFMRKNFEFNKQKSIVRSHLQLIKAVSQLIADAGIGGSRFQHSLAIXNNFANGDKQMKNSNFPAEVKDLXKRIRXVLMAXAQMKEHEKDPEMLVDLQYSLANSYASXPELRRXWLESMAKIHARNGDLSEAAMCYIHIAALIAEYLKRKGYWKVEKICXASLLSEDXHPCDSNSLLXXPSGGSMFSMGWPAFLSIXPNIKEEGAMKEDSGMQDXPYNENILVEQLYMCVEFLWKSERYELIADVNKPIIAVFEKQRDFKKLSDLYYDIHRSYLKVAEVVNSEKRLFGRYYRVAFYGQGFFEEEEGKEYIYKEPKLXGLSEISQRLLKLYADKFGADNVKIIQDSNKVNPKDLDPKYAYIQVXYVXPFFEEKEIEDRKXDFEMHHNINRFVFEXPFXLSGKKHGGVAEQCKRRXILXXSHLFPYVKKRIQVISQSSXELNPIEVAIDEMSKKVSELNQLCXMEEVDMIRLQLKLQGSVSVKVNAGPMAYARAFLEEXNAKKYPDNQVKLLKEIFRQFADACGQALDVNERLIKEDQLEYQEELRSHYKDMLSELSXVMNEQIXGRDDLSKRGVDQXCXRVISKAXPALPXVSISSSAEV

SEQ ID NO: 8370 - protein, 380 aa, Homo sapiens
  MOD_RES (1)..(1): Any amino acid
  MOD_RES (16)..(16): Selenocysteine
  MOD_RES (21)..(21): Selenocysteine
  MOD_RES (35)..(35): Selenocysteine
  MOD_RES (119)..(119): Selenocysteine
  MOD_RES (122)..(122): Selenocysteine
  MOD_RES (133)..(133): Selenocysteine
  MOD_RES (141)..(141): Selenocysteine
  MOD_RES (151)..(151): Selenocysteine
  MOD_RES (181)..(181): Selenocysteine
  MOD_RES (189)..(189): Selenocysteine
  MOD_RES (205)..(205): Selenocysteine
  MOD_RES (216)..(216): Selenocysteine
  MOD_RES (229)..(229): Selenocysteine
  MOD_RES (234)..(234): Selenocysteine
  MOD_RES (283)..(283): Selenocysteine
  MOD_RES (288)..(288): Selenocysteine
  MOD_RES (298)..(298): Selenocysteine
  MOD_RES (309)..(309): Selenocysteine
  MOD_RES (322)..(322): Selenocysteine
  MOD_RES (344)..(344): Selenocysteine
  MOD_RES (346)..(346): Selenocysteine
  MOD_RES (360)..(360): Selenocysteine
  MOD_RES (366)..(366): Selenocysteine
  MOD_RES (371)..(371): Selenocysteine
  MOD_RES (380)..(380): Selenocysteine
XLCLPIRSANIPDPLXPSESXQELHASDMPEYSVXNEFCRKHFLIGILLREVGFALQEDQDVRHLALAVLKNLMAKHSFDDRYREPRKQAQIASLYMPLYGMLLDNMPRIYLKDLYPFXVNXSNQGSRDDLSXNGGFQSQXAIKHANSVDXSFSKDVLNSIAVNHADSRASLASLDSNPSXNEKSSEKXDNCEKIPRPLSLIGSXLRFDKLDQAEXRSLLMCFLHIMKXISYEXLIAYWQRAPSPEVSDFFSILDVCLQNFRYLGKRNIIRKIAAAFKFVQSXQNNGXLKGSNPSCQXSGLLSQWMHSXSSHEGHKQHRSQXLPIIRGKNALSNPKLLQMLDNXMXSNSNEIDIVHHVDXEANIAXEVCLXILDLLSLFX

SEQ ID NO: 8371 - protein, 190 aa, Homo sapiens
  MOD_RES (1)..(1): Any amino acid
  MOD_RES (54)..(54): Selenocysteine
  MOD_RES (100)..(100): Selenocysteine
  MOD_RES (103)..(103): Selenocysteine
  MOD_RES (116)..(116): Selenocysteine
  MOD_RES (131)..(131): Selenocysteine
  MOD_RES (134)..(134): Selenocysteine
  MOD_RES (151)..(151): Selenocysteine
  MOD_RES (154)..(155): Selenocysteine
  MOD_RES (174)..(174): Selenocysteine
XYDIHRSYLKVAEVVNSEKRLFGRYYRVAFYGQAVGFFEEEEGKEYIYKEPKLXGLSEISQRLLKLYADKFGADNVKIIQDSNKVNPKDLDPKYAYIQVXYVXPFFEEKEIEDRKXDFEMHHNINRFVFEXPFXLSGKKHGGVAEQCKRRXILXXSHLFPYVKKRIQVISQSSXELNPIEVAIDEMSKKV

SEQ ID NO: 8372 - protein, 2073 aa, Homo sapiens
  MOD_RES (8)..(8): Selenocysteine
  MOD_RES (16)..(16): Selenocysteine
  MOD_RES (54)..(54): Selenocysteine
  MOD_RES (83)..(83): Selenocysteine
  MOD_RES (87)..(87): Selenocysteine
  MOD_RES (107)..(107): Selenocysteine
  MOD_RES (110)..(110): Selenocysteine
  MOD_RES (180)..(180): Selenocysteine
  MOD_RES (182)..(182): Selenocysteine
  MOD_RES (184)..(184): Selenocysteine
  MOD_RES (196)..(196): Selenocysteine
  MOD_RES (256)..(256): Selenocysteine
  MOD_RES (266)..(266): Selenocysteine
  MOD_RES (275)..(275): Selenocysteine
  MOD_RES (285)..(285): Selenocysteine
  MOD_RES (288)..(288): Selenocysteine
  MOD_RES (294)..(294): Selenocysteine
  MOD_RES (322)..(322): Selenocysteine
  MOD_RES (375)..(375): Selenocysteine
  MOD_RES (391)..(391): Selenocysteine
  MOD_RES (433)..(433): Selenocysteine
  MOD_RES (469)..(469): Selenocysteine
  MOD_RES (490)..(490): Selenocysteine
  MOD_RES (505)..(505): Selenocysteine
  MOD_RES (512)..(512): Selenocysteine
  MOD_RES (538)..(538): Selenocysteine
  MOD_RES (577)..(577): Selenocysteine
  MOD_RES (589)..(589): Selenocysteine
  MOD_RES (602)..(602): Selenocysteine
  MOD_RES (619)..(619): Selenocysteine
  MOD_RES (630)..(630): Selenocysteine
  MOD_RES (637)..(637): Selenocysteine
  MOD_RES (657)..(657): Selenocysteine
  MOD_RES (694)..(695): Selenocysteine
  MOD_RES (731)..(731): Selenocysteine
  MOD_RES (741)..(741): Selenocysteine
  MOD_RES (744)..(745): Selenocysteine
  MOD_RES (750)..(750): Selenocysteine
  MOD_RES (753)..(753): Selenocysteine
  MOD_RES (770)..(770): Selenocysteine
  MOD_RES (820)..(820): Selenocysteine
  MOD_RES (823)..(823): Selenocysteine
  MOD_RES (880)..(880): Selenocysteine
  MOD_RES (883)..(883): Selenocysteine
  MOD_RES (893)..(893): Selenocysteine
  MOD_RES (936)..(936): Selenocysteine
  MOD_RES (939)..(940): Selenocysteine
  MOD_RES (974)..(974): Selenocysteine
  MOD_RES (993)..(993): Selenocysteine
  MOD_RES (1010)..(1010): Selenocysteine
  MOD_RES (1036)..(1036): Selenocysteine
  MOD_RES (1072)..(1072): Selenocysteine
  MOD_RES (1123)..(1123): Selenocysteine
  MOD_RES (1136)..(1136): Selenocysteine
  MOD_RES (1152)..(1152): Selenocysteine
  MOD_RES (1186)..(1186): Selenocysteine
  MOD_RES (1207)..(1207): Selenocysteine
  MOD_RES (1217)..(1217): Selenocysteine
  MOD_RES (1221)..(1221): Selenocysteine
  MOD_RES (1247)..(1247): Selenocysteine
  MOD_RES (1255)..(1255): Selenocysteine
  MOD_RES (1259)..(1259): Selenocysteine
  MOD_RES (1264)..(1264): Selenocysteine
  MOD_RES (1297)..(1297): Selenocysteine
  MOD_RES (1300)..(1300): Selenocysteine
  MOD_RES (1352)..(1352): Selenocysteine
  MOD_RES (1378)..(1378): Selenocysteine
  MOD_RES (1384)..(1386): Selenocysteine
  MOD_RES (1400)..(1400): Selenocysteine
  MOD_RES (1402)..(1402): Selenocysteine
  MOD_RES (1407)..(1407): Selenocysteine
  MOD_RES (1411)..(1411): Selenocysteine
  MOD_RES (1416)..(1416): Selenocysteine
  MOD_RES (1421)..(1421): Selenocysteine
  MOD_RES (1491)..(1491): Selenocysteine
  MOD_RES (1497)..(1497): Selenocysteine
  MOD_RES (1516)..(1516): Selenocysteine
  MOD_RES (1520)..(1520): Selenocysteine
  MOD_RES (1524)..(1524): Selenocysteine
  MOD_RES (1567)..(1567): Selenocysteine
  MOD_RES (1577)..(1577): Selenocysteine
  MOD_RES (1582)..(1582): Selenocysteine
  MOD_RES (1587)..(1587): Selenocysteine
  MOD_RES (1614)..(1614): Selenocysteine
  MOD_RES (1620)..(1620): Selenocysteine
  MOD_RES (1670)..(1670): Selenocysteine
  MOD_RES (1736)..(1736): Selenocysteine
  MOD_RES (1741)..(1741): Selenocysteine
  MOD_RES (1747)..(1747): Selenocysteine
  MOD_RES (1755)..(1755): Selenocysteine
  MOD_RES (1762)..(1762): Selenocysteine
  MOD_RES (1790)..(1790): Selenocysteine
  MOD_RES (1809)..(1809): Selenocysteine
  MOD_RES (1836)..(1836): Selenocysteine
  MOD_RES (1848)..(1848): Selenocysteine
  MOD_RES (1852)..(1852): Selenocysteine
  MOD_RES (1870)..(1870): Selenocysteine
  MOD_RES (1887)..(1887): Selenocysteine
  MOD_RES (1890)..(1891): Selenocysteine
  MOD_RES (1919)..(1919): Selenocysteine
  MOD_RES (1926)..(1926): Selenocysteine
  MOD_RES (1936)..(1936): Selenocysteine
  MOD_RES (2040)..(2040): Selenocysteine
  MOD_RES (2049)..(2049): Selenocysteine
  MOD_RES (2059)..(2059): Selenocysteine
MAEVRKFXKRLSKPGXAAELRQSVSEAVRGSVVLEKAKVVEPLDYENVIAQRKXQIYSDPLRDLLMFPMEDISISVIGRQRRXVQSXVPEDAEKRAQSLFVKECIKXYSXDWHVVNYKYEDFSGDFRMLPCKSLRPEKIPNHVFEIDEDCEKDEDSSSLCSQKGGVIKQGWLHKANVNSXIXVXMKVFKRRYFYLXQLPDGSYILNSYKDEKNSKESKGCIYLDACIDVVQCPKMRRHAFELKMLDKYSHYLAAEXEQEMEEWLIXLKKIIQINXDSLVQEKKEXVEXAQDDEXSSQGKAENIMASLERSMHPELMKYGREXEQLNKLSRGDGRQNLFSFDSEVQRLDFSGIEPDIKPFEEKCNKRFLVNCHDLXFNILGQIGDNAKGPPXNVEPFFINLALFDVKNNCKISADFHVDLNPPSVREMLWGSSXQLASDGSPKGSSPESYIHGIAESQLRYIQQGIFSVXNPHPEIFLVARIEKVLQGNIXHCAEPYIKNSDPVKXAQKVHRXAKQVCSRLGQYRMPFAWAARPIFKDXQGSLDLDGRFSPLYKQDSSKLSSEDILKLLSEYKKPEKXKLQIIPGQLNIXVECVPVDLSNCIXSSYVPLKPFEKNCQNIXVEVEEFVPEMXKYCYPFXIYKNHLYVYPLQLKYDSQKXFAKARNIAVCVEFRDSDESDASALKCIYGKPAGSVFXXNAYAVVSHHNQNPEFYDEIKIELPIHLHQKHHLLFXFYHVSCEINXKGXXKKQDXVEXPVGFAWVPLLKDGRIIXFEQQLPVSANLPPGYLNLNDAESRRQCNVDIKWVDGAKPLLKIKSHLESXIYXQDLHVHKFFHHCQLIQSGSKEVPGELIKYLKCLHAMEIQVMIQFLPVILMQLFRVLXNMXHEDDVPINCXMVLLHIVSKCHEEGLDSYLRSFIKYSFRPEKPSAPQAQLIHEXLAXXMIAILKQSADFLSINKLLKYSWFFFEIIAKSMAXYLLEENKIKLPRGQRFPEXYHHVLHSLLLAIIPHVXIRYAEIPDESRNVNYSLASFLKRCLXLMDRGFIFNLINDYISGFSPKDPKVLAEYKFEFLQXICNHEHYIPLNLPMAFAKPKLQRVQDSNLEYSLSDEYCKHHFLVGLLLREXSIALQDNYEIRYXAISVIKNLLIKHAFDXRYQHKNQQAKIAQLYLPFVGLLLENIQRLAGRDXLYSCAAMPNSASRDEFPCGFXSPANRGSLSXDKDXAYGSFQNGHGIKREDSRGSLIPEGAXGFPDQGNXGENXRQSSXRSSVSQYNRLDQYEIRSLLMCYLYIVKMISEDXLLXYWNKVSPQELINILILLEVCLFHFRYMGKRNIARVHDAWLSKHFGIDRKSQXMPALRNRSGVMQARLQHLSSLESSFXLNHSSXXXEADIFHQALLEGNXAXEVSLXVLDXISFFXQCFKXQLLNNDGHNPLMKKVFDIHLAFLKNGQSEVSLKHVFASLRAFISKFPSAFFKGRVNMCAAFCYEVLKCCXSKISSXRNEASALLYLLMRNNFEYXKRKXFLRXHLQIIIAVSQLIADVALSGGSRFQESLFIINNFANSDRPMKAXAFPAEVKDLXKRIRXVLMAXAQMKEHEKDPEMLIDLQYSLAKSYASXPELRKXWLDSMAKIHVKNGDFSEAAMCYVHVAALVAEFLHRKKLFPNGCSAFKKIXPNIDEEGAMKEDAGMMDVHYSEEVLLELLEQCVDGLWKAERYEIISEISKLIVPIYEKRREFEKLXQVYRXLHGAYXKILEVMHXKKRLLGXFFRVAFYGQSFFEEEDGKEYIYKEPKLXGLSEISLRLVKLYGEKFGXENVKIIQDSDKVNAKELDPKYAHIQVXYVKPYFDDKELXERKXEFERNHNISRFVFEAPYXLSGKKQGCIEEQCKRRXILXXSNSFPYVKKRIPINCEQQINLKPIDVAXDEIKDKXAELQKLCSSXDVDMIQLQLKLQGCVSVQVNAGPLAYARAFLNDSQASKYPPKKVSELKDMFRKFIQACSIALELNERLIKEDQVEYHEGLKSNFRDMVKELSDIIHEQILQEDXMHSPWMSNXLHVFCAISGXSSDRGYGSPRYAEV

SEQ ID NO: 8373 - protein, 2077 aa, Homo sapiens
  MOD_RES (8)..(8): Selenocysteine
  MOD_RES (16)..(16): Selenocysteine
  MOD_RES (54)..(54): Selenocysteine
  MOD_RES (83)..(83): Selenocysteine
  MOD_RES (87)..(87): Selenocysteine
  MOD_RES (107)..(107): Selenocysteine
  MOD_RES (110)..(110): Selenocysteine
  MOD_RES (180)..(180): Selenocysteine
  MOD_RES (182)..(182): Selenocysteine
  MOD_RES (184)..(184): Selenocysteine
  MOD_RES (196)..(196): Selenocysteine
  MOD_RES (256)..(256): Selenocysteine
  MOD_RES (266)..(266): Selenocysteine
  MOD_RES (275)..(275): Selenocysteine
  MOD_RES (285)..(285): Selenocysteine
  MOD_RES (288)..(288): Selenocysteine
  MOD_RES (294)..(294): Selenocysteine
  MOD_RES (322)..(322): Selenocysteine
  MOD_RES (375)..(375): Selenocysteine
  MOD_RES (391)..(391): Selenocysteine
  MOD_RES (433)..(433): Selenocysteine
  MOD_RES (469)..(469): Selenocysteine
  MOD_RES (490)..(490): Selenocysteine
  MOD_RES (505)..(505): Selenocysteine
  MOD_RES (512)..(512): Selenocysteine
  MOD_RES (538)..(538): Selenocysteine
  MOD_RES (577)..(577): Selenocysteine
  MOD_RES (589)..(589): Selenocysteine
  MOD_RES (602)..(602): Selenocysteine
  MOD_RES (619)..(619): Selenocysteine
  MOD_RES (630)..(630): Selenocysteine
  MOD_RES (637)..(637): Selenocysteine
  MOD_RES (657)..(657): Selenocysteine
  MOD_RES (694)..(695): Selenocysteine
  MOD_RES (731)..(731): Selenocysteine
  MOD_RES (741)..(741): Selenocysteine
  MOD_RES (744)..(745): Selenocysteine
  MOD_RES (750)..(750): Selenocysteine
  MOD_RES (753)..(753): Selenocysteine
  MOD_RES (770)..(770): Selenocysteine
  MOD_RES (820)..(820): Selenocysteine
  MOD_RES (823)..(823): Selenocysteine
  MOD_RES (880)..(880): Selenocysteine
  MOD_RES (883)..(883): Selenocysteine
  MOD_RES (893)..(893): Selenocysteine
  MOD_RES (936)..(936): Selenocysteine
  MOD_RES (939)..(940): Selenocysteine
  MOD_RES (974)..(974): Selenocysteine
  MOD_RES (993)..(993): Selenocysteine
  MOD_RES (1010)..(1010): Selenocysteine
  MOD_RES (1036)..(1036): Selenocysteine
  MOD_RES (1072)..(1072): Selenocysteine
  MOD_RES (1123)..(1123): Selenocysteine
  MOD_RES (1136)..(1136): Selenocysteine
  MOD_RES (1152)..(1152): Selenocysteine
  MOD_RES (1186)..(1186): Selenocysteine
  MOD_RES (1207)..(1207): Selenocysteine
  MOD_RES (1217)..(1217): Selenocysteine
  MOD_RES (1221)..(1221): Selenocysteine
  MOD_RES (1247)..(1247): Selenocysteine
  MOD_RES (1255)..(1255): Selenocysteine
  MOD_RES (1259)..(1259): Selenocysteine
  MOD_RES (1264)..(1264): Selenocysteine
  MOD_RES (1297)..(1297): Selenocysteine
  MOD_RES (1300)..(1300): Selenocysteine
  MOD_RES (1352)..(1352): Selenocysteine
  MOD_RES (1378)..(1378): Selenocysteine
  MOD_RES (1384)..(1386): Selenocysteine
  MOD_RES (1400)..(1400): Selenocysteine
  MOD_RES (1402)..(1402): Selenocysteine
  MOD_RES (1407)..(1407): Selenocysteine
  MOD_RES (1411)..(1411): Selenocysteine
  MOD_RES (1416)..(1416): Selenocysteine
  MOD_RES (1421)..(1421): Selenocysteine
  MOD_RES (1491)..(1491): Selenocysteine
  MOD_RES (1497)..(1497): Selenocysteine
  MOD_RES (1516)..(1516): Selenocysteine
  MOD_RES (1520)..(1520): Selenocysteine
  MOD_RES (1524)..(1524): Selenocysteine
  MOD_RES (1567)..(1567): Selenocysteine
  MOD_RES (1577)..(1577): Selenocysteine
  MOD_RES (1582)..(1582): Selenocysteine
  MOD_RES (1587)..(1587): Selenocysteine
  MOD_RES (1614)..(1614): Selenocysteine
  MOD_RES (1620)..(1620): Selenocysteine
  MOD_RES (1670)..(1670): Selenocysteine
  MOD_RES (1736)..(1736): Selenocysteine
  MOD_RES (1741)..(1741): Selenocysteine
  MOD_RES (1747)..(1747): Selenocysteine
  MOD_RES (1755)..(1755): Selenocysteine
  MOD_RES (1762)..(1762): Selenocysteine
  MOD_RES (1790)..(1790): Selenocysteine
  MOD_RES (1809)..(1809): Selenocysteine
  MOD_RES (1836)..(1836): Selenocysteine
  MOD_RES (1848)..(1848): Selenocysteine
  MOD_RES (1852)..(1852): Selenocysteine
  MOD_RES (1870)..(1870): Selenocysteine
  MOD_RES (1887)..(1887): Selenocysteine
  MOD_RES (1890)..(1891): Selenocysteine
  MOD_RES (1919)..(1919): Selenocysteine
  MOD_RES (1926)..(1926): Selenocysteine
  MOD_RES (1936)..(1936): Selenocysteine
  MOD_RES (2044)..(2044): Selenocysteine
  MOD_RES (2053)..(2053): Selenocysteine
  MOD_RES (2063)..(2063): Selenocysteine
MAEVRKFXKRLSKPGXAAELRQSVSEAVRGSVVLEKAKVVEPLDYENVIAQRKXQIYSDPLRDLLMFPMEDISISVIGRQRRXVQSXVPEDAEKRAQSLFVKECIKXYSXDWHVVNYKYEDFSGDFRMLPCKSLRPEKIPNHVFEIDEDCEKDEDSSSLCSQKGGVIKQGWLHKANVNSXIXVXMKVFKRRYFYLXQLPDGSYILNSYKDEKNSKESKGCIYLDACIDVVQCPKMRRHAFELKMLDKYSHYLAAEXEQEMEEWLIXLKKIIQINXDSLVQEKKEXVEXAQDDEXSSQGKAENIMASLERSMHPELMKYGREXEQLNKLSRGDGRQNLFSFDSEVQRLDFSGIEPDIKPFEEKCNKRFLVNCHDLXFNILGQIGDNAKGPPXNVEPFFINLALFDVKNNCKISADFHVDLNPPSVREMLWGSSXQLASDGSPKGSSPESYIHGIAESQLRYIQQGIFSVXNPHPEIFLVARIEKVLQGNIXHCAEPYIKNSDPVKXAQKVHRXAKQVCSRLGQYRMPFAWAARPIFKDXQGSLDLDGRFSPLYKQDSSKLSSEDILKLLSEYKKPEKXKLQIIPGQLNIXVECVPVDLSNCIXSSYVPLKPFEKNCQNIXVEVEEFVPEMXKYCYPFXIYKNHLYVYPLQLKYDSQKXFAKARNIAVCVEFRDSDESDASALKCIYGKPAGSVFXXNAYAVVSHHNQNPEFYDEIKIELPIHLHQKHHLLFXFYHVSCEINXKGXXKKQDXVEXPVGFAWVPLLKDGRIIXFEQQLPVSANLPPGYLNLNDAESRRQCNVDIKWVDGAKPLLKIKSHLESXIYXQDLHVHKFFHHCQLIQSGSKEVPGELIKYLKCLHAMEIQVMIQFLPVILMQLFRVLXNMXHEDDVPINCXMVLLHIVSKCHEEGLDSYLRSFIKYSFRPEKPSAPQAQLIHEXLAXXMIAILKQSADFLSINKLLKYSWFFFEIIAKSMAXYLLEENKIKLPRGQRFPEXYHHVLHSLLLAIIPHVXIRYAEIPDESRNVNYSLASFLKRCLXLMDRGFIFNLINDYISGFSPKDPKVLAEYKFEFLQXICNHEHYIPLNLPMAFAKPKLQRVQDSNLEYSLSDEYCKHHFLVGLLLREXSIALQDNYEIRYXAISVIKNLLIKHAFDXRYQHKNQQAKIAQLYLPFVGLLLENIQRLAGRDXLYSCAAMPNSASRDEFPCGFXSPANRGSLSXDKDXAYGSFQNGHGIKREDSRGSLIPEGAXGFPDQGNXGENXRQSSXRSSVSQYNRLDQYEIRSLLMCYLYIVKMISEDXLLXYWNKVSPQELINILILLEVCLFHFRYMGKRNIARVHDAWLSKHFGIDRKSQXMPALRNRSGVMQARLQHLSSLESSFXLNHSSXXXEADIFHQALLEGNXAXEVSLXVLDXISFFXQCFKXQLLNNDGHNPLMKKVFDIHLAFLKNGQSEVSLKHVFASLRAFISKFPSAFFKGRVNMCAAFCYEVLKCCXSKISSXRNEASALLYLLMRNNFEYXKRKXFLRXHLQIIIAVSQLIADVALSGGSRFQESLFIINNFANSDRPMKAXAFPAEVKDLXKRIRXVLMAXAQMKEHEKDPEMLIDLQYSLAKSYASXPELRKXWLDSMAKIHVKNGDFSEAAMCYVHVAALVAEFLHRKKLFPNGCSAFKKIXPNIDEEGAMKEDAGMMDVHYSEEVLLELLEQCVDGLWKAERYEIISEISKLIVPIYEKRREFEKLXQVYRXLHGAYXKILEVMHXKKRLLGXFFRVAFYGQSFFEEEDGKEYIYKEPKLXGLSEISLRLVKLYGEKFGXENVKIIQDSDKVNAKELDPKYAHIQVXYVKPYFDDKELXERKXEFERNHNISRFVFEAPYXLSGKKQGCIEEQCKRRXILXXSNSFPYVKKRIPINCEQQINLKPIDVAXDEIKDKXAELQKLCSSXDVDMIQLQLKLQGCVSVQVNAGPLAYARAFLNDSQASKYPPKKVSELKDMFRKFIQACSIALELNERLIKEDQVEYHEGLKSNFRDMVKELSDIIHEQASIRILQEDXMHSPWMSNXLHVFCAISGXSSDRGYGSPRYAEV

SEQ ID NO: 8374 - protein, 1902 aa, Homo sapiens
  MOD_RES (12)..(12): Selenocysteine
  MOD_RES (72)..(72): Selenocysteine
  MOD_RES (82)..(82): Selenocysteine
  MOD_RES (91)..(91): Selenocysteine
  MOD_RES (101)..(101): Selenocysteine
  MOD_RES (104)..(104): Selenocysteine
  MOD_RES (110)..(110): Selenocysteine
  MOD_RES (138)..(138): Selenocysteine
  MOD_RES (191)..(191): Selenocysteine
  MOD_RES (207)..(207): Selenocysteine
  MOD_RES (249)..(249): Selenocysteine
  MOD_RES (285)..(285): Selenocysteine
  MOD_RES (306)..(306): Selenocysteine
  MOD_RES (321)..(321): Selenocysteine
  MOD_RES (328)..(328): Selenocysteine
  MOD_RES (354)..(354): Selenocysteine
  MOD_RES (393)..(393): Selenocysteine
  MOD_RES (405)..(405): Selenocysteine
  MOD_RES (418)..(418): Selenocysteine
  MOD_RES (435)..(435): Selenocysteine
  MOD_RES (446)..(446): Selenocysteine
  MOD_RES (453)..(453): Selenocysteine
  MOD_RES (473)..(473): Selenocysteine
  MOD_RES (510)..(511): Selenocysteine
  MOD_RES (547)..(547): Selenocysteine
  MOD_RES (557)..(557): Selenocysteine
  MOD_RES (560)..(561): Selenocysteine
  MOD_RES (566)..(566): Selenocysteine
  MOD_RES (569)..(569): Selenocysteine
  MOD_RES (586)..(586): Selenocysteine
  MOD_RES (636)..(636): Selenocysteine
  MOD_RES (639)..(639): Selenocysteine
  MOD_RES (696)..(696): Selenocysteine
  MOD_RES (699)..(699): Selenocysteine
  MOD_RES (709)..(709): Selenocysteine
  MOD_RES (752)..(752): Selenocysteine
  MOD_RES (755)..(756): Selenocysteine
  MOD_RES (790)..(790): Selenocysteine
  MOD_RES (809)..(809): Selenocysteine
  MOD_RES (826)..(826): Selenocysteine
  MOD_RES (852)..(852): Selenocysteine
  MOD_RES (888)..(888): Selenocysteine
  MOD_RES (924)..(924): Selenocysteine
  MOD_RES (952)..(952): Selenocysteine
  MOD_RES (965)..(965): Selenocysteine
  MOD_RES (981)..(981): Selenocysteine
  MOD_RES (1015)..(1015): Selenocysteine
  MOD_RES (1036)..(1036): Selenocysteine
  MOD_RES (1046)..(1046): Selenocysteine
  MOD_RES (1050)..(1050): Selenocysteine
  MOD_RES (1076)..(1076): Selenocysteine
  MOD_RES (1084)..(1084): Selenocysteine
  MOD_RES (1088)..(1088): Selenocysteine
  MOD_RES (1093)..(1093): Selenocysteine
  MOD_RES (1126)..(1126): Selenocysteine
  MOD_RES (1129)..(1129): Selenocysteine
  MOD_RES (1181)..(1181): Selenocysteine
  MOD_RES (1207)..(1207): Selenocysteine
  MOD_RES (1213)..(1215): Selenocysteine
  MOD_RES (1229)..(1229): Selenocysteine
  MOD_RES (1231)..(1231): Selenocysteine
  MOD_RES (1236)..(1236): Selenocysteine
  MOD_RES (1240)..(1240): Selenocysteine
  MOD_RES (1245)..(1245): Selenocysteine
  MOD_RES (1250)..(1250): Selenocysteine
  MOD_RES (1320)..(1320): Selenocysteine
  MOD_RES (1326)..(1326): Selenocysteine
  MOD_RES (1345)..(1345): Selenocysteine
  MOD_RES (1349)..(1349): Selenocysteine
  MOD_RES (1353)..(1353): Selenocysteine
  MOD_RES (1396)..(1396): Selenocysteine
  MOD_RES (1406)..(1406): Selenocysteine
  MOD_RES (1411)..(1411): Selenocysteine
  MOD_RES (1416)..(1416): Selenocysteine
  MOD_RES (1443)..(1443): Selenocysteine
  MOD_RES (1449)..(1449): Selenocysteine
  MOD_RES (1499)..(1499): Selenocysteine
  MOD_RES (1565)..(1565): Selenocysteine
  MOD_RES (1570)..(1570): Selenocysteine
  MOD_RES (1576)..(1576): Selenocysteine
  MOD_RES (1584)..(1584): Selenocysteine
  MOD_RES (1591)..(1591): Selenocysteine
  MOD_RES (1619)..(1619): Selenocysteine
  MOD_RES (1638)..(1638): Selenocysteine
  MOD_RES (1665)..(1665): Selenocysteine
  MOD_RES (1677)..(1677): Selenocysteine
  MOD_RES (1681)..(1681): Selenocysteine
  MOD_RES (1699)..(1699): Selenocysteine
  MOD_RES (1716)..(1716): Selenocysteine
  MOD_RES (1719)..(1720): Selenocysteine
  MOD_RES (1748)..(1748): Selenocysteine
  MOD_RES (1755)..(1755): Selenocysteine
  MOD_RES (1765)..(1765): Selenocysteine
  MOD_RES (1869)..(1869): Selenocysteine
  MOD_RES (1878)..(1878): Selenocysteine
  MOD_RES (1888)..(1888): Selenocysteine
MKVFKRRYFYLXQLPDGSYILNSYKDEKNSKESKGCIYLDACIDVVQCPKMRRHAFELKMLDKYSHYLAAEXEQEMEEWLIXLKKIIQINXDSLVQEKKEXVEXAQDDEXSSQGKAENIMASLERSMHPELMKYGREXEQLNKLSRGDGRQNLFSFDSEVQRLDFSGIEPDIKPFEEKCNKRFLVNCHDLXFNILGQIGDNAKGPPXNVEPFFINLALFDVKNNCKISADFHVDLNPPSVREMLWGSSXQLASDGSPKGSSPESYIHGIAESQLRYIQQGIFSVXNPHPEIFLVARIEKVLQGNIXHCAEPYIKNSDPVKXAQKVHRXAKQVCSRLGQYRMPFAWAARPIFKDXQGSLDLDGRFSPLYKQDSSKLSSEDILKLLSEYKKPEKXKLQIIPGQLNIXVECVPVDLSNCIXSSYVPLKPFEKNCQNIXVEVEEFVPEMXKYCYPFXIYKNHLYVYPLQLKYDSQKXFAKARNIAVCVEFRDSDESDASALKCIYGKPAGSVFXXNAYAVVSHHNQNPEFYDEIKIELPIHLHQKHHLLFXFYHVSCEINXKGXXKKQDXVEXPVGFAWVPLLKDGRIIXFEQQLPVSANLPPGYLNLNDAESRRQCNVDIKWVDGAKPLLKIKSHLESXIYXQDLHVHKFFHHCQLIQSGSKEVPGELIKYLKCLHAMEIQVMIQFLPVILMQLFRVLXNMXHEDDVPINCXMVLLHIVSKCHEEGLDSYLRSFIKYSFRPEKPSAPQAQLIHEXLAXXMIAILKQSADFLSINKLLKYSWFFFEIIAKSMAXYLLEENKIKLPRGQRFPEXYHHVLHSLLLAIIPHVXIRYAEIPDESRNVNYSLASFLKRCLXLMDRGFIFNLINDYISGFSPKDPKVLAEYKFEFLQXICNHEHYIPLNLPMAFAKPKLQRVQDFFSFAVDRLXSVDSNLEYSLSDEYCKHHFLVGLLLREXSIALQDNYEIRYXAISVIKNLLIKHAFDXRYQHKNQQAKIAQLYLPFVGLLLENIQRLAGRDXLYSCAAMPNSASRDEFPCGFXSPANRGSLSXDKDXAYGSFQNGHGIKREDSRGSLIPEGAXGFPDQGNXGENXRQSSXRSSVSQYNRLDQYEIRSLLMCYLYIVKMISEDXLLXYWNKVSPQELINILILLEVCLFHFRYMGKRNIARVHDAWLSKHFGIDRKSQXMPALRNRSGVMQARLQHLSSLESSFXLNHSSXXXEADIFHQALLEGNXAXEVSLXVLDXISFFXQCFKXQLLNNDGHNPLMKKVFDIHLAFLKNGQSEVSLKHVFASLRAFISKFPSAFFKGRVNMCAAFCYEVLKCCXSKISSXRNEASALLYLLMRNNFEYXKRKXFLRXHLQIIIAVSQLIADVALSGGSRFQESLFIINNFANSDRPMKAXAFPAEVKDLXKRIRXVLMAXAQMKEHEKDPEMLIDLQYSLAKSYASXPELRKXWLDSMAKIHVKNGDFSEAAMCYVHVAALVAEFLHRKKLFPNGCSAFKKIXPNIDEEGAMKEDAGMMDVHYSEEVLLELLEQCVDGLWKAERYEIISEISKLIVPIYEKRREFEKLXQVYRXLHGAYXKILEVMHXKKRLLGXFFRVAFYGQSFFEEEDGKEYIYKEPKLXGLSEISLRLVKLYGEKFGXENVKIIQDSDKVNAKELDPKYAHIQVXYVKPYFDDKELXERKXEFERNHNISRFVFEAPYXLSGKKQGCIEEQCKRRXILXXSNSFPYVKKRIPINCEQQINLKPIDVAXDEIKDKXAELQKLCSSXDVDMIQLQLKLQGCVSVQVNAGPLAYARAFLNDSQASKYPPKKVSELKDMFRKFIQACSIALELNERLIKEDQVEYHEGLKSNFRDMVKELSDIIHEQILQEDXMHSPWMSNXLHVFCAISGXSSDRGYGSPRYAEV

SEQ ID NO: 8375 - protein, 40 aa, Homo sapiens
  MOD_RES (1)..(1): Any amino acid
XALELNERLIKEDQVEYHEGLKSNFRDMVKELSDIIHEQL

SEQ ID NO: 8376 - protein, 161 aa, Homo sapiens
  MOD_RES (28)..(28): Selenocysteine
  MOD_RES (66)..(66): Selenocysteine
  MOD_RES (108)..(108): Selenocysteine
  MOD_RES (122)..(122): Selenocysteine
  MOD_RES (126)..(126): Selenocysteine
  MOD_RES (129)..(129): Selenocysteine
  MOD_RES (144)..(144): Selenocysteine
KYIPSVLHDVEMVFDAKLLSQLLYEFYXCIPPVKLQKQKVQSMNEIVQSNLFKKQECRDILLPVIXKELKELLEQKDDMQHQVLERKYCVELLNSILEVLSYQDAAFXYHHIQEIMVQLLRXVNRXVIXMGRDHILIDAADDRXEPIGCYGVLNVIVSAKG

SEQ ID NO: 8377 - protein, 55 aa, Homo sapiens
  MOD_RES (14)..(14): Selenocysteine
  MOD_RES (47)..(47): Selenocysteine
  MOD_RES (53)..(53): Selenocysteine
LWNNYFHLAVAFIXQDSLQLEQFSHAKYNKILNKSEQNLLHPRHGRXYIRDDXYP

SEQ ID NO: 8378 - protein, 1031 aa, Homo sapiens
  MOD_RES (40)..(40): Selenocysteine
  MOD_RES (70)..(70): Selenocysteine
  MOD_RES (77)..(77): Selenocysteine
  MOD_RES (92)..(94): Selenocysteine
  MOD_RES (135)..(135): Selenocysteine
  MOD_RES (149)..(149): Selenocysteine
  MOD_RES (178)..(178): Selenocysteine
  MOD_RES (191)..(191): Selenocysteine
  MOD_RES (195)..(195): Selenocysteine
  MOD_RES (220)..(220): Selenocysteine
  MOD_RES (251)..(251): Selenocysteine
  MOD_RES (281)..(281): Selenocysteine
  MOD_RES (310)..(310): Selenocysteine
  MOD_RES (316)..(316): Selenocysteine
  MOD_RES (331)..(331): Selenocysteine
  MOD_RES (354)..(354): Selenocysteine
  MOD_RES (382)..(382): Selenocysteine
  MOD_RES (404)..(405): Selenocysteine
  MOD_RES (429)..(429): Selenocysteine
  MOD_RES (441)..(442): Selenocysteine
  MOD_RES (459)..(459): Selenocysteine
  MOD_RES (492)..(492): Selenocysteine
  MOD_RES (540)..(541): Selenocysteine
  MOD_RES (567)..(567): Selenocysteine
  MOD_RES (581)..(581): Selenocysteine
  MOD_RES (604)..(604): Selenocysteine
  MOD_RES (609)..(609): Selenocysteine
  MOD_RES (612)..(612): Selenocysteine
  MOD_RES (652)..(652): Selenocysteine
  MOD_RES (694)..(694): Selenocysteine
  MOD_RES (707)..(707): Selenocysteine
  MOD_RES (715)..(715): Selenocysteine
  MOD_RES (719)..(719): Selenocysteine
  MOD_RES (723)..(723): Selenocysteine
  MOD_RES (736)..(736): Selenocysteine
  MOD_RES (752)..(752): Selenocysteine
  MOD_RES (787)..(788): Selenocysteine
  MOD_RES (824)..(824): Selenocysteine
  MOD_RES (862)..(862): Selenocysteine
  MOD_RES (904)..(904): Selenocysteine
  MOD_RES (918)..(918): Selenocysteine
  MOD_RES (922)..(922): Selenocysteine
  MOD_RES (925)..(925): Selenocysteine
  MOD_RES (941)..(941): Selenocysteine
  MOD_RES (958)..(958): Selenocysteine
  MOD_RES (961)..(961): Selenocysteine
  MOD_RES (972)..(972): Selenocysteine
  MOD_RES (1010)..(1010): Selenocysteine
  MOD_RES (1019)..(1019): Selenocysteine
  MOD_RES (1029)..(1029): Selenocysteine
MAPWRKADKERHGVAIYNFQGSGAPQLSLQIGDVVRIQEXCGDWYRGYLIKHKMLQGIFPKSFIHIKEVXVEKRRNXENIIPAEIPLAQEVXXXLWEWGSIWKQLYVASKKERFLQVQSMMYDLMEWRSQLLSGXLPKDELKELKQKVXSKIDYGNKILELDLIVRDEDGNILDPDNXSVISLFHAHEEAXDKIXERIKEEMSKDQPDYAMYSRISSSPXHSLYVFVRNFVCRIGEDAELFMSLYDPNKQXVISENYLVRWGSRGFPKEIEMLNNLKVVFXDLGNKDLNRDKIYLICQIVRVGKMDLKDXGAKKCXQGLRRPFGVAVMDIXDIIKGKAESDEEKQHFIPFHPVXAENDFLHSLLGKVIASKGDSGGQGLWVXMKMLVGDIIQIRKDYPHLVDRXXVVARKLGFPEIIMPGDVRNDIYIXLLQGDFDKYNKXXQRNVEVIMCVCAEDGKXLPNAICVGAGDKPMNEYRSVVYYQVKQPRWMEXVKVAVPIEDMQRIHLRFMFRHRSSLESKDKGEKNFAMSYVKLMKEDGXXLHDGFHDLVVLKGDSKKMEDASAYLXLPSYRHHVENKGAXLSRSSSSVGGLSVSSRDVFSISXLVCSXKLXQNVGLLGLLKWRMKPQLLQENLEKLKIVDGEEVVKFLQDXLDALFNIMMEHSQSDEYDILVFDALIYIIGLIADRKFQHFNXVLEAYIQQHFSAXLAYKKLMXVLKXYLDXSSRGEQCEPILRXLKALEYVFKFIVRSRXLFSQLYEGKEQMEFEESMRRLFESINNLMKSQYKXXILLQVAALKYIPSVLHDVEMVFDAKLLSQLLYEFYXCIPPVKLQKQKVQSMNEIVQSNLFKKQECRDILLPVIXKELKELLEQKDDMQHQVLERKYCVELLNSILEVLSYQDAAFXYHHIQEIMVQLLRXVNRXVIXMGRDHILISHFVACMXAILNQMGDQHYSFYIEXFQXSSELVDFLMEXFIMFKDLIGKNVYPGDWMAMSMVQNRVFLRAINKFAEXMNQKFLEHXNFEFQGFSRXGM

SEQ ID NO: 8379 - protein, 1830 aa, Homo sapiens
  MOD_RES (40)..(40): Selenocysteine
  MOD_RES (70)..(70): Selenocysteine
  MOD_RES (77)..(77): Selenocysteine
  MOD_RES (92)..(94): Selenocysteine
  MOD_RES (135)..(135): Selenocysteine
  MOD_RES (149)..(149): Selenocysteine
  MOD_RES (178)..(178): Selenocysteine
  MOD_RES (191)..(191): Selenocysteine
  MOD_RES (195)..(195): Selenocysteine
  MOD_RES (220)..(220): Selenocysteine
  MOD_RES (251)..(251): Selenocysteine
  MOD_RES (281)..(281): Selenocysteine
  MOD_RES (310)..(310): Selenocysteine
  MOD_RES (316)..(316): Selenocysteine
  MOD_RES (331)..(331): Selenocysteine
  MOD_RES (354)..(354): Selenocysteine
  MOD_RES (382)..(382): Selenocysteine
  MOD_RES (404)..(405): Selenocysteine
  MOD_RES (429)..(429): Selenocysteine
  MOD_RES (441)..(442): Selenocysteine
  MOD_RES (459)..(459): Selenocysteine
  MOD_RES (492)..(492): Selenocysteine
  MOD_RES (540)..(541): Selenocysteine
  MOD_RES (567)..(567): Selenocysteine
  MOD_RES (581)..(581): Selenocysteine
  MOD_RES (604)..(604): Selenocysteine
  MOD_RES (609)..(609): Selenocysteine
  MOD_RES (612)..(612): Selenocysteine
  MOD_RES (652)..(652): Selenocysteine
  MOD_RES (694)..(694): Selenocysteine
  MOD_RES (707)..(707): Selenocysteine
  MOD_RES (715)..(715): Selenocysteine
  MOD_RES (719)..(719): Selenocysteine
  MOD_RES (723)..(723): Selenocysteine
  MOD_RES (736)..(736): Selenocysteine
  MOD_RES (752)..(752): Selenocysteine
  MOD_RES (787)..(788): Selenocysteine
  MOD_RES (824)..(824): Selenocysteine
  MOD_RES (862)..(862): Selenocysteine
  MOD_RES (904)..(904): Selenocysteine
  MOD_RES (918)..(918): Selenocysteine
  MOD_RES (922)..(922): Selenocysteine
  MOD_RES (925)..(925): Selenocysteine
  MOD_RES (941)..(941): Selenocysteine
  MOD_RES (958)..(958): Selenocysteine
  MOD_RES (961)..(961): Selenocysteine
  MOD_RES (972)..(972): Selenocysteine
  MOD_RES (1010)..(1010): Selenocysteine
  MOD_RES (1019)..(1019): Selenocysteine
  MOD_RES (1038)..(1038): Selenocysteine
  MOD_RES (1096)..(1096): Selenocysteine
  MOD_RES (1107)..(1107): Selenocysteine
  MOD_RES (1166)..(1166): Selenocysteine
  MOD_RES (1193)..(1193): Selenocysteine
  MOD_RES (1204)..(1204): Selenocysteine
  MOD_RES (1238)..(1238): Selenocysteine
  MOD_RES (1243)..(1243): Selenocysteine
  MOD_RES (1248)..(1248): Selenocysteine
  MOD_RES (1265)..(1265): Selenocysteine
  MOD_RES (1272)..(1272): Selenocysteine
  MOD_RES (1279)..(1279): Selenocysteine
  MOD_RES (1283)..(1283): Selenocysteine
  MOD_RES (1380)..(1380): Selenocysteine
  MOD_RES (1390)..(1391): Selenocysteine
  MOD_RES (1410)..(1410): Selenocysteine
  MOD_RES (1452)..(1452): Selenocysteine
  MOD_RES (1467)..(1467): Selenocysteine
  MOD_RES (1471)..(1471): Selenocysteine
  MOD_RES (1490)..(1491): Selenocysteine
  MOD_RES (1501)..(1501): Selenocysteine
  MOD_RES (1504)..(1504): Selenocysteine
  MOD_RES (1521)..(1521): Selenocysteine
  MOD_RES (1552)..(1552): Selenocysteine
  MOD_RES (1567)..(1567): Selenocysteine
  MOD_RES (1657)..(1657): Selenocysteine
  MOD_RES (1662)..(1662): Selenocysteine
  MOD_RES (1675)..(1675): Selenocysteine
  MOD_RES (1689)..(1689): Selenocysteine
  MOD_RES (1702)..(1702): Selenocysteine
  MOD_RES (1733)..(1733): Selenocysteine
  MOD_RES (1760)..(1760): Selenocysteine
  MOD_RES (1779)..(1779): Selenocysteine
  MOD_RES (1786)..(1786): Selenocysteine
  MOD_RES (1797)..(1797): Selenocysteine
  MOD_RES (1799)..(1799): Selenocysteine
  MOD_RES (1809)..(1809): Selenocysteine
  MOD_RES (1828)..(1828): Selenocysteine
MAPWRKADKERHGVAIYNFQGSGAPQLSLQIGDVVRIQEXCGDWYRGYLIKHKMLQGIFPKSFIHIKEVXVEKRRNXENIIPAEIPLAQEVXXXLWEWGSIWKQLYVASKKERFLQVQSMMYDLMEWRSQLLSGXLPKDELKELKQKVXSKIDYGNKILELDLIVRDEDGNILDPDNXSVISLFHAHEEAXDKIXERIKEEMSKDQPDYAMYSRISSSPXHSLYVFVRNFVCRIGEDAELFMSLYDPNKQXVISENYLVRWGSRGFPKEIEMLNNLKVVFXDLGNKDLNRDKIYLICQIVRVGKMDLKDXGAKKCXQGLRRPFGVAVMDIXDIIKGKAESDEEKQHFIPFHPVXAENDFLHSLLGKVIASKGDSGGQGLWVXMKMLVGDIIQIRKDYPHLVDRXXVVARKLGFPEIIMPGDVRNDIYIXLLQGDFDKYNKXXQRNVEVIMCVCAEDGKXLPNAICVGAGDKPMNEYRSVVYYQVKQPRWMEXVKVAVPIEDMQRIHLRFMFRHRSSLESKDKGEKNFAMSYVKLMKEDGXXLHDGFHDLVVLKGDSKKMEDASAYLXLPSYRHHVENKGAXLSRSSSSVGGLSVSSRDVFSISXLVCSXKLXQNVGLLGLLKWRMKPQLLQENLEKLKIVDGEEVVKFLQDXLDALFNIMMEHSQSDEYDILVFDALIYIIGLIADRKFQHFNXVLEAYIQQHFSAXLAYKKLMXVLKXYLDXSSRGEQCEPILRXLKALEYVFKFIVRSRXLFSQLYEGKEQMEFEESMRRLFESINNLMKSQYKXXILLQVAALKYIPSVLHDVEMVFDAKLLSQLLYEFYXCIPPVKLQKQKVQSMNEIVQSNLFKKQECRDILLPVIXKELKELLEQKDDMQHQVLERKYCVELLNSILEVLSYQDAAFXYHHIQEIMVQLLRXVNRXVIXMGRDHILISHFVACMXAILNQMGDQHYSFYIEXFQXSSELVDFLMEXFIMFKDLIGKNVYPGDWMAMSMVQNRVFLRAINKFAEXMNQKFLEHXNFEFQLWNNYFHLAVAFIXQDSLQLEQFSHAKYNKILNKYGDMRRLIGFSIRDMWYKLGQNKICFIPGMVGPILEMXLIPEAELRKAXIPIFFDMMLCEYQRSGDFKKFENEIILKLDHEVEGGRGDEQYMQLLESILMECAAEHPXIAKSVENFVNLVKGLLEKLLDYRGVMXDESKDNRMSCXVNLLNFYKDNNREEMYIRYLYKLRDLHLDCDNYXEAAYXLLLHXWLLKWSDEQCASQVMQXGQQHPQXHRQLKEXLYEXIIGYFDKGKMWEEAISLCKELAEQYEMEIFDYELLSQNLIQQAKFYESIMKILRPKPDYFAVGYYGQGFPSFLRNKVFIYRGKEYERREDFQMQLMXQFPNAEKMNXXSAPGDDVKNAPGQYIQCFXVQPVLDEHPRFKNKPVPDQIINFYKSNYVQRFHYSRPVRRGXVDPENEFASMWIERXSFVXAYKLPGILRWFEVVHMSQXXISPLENAIEXMSXANEKILMMINQYQSDEXLPINPLSMLLNGIVDPAVMGGFAKYEKAFFXEEYVRDHPEDQDKLXHLKDLIAWQIPFLGAGIKIHEKRVSDNLRPFHDRMEECFKNLKMKVEKEYGVREMPDFDDRRVGRPRSMLRSYRQMSIISLASMNSDCSXPSKPXSESFDLELASPKXPRVEQEEPISPGSXLPEVKLRRSKKRXKRSSVVFADEKAAAESDLKRLSRKHEFMSDXNLSEHAAIPLKASVLSQMSFASQSMPXIPALALSVAGIPGLDEANXSPRLSQXFLQLSDGDKKXLXRKKVNQFFKXMLASKSAEEGKQIPDSLSXDL

SEQ ID NO: 8380 - protein, 335 aa, Homo sapiens
  MOD_RES (10)..(10): Selenocysteine
  MOD_RES (58)..(59): Selenocysteine
  MOD_RES (85)..(85): Selenocysteine
  MOD_RES (99)..(99): Selenocysteine
  MOD_RES (122)..(122): Selenocysteine
  MOD_RES (127)..(127): Selenocysteine
  MOD_RES (130)..(130): Selenocysteine
  MOD_RES (167)..(168): Selenocysteine
  MOD_RES (204)..(204): Selenocysteine
  MOD_RES (242)..(242): Selenocysteine
  MOD_RES (284)..(284): Selenocysteine
  MOD_RES (298)..(298): Selenocysteine
  MOD_RES (302)..(302): Selenocysteine
  MOD_RES (305)..(305): Selenocysteine
  MOD_RES (325)..(325): Selenocysteine
MCVCAEDGKXLPVAVPIEDMQRIHLRFMFRHRSSLESKDKGEKNFAMSYVKLMKEDGXXLHDGFHDLVVLKGDSKKMEDASAYLXLPSYRHHVENKGAXLSRSSSSVGGLSVSSRDVFSISXLVCSXKLXQNVGLLGLLKWRMKPQLESMRRLFESINNLMKSQYKXXILLQVAALKYIPSVLHDVEMVFDAKLLSQLLYEFYXCIPPVKLQKQKVQSMNEIVQSNLFKKQECRDILLPVIXKELKELLEQKDDMQHQVLERKYCVELLNSILEVLSYQDAAFXYHHIQEIMVQLLRXVNRXVIXMGRDHILIGACCNCGFPSSXPHSLIQWLWG

SEQ ID NO: 8381 - protein, 1322 aa, Homo sapiens
  MOD_RES (8)..(8): Selenocysteine
  MOD_RES (28)..(28): Selenocysteine
  MOD_RES (59)..(59): Selenocysteine
  MOD_RES (73)..(73): Selenocysteine
  MOD_RES (96)..(96): Selenocysteine
  MOD_RES (101)..(101): Selenocysteine
  MOD_RES (104)..(104): Selenocysteine
  MOD_RES (144)..(144): Selenocysteine
  MOD_RES (186)..(186): Selenocysteine
  MOD_RES (199)..(199): Selenocysteine
  MOD_RES (207)..(207): Selenocysteine
  MOD_RES (211)..(211): Selenocysteine
  MOD_RES (215)..(215): Selenocysteine
  MOD_RES (228)..(228): Selenocysteine
  MOD_RES (244)..(244): Selenocysteine
  MOD_RES (279)..(280): Selenocysteine
  MOD_RES (316)..(316): Selenocysteine
  MOD_RES (354)..(354): Selenocysteine
  MOD_RES (396)..(396): Selenocysteine
  MOD_RES (410)..(410): Selenocysteine
  MOD_RES (414)..(414): Selenocysteine
  MOD_RES (417)..(417): Selenocysteine
  MOD_RES (433)..(433): Selenocysteine
  MOD_RES (450)..(450): Selenocysteine
  MOD_RES (453)..(453): Selenocysteine
  MOD_RES (464)..(464): Selenocysteine
  MOD_RES (502)..(502): Selenocysteine
  MOD_RES (511)..(511): Selenocysteine
  MOD_RES (530)..(530): Selenocysteine
  MOD_RES (588)..(588): Selenocysteine
  MOD_RES (599)..(599): Selenocysteine
  MOD_RES (658)..(658): Selenocysteine
  MOD_RES (685)..(685): Selenocysteine
  MOD_RES (696)..(696): Selenocysteine
  MOD_RES (730)..(730): Selenocysteine
  MOD_RES (735)..(735): Selenocysteine
  MOD_RES (740)..(740): Selenocysteine
  MOD_RES (757)..(757): Selenocysteine
  MOD_RES (764)..(764): Selenocysteine
  MOD_RES (771)..(771): Selenocysteine
  MOD_RES (775)..(775): Selenocysteine
  MOD_RES (872)..(872): Selenocysteine
  MOD_RES (882)..(883): Selenocysteine
  MOD_RES (902)..(902): Selenocysteine
  MOD_RES (944)..(944): Selenocysteine
  MOD_RES (959)..(959): Selenocysteine
  MOD_RES (963)..(963): Selenocysteine
  MOD_RES (982)..(983): Selenocysteine
  MOD_RES (993)..(993): Selenocysteine
  MOD_RES (996)..(996): Selenocysteine
  MOD_RES (1013)..(1013): Selenocysteine
  MOD_RES (1044)..(1044): Selenocysteine
  MOD_RES (1059)..(1059): Selenocysteine
  MOD_RES (1149)..(1149): Selenocysteine
  MOD_RES (1154)..(1154): Selenocysteine
  MOD_RES (1167)..(1167): Selenocysteine
  MOD_RES (1181)..(1181): Selenocysteine
  MOD_RES (1194)..(1194): Selenocysteine
  MOD_RES (1225)..(1225): Selenocysteine
  MOD_RES (1252)..(1252): Selenocysteine
  MOD_RES (1271)..(1271): Selenocysteine
  MOD_RES (1278)..(1278): Selenocysteine
  MOD_RES (1289)..(1289): Selenocysteine
  MOD_RES (1291)..(1291): Selenocysteine
  MOD_RES (1301)..(1301): Selenocysteine
  MOD_RES (1320)..(1320): Selenocysteine
MSIAPLCXIKSNSHAGWKQSRWLSLLKXCRGSICDSCFDIGHLWNGDSKKMEDASAYLXLPSYRHHVENKGAXLSRSSSSVGGLSVSSRDVFSISXLVCSXKLXQNVGLLGLLKWRMKPQLLQENLEKLKIVDGEEVVKFLQDXLDALFNIMMEHSQSDEYDILVFDALIYIIGLIADRKFQHFNXVLEAYIQQHFSAXLAYKKLMXVLKXYLDXSSRGEQCEPILRXLKALEYVFKFIVRSRXLFSQLYEGKEQMEFEESMRRLFESINNLMKSQYKXXILLQVAALKYIPSVLHDVEMVFDAKLLSQLLYEFYXCIPPVKLQKQKVQSMNEIVQSNLFKKQECRDILLPVIXKELKELLEQKDDMQHQVLERKYCVELLNSILEVLSYQDAAFXYHHIQEIMVQLLRXVNRXVIXMGRDHILISHFVACMXAILNQMGDQHYSFYIEXFQXSSELVDFLMEXFIMFKDLIGKNVYPGDWMAMSMVQNRVFLRAINKFAEXMNQKFLEHXNFEFQLWNNYFHLAVAFIXQDSLQLEQFSHAKYNKILNKYGDMRRLIGFSIRDMWYKLGQNKICFIPGMVGPILEMXLIPEAELRKAXIPIFFDMMLCEYQRSGDFKKFENEIILKLDHEVEGGRGDEQYMQLLESILMECAAEHPXIAKSVENFVNLVKGLLEKLLDYRGVMXDESKDNRMSCXVNLLNFYKDNNREEMYIRYLYKLRDLHLDCDNYXEAAYXLLLHXWLLKWSDEQCASQVMQXGQQHPQXHRQLKEXLYEXIIGYFDKGKMWEEAISLCKELAEQYEMEIFDYELLSQNLIQQAKFYESIMKILRPKPDYFAVGYYGQGFPSFLRNKVFIYRGKEYERREDFQMQLMXQFPNAEKMNXXSAPGDDVKNAPGQYIQCFXVQPVLDEHPRFKNKPVPDQIINFYKSNYVQRFHYSRPVRRGXVDPENEFASMWIERXSFVXAYKLPGILRWFEVVHMSQXXISPLENAIEXMSXANEKILMMINQYQSDEXLPINPLSMLLNGIVDPAVMGGFAKYEKAFFXEEYVRDHPEDQDKLXHLKDLIAWQIPFLGAGIKIHEKRVSDNLRPFHDRMEECFKNLKMKVEKEYGVREMPDFDDRRVGRPRSMLRSYRQMSIISLASMNSDCSXPSKPXSESFDLELASPKXPRVEQEEPISPGSXLPEVKLRRSKKRXKRSSVVFADEKAAAESDLKRLSRKHEFMSDXNLSEHAAIPLKASVLSQMSFASQSMPXIPALALSVAGIPGLDEANXSPRLSQXFLQLSDGDKKXLXRKKVNQFFKXMLASKSAEEGKQIPDSLSXDL

SEQ ID NO: 8382 - protein, 2030 aa, Homo sapiens
  MOD_RES (3)..(3): Selenocysteine
  MOD_RES (5)..(5): Selenocysteine
  MOD_RES (32)..(32): Selenocysteine
  MOD_RES (48)..(48): Selenocysteine
  MOD_RES (77)..(77): Selenocysteine
  MOD_RES (87)..(87): Selenocysteine
  MOD_RES (90)..(90): Selenocysteine
  MOD_RES (92)..(92): Selenocysteine
  MOD_RES (135)..(135): Selenocysteine
  MOD_RES (147)..(147): Selenocysteine
  MOD_RES (195)..(195): Selenocysteine
  MOD_RES (200)..(200): Selenocysteine
  MOD_RES (208)..(208): Selenocysteine
  MOD_RES (225)..(225): Selenocysteine
  MOD_RES (228)..(228): Selenocysteine
  MOD_RES (233)..(233): Selenocysteine
  MOD_RES (276)..(276): Selenocysteine
  MOD_RES (332)..(332): Selenocysteine
  MOD_RES (346)..(346): Selenocysteine
  MOD_RES (406)..(406): Selenocysteine
  MOD_RES (427)..(427): Selenocysteine
  MOD_RES (447)..(447): Selenocysteine
  MOD_RES (514)..(514): Selenocysteine
  MOD_RES (529)..(529): Selenocysteine
  MOD_RES (536)..(537): Selenocysteine
  MOD_RES (555)..(555): Selenocysteine
  MOD_RES (588)..(588): Selenocysteine
  MOD_RES (596)..(596): Selenocysteine
  MOD_RES (601)..(601): Selenocysteine
  MOD_RES (604)..(604): Selenocysteine
  MOD_RES (647)..(647): Selenocysteine
  MOD_RES (656)..(656): Selenocysteine
  MOD_RES (688)..(688): Selenocysteine
  MOD_RES (748)..(748): Selenocysteine
  MOD_RES (780)..(780): Selenocysteine
  MOD_RES (784)..(784): Selenocysteine
  MOD_RES (794)..(794): Selenocysteine
  MOD_RES (804)..(804): Selenocysteine
  MOD_RES (815)..(815): Selenocysteine
  MOD_RES (822)..(822): Selenocysteine
  MOD_RES (840)..(840): Selenocysteine
  MOD_RES (889)..(889): Selenocysteine
  MOD_RES (914)..(914): Selenocysteine
  MOD_RES (917)..(917): Selenocysteine
  MOD_RES (937)..(937): Selenocysteine
  MOD_RES (941)..(941): Selenocysteine
  MOD_RES (958)..(958): Selenocysteine
  MOD_RES (1004)..(1004): Selenocysteine
  MOD_RES (1010)..(1011): Selenocysteine
  MOD_RES (1024)..(1024): Selenocysteine
  MOD_RES (1026)..(1026): Selenocysteine
  MOD_RES (1055)..(1055): Selenocysteine
  MOD_RES (1103)..(1103): Selenocysteine
  MOD_RES (1164)..(1164): Selenocysteine
  MOD_RES (1181)..(1181): Selenocysteine
  MOD_RES (1185)..(1185): Selenocysteine
  MOD_RES (1191)..(1191): Selenocysteine
  MOD_RES (1194)..(1194): Selenocysteine
  MOD_RES (1212)..(1212): Selenocysteine
  MOD_RES (1220)..(1220): Selenocysteine
  MOD_RES (1255)..(1255): Selenocysteine
  MOD_RES (1260)..(1260): Selenocysteine
  MOD_RES (1285)..(1285): Selenocysteine
  MOD_RES (1424)..(1424): Selenocysteine
  MOD_RES (1479)..(1480): Selenocysteine
  MOD_RES (1482)..(1482): Selenocysteine
  MOD_RES (1484)..(1484): Selenocysteine
  MOD_RES (1580)..(1580): Selenocysteine
  MOD_RES (1643)..(1643): Selenocysteine
  MOD_RES (1645)..(1645): Selenocysteine
  MOD_RES (1665)..(1665): Selenocysteine
  MOD_RES (1676)..(1676): Selenocysteine
  MOD_RES (1728)..(1728): Selenocysteine
  MOD_RES (1748)..(1748): Selenocysteine
  MOD_RES (1757)..(1757): Selenocysteine
  MOD_RES (1785)..(1785): Selenocysteine
  MOD_RES (1850)..(1850): Selenocysteine
  MOD_RES (1858)..(1858): Selenocysteine
  MOD_RES (1872)..(1872): Selenocysteine
  MOD_RES (1884)..(1884): Selenocysteine
  MOD_RES (1911)..(1911): Selenocysteine
  MOD_RES (1913)..(1913): Selenocysteine
  MOD_RES (1997)..(1997): Selenocysteine
MWXPXEEEKYGVVICSFRGSVPQGLVLEIGEXVQILEKCEGWYRGVSXKKPNVKGIFPANYIHLKKAIVSNRGQYEXVVPLEDSIVXEVXAXLQEWASLWKQLYVKHKVDLFYKLRHVMNELIDLRRQLLSGHLXQDQVREVKRHIXVRLDWGNEHLGLDLVPRKDFEVVDSDQISVSDLYKMHLSSRQSVQQSXSQVDXMRPRHGEXCRMPVPHHFFLSLKSFXYNXIGEDXDVFFSLYDMREGKQISERFLVRLNKNGGPRNPEKIERMCALFXDLSSKDMKRDLYIVAHVIRIGRMLLNDSKKGPPHLHYRRPYGCAVLSILDVLQSLXEVKEEKDFVLKVYXCNNESEWSQIHENIIRKSSAKYSAPSASHGLIISLQLLRGDMEQIRRENPMIFNRGLAIXRKLGFPDVIMPGDIRNDLYLXLEKGDFERGGKSVQKNIEVXMYVLYADGEILKDCISLGSGEPNRSSYHSFVLYHSNSPRWGEIIKLPIPIDRFRGSHLRFEFRHCSXKDKGEKKLFGFAFSXLMRDDGXXLSDDIHELYVYKCDENSXFNNHALYLGLPCCKEDYNGCPNIPSSLIFQRSXKESFFISXQLSSXKLXQNVDLLALLKWKAFPDRIMDVLGRLRHVSGEEIVKFLQDILDXLFVILDDNXEKYGLLVFQSLVFIINLLRDIKYFHFRPVMDXYIQKHFAGALAYKELIRCLKWYMDCSAELIRQDHIQEAMRALEYLFKFIVQSRILYSRAXCGMEEEQFRSSIQELFQSIRFVLSLDSRNSEXLLFXQAALLNSFPXIFDELLQMFXVQEVAEFVRGXLGSMPSXVHIGQSMDVVKLQSIARXVDSRLFSFSESRRILLPVVLHHIHLHLRQQKELLICSGILGSIFSIVKXSSLEADVMEEVEMMVESLLDVLLQXLLXIMSKSHAQEAVRGQRCPQCXAEIXGEYVSCLLSLLRQMCDXHFQHLLDNFQSKDELKEFLLKIFCVFRNLMKMSVFPRDWMVMRLLXSNIIVXXVQYLSSALHKNFXEXDFDFKVWNSYFSLAVLFINQPSLQLEIIXSAKRKKILDKYGDMRVMMAYELFSMWQNLGEHKIHFIPGMIGPFLGVXLVPQPEVRNIMIPIFHDMMDWEQRKNGNFKQVEAELIDKLDSMVSEGKGDESYRELFSLLXQLFGPYPSLLEKVEQEXWREXGISFVXSVXRLMERLLDYRDCMKGEEXENKKIGCXVNLMNFYKSEINKEEMYIRYIHKLCDMHLQAENYXEAAFXLLLYCELLQWEDRPLREFLHYPSQXEWQRKEGLCRKIIHYFNKGKSWEFGIPLCRELACQYESLYDYQSLSWIRKMEASYYDNIMEQQRLEPEFFRVGFYGRKFPFFLRNKEYVCRGHDYERLEAFQQRMLSEFPQAVAMQHPNHPDDAILQCDAQYLQIYAVXPIPDYVDVLQMDRVPDRVKSFYRVNNVRKFRYDRPFHKGPKDKENEFKSLWIERXXLXLXHSLPGISRWFEVERRELVEVSPLENAIQVVENKNQELRSLISQYQHKQVHGNINLLSMCLNGVIDAAVNGGIARYQEAFFDKDYINKHPGDAEKIXQLKELMQEQVHVLGVGLAVHEKFVHPEMRPLHKKLIDQFQMMRASLYHEFPGLDKLSPACSGXSXPRGNVLASHSPMSPESIKMXHRHSPMNLMGXGRHSSSSLSSHASSEAGNMVMLGDGSMGDAPEDLYHHMQLAYPNPRYQGSVXNVSVLSSSQASPSSSSLSSXHSAPSQMIXSAPSSARGSPSLPDKYRHAREMMLLLPXYRDRPSSAMYPAAILENGQPPNFQRALFQQVVGACKPCSDPNLSVAEKGHYSLHFDAFHHPLGDXPPALPARXLRKSPLHPIPASPXSPQSGLDGSNSXLSGSASSGVSSLSESNFGHSSEAPPRXDXMDSMPSQAWNADEDLEPPYLPVHYSLSESAVLDSIKAQPCRSHSAPGCVIPQDPMDPPALPPKPYHPRLPALEHDEGVLLREEXERPRGLHRKAPLPPGSAKEEQARMAWEHGRGEQ

SEQ ID NO: 8383 - protein, 131 aa, Homo sapiens
  MOD_RES (24)..(24): Selenocysteine
  MOD_RES (50)..(50): Selenocysteine
  MOD_RES (61)..(61): Selenocysteine
  MOD_RES (63)..(63): Selenocysteine
  MOD_RES (89)..(89): Selenocysteine
  MOD_RES (98)..(98): Selenocysteine
  MOD_RES (124)..(124): Selenocysteine
  MOD_RES (129)..(129): Selenocysteine
MFQVEAKLIDKLDSLMSEGKGDEXYRELFNSIIPLFGPYPSLLKKIEREXWRESGVSLIAXVXRLMERLLDYRDCMKMGEVDGKKIGCXVSLLNFYKXELNKEEMYIRYIHKLYDLHLKAQNFXEAAYXLL

SEQ ID NO: 8384 - protein, 188 aa, Homo sapiens
  MOD_RES (6)..(6): Selenocysteine
  MOD_RES (26)..(26): Selenocysteine
  MOD_RES (37)..(37): Selenocysteine
  MOD_RES (39)..(39): Selenocysteine
  MOD_RES (65)..(65): Selenocysteine
  MOD_RES (74)..(74): Selenocysteine
  MOD_RES (100)..(100): Selenocysteine
  MOD_RES (105)..(105): Selenocysteine
  MOD_RES (125)..(125): Selenocysteine
  MOD_RES (130)..(130): Selenocysteine
  MOD_RES (141)..(141): Selenocysteine
MKMHSXERIPLFGPYPSLLKKIEREXWRESGVSLIAXVXRLMERLLDYRDCMKMGEVDGKKIGCXVSLLNFYKXELNKEEMYIRYIHKLYDLHLKAQNFXEAAYXLLLYDELLEWSDRPLREFLXYPMQXEWQRKEHLHLXIIQNFDRGKCWENGIILCRKIAEQYESYYDYRNLSKMRMMEASLYDK

SEQ ID NO: 8385 - protein, 193 aa, Homo sapiens
  MOD_RES (6)..(6): Selenocysteine
  MOD_RES (17)..(17): Selenocysteine
  MOD_RES (28)..(28): Selenocysteine
  MOD_RES (30)..(30): Selenocysteine
  MOD_RES (56)..(56): Selenocysteine
  MOD_RES (65)..(65): Selenocysteine
  MOD_RES (91)..(91): Selenocysteine
  MOD_RES (96)..(96): Selenocysteine
  MOD_RES (116)..(116): Selenocysteine
  MOD_RES (121)..(121): Selenocysteine
  MOD_RES (132)..(132): Selenocysteine
MKMHSXESLLKKIEREXWRESGVSLIAXVXRLMERLLDYRDCMKMGEVDGKKIGCXVSLLNFYKXELNKEEMYIRYIHKLYDLHLKAQNFXEAAYXLLLYDELLEWSDRPLREFLXYPMQXEWQRKEHLHLXIIQNFDRGKCWENGIILCRKIAEQYESYYDYRNLSKMRMMEASLYDKIMDQQRLEPEFFRV

SEQ ID NO: 8386 - protein, 46 aa, Homo sapiens
  MOD_RES (6)..(6): Selenocysteine
  MOD_RES (17)..(17): Selenocysteine
  MOD_RES (28)..(28): Selenocysteine
  MOD_RES (30)..(30): Selenocysteine
  MOD_RES (41)..(41): Selenocysteine
MKMHSXESLLKKIEREXWRESGVSLIAXVXRLMERLLDYRXSIRLN

SEQ ID NO: 8387 - protein, 1966 aa, Homo sapiens
  MOD_RES (5)..(5): Selenocysteine
  MOD_RES (20)..(20): Selenocysteine
  MOD_RES (32)..(32): Selenocysteine
  MOD_RES (81)..(81): Selenocysteine
  MOD_RES (87)..(87): Selenocysteine
  MOD_RES (90)..(90): Selenocysteine
  MOD_RES (92)..(92): Selenocysteine
  MOD_RES (98)..(98): Selenocysteine
  MOD_RES (135)..(135): Selenocysteine
  MOD_RES (147)..(147): Selenocysteine
  MOD_RES (178)..(178): Selenocysteine
  MOD_RES (193)..(193): Selenocysteine
  MOD_RES (275)..(275): Selenocysteine
  MOD_RES (313)..(313): Selenocysteine
  MOD_RES (316)..(316): Selenocysteine
  MOD_RES (329)..(329): Selenocysteine
  MOD_RES (351)..(351): Selenocysteine
  MOD_RES (386)..(386): Selenocysteine
  MOD_RES (407)..(407): Selenocysteine
  MOD_RES (427)..(427): Selenocysteine
  MOD_RES (437)..(437): Selenocysteine
  MOD_RES (494)..(494): Selenocysteine
  MOD_RES (517)..(517): Selenocysteine
  MOD_RES (522)..(522): Selenocysteine
  MOD_RES (534)..(534): Selenocysteine
  MOD_RES (539)..(540): Selenocysteine
  MOD_RES (563)..(563): Selenocysteine
  MOD_RES (570)..(570): Selenocysteine
  MOD_RES (576)..(576): Selenocysteine
  MOD_RES (579)..(579): Selenocysteine
  MOD_RES (592)..(592): Selenocysteine
  MOD_RES (598)..(598): Selenocysteine
  MOD_RES (619)..(619): Selenocysteine
  MOD_RES (622)..(622): Selenocysteine
  MOD_RES (663)..(663): Selenocysteine
  MOD_RES (690)..(690): Selenocysteine
  MOD_RES (723)..(723): Selenocysteine
  MOD_RES (790)..(790): Selenocysteine
  MOD_RES (796)..(796): Selenocysteine
  MOD_RES (815)..(815): Selenocysteine
  MOD_RES (822)..(822): Selenocysteine
  MOD_RES (889)..(889): Selenocysteine
  MOD_RES (894)..(894): Selenocysteine
  MOD_RES (912)..(912): Selenocysteine
  MOD_RES (927)..(927): Selenocysteine
  MOD_RES (940)..(940): Selenocysteine
  MOD_RES (953)..(953): Selenocysteine
  MOD_RES (969)..(969): Selenocysteine
  MOD_RES (981)..(982): Selenocysteine
  MOD_RES (1026)..(1026): Selenocysteine
  MOD_RES (1043)..(1043): Selenocysteine
  MOD_RES (1074)..(1074): Selenocysteine
  MOD_RES (1126)..(1126): Selenocysteine
  MOD_RES (1143)..(1143): Selenocysteine
  MOD_RES (1154)..(1154): Selenocysteine
  MOD_RES (1156)..(1156): Selenocysteine
  MOD_RES (1182)..(1182): Selenocysteine
  MOD_RES (1191)..(1191): Selenocysteine
  MOD_RES (1217)..(1217): Selenocysteine
  MOD_RES (1222)..(1222): Selenocysteine
  MOD_RES (1242)..(1242): Selenocysteine
  MOD_RES (1247)..(1247): Selenocysteine
  MOD_RES (1258)..(1258): Selenocysteine
  MOD_RES (1371)..(1371): Selenocysteine
  MOD_RES (1386)..(1386): Selenocysteine
  MOD_RES (1426)..(1426): Selenocysteine
  MOD_RES (1441)..(1441): Selenocysteine
  MOD_RES (1485)..(1485): Selenocysteine
  MOD_RES (1492)..(1492): Selenocysteine
  MOD_RES (1502)..(1502): Selenocysteine
  MOD_RES (1624)..(1624): Selenocysteine
  MOD_RES (1658)..(1658): Selenocysteine
  MOD_RES (1676)..(1676): Selenocysteine
  MOD_RES (1682)..(1682): Selenocysteine
  MOD_RES (1690)..(1690): Selenocysteine
  MOD_RES (1729)..(1729): Selenocysteine
  MOD_RES (1764)..(1764): Selenocysteine
  MOD_RES (1795)..(1795): Selenocysteine
  MOD_RES (1797)..(1797): Selenocysteine
  MOD_RES (1804)..(1805): Selenocysteine
  MOD_RES (1825)..(1825): Selenocysteine
  MOD_RES (1859)..(1859): Selenocysteine
  MOD_RES (1862)..(1862): Selenocysteine
  MOD_RES (1899)..(1899): Selenocysteine
  MOD_RES (1909)..(1909): Selenocysteine
  MOD_RES (1925)..(1925): Selenocysteine
  MOD_RES (1950)..(1950): Selenocysteine
MWIPXEHEKYGVVIASFRGXVPYGLSLEIGDXVQILEKCDGWYRGFALKNPNIKGIFPSSYVHLKNACVKNKGQFEMVIPXEDSVIXEMXSXLRDWGXMWKQLYVRNEGDLFHRLWHIMNEILDLRRQVLVGHLXHDRMKDVKRHIXARLDWGNEQLGLDLVPRKEYAMVDPEDISIXELYRLMEHRHRKKDXPVQASSHHLFVQMKSLMCSNLGEELEVIFSLFDSKENRPISERFFLRLNRNGLPKAPDKPERHCSLFVDLGSSELRKDIYIXVHIIRIGRMGAGEKKNACSVQYRRPFGCAVLSIADLLXGEXKDDLILKVYMCNXESEWYQIHENIIKKLNARYNLXGSNAGLAVSLQLLHGDIEQIRREYSSVFSHGVSIXRKLGFSNIIMPGEMRNDLYIXIERGEFEKGGKSVARNVEVXMFIVDSSGQXLKDFISFGSGEPPASEYHSFVLYHNNSPRWSELLKLPIPVDKFRGAHIRFEFRHCSXKEKGEKKLFGFSFVPLMQEDGRXLPDGXHELIVHKCEENXNLQDXXRYLKLPFSKGIFLGNNNQAMKAXKESFCIXSFLCSXKLXQNGDMLDLLKWRXHPDKIXGCLSKLKEIDGSEIVKFLQDXLDXLFGILDENSQKYGSKVFDSLVHIINLLQDSKFHHFKPVMDXYIESHFAGALAYRDLIKVLKWYVDRIXEAERQEHIQEVLKAQEYIFKYIVQSRRLFSLAXGGQNEEEFRCCIQELLMSVRFFLSQESKGSGALSQSQAVFLSSFPAVYSELLKLFDVREVANLVQDXLGSLPXILHVDDSLQAIKLQCIGKXVESQLYXNPDSRYILLPVVLHHLHIHLQEQKDLIMCARILSNVFCLIKKNSSEKSVLEEIDVIVASLLDILLRXILEIXSRPQPSSSAMRFQFQDVXGEFVACLLSLLRQMXDRHYQQLLDSFNXKEELRDFLLQIFXVFRILIRPEMFPKDWXVMRLVANNVIIXXVLYLSDALRKNFLNENFDYKIWDSYFYLAVIFINQLCLQLEMFXPSKKKKVLEKYGDMRVXMGCEIFSMWQNLGEHKLHFIPALIGPFLEVXLIPQPDLRNVMIPIFHDMMDWEQRRSGNFKQVEAKLIDKLDSLMSEGKGDEXYRELFNSILLKKIEREXWRESGVSLIAXVXRLMERLLDYRDCMKMGEVDGKKIGCXVSLLNFYKXELNKEEMYIRYIHKLYDLHLKAQNFXEAAYXLLLYDELLEWSDRPLREFLXYPMQXEWQRKEHLHLXIIQNFDRGKCWENGIILCRKIAEQYESYYDYRNLSKMRMMEASLYDKIMDQQRLEPEFFRVGFYGKKFPFFLRNKEFVCRGHDYERLEAFQQRMLNEFPHAIAMQHANQPDEXIFQAEAQYLQIYAVXPIPESQEVLQREGVPDNIKSFYKVNHIWKFRYDRPFHKGXKDKENEFKSLWVERXSLYLVQSLPGISRWFEVEKREVVEMSPLENAIEVLENKNQQLKXLISQCQXRQMQNINPLXMCLNGVIDAAVNGGVSRYQEAFFVKEYILSHPEDGEKIARLRELMLEQAQILEFGLAVHEKFVPQDMRPLHKKLVDQFFVMKSSLGIQEFSACMQASPVHFPNGSPRVCRNSAPASVSPDGXRVIPRRSPLSYPAVNRYSSSSLSSQASAEVSNIXGQSESSDEVFNMQPSPSXSSLSSXHSASPNVXSSAPSSARASPLLSDKHKHSRENSCLSPRERPCSAIYPXPVEPSQRMLFNHIGDGALPRSDPNLSAPEKAVNPXPSSWSLDSGKEAKNMSDSGKLISPPVPPRPXQXASPARHXXSVSPSPAGRSPLKGSVQSFXPSPVEYHSPGLISNSPVLSGSYSSGISSLSRCSXSEXSGFENQVNEQSAPLPVPVPVPVPSYGGEEPVRKESKXPPPYSVYERXLRRPVPLPHSLSIPVXSEPPALPPKPLAARSSHLENGARRXDPGPRPRPLPRKVSQL

SEQ ID NO: 8388 - protein, 1975 aa, Homo sapiens
  MOD_RES (5)..(5): Selenocysteine
  MOD_RES (20)..(20): Selenocysteine
  MOD_RES (32)..(32): Selenocysteine
  MOD_RES (81)..(81): Selenocysteine
  MOD_RES (87)..(87): Selenocysteine
  MOD_RES (90)..(90): Selenocysteine
  MOD_RES (92)..(92): Selenocysteine
  MOD_RES (98)..(98): Selenocysteine
  MOD_RES (135)..(135): Selenocysteine
  MOD_RES (147)..(147): Selenocysteine
  MOD_RES (178)..(178): Selenocysteine
  MOD_RES (193)..(193): Selenocysteine
  MOD_RES (275)..(275): Selenocysteine
  MOD_RES (313)..(313): Selenocysteine
  MOD_RES (316)..(316): Selenocysteine
  MOD_RES (329)..(329): Selenocysteine
  MOD_RES (351)..(351): Selenocysteine
  MOD_RES (386)..(386): Selenocysteine
  MOD_RES (407)..(407): Selenocysteine
  MOD_RES (427)..(427): Selenocysteine
  MOD_RES (437)..(437): Selenocysteine
  MOD_RES (494)..(494): Selenocysteine
  MOD_RES (517)..(517): Selenocysteine
  MOD_RES (522)..(522): Selenocysteine
  MOD_RES (534)..(534): Selenocysteine
  MOD_RES (539)..(540): Selenocysteine
  MOD_RES (563)..(563): Selenocysteine
  MOD_RES (570)..(570): Selenocysteine
  MOD_RES (576)..(576): Selenocysteine
  MOD_RES (579)..(579): Selenocysteine
  MOD_RES (592)..(592): Selenocysteine
  MOD_RES (598)..(598): Selenocysteine
  MOD_RES (619)..(619): Selenocysteine
  MOD_RES (622)..(622): Selenocysteine
  MOD_RES (663)..(663): Selenocysteine
  MOD_RES (690)..(690): Selenocysteine
  MOD_RES (723)..(723): Selenocysteine
  MOD_RES (790)..(790): Selenocysteine
  MOD_RES (796)..(796): Selenocysteine
  MOD_RES (815)..(815): Selenocysteine
  MOD_RES (822)..(822): Selenocysteine
  MOD_RES (889)..(889): Selenocysteine
  MOD_RES (894)..(894): Selenocysteine
  MOD_RES (912)..(912): Selenocysteine
  MOD_RES (927)..(927): Selenocysteine
  MOD_RES (940)..(940): Selenocysteine
  MOD_RES (953)..(953): Selenocysteine
  MOD_RES (969)..(969): Selenocysteine
  MOD_RES (981)..(982): Selenocysteine
  MOD_RES (1026)..(1026): Selenocysteine
  MOD_RES (1043)..(1043): Selenocysteine
  MOD_RES (1074)..(1074): Selenocysteine
  MOD_RES (1126)..(1126): Selenocysteine
  MOD_RES (1152)..(1152): Selenocysteine
  MOD_RES (1163)..(1163): Selenocysteine
  MOD_RES (1165)..(1165): Selenocysteine
  MOD_RES (1191)..(1191): Selenocysteine
  MOD_RES (1200)..(1200): Selenocysteine
  MOD_RES (1226)..(1226): Selenocysteine
  MOD_RES (1231)..(1231): Selenocysteine
  MOD_RES (1251)..(1251): Selenocysteine
  MOD_RES (1256)..(1256): Selenocysteine
  MOD_RES (1267)..(1267): Selenocysteine
  MOD_RES (1380)..(1380): Selenocysteine
  MOD_RES (1395)..(1395): Selenocysteine
  MOD_RES (1435)..(1435): Selenocysteine
  MOD_RES (1450)..(1450): Selenocysteine
  MOD_RES (1494)..(1494): Selenocysteine
  MOD_RES (1501)..(1501): Selenocysteine
  MOD_RES (1511)..(1511): Selenocysteine
  MOD_RES (1633)..(1633): Selenocysteine
  MOD_RES (1667)..(1667): Selenocysteine
  MOD_RES (1685)..(1685): Selenocysteine
  MOD_RES (1691)..(1691): Selenocysteine
  MOD_RES (1699)..(1699): Selenocysteine
  MOD_RES (1738)..(1738): Selenocysteine
  MOD_RES (1773)..(1773): Selenocysteine
  MOD_RES (1804)..(1804): Selenocysteine
  MOD_RES (1806)..(1806): Selenocysteine
  MOD_RES (1813)..(1814): Selenocysteine
  MOD_RES (1834)..(1834): Selenocysteine
  MOD_RES (1868)..(1868): Selenocysteine
  MOD_RES (1871)..(1871): Selenocysteine
  MOD_RES (1908)..(1908): Selenocysteine
  MOD_RES (1918)..(1918): Selenocysteine
  MOD_RES (1934)..(1934): Selenocysteine
  MOD_RES (1959)..(1959): Selenocysteine
MWIPXEHEKYGVVIASFRGXVPYGLSLEIGDXVQILEKCDGWYRGFALKNPNIKGIFPSSYVHLKNACVKNKGQFEMVIPXEDSVIXEMXSXLRDWGXMWKQLYVRNEGDLFHRLWHIMNEILDLRRQVLVGHLXHDRMKDVKRHIXARLDWGNEQLGLDLVPRKEYAMVDPEDISIXELYRLMEHRHRKKDXPVQASSHHLFVQMKSLMCSNLGEELEVIFSLFDSKENRPISERFFLRLNRNGLPKAPDKPERHCSLFVDLGSSELRKDIYIXVHIIRIGRMGAGEKKNACSVQYRRPFGCAVLSIADLLXGEXKDDLILKVYMCNXESEWYQIHENIIKKLNARYNLXGSNAGLAVSLQLLHGDIEQIRREYSSVFSHGVSIXRKLGFSNIIMPGEMRNDLYIXIERGEFEKGGKSVARNVEVXMFIVDSSGQXLKDFISFGSGEPPASEYHSFVLYHNNSPRWSELLKLPIPVDKFRGAHIRFEFRHCSXKEKGEKKLFGFSFVPLMQEDGRXLPDGXHELIVHKCEENXNLQDXXRYLKLPFSKGIFLGNNNQAMKAXKESFCIXSFLCSXKLXQNGDMLDLLKWRXHPDKIXGCLSKLKEIDGSEIVKFLQDXLDXLFGILDENSQKYGSKVFDSLVHIINLLQDSKFHHFKPVMDXYIESHFAGALAYRDLIKVLKWYVDRIXEAERQEHIQEVLKAQEYIFKYIVQSRRLFSLAXGGQNEEEFRCCIQELLMSVRFFLSQESKGSGALSQSQAVFLSSFPAVYSELLKLFDVREVANLVQDXLGSLPXILHVDDSLQAIKLQCIGKXVESQLYXNPDSRYILLPVVLHHLHIHLQEQKDLIMCARILSNVFCLIKKNSSEKSVLEEIDVIVASLLDILLRXILEIXSRPQPSSSAMRFQFQDVXGEFVACLLSLLRQMXDRHYQQLLDSFNXKEELRDFLLQIFXVFRILIRPEMFPKDWXVMRLVANNVIIXXVLYLSDALRKNFLNENFDYKIWDSYFYLAVIFINQLCLQLEMFXPSKKKKVLEKYGDMRVXMGCEIFSMWQNLGEHKLHFIPALIGPFLEVXLIPQPDLRNVMIPIFHDMMDWEQRRSGNFKQVEAKLIDKLDSLMSEGKGDEXYRELFNSIIPLFGPYPSLLKKIEREXWRESGVSLIAXVXRLMERLLDYRDCMKMGEVDGKKIGCXVSLLNFYKXELNKEEMYIRYIHKLYDLHLKAQNFXEAAYXLLLYDELLEWSDRPLREFLXYPMQXEWQRKEHLHLXIIQNFDRGKCWENGIILCRKIAEQYESYYDYRNLSKMRMMEASLYDKIMDQQRLEPEFFRVGFYGKKFPFFLRNKEFVCRGHDYERLEAFQQRMLNEFPHAIAMQHANQPDEXIFQAEAQYLQIYAVXPIPESQEVLQREGVPDNIKSFYKVNHIWKFRYDRPFHKGXKDKENEFKSLWVERXSLYLVQSLPGISRWFEVEKREVVEMSPLENAIEVLENKNQQLKXLISQCQXRQMQNINPLXMCLNGVIDAAVNGGVSRYQEAFFVKEYILSHPEDGEKIARLRELMLEQAQILEFGLAVHEKFVPQDMRPLHKKLVDQFFVMKSSLGIQEFSACMQASPVHFPNGSPRVCRNSAPASVSPDGXRVIPRRSPLSYPAVNRYSSSSLSSQASAEVSNIXGQSESSDEVFNMQPSPSXSSLSSXHSASPNVXSSAPSSARASPLLSDKHKHSRENSCLSPRERPCSAIYPXPVEPSQRMLFNHIGDGALPRSDPNLSAPEKAVNPXPSSWSLDSGKEAKNMSDSGKLISPPVPPRPXQXASPARHXXSVSPSPAGRSPLKGSVQSFXPSPVEYHSPGLISNSPVLSGSYSSGISSLSRCSXSEXSGFENQVNEQSAPLPVPVPVPVPSYGGEEPVRKESKXPPPYSVYERXLRRPVPLPHSLSIPVXSEPPALPPKPLAARSSHLENGARRXDPGPRPRPLPRKVSQL

SEQ ID NO: 8389 - protein, 1094 aa, Homo sapiens
  MOD_RES (8)..(8): Selenocysteine
  MOD_RES (20)..(20): Selenocysteine
  MOD_RES (69)..(69): Selenocysteine
  MOD_RES (75)..(75): Selenocysteine
  MOD_RES (78)..(78): Selenocysteine
  MOD_RES (80)..(80): Selenocysteine
  MOD_RES (86)..(86): Selenocysteine
  MOD_RES (123)..(123): Selenocysteine
  MOD_RES (135)..(135): Selenocysteine
  MOD_RES (166)..(166): Selenocysteine
  MOD_RES (181)..(181): Selenocysteine
  MOD_RES (263)..(263): Selenocysteine
  MOD_RES (301)..(301): Selenocysteine
  MOD_RES (304)..(304): Selenocysteine
  MOD_RES (317)..(317): Selenocysteine
  MOD_RES (339)..(339): Selenocysteine
  MOD_RES (374)..(374): Selenocysteine
  MOD_RES (395)..(395): Selenocysteine
  MOD_RES (415)..(415): Selenocysteine
  MOD_RES (425)..(425): Selenocysteine
  MOD_RES (482)..(482): Selenocysteine
  MOD_RES (505)..(505): Selenocysteine
  MOD_RES (510)..(510): Selenocysteine
  MOD_RES (522)..(522): Selenocysteine
  MOD_RES (527)..(528): Selenocysteine
  MOD_RES (551)..(551): Selenocysteine
  MOD_RES (558)..(558): Selenocysteine
  MOD_RES (564)..(564): Selenocysteine
  MOD_RES (567)..(567): Selenocysteine
  MOD_RES (580)..(580): Selenocysteine
  MOD_RES (586)..(586): Selenocysteine
  MOD_RES (607)..(607): Selenocysteine
  MOD_RES (610)..(610): Selenocysteine
  MOD_RES (651)..(651): Selenocysteine
  MOD_RES (678)..(678): Selenocysteine
  MOD_RES (711)..(711): Selenocysteine
  MOD_RES (778)..(778): Selenocysteine
  MOD_RES (784)..(784): Selenocysteine
  MOD_RES (803)..(803): Selenocysteine
  MOD_RES (810)..(810): Selenocysteine
  MOD_RES (877)..(877): Selenocysteine
  MOD_RES (882)..(882): Selenocysteine
  MOD_RES (900)..(900): Selenocysteine
  MOD_RES (915)..(915): Selenocysteine
  MOD_RES (928)..(928): Selenocysteine
  MOD_RES (941)..(941): Selenocysteine
  MOD_RES (957)..(957): Selenocysteine
  MOD_RES (969)..(970): Selenocysteine
  MOD_RES (1014)..(1014): Selenocysteine
  MOD_RES (1031)..(1031): Selenocysteine
  MOD_RES (1076)..(1076): Selenocysteine
  MOD_RES (1081)..(1081): Selenocysteine
  MOD_RES (1094)..(1094): Selenocysteine
VIASFRGXVPYGLSLEIGDXVQILEKCDGWYRGFALKNPNIKGIFPSSYVHLKNACVKNKGQFEMVIPXEDSVIXEMXSXLRDWGXMWKQLYVRNEGDLFHRLWHIMNEILDLRRQVLVGHLXHDRMKDVKRHIXARLDWGNEQLGLDLVPRKEYAMVDPEDISIXELYRLMEHRHRKKDXPVQASSHHLFVQMKSLMCSNLGEELEVIFSLFDSKENRPISERFFLRLNRNGLPKAPDKPERHCSLFVDLGSSELRKDIYIXVHIIRIGRMGAGEKKNACSVQYRRPFGCAVLSIADLLXGEXKDDLILKVYMCNXESEWYQIHENIIKKLNARYNLXGSNAGLAVSLQLLHGDIEQIRREYSSVFSHGVSIXRKLGFSNIIMPGEMRNDLYIXIERGEFEKGGKSVARNVEVXMFIVDSSGQXLKDFISFGSGEPPASEYHSFVLYHNNSPRWSELLKLPIPVDKFRGAHIRFEFRHCSXKEKGEKKLFGFSFVPLMQEDGRXLPDGXHELIVHKCEENXNLQDXXRYLKLPFSKGIFLGNNNQAMKAXKESFCIXSFLCSXKLXQNGDMLDLLKWRXHPDKIXGCLSKLKEIDGSEIVKFLQDXLDXLFGILDENSQKYGSKVFDSLVHIINLLQDSKFHHFKPVMDXYIESHFAGALAYRDLIKVLKWYVDRIXEAERQEHIQEVLKAQEYIFKYIVQSRRLFSLAXGGQNEEEFRCCIQELLMSVRFFLSQESKGSGALSQSQAVFLSSFPAVYSELLKLFDVREVANLVQDXLGSLPXILHVDDSLQAIKLQCIGKXVESQLYXNPDSRYILLPVVLHHLHIHLQEQKDLIMCARILSNVFCLIKKNSSEKSVLEEIDVIVASLLDILLRXILEIXSRPQPSSSAMRFQFQDVXGEFVACLLSLLRQMXDRHYQQLLDSFNXKEELRDFLLQIFXVFRILIRPEMFPKDWXVMRLVANNVIIXXVLYLSDALRKNFLNENFDYKIWDSYFYLAVIFINQLCLQLEMFXPSKKKKVLEKYGDMRVXMGCEIFSMWQNLGEHKLHFIPALRQENRLNLGGGGCSEPRACHCXPAWAXKRDCVSKKKEKKX

SEQ ID NO: 8390 - protein, 1389 aa, Homo sapiens
  MOD_RES (1)..(1): Any amino acid
  MOD_RES (15)..(15): Selenocysteine
  MOD_RES (22)..(22): Selenocysteine
  MOD_RES (28)..(28): Selenocysteine
  MOD_RES (31)..(31): Selenocysteine
  MOD_RES (44)..(44): Selenocysteine
  MOD_RES (50)..(50): Selenocysteine
  MOD_RES (71)..(71): Selenocysteine
  MOD_RES (74)..(74): Selenocysteine
  MOD_RES (115)..(115): Selenocysteine
  MOD_RES (142)..(142): Selenocysteine
  MOD_RES (175)..(175): Selenocysteine
  MOD_RES (242)..(242): Selenocysteine
  MOD_RES (248)..(248): Selenocysteine
  MOD_RES (267)..(267): Selenocysteine
  MOD_RES (274)..(274): Selenocysteine
  MOD_RES (341)..(341): Selenocysteine
  MOD_RES (346)..(346): Selenocysteine
  MOD_RES (364)..(364): Selenocysteine
  MOD_RES (379)..(379): Selenocysteine
  MOD_RES (392)..(392): Selenocysteine
  MOD_RES (405)..(405): Selenocysteine
  MOD_RES (421)..(421): Selenocysteine
  MOD_RES (433)..(434): Selenocysteine
  MOD_RES (478)..(478): Selenocysteine
  MOD_RES (495)..(495): Selenocysteine
  MOD_RES (526)..(526): Selenocysteine
  MOD_RES (578)..(578): Selenocysteine
  MOD_RES (604)..(604): Selenocysteine
  MOD_RES (615)..(615): Selenocysteine
  MOD_RES (617)..(617): Selenocysteine
  MOD_RES (643)..(643): Selenocysteine
  MOD_RES (652)..(652): Selenocysteine
  MOD_RES (678)..(678): Selenocysteine
  MOD_RES (683)..(683): Selenocysteine
  MOD_RES (703)..(703): Selenocysteine
  MOD_RES (708)..(708): Selenocysteine
  MOD_RES (719)..(719): Selenocysteine
  MOD_RES (832)..(832): Selenocysteine
  MOD_RES (847)..(847): Selenocysteine
  MOD_RES (887)..(887): Selenocysteine
  MOD_RES (902)..(902): Selenocysteine
  MOD_RES (946)..(946): Selenocysteine
  MOD_RES (953)..(953): Selenocysteine
  MOD_RES (963)..(963): Selenocysteine
  MOD_RES (1085)..(1085): Selenocysteine
  MOD_RES (1119)..(1119): Selenocysteine
  MOD_RES (1137)..(1137): Selenocysteine
  MOD_RES (1143)..(1143): Selenocysteine
  MOD_RES (1151)..(1151): Selenocysteine
  MOD_RES (1190)..(1190): Selenocysteine
  MOD_RES (1227)..(1228): Selenocysteine
  MOD_RES (1248)..(1248): Selenocysteine
  MOD_RES (1282)..(1282): Selenocysteine
  MOD_RES (1285)..(1285): Selenocysteine
  MOD_RES (1322)..(1322): Selenocysteine
  MOD_RES (1332)..(1332): Selenocysteine
  MOD_RES (1348)..(1348): Selenocysteine
  MOD_RES (1373)..(1373): Selenocysteine
XGIFLGNNNQAMKAXKESFCIXSFLCSXKLXQNGDMLDLLKWRXHPDKIXGCLSKLKEIDGSEIVKFLQDXLDXLFGILDENSQKYGSKVFDSLVHIINLLQDSKFHHFKPVMDXYIESHFAGALAYRDLIKVLKWYVDRIXEAERQEHIQEVLKAQEYIFKYIVQSRRLFSLAXGGQNEEEFRCCIQELLMSVRFFLSQESKGSGALSQSQAVFLSSFPAVYSELLKLFDVREVANLVQDXLGSLPXILHVDDSLQAIKLQCIGKXVESQLYXNPDSRYILLPVVLHHLHIHLQEQKDLIMCARILSNVFCLIKKNSSEKSVLEEIDVIVASLLDILLRXILEIXSRPQPSSSAMRFQFQDVXGEFVACLLSLLRQMXDRHYQQLLDSFNXKEELRDFLLQIFXVFRILIRPEMFPKDWXVMRLVANNVIIXXVLYLSDALRKNFLNENFDYKIWDSYFYLAVIFINQLCLQLEMFXPSKKKKVLEKYGDMRVXMGCEIFSMWQNLGEHKLHFIPALIGPFLEVXLIPQPDLRNVMIPIFHDMMDWEQRRSGNFKQVEAKLIDKLDSLMSEGKGDEXYRELFNSIIPLFGPYPSLLKKIEREXWRESGVSLIAXVXRLMERLLDYRDCMKMGEVDGKKIGCXVSLLNFYKXELNKEEMYIRYIHKLYDLHLKAQNFXEAAYXLLLYDELLEWSDRPLREFLXYPMQXEWQRKEHLHLXIIQNFDRGKCWENGIILCRKIAEQYESYYDYRNLSKMRMMEASLYDKIMDQQRLEPEFFRVGFYGKKFPFFLRNKEFVCRGHDYERLEAFQQRMLNEFPHAIAMQHANQPDEXIFQAEAQYLQIYAVXPIPESQEVLQREGVPDNIKSFYKVNHIWKFRYDRPFHKGXKDKENEFKSLWVERXSLYLVQSLPGISRWFEVEKREVVEMSPLENAIEVLENKNQQLKXLISQCQXRQMQNINPLXMCLNGVIDAAVNGGVSRYQEAFFVKEYILSHPEDGEKIARLRELMLEQAQILEFGLAVHEKFVPQDMRPLHKKLVDQFFVMKSSLGIQEFSACMQASPVHFPNGSPRVCRNSAPASVSPDGXRVIPRRSPLSYPAVNRYSSSSLSSQASAEVSNIXGQSESSDEVFNMQPSPSXSSLSSXHSASPNVXSSAPSSARASPLLSDKHKHSRENSCLSPRERPCSAIYPXPVEPSQRMLFNHIGDGALPRSDPNLSAPEKASPARHXXSVSPSPAGRSPLKGSVQSFXPSPVEYHSPGLISNSPVLSGSYSSGISSLSRCSXSEXSGFENQVNEQSAPLPVPVPVPVPSYGGEEPVRKESKXPPPYSVYERXLRRPVPLPHSLSIPVXSEPPALPPKPLAARSSHLENGARRXDPGPRPRPLPRKVSQL

SEQ ID NO: 8391 - protein, 1999 aa, Homo sapiens
  MOD_RES (1)..(1): Any amino acid
  MOD_RES (8)..(8): Selenocysteine
  MOD_RES (20)..(20): Selenocysteine
  MOD_RES (69)..(69): Selenocysteine
  MOD_RES (75)..(75): Selenocysteine
  MOD_RES (78)..(78): Selenocysteine
  MOD_RES (80)..(80): Selenocysteine
  MOD_RES (86)..(86): Selenocysteine
  MOD_RES (123)..(123): Selenocysteine
  MOD_RES (135)..(135): Selenocysteine
  MOD_RES (166)..(166): Selenocysteine
  MOD_RES (181)..(181): Selenocysteine
  MOD_RES (263)..(263): Selenocysteine
  MOD_RES (301)..(301): Selenocysteine
  MOD_RES (304)..(304): Selenocysteine
  MOD_RES (317)..(317): Selenocysteine
  MOD_RES (339)..(339): Selenocysteine
  MOD_RES (374)..(374): Selenocysteine
  MOD_RES (395)..(395): Selenocysteine
  MOD_RES (415)..(415): Selenocysteine
  MOD_RES (425)..(425): Selenocysteine
  MOD_RES (482)..(482): Selenocysteine
  MOD_RES (505)..(505): Selenocysteine
  MOD_RES (510)..(510): Selenocysteine
  MOD_RES (522)..(522): Selenocysteine
  MOD_RES (527)..(528): Selenocysteine
  MOD_RES (551)..(551): Selenocysteine
  MOD_RES (558)..(558): Selenocysteine
  MOD_RES (564)..(564): Selenocysteine
  MOD_RES (567)..(567): Selenocysteine
  MOD_RES (580)..(580): Selenocysteine
  MOD_RES (586)..(586): Selenocysteine
  MOD_RES (607)..(607): Selenocysteine
  MOD_RES (610)..(610): Selenocysteine
  MOD_RES (651)..(651): Selenocysteine
  MOD_RES (678)..(678): Selenocysteine
  MOD_RES (711)..(711): Selenocysteine
  MOD_RES (778)..(778): Selenocysteine
  MOD_RES (784)..(784): Selenocysteine
  MOD_RES (803)..(803): Selenocysteine
  MOD_RES (810)..(810): Selenocysteine
  MOD_RES (877)..(877): Selenocysteine
  MOD_RES (882)..(882): Selenocysteine
  MOD_RES (900)..(900): Selenocysteine
  MOD_RES (902)..(902): Selenocysteine
  MOD_RES (914)..(915): Selenocysteine
  MOD_RES (918)..(918): Selenocysteine
  MOD_RES (925)..(925): Selenocysteine
  MOD_RES (932)..(932): Selenocysteine
  MOD_RES (936)..(936): Selenocysteine
  MOD_RES (951)..(951): Selenocysteine
  MOD_RES (964)..(964): Selenocysteine
  MOD_RES (977)..(977): Selenocysteine
  MOD_RES (993)..(993): Selenocysteine
  MOD_RES (1005)..(1006): Selenocysteine
  MOD_RES (1050)..(1050): Selenocysteine
  MOD_RES (1067)..(1067): Selenocysteine
  MOD_RES (1098)..(1098): Selenocysteine
  MOD_RES (1150)..(1150): Selenocysteine
  MOD_RES (1176)..(1176): Selenocysteine
  MOD_RES (1187)..(1187): Selenocysteine
  MOD_RES (1189)..(1189): Selenocysteine
  MOD_RES (1215)..(1215): Selenocysteine
  MOD_RES (1224)..(1224): Selenocysteine
  MOD_RES (1250)..(1250): Selenocysteine
  MOD_RES (1255)..(1255): Selenocysteine
  MOD_RES (1275)..(1275): Selenocysteine
  MOD_RES (1280)..(1280): Selenocysteine
  MOD_RES (1291)..(1291): Selenocysteine
  MOD_RES (1404)..(1404): Selenocysteine
  MOD_RES (1419)..(1419): Selenocysteine
  MOD_RES (1459)..(1459): Selenocysteine
  MOD_RES (1474)..(1474): Selenocysteine
  MOD_RES (1518)..(1518): Selenocysteine
  MOD_RES (1525)..(1525): Selenocysteine
  MOD_RES (1535)..(1535): Selenocysteine
  MOD_RES (1657)..(1657): Selenocysteine
  MOD_RES (1691)..(1691): Selenocysteine
  MOD_RES (1709)..(1709): Selenocysteine
  MOD_RES (1715)..(1715): Selenocysteine
  MOD_RES (1723)..(1723): Selenocysteine
  MOD_RES (1762)..(1762): Selenocysteine
  MOD_RES (1797)..(1797): Selenocysteine
  MOD_RES (1828)..(1828): Selenocysteine
  MOD_RES (1830)..(1830): Selenocysteine
  MOD_RES (1837)..(1838): Selenocysteine
  MOD_RES (1858)..(1858): Selenocysteine
  MOD_RES (1892)..(1892): Selenocysteine
  MOD_RES (1895)..(1895): Selenocysteine
  MOD_RES (1932)..(1932): Selenocysteine
  MOD_RES (1942)..(1942): Selenocysteine
  MOD_RES (1958)..(1958): Selenocysteine
  MOD_RES (1983)..(1983): Selenocysteine
XIASFRGXVPYGLSLEIGDXVQILEKCDGWYRGFALKNPNIKGIFPSSYVHLKNACVKNKGQFEMVIPXEDSVIXEMXSXLRDWGXMWKQLYVRNEGDLFHRLWHIMNEILDLRRQVLVGHLXHDRMKDVKRHIXARLDWGNEQLGLDLVPRKEYAMVDPEDISIXELYRLMEHRHRKKDXPVQASSHHLFVQMKSLMCSNLGEELEVIFSLFDSKENRPISERFFLRLNRNGLPKAPDKPERHCSLFVDLGSSELRKDIYIXVHIIRIGRMGAGEKKNACSVQYRRPFGCAVLSIADLLXGEXKDDLILKVYMCNXESEWYQIHENIIKKLNARYNLXGSNAGLAVSLQLLHGDIEQIRREYSSVFSHGVSIXRKLGFSNIIMPGEMRNDLYIXIERGEFEKGGKSVARNVEVXMFIVDSSGQXLKDFISFGSGEPPASEYHSFVLYHNNSPRWSELLKLPIPVDKFRGAHIRFEFRHCSXKEKGEKKLFGFSFVPLMQEDGRXLPDGXHELIVHKCEENXNLQDXXRYLKLPFSKGIFLGNNNQAMKAXKESFCIXSFLCSXKLXQNGDMLDLLKWRXHPDKIXGCLSKLKEIDGSEIVKFLQDXLDXLFGILDENSQKYGSKVFDSLVHIINLLQDSKFHHFKPVMDXYIESHFAGALAYRDLIKVLKWYVDRIXEAERQEHIQEVLKAQEYIFKYIVQSRRLFSLAXGGQNEEEFRCCIQELLMSVRFFLSQESKGSGALSQSQAVFLSSFPAVYSELLKLFDVREVANLVQDXLGSLPXILHVDDSLQAIKLQCIGKXVESQLYXNPDSRYILLPVVLHHLHIHLQEQKDLIMCARILSNVFCLIKKNSSEKSVLEEIDVIVASLLDILLRXILEIXSRPQPSSSAMRFQFQDVXRXGFLNRESSHGSXXLSXFSVCADXYGKVPMXSRHXGEFVACLLSLLRQMXDRHYQQLLDSFNXKEELRDFLLQIFXVFRILIRPEMFPKDWXVMRLVANNVIIXXVLYLSDALRKNFLNENFDYKIWDSYFYLAVIFINQLCLQLEMFXPSKKKKVLEKYGDMRVXMGCEIFSMWQNLGEHKLHFIPALIGPFLEVXLIPQPDLRNVMIPIFHDMMDWEQRRSGNFKQVEAKLIDKLDSLMSEGKGDEXYRELFNSIIPLFGPYPSLLKKIEREXWRESGVSLIAXVXRLMERLLDYRDCMKMGEVDGKKIGCXVSLLNFYKXELNKEEMYIRYIHKLYDLHLKAQNFXEAAYXLLLYDELLEWSDRPLREFLXYPMQXEWQRKEHLHLXIIQNFDRGKCWENGIILCRKIAEQYESYYDYRNLSKMRMMEASLYDKIMDQQRLEPEFFRVGFYGKKFPFFLRNKEFVCRGHDYERLEAFQQRMLNEFPHAIAMQHANQPDEXIFQAEAQYLQIYAVXPIPESQEVLQREGVPDNIKSFYKVNHIWKFRYDRPFHKGXKDKENEFKSLWVERXSLYLVQSLPGISRWFEVEKREVVEMSPLENAIEVLENKNQQLKXLISQCQXRQMQNINPLXMCLNGVIDAAVNGGVSRYQEAFFVKEYILSHPEDGEKIARLRELMLEQAQILEFGLAVHEKFVPQDMRPLHKKLVDQFFVMKSSLGIQEFSACMQASPVHFPNGSPRVCRNSAPASVSPDGXRVIPRRSPLSYPAVNRYSSSSLSSQASAEVSNIXGQSESSDEVFNMQPSPSXSSLSSXHSASPNVXSSAPSSARASPLLSDKHKHSRENSCLSPRERPCSAIYPXPVEPSQRMLFNHIGDGALPRSDPNLSAPEKAVNPXPSSWSLDSGKEAKNMSDSGKLISPPVPPRPXQXASPARHXXSVSPSPAGRSPLKGSVQSFXPSPVEYHSPGLISNSPVLSGSYSSGISSLSRCSXSEXSGFENQVNEQSAPLPVPVPVPVPSYGGEEPVRKESKXPPPYSVYERXLRRPVPLPHSLSIPVXSEPPALPPKPLAARSSHLENGARRXDPGPRPRPLPRKVSQL

SEQ ID NO: 8392 - protein, 83 aa, Homo sapiens
  MOD_RES (7)..(7): Selenocysteine
  MOD_RES (34)..(34): Selenocysteine
  MOD_RES (49)..(49): Selenocysteine
  MOD_RES (62)..(62): Selenocysteine
  MOD_RES (64)..(64): Selenocysteine
MARWIPXKRQKYGVAIYNYNASQDVELSLQIGDXVHILEMYEGWYRGYXLQNKSKKAIGSRXPXIPKSMDAQVSDIKWHSICI

SEQ ID NO: 8393 - protein, 350 aa, Homo sapiens
  MOD_RES (7)..(7): Selenocysteine
  MOD_RES (34)..(34): Selenocysteine
  MOD_RES (49)..(49): Selenocysteine
  MOD_RES (62)..(62): Selenocysteine
  MOD_RES (70)..(70): Selenocysteine
  MOD_RES (79)..(79): Selenocysteine
  MOD_RES (92)..(92): Selenocysteine
  MOD_RES (94)..(94): Selenocysteine
  MOD_RES (112)..(112): Selenocysteine
  MOD_RES (121)..(121): Selenocysteine
  MOD_RES (135)..(135): Selenocysteine
  MOD_RES (149)..(149): Selenocysteine
  MOD_RES (178)..(178): Selenocysteine
  MOD_RES (180)..(180): Selenocysteine
  MOD_RES (218)..(218): Selenocysteine
  MOD_RES (221)..(221): Selenocysteine
  MOD_RES (252)..(252): Selenocysteine
  MOD_RES (282)..(282): Selenocysteine
  MOD_RES (315)..(315): Selenocysteine
  MOD_RES (330)..(330): Selenocysteine
MARWIPXKRQKYGVAIYNYNASQDVELSLQIGDXVHILEMYEGWYRGYXLQNKSKKGIFPEXYIHLKEAXVEDLGQHEXVIPGELPLVQELXSXLREWAVIWRKLYVNNKLXLFRQLQQMXYSLIEWRSQILSGXLPKDELAELKKKVXAKIDHGNRMLGLDLVVRDDNGNILDPDEXSXIALFKAHEVASKRIEEKIQEEKSILQNLDLRGQSIFSXIHXYGLYVNFKNFVCNIGEDAELFMALYDPDQSXFISENYLIRWGSNGMPKEIEKLNNLQAVFXDLSSMDLIRPRVSLVCQIVRVGHMELKEGKKHXCGLRRPFGVAVMDIXDIIHGKVDDEEKQHFIPFQQ

SEQ ID NO: 8394 - protein, 1870 aa, Homo sapiens
  MOD_RES (7)..(7): Selenocysteine
  MOD_RES (34)..(34): Selenocysteine
  MOD_RES (49)..(49): Selenocysteine
  MOD_RES (62)..(62): Selenocysteine
  MOD_RES (70)..(70): Selenocysteine
  MOD_RES (79)..(79): Selenocysteine
  MOD_RES (92)..(92): Selenocysteine
  MOD_RES (94)..(94): Selenocysteine
  MOD_RES (112)..(112): Selenocysteine
  MOD_RES (121)..(121): Selenocysteine
  MOD_RES (135)..(135): Selenocysteine
  MOD_RES (149)..(149): Selenocysteine
  MOD_RES (178)..(178): Selenocysteine
  MOD_RES (180)..(180): Selenocysteine
  MOD_RES (218)..(218): Selenocysteine
  MOD_RES (221)..(221): Selenocysteine
  MOD_RES (252)..(252): Selenocysteine
  MOD_RES (282)..(282): Selenocysteine
  MOD_RES (315)..(315): Selenocysteine
  MOD_RES (330)..(330): Selenocysteine
  MOD_RES (355)..(355): Selenocysteine
  MOD_RES (369)..(369): Selenocysteine
  MOD_RES (380)..(380): Selenocysteine
  MOD_RES (411)..(411): Selenocysteine
  MOD_RES (425)..(425): Selenocysteine
  MOD_RES (449)..(449): Selenocysteine
  MOD_RES (462)..(462): Selenocysteine
  MOD_RES (469)..(469): Selenocysteine
  MOD_RES (512)..(512): Selenocysteine
  MOD_RES (523)..(523): Selenocysteine
  MOD_RES (530)..(530): Selenocysteine
  MOD_RES (539)..(539): Selenocysteine
  MOD_RES (560)..(561): Selenocysteine
  MOD_RES (587)..(587): Selenocysteine
  MOD_RES (591)..(591): Selenocysteine
  MOD_RES (608)..(608): Selenocysteine
  MOD_RES (610)..(610): Selenocysteine
  MOD_RES (616)..(616): Selenocysteine
  MOD_RES (624)..(624): Selenocysteine
  MOD_RES (629)..(629): Selenocysteine
  MOD_RES (632)..(632): Selenocysteine
  MOD_RES (672)..(672): Selenocysteine
  MOD_RES (688)..(688): Selenocysteine
  MOD_RES (718)..(718): Selenocysteine
  MOD_RES (727)..(727): Selenocysteine
  MOD_RES (750)..(750): Selenocysteine
  MOD_RES (861)..(861): Selenocysteine
  MOD_RES (867)..(867): Selenocysteine
  MOD_RES (883)..(883): Selenocysteine
  MOD_RES (921)..(921): Selenocysteine
  MOD_RES (939)..(939): Selenocysteine
  MOD_RES (975)..(975): Selenocysteine
  MOD_RES (978)..(978): Selenocysteine
  MOD_RES (989)..(989): Selenocysteine
  MOD_RES (1012)..(1012): Selenocysteine
  MOD_RES (1029)..(1029): Selenocysteine
  MOD_RES (1055)..(1055): Selenocysteine
  MOD_RES (1063)..(1063): Selenocysteine
  MOD_RES (1113)..(1113): Selenocysteine
  MOD_RES (1115)..(1115): Selenocysteine
  MOD_RES (1124)..(1124): Selenocysteine
  MOD_RES (1153)..(1153): Selenocysteine
  MOD_RES (1209)..(1209): Selenocysteine
  MOD_RES (1224)..(1224): Selenocysteine
  MOD_RES (1258)..(1258): Selenocysteine
  MOD_RES (1263)..(1263): Selenocysteine
  MOD_RES (1292)..(1292): Selenocysteine
  MOD_RES (1327)..(1327): Selenocysteine
  MOD_RES (1400)..(1400): Selenocysteine
  MOD_RES (1409)..(1409): Selenocysteine
  MOD_RES (1411)..(1412): Selenocysteine
  MOD_RES (1430)..(1430): Selenocysteine
  MOD_RES (1481)..(1481): Selenocysteine
  MOD_RES (1487)..(1488): Selenocysteine
  MOD_RES (1490)..(1491): Selenocysteine
  MOD_RES (1494)..(1494): Selenocysteine
  MOD_RES (1509)..(1509): Selenocysteine
  MOD_RES (1521)..(1521): Selenocysteine
  MOD_RES (1525)..(1525): Selenocysteine
  MOD_RES (1572)..(1572): Selenocysteine
  MOD_RES (1601)..(1601): Selenocysteine
  MOD_RES (1612)..(1612): Selenocysteine
  MOD_RES (1641)..(1641): Selenocysteine
  MOD_RES (1647)..(1647): Selenocysteine
  MOD_RES (1654)..(1654): Selenocysteine
  MOD_RES (1666)..(1666): Selenocysteine
  MOD_RES (1673)..(1673): Selenocysteine
  MOD_RES (1676)..(1676): Selenocysteine
  MOD_RES (1682)..(1682): Selenocysteine
  MOD_RES (1758)..(1758): Selenocysteine
  MOD_RES (1786)..(1786): Selenocysteine
  MOD_RES (1794)..(1794): Selenocysteine
  MOD_RES (1798)..(1798): Selenocysteine
  MOD_RES (1800)..(1800): Selenocysteine
  MOD_RES (1808)..(1808): Selenocysteine
  MOD_RES (1814)..(1814): Selenocysteine
  MOD_RES (1835)..(1835): Selenocysteine
  MOD_RES (1864)..(1864): Selenocysteine
MARWIPXKRQKYGVAIYNYNASQDVELSLQIGDXVHILEMYEGWYRGYXLQNKSKKGIFPEXYIHLKEAXVEDLGQHEXVIPGELPLVQELXSXLREWAVIWRKLYVNNKLXLFRQLQQMXYSLIEWRSQILSGXLPKDELAELKKKVXAKIDHGNRMLGLDLVVRDDNGNILDPDEXSXIALFKAHEVASKRIEEKIQEEKSILQNLDLRGQSIFSXIHXYGLYVNFKNFVCNIGEDAELFMALYDPDQSXFISENYLIRWGSNGMPKEIEKLNNLQAVFXDLSSMDLIRPRVSLVCQIVRVGHMELKEGKKHXCGLRRPFGVAVMDIXDIIHGKVDDEEKQHFIPFQQIAMEXYIRQRQLIMSPLIXSHVIGENEPLXSVLNKVIAAKEVNHKGQGLWVSLKLLPGDLXQVQKNFSHLVDRSXAIARKMGFPEIILPGDVRNDIYVXLIHGEFDKGKKKXPKNVEVXMSVHDEEGKLLEKAIHPGAGYEGISEYKSVVYYQVKQPCWYEXVKVSIAIEEVXRCHIRFXFRHRSSQEXRDKSERAFGVAFVKLMNPDGXXLQDGRHDLVVYKGDNKKMEDAKFYLXLPGXKMEMEEKELQASKNLVXFXPSKDSXKDSFQIAXLICSXKLXQNVDLLGLLNWRSNSQNIKHNLKKLMEVDGGEIVKFLQDXLDALFNIMMEMSDSEXYDFLVFDALVFIISLIGDIKFQHFNPVLEXYIYKHFSAXLAYVKLSKVLNFYVANADDSSKXELLFAALKALKYLFRFIIQSRVLYLRFYGQSKDGDEFNNSIRQLFLAFNMLMDRPLEEAVKIKGAALKYLPSIINDVKLVFDPVELSVLFCKFIQSIPDNQLVRQKLNCMXKIVESXLFRQSECREVLLPLLXDQLSGQLDDNSNKPDHEASSQLLSNILEVLDRKDVGAXAVHIQLIMERLLRRINRXVIGMNRQSPHIGSFVACMIALLQQMDDSHYSHYISXFKXRQDIIDFLMEXFIMFKDLIGKNVYAKDWMVMNMXQNRVFLRAINQFAEVLXRFFMDQASFELQLWNNYFHLAVAFLXHESLQLEXFSQAKRNKIVKKYGDMRKEIGFRIRDMWYNLGPHKIKFIPSMVGPILEVXLXPEVELRKAXIPIFFDMMQCEFNFSGNGNFHMFENELIXKLDQEVEGGRGDEQYKVLLEKLLLEHCRKHKYLSSSGEVFALLVSSLLENLLDYRXIIMQDESKENRMSCXVNVLNFYKEKKREDIYIRYLYKLRDLHRDCENYXEAAYXLLLHAELLQWSDKPCVPHLLQKDSYYVYXQQELKEKLYQEIISYFDKGKMWEKAIKLSKELAEXYESKVFDYEGLGNLLKKRASFYENIIKAMRPQPEYFAVGYYGQGFPSFLRNKIFIYRGKEYERREDFSLRLLXQFPNAEKMXSXXPPGEDIKSSPKQYMQCFXVKPVMSLPPSYKDKPVPEQILNYYRANEVQQFRYSRPFRKGEKDPDNEFAXMWIERXXYXXAYXFPGILKWFEVKQISXEEISPLENAIEXMELXNERISNCVQQHAWDRSLSVHPLSMLLSGIVDPAVMGGFSNYEKAFFXEKYLQEHPEDQEKVELLKRLIALQMPLLXEGIRIHGEKLXEQLKPLHERLSSCFRELKEKVEKHYGVIXLPPNLXERKQSRXGSIVLPYIMSSXLRRLSIXSVXSSVVSXSSNSSDNAPSRPGSDGSILEPLLERRASSGARVEDLSLREENSENRISKFKRKDWSLSKSQVIAEKAPEPDLMSPXRKAQRPKSLQLMDNRLSPFHGSSPPQSXPLSPPPLXPKAXRXLSSPSLQXDGIAAXPVPPPPPPKSKPYEGSQRNSXELAPPLPVRREAKAPPPPPPKARKSGIPXSEPGSQ

SEQ ID NO: 8395 - protein, 138 aa, Homo sapiens
  MOD_RES (1)..(1): Any amino acid
  MOD_RES (15)..(15): Selenocysteine
  MOD_RES (17)..(17): Selenocysteine
  MOD_RES (23)..(23): Selenocysteine
  MOD_RES (31)..(31): Selenocysteine
  MOD_RES (36)..(36): Selenocysteine
  MOD_RES (39)..(39): Selenocysteine
  MOD_RES (79)..(79): Selenocysteine
  MOD_RES (95)..(95): Selenocysteine
  MOD_RES (125)..(125): Selenocysteine
  MOD_RES (134)..(134): Selenocysteine
XMEEKELQASKNLVXFXPSKDSXKDSFQIAXLICSXKLXQNVDLLGLLNWRSNSQNIKHNLKKLMEVDGGEIVKFLQDXLDALFNIMMEMSDSEXYDFLVFDALVFIISLIGDIKFQHFNPVLEXYIYKHFSAXLAYV

SEQ ID NO: 8396 - protein, 1090 aa, Homo sapiens
  MOD_RES (1)..(1): Any amino acid
  MOD_RES (87)..(87): Selenocysteine
  MOD_RES (102)..(102): Selenocysteine
  MOD_RES (127)..(127): Selenocysteine
  MOD_RES (141)..(141): Selenocysteine
  MOD_RES (152)..(152): Selenocysteine
  MOD_RES (183)..(183): Selenocysteine
  MOD_RES (197)..(197): Selenocysteine
  MOD_RES (221)..(221): Selenocysteine
  MOD_RES (234)..(234): Selenocysteine
  MOD_RES (241)..(241): Selenocysteine
  MOD_RES (284)..(284): Selenocysteine
  MOD_RES (295)..(295): Selenocysteine
  MOD_RES (302)..(302): Selenocysteine
  MOD_RES (311)..(311): Selenocysteine
  MOD_RES (332)..(333): Selenocysteine
  MOD_RES (359)..(359): Selenocysteine
  MOD_RES (363)..(363): Selenocysteine
  MOD_RES (380)..(380): Selenocysteine
  MOD_RES (382)..(382): Selenocysteine
  MOD_RES (388)..(388): Selenocysteine
  MOD_RES (396)..(396): Selenocysteine
  MOD_RES (401)..(401): Selenocysteine
  MOD_RES (404)..(404): Selenocysteine
  MOD_RES (444)..(444): Selenocysteine
  MOD_RES (460)..(460): Selenocysteine
  MOD_RES (490)..(490): Selenocysteine
  MOD_RES (499)..(499): Selenocysteine
  MOD_RES (522)..(522): Selenocysteine
  MOD_RES (633)..(633): Selenocysteine
  MOD_RES (639)..(639): Selenocysteine
  MOD_RES (655)..(655): Selenocysteine
  MOD_RES (693)..(693): Selenocysteine
  MOD_RES (711)..(711): Selenocysteine
  MOD_RES (747)..(747): Selenocysteine
  MOD_RES (750)..(750): Selenocysteine
  MOD_RES (761)..(761): Selenocysteine
  MOD_RES (784)..(784): Selenocysteine
  MOD_RES (801)..(801): Selenocysteine
  MOD_RES (827)..(827): Selenocysteine
  MOD_RES (835)..(835): Selenocysteine
  MOD_RES (885)..(885): Selenocysteine
  MOD_RES (887)..(887): Selenocysteine
  MOD_RES (896)..(896): Selenocysteine
  MOD_RES (925)..(925): Selenocysteine
  MOD_RES (981)..(981): Selenocysteine
  MOD_RES (996)..(996): Selenocysteine
  MOD_RES (1030)..(1030): Selenocysteine
  MOD_RES (1035)..(1035): Selenocysteine
  MOD_RES (1084)..(1084): Selenocysteine
XVNPAEPRFAGPVHLQYHPHLWPLCELQELCLQHRGRCRVVYGPLRPRPVHFYQDLSSMDLIRPRVSLVCQIVRVGHMELKEGKKHXCGLRRPFGVAVMDIXDIIHGKVDDEEKQHFIPFQQIAMEXYIRQRQLIMSPLIXSHVIGENEPLXSVLNKVIAAKEVNHKGQGLWVSLKLLPGDLXQVQKNFSHLVDRSXAIARKMGFPEIILPGDVRNDIYVXLIHGEFDKGKKKXPKNVEVXMSVHDEEGKLLEKAIHPGAGYEGISEYKSVVYYQVKQPCWYEXVKVSIAIEEVXRCHIRFXFRHRSSQEXRDKSERAFGVAFVKLMNPDGXXLQDGRHDLVVYKGDNKKMEDAKFYLXLPGXKMEMEEKELQASKNLVXFXPSKDSXKDSFQIAXLICSXKLXQNVDLLGLLNWRSNSQNIKHNLKKLMEVDGGEIVKFLQDXLDALFNIMMEMSDSEXYDFLVFDALVFIISLIGDIKFQHFNPVLEXYIYKHFSAXLAYVKLSKVLNFYVANADDSSKXELLFAALKALKYLFRFIIQSRVLYLRFYGQSKDGDEFNNSIRQLFLAFNMLMDRPLEEAVKIKGAALKYLPSIINDVKLVFDPVELSVLFCKFIQSIPDNQLVRQKLNCMXKIVESXLFRQSECREVLLPLLXDQLSGQLDDNSNKPDHEASSQLLSNILEVLDRKDVGAXAVHIQLIMERLLRRINRXVIGMNRQSPHIGSFVACMIALLQQMDDSHYSHYISXFKXRQDIIDFLMEXFIMFKDLIGKNVYAKDWMVMNMXQNRVFLRAINQFAEVLXRFFMDQASFELQLWNNYFHLAVAFLXHESLQLEXFSQAKRNKIVKKYGDMRKEIGFRIRDMWYNLGPHKIKFIPSMVGPILEVXLXPEVELRKAXIPIFFDMMQCEFNFSGNGNFHMFENELIXKLDQEVEGGRGDEQYKVLLEKLLLEHCRKHKYLSSSGEVFALLVSSLLENLLDYRXIIMQDESKENRMSCXVNVLNFYKEKKREDIYIRYLYKLRDLHRDCENYXEAAYXLLLHAELLQVNGSESLFQQGGVQCPFRLNSIHFMILMGKNFIPGISFYXSFFSSF

SEQ ID NO: 8397 - protein, 185 aa, Homo sapiens
  MOD_RES (46)..(46): Selenocysteine
  MOD_RES (58)..(58): Selenocysteine
  MOD_RES (63)..(63): Selenocysteine
  MOD_RES (165)..(165): Selenocysteine
  MOD_RES (170)..(170): Selenocysteine
LGRGAFEAMAHVVSLVHRSLEAAQDARGHCPQLAAYVHYAFRLPGXEPSLPDGAPPVXVQAAXLARGSGRPASLYLARSKSISSSNPDLAVAPGSVDDEVSRILASKGIDRSHSWVNSAYAPGGSKAVLRRAPPYCGADPRQAIDCNSSRASSYLEGSSSAPPAXQLRPXVQKLLHEELALQWVV

SEQ ID NO: 8398 - protein, 2047 aa, Homo sapiens
  MOD_RES (16)..(16): Selenocysteine
  MOD_RES (48)..(48): Selenocysteine
  MOD_RES (94)..(95): Selenocysteine
  MOD_RES (138)..(139): Selenocysteine
  MOD_RES (141)..(141): Selenocysteine
  MOD_RES (182)..(182): Selenocysteine
  MOD_RES (221)..(221): Selenocysteine
  MOD_RES (233)..(233): Selenocysteine
  MOD_RES (314)..(314): Selenocysteine
  MOD_RES (320)..(320): Selenocysteine
  MOD_RES (330)..(330): Selenocysteine
  MOD_RES (366)..(366): Selenocysteine
  MOD_RES (385)..(385): Selenocysteine
  MOD_RES (397)..(397): Selenocysteine
  MOD_RES (426)..(426): Selenocysteine
  MOD_RES (453)..(453): Selenocysteine
  MOD_RES (455)..(455): Selenocysteine
  MOD_RES (457)..(457): Selenocysteine
  MOD_RES (493)..(493): Selenocysteine
  MOD_RES (529)..(529): Selenocysteine
  MOD_RES (545)..(545): Selenocysteine
  MOD_RES (578)..(578): Selenocysteine
  MOD_RES (599)..(599): Selenocysteine
  MOD_RES (604)..(604): Selenocysteine
  MOD_RES (628)..(628): Selenocysteine
  MOD_RES (636)..(636): Selenocysteine
  MOD_RES (648)..(648): Selenocysteine
  MOD_RES (652)..(652): Selenocysteine
  MOD_RES (657)..(657): Selenocysteine
  MOD_RES (669)..(669): Selenocysteine
  MOD_RES (689)..(689): Selenocysteine
  MOD_RES (712)..(712): Selenocysteine
  MOD_RES (729)..(729): Selenocysteine
  MOD_RES (746)..(746): Selenocysteine
  MOD_RES (845)..(845): Selenocysteine
  MOD_RES (857)..(857): Selenocysteine
  MOD_RES (862)..(862): Selenocysteine
  MOD_RES (954)..(954): Selenocysteine
  MOD_RES (969)..(969): Selenocysteine
  MOD_RES (981)..(981): Selenocysteine
  MOD_RES (1026)..(1026): Selenocysteine
  MOD_RES (1039)..(1039): Selenocysteine
  MOD_RES (1045)..(1045): Selenocysteine
  MOD_RES (1056)..(1056): Selenocysteine
  MOD_RES (1077)..(1078): Selenocysteine
  MOD_RES (1083)..(1083): Selenocysteine
  MOD_RES (1094)..(1094): Selenocysteine
  MOD_RES (1115)..(1115): Selenocysteine
  MOD_RES (1148)..(1148): Selenocysteine
  MOD_RES (1156)..(1156): Selenocysteine
  MOD_RES (1175)..(1175): Selenocysteine
  MOD_RES (1200)..(1200): Selenocysteine
  MOD_RES (1209)..(1209): Selenocysteine
  MOD_RES (1237)..(1237): Selenocysteine
  MOD_RES (1252)..(1252): Selenocysteine
  MOD_RES (1264)..(1264): Selenocysteine
  MOD_RES (1274)..(1274): Selenocysteine
  MOD_RES (1277)..(1277): Selenocysteine
  MOD_RES (1310)..(1310): Selenocysteine
  MOD_RES (1328)..(1328): Selenocysteine
  MOD_RES (1358)..(1358): Selenocysteine
  MOD_RES (1363)..(1363): Selenocysteine
  MOD_RES (1370)..(1370): Selenocysteine
  MOD_RES (1386)..(1386): Selenocysteine
  MOD_RES (1395)..(1395): Selenocysteine
  MOD_RES (1402)..(1402): Selenocysteine
  MOD_RES (1439)..(1439): Selenocysteine
  MOD_RES (1456)..(1456): Selenocysteine
  MOD_RES (1476)..(1476): Selenocysteine
  MOD_RES (1479)..(1479): Selenocysteine
  MOD_RES (1507)..(1507): Selenocysteine
  MOD_RES (1516)..(1517): Selenocysteine
  MOD_RES (1531)..(1531): Selenocysteine
  MOD_RES (1534)..(1534): Selenocysteine
  MOD_RES (1546)..(1546): Selenocysteine
  MOD_RES (1563)..(1563): Selenocysteine
  MOD_RES (1565)..(1565): Selenocysteine
  MOD_RES (1598)..(1598): Selenocysteine
  MOD_RES (1679)..(1679): Selenocysteine
  MOD_RES (1695)..(1695): Selenocysteine
  MOD_RES (1735)..(1735): Selenocysteine
  MOD_RES (1750)..(1750): Selenocysteine
  MOD_RES (1777)..(1777): Selenocysteine
  MOD_RES (1791)..(1791): Selenocysteine
  MOD_RES (1823)..(1823): Selenocysteine
  MOD_RES (1831)..(1831): Selenocysteine
  MOD_RES (1839)..(1839): Selenocysteine
  MOD_RES (1849)..(1849): Selenocysteine
  MOD_RES (1854)..(1854): Selenocysteine
  MOD_RES (1857)..(1857): Selenocysteine
  MOD_RES (1874)..(1874): Selenocysteine
  MOD_RES (1878)..(1878): Selenocysteine
  MOD_RES (1887)..(1887): Selenocysteine
  MOD_RES (1897)..(1897): Selenocysteine
  MOD_RES (1900)..(1900): Selenocysteine
  MOD_RES (1913)..(1913): Selenocysteine
  MOD_RES (1920)..(1920): Selenocysteine
  MOD_RES (1941)..(1941): Selenocysteine
  MOD_RES (2019)..(2019): Selenocysteine
  MOD_RES (2029)..(2029): Selenocysteine
MAASERRAFAHKINRXVAAEVRKQVSRERSGSPHSSRRCSSSLGVPLXEVVEPLDFEDVLLSRPPDAEPGPLRDLVEFPADDLELLLQPRECRXXEPGIPKDEKLDAQVRAAVEMYIEDWVIVHRRYQYLSAAYSPVXXDXQRERQKGLPRQVFEQDASGDERSGPEDSNDSRRGSGSPEDXPRSSGASSIFDLRNLAADSLLPSLLERAAPEDVDRRNEXLRRQHRPPALLXLYPAPDEDEAVERCSRPEPPREHFGQRILVKCLSLKFEIEIEPIFGILALYDVREKKKISENFYFDLNSDSMKGLLRAHGXHPAISXLARSAIFSVXYPSPDIFLVIKLEKVLQQGDISECCEPYMVLKEVDXAKNKEKLEKLRLAAEQFCXRLGRYRMPFAWXAVHLANIVSSAGQLDRDSDSEGERRPAWXDRRRRGPQDRASSGDDACSFSGFRPAXLXVXNFFKQEAERLSDEDLFKFLADMRRPSSLLRRLRPVXAQLKIDISPAPENPHFCLSPELLHIKPYPDPRGRPXKEILEFPAREVYAPHXSYRNLLYVYPHSLNFSSRQGSVRNLAVRVQYMXGEDPSQALPVIFGKSSCSEFXREAFXPVVYHNKSPEFYEEFKLHLPACVXENHHLLFXFYHVSCQPRPGXALEXPVGFXWIPLLQHGRLRXGPFCLPVSVDQPPPSYSVLXPDVALPGMRWVDGHKGVFSVELXAVSSVHPQDPYLDKFFXLVHVLEEGAFPFRLKDXVLSEGNVEQELRASLAALRLASPEPLVAFSHHVLDKLVRLVIRPPIISGQIVNLGRGAFEAMAHVVSLVHRSLEAAQDARGHCPQLAAYVHYAFRLPGXEPSLPDGAPPVXVQAAXLARGSGRPASLYLARSKSISSSNPDLAVAPGSVDDEVSRILASKLLHEELALQWVVSSSAVREAILQHAWFFFQLMVKSMALHLLLGQRLDXPRKLRFPGRFLDDIXALVGSVGLEVIXRVHKDVELAEHLNASLAFFLSDLLSLVDRGFVFSLVRAHYKQVAXRLQSSPNPAALLXLRMEFXRILCSHEHYVXLNLPCCPLSPPASPSPSVSSXXSQSSXFSSQAPDPKVXSMFELSGPFRQQHFLAGLLLXELALALEPEAEGAFLLHKKAISAVHSLLCGHDXDPRYAEAXVKARVAELYLPLLSIARDXLPRLHDFAEGPGQRSRLASMLDSDXEGEGDIAGXINPSVAMAIAGGPLAPGSRASISQGPPXASRAGCALSAESSRXLLACVLWVLKNXEPALLQRWAXDLXLPQLGRLLDLLYLCLAAFEYKGKKAFERINSLXFKKSLDMKARLEEAILGXIGARQEMVRRSRERSPFGNPENVRWRKSVXHWKQXSDRVDKXKDEMEHEALVEGNLAXEASLVVLDXLEIIVQXVMLSEARESVLGAVLKVVLYSLGSAQSALFLQHGLAXQRALVSKFPELLFEEDXELCADLCLRLLRHCGSRISXIRXHASASLYLLMRQNFEIGHNFARVKMQVXMSLSSLVGXXQNFSEEHLRRSLKXILXYAEEDMGLRDSXFAEQVQDLMFNLHMILXDXVKMKEHQEDPEMLIDLMYRIARGYQGSPDLRLXWLQNMAGKHAELGNHAEAAQCMVHAAALVAEYLALLEDHRHLPVGCVSFQNISSNVLEESAISDDILSPDEEGFCSGKHFXELGLVGLLEQAAGYFXMGGLYEAVNEVYKNLIPILEAHRDYKKLAAVHGKLQEAFXKIMHQSSGWERVFGXYFRVGFYGAHFGDLDEQEFVYKEPSIXKLAEISHRLEEFYXERFGDDVVEIIKDSNPVDKSKLDSQKAYIQIXYVEPYFDXYELKDRVXYFDRNYGLRXFLFCXPFXPDGRAHGELPEQHKRKXLLSXDHAFPYIKXRIRVCHREEXVLXPVEVAIEDMQKKXRELAFAXEQDPPDAKMLQMVLQGSVGPXVNQGPLEVAQVFLAEIPEDPKLFRHHNKLRLCFKDFCKKCEDALRKNKALIGPDQKEYHRELERNYCRLREALQPLLXQRLPQLMAPXPPGLRNSLNRASFRKADL

SEQ ID NO: 8399 - protein, 98 aa, Homo sapiens
  MOD_RES (3)..(3): Selenocysteine
  MOD_RES (7)..(7): Selenocysteine
  MOD_RES (16)..(16): Selenocysteine
  MOD_RES (69)..(69): Selenocysteine
  MOD_RES (76)..(76): Selenocysteine
  MOD_RES (92)..(92): Selenocysteine
RKXLLSXDHAFPYIKXRIRVCHREEELLEQSKFPKGRPLSPQGPKLYLEEPAPGPQLSVLRGESALVPXGLWGDHXVLGAGPSAPVSPSVCXDASSLF

SEQ ID NO: 8400 - protein, 1336 aa, Homo sapiens
  MOD_RES (1)..(1): Any amino acid
  MOD_RES (99)..(99): Selenocysteine
  MOD_RES (111)..(111): Selenocysteine
  MOD_RES (116)..(116): Selenocysteine
  MOD_RES (243)..(243): Selenocysteine
  MOD_RES (258)..(258): Selenocysteine
  MOD_RES (270)..(270): Selenocysteine
  MOD_RES (315)..(315): Selenocysteine
  MOD_RES (328)..(328): Selenocysteine
  MOD_RES (334)..(334): Selenocysteine
  MOD_RES (345)..(345): Selenocysteine
  MOD_RES (366)..(367): Selenocysteine
  MOD_RES (372)..(372): Selenocysteine
  MOD_RES (383)..(383): Selenocysteine
  MOD_RES (404)..(404): Selenocysteine
  MOD_RES (437)..(437): Selenocysteine
  MOD_RES (445)..(445): Selenocysteine
  MOD_RES (464)..(464): Selenocysteine
  MOD_RES (489)..(489): Selenocysteine
  MOD_RES (498)..(498): Selenocysteine
  MOD_RES (526)..(526): Selenocysteine
  MOD_RES (541)..(541): Selenocysteine
  MOD_RES (553)..(553): Selenocysteine
  MOD_RES (563)..(563): Selenocysteine
  MOD_RES (566)..(566): Selenocysteine
  MOD_RES (599)..(599): Selenocysteine
  MOD_RES (617)..(617): Selenocysteine
  MOD_RES (647)..(647): Selenocysteine
  MOD_RES (652)..(652): Selenocysteine
  MOD_RES (659)..(659): Selenocysteine
  MOD_RES (675)..(675): Selenocysteine
  MOD_RES (684)..(684): Selenocysteine
  MOD_RES (691)..(691): Selenocysteine
  MOD_RES (728)..(728): Selenocysteine
  MOD_RES (745)..(745): Selenocysteine
  MOD_RES (765)..(765): Selenocysteine
  MOD_RES (768)..(768): Selenocysteine
  MOD_RES (796)..(796): Selenocysteine
  MOD_RES (805)..(806): Selenocysteine
  MOD_RES (820)..(820): Selenocysteine
  MOD_RES (823)..(823): Selenocysteine
  MOD_RES (835)..(835): Selenocysteine
  MOD_RES (852)..(852): Selenocysteine
  MOD_RES (854)..(854): Selenocysteine
  MOD_RES (887)..(887): Selenocysteine
  MOD_RES (968)..(968): Selenocysteine
  MOD_RES (984)..(984): Selenocysteine
  MOD_RES (1024)..(1024): Selenocysteine
  MOD_RES (1039)..(1039): Selenocysteine
  MOD_RES (1066)..(1066): Selenocysteine
  MOD_RES (1080)..(1080): Selenocysteine
  MOD_RES (1112)..(1112): Selenocysteine
  MOD_RES (1120)..(1120): Selenocysteine
  MOD_RES (1128)..(1128): Selenocysteine
  MOD_RES (1138)..(1138): Selenocysteine
  MOD_RES (1143)..(1143): Selenocysteine
  MOD_RES (1146)..(1146): Selenocysteine
  MOD_RES (1163)..(1163): Selenocysteine
  MOD_RES (1167)..(1167): Selenocysteine
  MOD_RES (1176)..(1176): Selenocysteine
  MOD_RES (1186)..(1186): Selenocysteine
  MOD_RES (1189)..(1189): Selenocysteine
  MOD_RES (1202)..(1202): Selenocysteine
  MOD_RES (1209)..(1209): Selenocysteine
  MOD_RES (1230)..(1230): Selenocysteine
  MOD_RES (1308)..(1308): Selenocysteine
  MOD_RES (1318)..(1318): Selenocysteine
XLSEGNVEQELRASLAALRLASPEPLVAFSHHVLDKLVRLVIRPPIISGQIVNLGRGAFEAMAHVVSLVHRSLEAAQDARGHCPQLAAYVHYAFRLPGXEPSLPDGAPPVXVQAAXLARGSGRPASLYLARSKSISSSNPDLAVAPGSVDDEVSRILASKGIDRSHSWVNSAYAPGGSKAVLRRAPPYCGADPRQLLHEELALQWVVSSSAVREAILQHAWFFFQLMVKSMALHLLLGQRLDXPRKLRFPGRFLDDIXALVGSVGLEVIXRVHKDVELAEHLNASLAFFLSDLLSLVDRGFVFSLVRAHYKQVAXRLQSSPNPAALLXLRMEFXRILCSHEHYVXLNLPCCPLSPPASPSPSVSSXXSQSSXFSSQAPDPKVXSMFELSGPFRQQHFLAGLLLXELALALEPEAEGAFLLHKKAISAVHSLLCGHDXDPRYAEAXVKARVAELYLPLLSIARDXLPRLHDFAEGPGQRSRLASMLDSDXEGEGDIAGXINPSVAMAIAGGPLAPGSRASISQGPPXASRAGCALSAESSRXLLACVLWVLKNXEPALLQRWAXDLXLPQLGRLLDLLYLCLAAFEYKGKKAFERINSLXFKKSLDMKARLEEAILGXIGARQEMVRRSRERSPFGNPENVRWRKSVXHWKQXSDRVDKXKDEMEHEALVEGNLAXEASLVVLDXLEIIVQXVMLSEARESVLGAVLKVVLYSLGSAQSALFLQHGLAXQRALVSKFPELLFEEDXELCADLCLRLLRHCGSRISXIRXHASASLYLLMRQNFEIGHNFARVKMQVXMSLSSLVGXXQNFSEEHLRRSLKXILXYAEEDMGLRDSXFAEQVQDLMFNLHMILXDXVKMKEHQEDPEMLIDLMYRIARGYQGSPDLRLXWLQNMAGKHAELGNHAEAAQCMVHAAALVAEYLALLEDHRHLPVGCVSFQNISSNVLEESAISDDILSPDEEGFCSGKHFXELGLVGLLEQAAGYFXMGGLYEAVNEVYKNLIPILEAHRDYKKLAAVHGKLQEAFXKIMHQSSGWERVFGXYFRVGFYGAHFGDLDEQEFVYKEPSIXKLAEISHRLEEFYXERFGDDVVEIIKDSNPVDKSKLDSQKAYIQIXYVEPYFDXYELKDRVXYFDRNYGLRXFLFCXPFXPDGRAHGELPEQHKRKXLLSXDHAFPYIKXRIRVCHREEXVLXPVEVAIEDMQKKXRELAFAXEQDPPDAKMLQMVLQGSVGPXVNQGPLEVAQVFLAEIPEDPKLFRHHNKLRLCFKDFCKKCEDALRKNKALIGPDQKEYHRELERNYCRLREALQPLLXQRLPQLMAPXPPGLRNSLNRASFRKADL

SEQ ID NO: 8401 - protein, 148 aa, Homo sapiens
  MOD_RES (1)..(1): Any amino acid
  MOD_RES (43)..(43): Selenocysteine
  MOD_RES (59)..(59): Selenocysteine
  MOD_RES (67)..(67): Selenocysteine
  MOD_RES (94)..(94): Selenocysteine
  MOD_RES (108)..(108): Selenocysteine
  MOD_RES (140)..(140): Selenocysteine
  MOD_RES (148)..(148): Selenocysteine
XRHLPVGCVSFQNISSNVLEESAISDDILSPDEEGFCSGKHFXELGLVGLLEQAAGYFXMPQRVFGXYFRVGFYGAHFGDLDEQEFVYKEPSIXKLAEISHRLEEFYXERFGDDVVEIIKDSNPVDKSKLDSQKAYIQIXYVEPYFDX

SEQ ID NO: 8402 - protein, 464 aa, Homo sapiens
  MOD_RES (1)..(1): Any amino acid
  MOD_RES (26)..(26): Selenocysteine
  MOD_RES (47)..(47): Selenocysteine
  MOD_RES (52)..(52): Selenocysteine
  MOD_RES (76)..(76): Selenocysteine
  MOD_RES (84)..(84): Selenocysteine
  MOD_RES (96)..(96): Selenocysteine
  MOD_RES (100)..(100): Selenocysteine
  MOD_RES (105)..(105): Selenocysteine
  MOD_RES (117)..(117): Selenocysteine
  MOD_RES (137)..(137): Selenocysteine
  MOD_RES (160)..(160): Selenocysteine
  MOD_RES (177)..(177): Selenocysteine
  MOD_RES (194)..(194): Selenocysteine
  MOD_RES (293)..(293): Selenocysteine
  MOD_RES (305)..(305): Selenocysteine
  MOD_RES (310)..(310): Selenocysteine
  MOD_RES (377)..(377): Selenocysteine
  MOD_RES (382)..(382): Selenocysteine
  MOD_RES (433)..(433): Selenocysteine
  MOD_RES (448)..(448): Selenocysteine
  MOD_RES (460)..(460): Selenocysteine
XYPHSLNFSSRQGSVRNLAVRVQYMXGEDPSQALPVIFGKSSCSEFXREAFXPVVYHNKSPEFYEEFKLHLPACVXENHHLLFXFYHVSCQPRPGXALEXPVGFXWIPLLQHGRLRXGPFCLPVSVDQPPPSYSVLXPDVALPGMRWVDGHKGVFSVELXAVSSVHPQDPYLDKFFXLVHVLEEGAFPFRLKDXVLSEGNVEQELRASLAALRLASPEPLVAFSHHVLDKLVRLVIRPPIISGQIVNLGRGAFEAMAHVVSLVHRSLEAAQDARGHCPQLAAYVHYAFRLPGXEPSLPDGAPPVXVQAAXLARGSGRPASLYLARSKSISSSNPDLAVAPGSVDDEVSRILASKAIDCNSSRASSYLEGSSSAPPAXQLRPXVQKLLHEELALQWVVSSSAVREAILQHAWFFFQLMVKSMALHLLLGQRLDXPRKLRFPGRFLDDIXALVGSVGLEVIXRVHK

SEQ ID NO: 8403 - protein, 1229 aa, Homo sapiens
  MOD_RES (21)..(21): Selenocysteine
  MOD_RES (40)..(40): Selenocysteine
  MOD_RES (54)..(54): Selenocysteine
  MOD_RES (56)..(56): Selenocysteine
  MOD_RES (62)..(62): Selenocysteine
  MOD_RES (64)..(64): Selenocysteine
  MOD_RES (69)..(69): Selenocysteine
  MOD_RES (151)..(151): Selenocysteine
  MOD_RES (164)..(164): Selenocysteine
  MOD_RES (172)..(172): Selenocysteine
  MOD_RES (233)..(233): Selenocysteine
  MOD_RES (242)..(242): Selenocysteine
  MOD_RES (255)..(255): Selenocysteine
  MOD_RES (263)..(263): Selenocysteine
  MOD_RES (292)..(292): Selenocysteine
  MOD_RES (352)..(352): Selenocysteine
  MOD_RES (360)..(360): Selenocysteine
  MOD_RES (362)..(362): Selenocysteine
  MOD_RES (374)..(374): Selenocysteine
  MOD_RES (388)..(388): Selenocysteine
  MOD_RES (396)..(396): Selenocysteine
  MOD_RES (402)..(402): Selenocysteine
  MOD_RES (410)..(410): Selenocysteine
  MOD_RES (412)..(412): Selenocysteine
  MOD_RES (418)..(419): Selenocysteine
  MOD_RES (442)..(442): Selenocysteine
  MOD_RES (449)..(449): Selenocysteine
  MOD_RES (485)..(485): Selenocysteine
  MOD_RES (540)..(540): Selenocysteine
  MOD_RES (546)..(546): Selenocysteine
  MOD_RES (568)..(568): Selenocysteine
  MOD_RES (577)..(577): Selenocysteine
  MOD_RES (584)..(584): Selenocysteine
  MOD_RES (588)..(588): Selenocysteine
  MOD_RES (621)..(621): Selenocysteine
  MOD_RES (638)..(638): Selenocysteine
  MOD_RES (658)..(658): Selenocysteine
  MOD_RES (689)..(689): Selenocysteine
  MOD_RES (698)..(698): Selenocysteine
  MOD_RES (713)..(713): Selenocysteine
  MOD_RES (716)..(716): Selenocysteine
  MOD_RES (727)..(728): Selenocysteine
  MOD_RES (747)..(747): Selenocysteine
  MOD_RES (773)..(773): Selenocysteine
  MOD_RES (780)..(780): Selenocysteine
  MOD_RES (828)..(828): Selenocysteine
  MOD_RES (861)..(861): Selenocysteine
  MOD_RES (907)..(907): Selenocysteine
  MOD_RES (930)..(930): Selenocysteine
  MOD_RES (939)..(939): Selenocysteine
  MOD_RES (957)..(957): Selenocysteine
  MOD_RES (1003)..(1003): Selenocysteine
  MOD_RES (1011)..(1011): Selenocysteine
  MOD_RES (1019)..(1019): Selenocysteine
  MOD_RES (1034)..(1034): Selenocysteine
  MOD_RES (1037)..(1037): Selenocysteine
  MOD_RES (1054)..(1054): Selenocysteine
  MOD_RES (1057)..(1058): Selenocysteine
  MOD_RES (1067)..(1067): Selenocysteine
  MOD_RES (1072)..(1072): Selenocysteine
  MOD_RES (1080)..(1080): Selenocysteine
  MOD_RES (1093)..(1093): Selenocysteine
  MOD_RES (1100)..(1100): Selenocysteine
  MOD_RES (1120)..(1121): Selenocysteine
  MOD_RES (1158)..(1158): Selenocysteine
  MOD_RES (1213)..(1213): Selenocysteine
DEVRSIIGSKGLDRSNSWVNXGGPKAAPWGSNPSPSAESXQAMDRSCNRMSSHXEXSSFLQXLXGRLPXKKGKEDELEKLSLLLFHEELALQWVVCSGSVRESALQQAWFFFELMVKSMVHHLYFNDKLEAPRKSRFPERFMDDIAALVSXIASDIVSRFQKDXEMVERLNXSLAFFLNDLLSVMDRGFVFSLIKSCYKQVSSKLYSLPNPSVLVSLRLDFLRIICSHEHYVXLNLPCSLLXPPASPSPSVSSAXSQSSGFSXNVQDQKIANMFELSVPFRQQHYLAGLVLXELAVILDPDAEGLFGLHKKVINMVHNLLSSHDSDPRYSDPQIKARVAMLYLPLIGIIMEXVPQLYDFXEXHNQRGRPICIAXDDYESESGSMISQXVAMAIAGXSVPQLXRPGSFLLXSXSGRQHXXFSAESSRSLLICLLWVLKNADEXVLQKWFXDLSVLQLNRLLDLLYLCVSCFEYKGKKVFERMNSLXFKKSKDMRAKLEEAILGSIGARQEMVRRSRGQLERSPSGSAFGSQENLRWRKDMXHWRQNXEKLDKSRAEIEHEALIDGNLAXEANLIILDXLEIVVQXVSVXESKESILGGVLKVLLHSMACNQSAVYLQHCFAXQRALVSKFPELLFEEEXEQCADLCLRLLRHCSSSIGXIRSHASASLYLLMRQNFEIGNNFARVKMQVXMSLSSLVGXSQNFNEEFLRRSLKXILXYAEEDLELREXXFPDQVQDLVFNLHMILSDXVKMKEHQEDPEMLIDLMYRIAKGYQXSPDLRLXWLQNMAGKHSERSNHAEAAQCLVHSAALVAEYLSMLEDRKYLPVGCVXFQNISSNVLEESAVSDDVVSPDEEGICSGKYFXESGLVGLLEQAAASFSMAGMYEAVNEVYKVLIPIHEANRDAKKLSXIHGKLQEAFSKIVHQDGKRMFGXYFRVGFYGXKFGDLDEQEFVYKEPAIXKLAEISHRLEGFYGERFGEDVVEVIKDSNPVDKCKLDPNKAYIQIXYVEPYFDXYEMKDRIXYFDKNYNLRRFMYCXPFXLDGRAHGELHEQFKRKXILXXSHAFPYIKXRVNVXHKEEIILXPIEVAIEDMQKKXQELAFAXHQDPADPKMLQMVLQGSVGXXVNQGPLEVAQVFLSEIPSDPKLFRHHNKLRLCFKDFXKRCEDALRKNKSLIGPDQKEYQRELERNYHRLKEALQPLINRKIPQLYKAVLPVXCHRDSFSRMSLRKMDL

SEQ ID NO: 8404 - protein, 101 aa, Homo sapiens
  MOD_RES (2)..(2): Selenocysteine
  MOD_RES (48)..(48): Selenocysteine
  MOD_RES (72)..(72): Selenocysteine
  MOD_RES (76)..(76): Selenocysteine
FXESGLVGLLEQAAASFSMAGMYEAVNEVYKVLIPIHEANRDAKKLSXIHGKLQEAFSKIVHQFFYDLPFFXFYYXEYWLGADVWHLFSCWFLWNQVRGFG

SEQ ID NO: 8405 - protein, 602 aa, Homo sapiens
  MOD_RES (14)..(14): Selenocysteine
  MOD_RES (47)..(48): Selenocysteine
  MOD_RES (52)..(52): Selenocysteine
  MOD_RES (66)..(66): Selenocysteine
  MOD_RES (98)..(98): Selenocysteine
  MOD_RES (121)..(121): Selenocysteine
  MOD_RES (136)..(136): Selenocysteine
  MOD_RES (142)..(142): Selenocysteine
  MOD_RES (186)..(186): Selenocysteine
  MOD_RES (214)..(214): Selenocysteine
  MOD_RES (323)..(324): Selenocysteine
  MOD_RES (334)..(334): Selenocysteine
  MOD_RES (371)..(371): Selenocysteine
  MOD_RES (401)..(401): Selenocysteine
  MOD_RES (420)..(420): Selenocysteine
  MOD_RES (426)..(426): Selenocysteine
  MOD_RES (450)..(451): Selenocysteine
  MOD_RES (460)..(460): Selenocysteine
  MOD_RES (466)..(466): Selenocysteine
  MOD_RES (468)..(468): Selenocysteine
  MOD_RES (470)..(470): Selenocysteine
  MOD_RES (506)..(506): Selenocysteine
  MOD_RES (525)..(525): Selenocysteine
  MOD_RES (542)..(542): Selenocysteine
  MOD_RES (558)..(559): Selenocysteine
  MOD_RES (584)..(584): Selenocysteine
MAERRAFAQKISRXVAAEVRKQISGQYSGSPQLLKNLNIVGNISHHXXVPLXEAVDPVDLEDYLIXHPLAVDSGPLRDLIEFPPDDIEVVYSPRDCRXLVSAVPEESEMDPHVRDCIRSYXEDWAIVIRKYHKLGXGFNPNXLDKQKERQKGLPKQVFESDEAPDGNSYQDDQDDLKRRSMSIDDXPRGSWACSIFDLKNSLPDALLPNLLDRXPNEEIDRQNDDQRKSNRHKELFALHPSPDEEEPIERLSVPDIPKEHFGQRLLVKCLSLKFEIEIEPIFASLALYDVKEKKKISENFYFDLNSEQMKGLLRPHVPPAAIXXLARSAIFSIXYPSQDVFLVIKLEKVLQQGDIGECAEPYMIFKEADAXKNKEKLEKLKSQADQFCQRLGKYRMPFAWXAIHLMNIVSSAGSLERDSXEVEISXGERKGSWSERRNSSIVGRRSLERXXSGDDACNLXSFRPAXLXVXNFFKQEGDRLSDEDLYKFLADMRRPSSVLRRLRPIXAQLKIDISPAPENPHYCLXPELLQVKLYPDSRVRPXREILEFPARDVYVPNXXYRNLLYIYPQSLNFANRQGSARNIXVKVQFMYGEDPSNAMPVS

SEQ ID NO: 8406 - protein, 632 aa, Homo sapiens
  MOD_RES (14)..(14): Selenocysteine
  MOD_RES (47)..(48): Selenocysteine
  MOD_RES (52)..(52): Selenocysteine
  MOD_RES (66)..(66): Selenocysteine
  MOD_RES (98)..(98): Selenocysteine
  MOD_RES (121)..(121): Selenocysteine
  MOD_RES (136)..(136): Selenocysteine
  MOD_RES (142)..(142): Selenocysteine
  MOD_RES (186)..(186): Selenocysteine
  MOD_RES (214)..(214): Selenocysteine
  MOD_RES (323)..(324): Selenocysteine
  MOD_RES (334)..(334): Selenocysteine
  MOD_RES (371)..(371): Selenocysteine
  MOD_RES (401)..(401): Selenocysteine
  MOD_RES (420)..(420): Selenocysteine
  MOD_RES (426)..(426): Selenocysteine
  MOD_RES (450)..(451): Selenocysteine
  MOD_RES (460)..(460): Selenocysteine
  MOD_RES (466)..(466): Selenocysteine
  MOD_RES (468)..(468): Selenocysteine
  MOD_RES (470)..(470): Selenocysteine
  MOD_RES (506)..(506): Selenocysteine
  MOD_RES (525)..(525): Selenocysteine
  MOD_RES (542)..(542): Selenocysteine
  MOD_RES (558)..(559): Selenocysteine
  MOD_RES (584)..(584): Selenocysteine
  MOD_RES (605)..(605): Selenocysteine
  MOD_RES (610)..(610): Selenocysteine
  MOD_RES (632)..(632): Selenocysteine
MAERRAFAQKISRXVAAEVRKQISGQYSGSPQLLKNLNIVGNISHHXXVPLXEAVDPVDLEDYLIXHPLAVDSGPLRDLIEFPPDDIEVVYSPRDCRXLVSAVPEESEMDPHVRDCIRSYXEDWAIVIRKYHKLGXGFNPNXLDKQKERQKGLPKQVFESDEAPDGNSYQDDQDDLKRRSMSIDDXPRGSWACSIFDLKNSLPDALLPNLLDRXPNEEIDRQNDDQRKSNRHKELFALHPSPDEEEPIERLSVPDIPKEHFGQRLLVKCLSLKFEIEIEPIFASLALYDVKEKKKISENFYFDLNSEQMKGLLRPHVPPAAIXXLARSAIFSIXYPSQDVFLVIKLEKVLQQGDIGECAEPYMIFKEADAXKNKEKLEKLKSQADQFCQRLGKYRMPFAWXAIHLMNIVSSAGSLERDSXEVEISXGERKGSWSERRNSSIVGRRSLERXXSGDDACNLXSFRPAXLXVXNFFKQEGDRLSDEDLYKFLADMRRPSSVLRRLRPIXAQLKIDISPAPENPHYCLXPELLQVKLYPDSRVRPXREILEFPARDVYVPNXXYRNLLYIYPQSLNFANRQGSARNIXVKVQFMYGEDPSNAMPSPSCXHPIPXVRPLPLWCYHSIFSLLSWDFIX

SEQ ID NO: 8407 - protein, 2098 aa, Homo sapiens
  MOD_RES (14)..(14): Selenocysteine
  MOD_RES (47)..(48): Selenocysteine
  MOD_RES (52)..(52): Selenocysteine
  MOD_RES (66)..(66): Selenocysteine
  MOD_RES (98)..(98): Selenocysteine
  MOD_RES (121)..(121): Selenocysteine
  MOD_RES (136)..(136): Selenocysteine
  MOD_RES (142)..(142): Selenocysteine
  MOD_RES (186)..(186): Selenocysteine
  MOD_RES (214)..(214): Selenocysteine
  MOD_RES (323)..(324): Selenocysteine
  MOD_RES (334)..(334): Selenocysteine
  MOD_RES (371)..(371): Selenocysteine
  MOD_RES (401)..(401): Selenocysteine
  MOD_RES (420)..(420): Selenocysteine
  MOD_RES (426)..(426): Selenocysteine
  MOD_RES (450)..(451): Selenocysteine
  MOD_RES (460)..(460): Selenocysteine
  MOD_RES (466)..(466): Selenocysteine
  MOD_RES (468)..(468): Selenocysteine
  MOD_RES (470)..(470): Selenocysteine
  MOD_RES (506)..(506): Selenocysteine
  MOD_RES (525)..(525): Selenocysteine
  MOD_RES (542)..(542): Selenocysteine
  MOD_RES (558)..(559): Selenocysteine
  MOD_RES (584)..(584): Selenocysteine
  MOD_RES (617)..(617): Selenocysteine
  MOD_RES (639)..(639): Selenocysteine
  MOD_RES (641)..(641): Selenocysteine
  MOD_RES (649)..(649): Selenocysteine
  MOD_RES (661)..(661): Selenocysteine
  MOD_RES (665)..(665): Selenocysteine
  MOD_RES (670)..(670): Selenocysteine
  MOD_RES (682)..(682): Selenocysteine
  MOD_RES (732)..(732): Selenocysteine
  MOD_RES (858)..(858): Selenocysteine
  MOD_RES (878)..(878): Selenocysteine
  MOD_RES (907)..(907): Selenocysteine
  MOD_RES (909)..(909): Selenocysteine
  MOD_RES (935)..(935): Selenocysteine
  MOD_RES (937)..(937): Selenocysteine
  MOD_RES (943)..(943): Selenocysteine
  MOD_RES (945)..(945): Selenocysteine
  MOD_RES (950)..(950): Selenocysteine
  MOD_RES (1020)..(1020): Selenocysteine
  MOD_RES (1033)..(1033): Selenocysteine
  MOD_RES (1041)..(1041): Selenocysteine
  MOD_RES (1102)..(1102): Selenocysteine
  MOD_RES (1111)..(1111): Selenocysteine
  MOD_RES (1124)..(1124): Selenocysteine
  MOD_RES (1132)..(1132): Selenocysteine
  MOD_RES (1161)..(1161): Selenocysteine
  MOD_RES (1221)..(1221): Selenocysteine
  MOD_RES (1229)..(1229): Selenocysteine
  MOD_RES (1231)..(1231): Selenocysteine
  MOD_RES (1243)..(1243): Selenocysteine
  MOD_RES (1257)..(1257): Selenocysteine
  MOD_RES (1265)..(1265): Selenocysteine
  MOD_RES (1271)..(1271): Selenocysteine
  MOD_RES (1279)..(1279): Selenocysteine
  MOD_RES (1281)..(1281): Selenocysteine
  MOD_RES (1287)..(1288): Selenocysteine
  MOD_RES (1311)..(1311): Selenocysteine
  MOD_RES (1318)..(1318): Selenocysteine
  MOD_RES (1354)..(1354): Selenocysteine
  MOD_RES (1409)..(1409): Selenocysteine
  MOD_RES (1415)..(1415): Selenocysteine
  MOD_RES (1437)..(1437): Selenocysteine
  MOD_RES (1446)..(1446): Selenocysteine
  MOD_RES (1453)..(1453): Selenocysteine
  MOD_RES (1457)..(1457): Selenocysteine
  MOD_RES (1490)..(1490): Selenocysteine
  MOD_RES (1507)..(1507): Selenocysteine
  MOD_RES (1527)..(1527): Selenocysteine
  MOD_RES (1558)..(1558): Selenocysteine
  MOD_RES (1567)..(1567): Selenocysteine
  MOD_RES (1582)..(1582): Selenocysteine
  MOD_RES (1585)..(1585): Selenocysteine
  MOD_RES (1596)..(1597): Selenocysteine
  MOD_RES (1616)..(1616): Selenocysteine
  MOD_RES (1642)..(1642): Selenocysteine
  MOD_RES (1649)..(1649): Selenocysteine
  MOD_RES (1697)..(1697): Selenocysteine
  MOD_RES (1730)..(1730): Selenocysteine
  MOD_RES (1776)..(1776): Selenocysteine
  MOD_RES (1799)..(1799): Selenocysteine
  MOD_RES (1808)..(1808): Selenocysteine
  MOD_RES (1826)..(1826): Selenocysteine
  MOD_RES (1872)..(1872): Selenocysteine
  MOD_RES (1880)..(1880): Selenocysteine
  MOD_RES (1888)..(1888): Selenocysteine
  MOD_RES (1903)..(1903): Selenocysteine
  MOD_RES (1906)..(1906): Selenocysteine
  MOD_RES (1923)..(1923): Selenocysteine
  MOD_RES (1926)..(1927): Selenocysteine
  MOD_RES (1936)..(1936): Selenocysteine
  MOD_RES (1941)..(1941): Selenocysteine
  MOD_RES (1949)..(1949): Selenocysteine
  MOD_RES (1962)..(1962): Selenocysteine
  MOD_RES (1969)..(1969): Selenocysteine
  MOD_RES (1989)..(1990): Selenocysteine
  MOD_RES (2027)..(2027): Selenocysteine
  MOD_RES (2082)..(2082): Selenocysteine
MAERRAFAQKISRXVAAEVRKQISGQYSGSPQLLKNLNIVGNISHHXXVPLXEAVDPVDLEDYLIXHPLAVDSGPLRDLIEFPPDDIEVVYSPRDCRXLVSAVPEESEMDPHVRDCIRSYXEDWAIVIRKYHKLGXGFNPNXLDKQKERQKGLPKQVFESDEAPDGNSYQDDQDDLKRRSMSIDDXPRGSWACSIFDLKNSLPDALLPNLLDRXPNEEIDRQNDDQRKSNRHKELFALHPSPDEEEPIERLSVPDIPKEHFGQRLLVKCLSLKFEIEIEPIFASLALYDVKEKKKISENFYFDLNSEQMKGLLRPHVPPAAIXXLARSAIFSIXYPSQDVFLVIKLEKVLQQGDIGECAEPYMIFKEADAXKNKEKLEKLKSQADQFCQRLGKYRMPFAWXAIHLMNIVSSAGSLERDSXEVEISXGERKGSWSERRNSSIVGRRSLERXXSGDDACNLXSFRPAXLXVXNFFKQEGDRLSDEDLYKFLADMRRPSSVLRRLRPIXAQLKIDISPAPENPHYCLXPELLQVKLYPDSRVRPXREILEFPARDVYVPNXXYRNLLYIYPQSLNFANRQGSARNIXVKVQFMYGEDPSNAMPVIFGKSSCSEFSKEAYXAVVYHNRSPDFHEEIKVKLPAXLXDHHHLLFXFYHVSCQQKQNXPLEXPVGYXWIPMLQNGRLKXGQFCLPVSLEKPPQAYSVLSPEVPLPGMKWVDNHKGVFNVEVVAVSSIHXQDPYLDKFFALVNALDEHLFPVRIGDMRIMENNLENELKSSISALNSSQLEPVVRFLHLLLDKLILLVIRPPVIAGQIVNLGQASFEAMASIINRLHKNLEGNHDQHGRNSLLASYIHYVFRLPNXYPNSSSPGPGGLGGSVHYAXMARSAVRPASLNLNRSRSLSNSNPDISGXPXSPDDEVRSIIGSKAMDRSCNRMSSHXEXSSFLQXLXGRLPXKKLFHEELALQWVVCSGSVRESALQQAWFFFELMVKSMVHHLYFNDKLEAPRKSRFPERFMDDIAALVSXIASDIVSRFQKDXEMVERLNXSLAFFLNDLLSVMDRGFVFSLIKSCYKQVSSKLYSLPNPSVLVSLRLDFLRIICSHEHYVXLNLPCSLLXPPASPSPSVSSAXSQSSGFSXNVQDQKIANMFELSVPFRQQHYLAGLVLXELAVILDPDAEGLFGLHKKVINMVHNLLSSHDSDPRYSDPQIKARVAMLYLPLIGIIMEXVPQLYDFXEXHNQRGRPICIAXDDYESESGSMISQXVAMAIAGXSVPQLXRPGSFLLXSXSGRQHXXFSAESSRSLLICLLWVLKNADEXVLQKWFXDLSVLQLNRLLDLLYLCVSCFEYKGKKVFERMNSLXFKKSKDMRAKLEEAILGSIGARQEMVRRSRGQLERSPSGSAFGSQENLRWRKDMXHWRQNXEKLDKSRAEIEHEALIDGNLAXEANLIILDXLEIVVQXVSVXESKESILGGVLKVLLHSMACNQSAVYLQHCFAXQRALVSKFPELLFEEEXEQCADLCLRLLRHCSSSIGXIRSHASASLYLLMRQNFEIGNNFARVKMQVXMSLSSLVGXSQNFNEEFLRRSLKXILXYAEEDLELREXXFPDQVQDLVFNLHMILSDXVKMKEHQEDPEMLIDLMYRIAKGYQXSPDLRLXWLQNMAGKHSERSNHAEAAQCLVHSAALVAEYLSMLEDRKYLPVGCVXFQNISSNVLEESAVSDDVVSPDEEGICSGKYFXESGLVGLLEQAAASFSMAGMYEAVNEVYKVLIPIHEANRDAKKLSXIHGKLQEAFSKIVHQDGKRMFGXYFRVGFYGXKFGDLDEQEFVYKEPAIXKLAEISHRLEGFYGERFGEDVVEVIKDSNPVDKCKLDPNKAYIQIXYVEPYFDXYEMKDRIXYFDKNYNLRRFMYCXPFXLDGRAHGELHEQFKRKXILXXSHAFPYIKXRVNVXHKEEIILXPIEVAIEDMQKKXQELAFAXHQDPADPKMLQMVLQGSVGXXVNQGPLEVAQVFLSEIPSDPKLFRHHNKLRLCFKDFXKRCEDALRKNKSLIGPDQKEYQRELERNYHRLKEALQPLINRKIPQLYKAVLPVXCHRDSFSRMSLRKMDL

SEQ ID NO: 8408 - protein, 2100 aa, Homo sapiens
  MOD_RES (14)..(14): Selenocysteine
  MOD_RES (47)..(48): Selenocysteine
  MOD_RES (52)..(52): Selenocysteine
  MOD_RES (66)..(66): Selenocysteine
  MOD_RES (98)..(98): Selenocysteine
  MOD_RES (121)..(121): Selenocysteine
  MOD_RES (136)..(136): Selenocysteine
  MOD_RES (142)..(142): Selenocysteine
  MOD_RES (186)..(186): Selenocysteine
  MOD_RES (214)..(214): Selenocysteine
  MOD_RES (323)..(324): Selenocysteine
  MOD_RES (334)..(334): Selenocysteine
  MOD_RES (371)..(371): Selenocysteine
  MOD_RES (401)..(401): Selenocysteine
  MOD_RES (420)..(420): Selenocysteine
  MOD_RES (426)..(426): Selenocysteine
  MOD_RES (450)..(451): Selenocysteine
  MOD_RES (460)..(460): Selenocysteine
  MOD_RES (466)..(466): Selenocysteine
  MOD_RES (468)..(468): Selenocysteine
  MOD_RES (470)..(470): Selenocysteine
  MOD_RES (506)..(506): Selenocysteine
  MOD_RES (525)..(525): Selenocysteine
  MOD_RES (542)..(542): Selenocysteine
  MOD_RES (558)..(559): Selenocysteine
  MOD_RES (584)..(584): Selenocysteine
  MOD_RES (617)..(617): Selenocysteine
  MOD_RES (639)..(639): Selenocysteine
  MOD_RES (641)..(641): Selenocysteine
  MOD_RES (649)..(649): Selenocysteine
  MOD_RES (661)..(661): Selenocysteine
  MOD_RES (665)..(665): Selenocysteine
  MOD_RES (670)..(670): Selenocysteine
  MOD_RES (682)..(682): Selenocysteine
  MOD_RES (732)..(732): Selenocysteine
  MOD_RES (858)..(858): Selenocysteine
  MOD_RES (878)..(878): Selenocysteine
  MOD_RES (907)..(907): Selenocysteine
  MOD_RES (909)..(909): Selenocysteine
  MOD_RES (935)..(935): Selenocysteine
  MOD_RES (937)..(937): Selenocysteine
  MOD_RES (943)..(943): Selenocysteine
  MOD_RES (945)..(945): Selenocysteine
  MOD_RES (950)..(950): Selenocysteine
  MOD_RES (1020)..(1020): Selenocysteine
  MOD_RES (1033)..(1033): Selenocysteine
  MOD_RES (1041)..(1041): Selenocysteine
  MOD_RES (1102)..(1102): Selenocysteine
  MOD_RES (1111)..(1111): Selenocysteine
  MOD_RES (1124)..(1124): Selenocysteine
  MOD_RES (1132)..(1132): Selenocysteine
  MOD_RES (1161)..(1161): Selenocysteine
  MOD_RES (1221)..(1221): Selenocysteine
  MOD_RES (1229)..(1229): Selenocysteine
  MOD_RES (1231)..(1231): Selenocysteine
  MOD_RES (1243)..(1243): Selenocysteine
  MOD_RES (1257)..(1257): Selenocysteine
  MOD_RES (1265)..(1265): Selenocysteine
  MOD_RES (1271)..(1271): Selenocysteine
  MOD_RES (1279)..(1279): Selenocysteine
  MOD_RES (1281)..(1281): Selenocysteine
  MOD_RES (1287)..(1288): Selenocysteine
  MOD_RES (1311)..(1311): Selenocysteine
  MOD_RES (1318)..(1318): Selenocysteine
  MOD_RES (1354)..(1354): Selenocysteine
  MOD_RES (1409)..(1409): Selenocysteine
  MOD_RES (1415)..(1415): Selenocysteine
  MOD_RES (1437)..(1437): Selenocysteine
  MOD_RES (1446)..(1446): Selenocysteine
  MOD_RES (1453)..(1453): Selenocysteine
  MOD_RES (1457)..(1457): Selenocysteine
  MOD_RES (1490)..(1490): Selenocysteine
  MOD_RES (1507)..(1507): Selenocysteine
  MOD_RES (1527)..(1527): Selenocysteine
  MOD_RES (1558)..(1558): Selenocysteine
  MOD_RES (1567)..(1567): Selenocysteine
  MOD_RES (1582)..(1582): Selenocysteine
  MOD_RES (1585)..(1585): Selenocysteine
  MOD_RES (1596)..(1597): Selenocysteine
  MOD_RES (1616)..(1616): Selenocysteine
  MOD_RES (1642)..(1642): Selenocysteine
  MOD_RES (1649)..(1649): Selenocysteine
  MOD_RES (1697)..(1697): Selenocysteine
  MOD_RES (1730)..(1730): Selenocysteine
  MOD_RES (1776)..(1776): Selenocysteine
  MOD_RES (1793)..(1793): Selenocysteine
  MOD_RES (1801)..(1801): Selenocysteine
  MOD_RES (1810)..(1810): Selenocysteine
  MOD_RES (1828)..(1828): Selenocysteine
  MOD_RES (1874)..(1874): Selenocysteine
  MOD_RES (1882)..(1882): Selenocysteine
  MOD_RES (1890)..(1890): Selenocysteine
  MOD_RES (1905)..(1905): Selenocysteine
  MOD_RES (1908)..(1908): Selenocysteine
  MOD_RES (1925)..(1925): Selenocysteine
  MOD_RES (1928)..(1929): Selenocysteine
  MOD_RES (1938)..(1938): Selenocysteine
  MOD_RES (1943)..(1943): Selenocysteine
  MOD_RES (1951)..(1951): Selenocysteine
  MOD_RES (1964)..(1964): Selenocysteine
  MOD_RES (1971)..(1971): Selenocysteine
  MOD_RES (1991)..(1992): Selenocysteine
  MOD_RES (2029)..(2029): Selenocysteine
  MOD_RES (2084)..(2084): Selenocysteine
MAERRAFAQKISRXVAAEVRKQISGQYSGSPQLLKNLNIVGNISHHXXVPLXEAVDPVDLEDYLIXHPLAVDSGPLRDLIEFPPDDIEVVYSPRDCRXLVSAVPEESEMDPHVRDCIRSYXEDWAIVIRKYHKLGXGFNPNXLDKQKERQKGLPKQVFESDEAPDGNSYQDDQDDLKRRSMSIDDXPRGSWACSIFDLKNSLPDALLPNLLDRXPNEEIDRQNDDQRKSNRHKELFALHPSPDEEEPIERLSVPDIPKEHFGQRLLVKCLSLKFEIEIEPIFASLALYDVKEKKKISENFYFDLNSEQMKGLLRPHVPPAAIXXLARSAIFSIXYPSQDVFLVIKLEKVLQQGDIGECAEPYMIFKEADAXKNKEKLEKLKSQADQFCQRLGKYRMPFAWXAIHLMNIVSSAGSLERDSXEVEISXGERKGSWSERRNSSIVGRRSLERXXSGDDACNLXSFRPAXLXVXNFFKQEGDRLSDEDLYKFLADMRRPSSVLRRLRPIXAQLKIDISPAPENPHYCLXPELLQVKLYPDSRVRPXREILEFPARDVYVPNXXYRNLLYIYPQSLNFANRQGSARNIXVKVQFMYGEDPSNAMPVIFGKSSCSEFSKEAYXAVVYHNRSPDFHEEIKVKLPAXLXDHHHLLFXFYHVSCQQKQNXPLEXPVGYXWIPMLQNGRLKXGQFCLPVSLEKPPQAYSVLSPEVPLPGMKWVDNHKGVFNVEVVAVSSIHXQDPYLDKFFALVNALDEHLFPVRIGDMRIMENNLENELKSSISALNSSQLEPVVRFLHLLLDKLILLVIRPPVIAGQIVNLGQASFEAMASIINRLHKNLEGNHDQHGRNSLLASYIHYVFRLPNXYPNSSSPGPGGLGGSVHYAXMARSAVRPASLNLNRSRSLSNSNPDISGXPXSPDDEVRSIIGSKAMDRSCNRMSSHXEXSSFLQXLXGRLPXKKLFHEELALQWVVCSGSVRESALQQAWFFFELMVKSMVHHLYFNDKLEAPRKSRFPERFMDDIAALVSXIASDIVSRFQKDXEMVERLNXSLAFFLNDLLSVMDRGFVFSLIKSCYKQVSSKLYSLPNPSVLVSLRLDFLRIICSHEHYVXLNLPCSLLXPPASPSPSVSSAXSQSSGFSXNVQDQKIANMFELSVPFRQQHYLAGLVLXELAVILDPDAEGLFGLHKKVINMVHNLLSSHDSDPRYSDPQIKARVAMLYLPLIGIIMEXVPQLYDFXEXHNQRGRPICIAXDDYESESGSMISQXVAMAIAGXSVPQLXRPGSFLLXSXSGRQHXXFSAESSRSLLICLLWVLKNADEXVLQKWFXDLSVLQLNRLLDLLYLCVSCFEYKGKKVFERMNSLXFKKSKDMRAKLEEAILGSIGARQEMVRRSRGQLERSPSGSAFGSQENLRWRKDMXHWRQNXEKLDKSRAEIEHEALIDGNLAXEANLIILDXLEIVVQXVSVXESKESILGGVLKVLLHSMACNQSAVYLQHCFAXQRALVSKFPELLFEEEXEQCADLCLRLLRHCSSSIGXIRSHASASLYLLMRQNFEIGNNFARVKMQVXMSLSSLVGXSQNFNEEFLRRSLKXILXYAEEDLELREXXFPDQVQDLVFNLHMILSDXVKMKEHQEDPEMLIDLMYRIAKGYQXSPDLRLXWLQNMAGKHSERSNHAEAAQCLVHSAALVAEYLSMLEDRKYLPVGCVXFQNISSNVLEESAVSDDVVSPDEEGICSGKYFXESGLVGLLEQAAASFSMAGMYEAVNEVYKVLIPIHEANRDAKKLSXIHGKLQEAFSKIVHQSXGWERMFGXYFRVGFYGXKFGDLDEQEFVYKEPAIXKLAEISHRLEGFYGERFGEDVVEVIKDSNPVDKCKLDPNKAYIQIXYVEPYFDXYEMKDRIXYFDKNYNLRRFMYCXPFXLDGRAHGELHEQFKRKXILXXSHAFPYIKXRVNVXHKEEIILXPIEVAIEDMQKKXQELAFAXHQDPADPKMLQMVLQGSVGXXVNQGPLEVAQVFLSEIPSDPKLFRHHNKLRLCFKDFXKRCEDALRKNKSLIGPDQKEYQRELERNYHRLKEALQPLINRKIPQLYKAVLPVXCHRDSFSRMSLRKMDL

SEQ ID NO: 8409 - protein, 2109 aa, Homo sapiens
  MOD_RES (14)..(14): Selenocysteine
  MOD_RES (47)..(48): Selenocysteine
  MOD_RES (52)..(52): Selenocysteine
  MOD_RES (66)..(66): Selenocysteine
  MOD_RES (98)..(98): Selenocysteine
  MOD_RES (121)..(121): Selenocysteine
  MOD_RES (136)..(136): Selenocysteine
  MOD_RES (142)..(142): Selenocysteine
  MOD_RES (186)..(186): Selenocysteine
  MOD_RES (214)..(214): Selenocysteine
  MOD_RES (323)..(324): Selenocysteine
  MOD_RES (334)..(334): Selenocysteine
  MOD_RES (371)..(371): Selenocysteine
  MOD_RES (401)..(401): Selenocysteine
  MOD_RES (420)..(420): Selenocysteine
  MOD_RES (426)..(426): Selenocysteine
  MOD_RES (450)..(451): Selenocysteine
  MOD_RES (460)..(460): Selenocysteine
  MOD_RES (466)..(466): Selenocysteine
  MOD_RES (468)..(468): Selenocysteine
  MOD_RES (470)..(470): Selenocysteine
  MOD_RES (506)..(506): Selenocysteine
  MOD_RES (525)..(525): Selenocysteine
  MOD_RES (542)..(542): Selenocysteine
  MOD_RES (558)..(559): Selenocysteine
  MOD_RES (584)..(584): Selenocysteine
  MOD_RES (617)..(617): Selenocysteine
  MOD_RES (639)..(639): Selenocysteine
  MOD_RES (641)..(641): Selenocysteine
  MOD_RES (649)..(649): Selenocysteine
  MOD_RES (661)..(661): Selenocysteine
  MOD_RES (665)..(665): Selenocysteine
  MOD_RES (670)..(670): Selenocysteine
  MOD_RES (682)..(682): Selenocysteine
  MOD_RES (732)..(732): Selenocysteine
  MOD_RES (858)..(858): Selenocysteine
  MOD_RES (878)..(878): Selenocysteine
  MOD_RES (907)..(907): Selenocysteine
  MOD_RES (909)..(909): Selenocysteine
  MOD_RES (935)..(935): Selenocysteine
  MOD_RES (937)..(937): Selenocysteine
  MOD_RES (943)..(943): Selenocysteine
  MOD_RES (945)..(945): Selenocysteine
  MOD_RES (950)..(950): Selenocysteine
  MOD_RES (1020)..(1020): Selenocysteine
  MOD_RES (1033)..(1033): Selenocysteine
  MOD_RES (1041)..(1041): Selenocysteine
  MOD_RES (1102)..(1102): Selenocysteine
  MOD_RES (1111)..(1111): Selenocysteine
  MOD_RES (1124)..(1124): Selenocysteine
  MOD_RES (1132)..(1132): Selenocysteine
  MOD_RES (1161)..(1161): Selenocysteine
  MOD_RES (1221)..(1221): Selenocysteine
  MOD_RES (1229)..(1229): Selenocysteine
  MOD_RES (1231)..(1231): Selenocysteine
  MOD_RES (1243)..(1243): Selenocysteine
  MOD_RES (1257)..(1257): Selenocysteine
  MOD_RES (1265)..(1265): Selenocysteine
  MOD_RES (1271)..(1271): Selenocysteine
  MOD_RES (1279)..(1279): Selenocysteine
  MOD_RES (1281)..(1281): Selenocysteine
  MOD_RES (1287)..(1288): Selenocysteine
  MOD_RES (1311)..(1311): Selenocysteine
  MOD_RES (1318)..(1318): Selenocysteine
  MOD_RES (1354)..(1354): Selenocysteine
  MOD_RES (1389)..(1389): Selenocysteine
  MOD_RES (1391)..(1391): Selenocysteine
  MOD_RES (1418)..(1418): Selenocysteine
  MOD_RES (1424)..(1424): Selenocysteine
  MOD_RES (1446)..(1446): Selenocysteine
  MOD_RES (1455)..(1455): Selenocysteine
  MOD_RES (1462)..(1462): Selenocysteine
  MOD_RES (1466)..(1466): Selenocysteine
  MOD_RES (1499)..(1499): Selenocysteine
  MOD_RES (1516)..(1516): Selenocysteine
  MOD_RES (1536)..(1536): Selenocysteine
  MOD_RES (1567)..(1567): Selenocysteine
  MOD_RES (1576)..(1576): Selenocysteine
  MOD_RES (1591)..(1591): Selenocysteine
  MOD_RES (1594)..(1594): Selenocysteine
  MOD_RES (1605)..(1606): Selenocysteine
  MOD_RES (1625)..(1625): Selenocysteine
  MOD_RES (1651)..(1651): Selenocysteine
  MOD_RES (1658)..(1658): Selenocysteine
  MOD_RES (1706)..(1706): Selenocysteine
  MOD_RES (1739)..(1739): Selenocysteine
  MOD_RES (1785)..(1785): Selenocysteine
  MOD_RES (1802)..(1802): Selenocysteine
  MOD_RES (1810)..(1810): Selenocysteine
  MOD_RES (1819)..(1819): Selenocysteine
  MOD_RES (1837)..(1837): Selenocysteine
  MOD_RES (1883)..(1883): Selenocysteine
  MOD_RES (1891)..(1891): Selenocysteine
  MOD_RES (1899)..(1899): Selenocysteine
  MOD_RES (1914)..(1914): Selenocysteine
  MOD_RES (1917)..(1917): Selenocysteine
  MOD_RES (1934)..(1934): Selenocysteine
  MOD_RES (1937)..(1938): Selenocysteine
  MOD_RES (1947)..(1947): Selenocysteine
  MOD_RES (1952)..(1952): Selenocysteine
  MOD_RES (1960)..(1960): Selenocysteine
  MOD_RES (1973)..(1973): Selenocysteine
  MOD_RES (1980)..(1980): Selenocysteine
  MOD_RES (2000)..(2001): Selenocysteine
  MOD_RES (2038)..(2038): Selenocysteine
  MOD_RES (2093)..(2093): Selenocysteine
MAERRAFAQKISRXVAAEVRKQISGQYSGSPQLLKNLNIVGNISHHXXVPLXEAVDPVDLEDYLIXHPLAVDSGPLRDLIEFPPDDIEVVYSPRDCRXLVSAVPEESEMDPHVRDCIRSYXEDWAIVIRKYHKLGXGFNPNXLDKQKERQKGLPKQVFESDEAPDGNSYQDDQDDLKRRSMSIDDXPRGSWACSIFDLKNSLPDALLPNLLDRXPNEEIDRQNDDQRKSNRHKELFALHPSPDEEEPIERLSVPDIPKEHFGQRLLVKCLSLKFEIEIEPIFASLALYDVKEKKKISENFYFDLNSEQMKGLLRPHVPPAAIXXLARSAIFSIXYPSQDVFLVIKLEKVLQQGDIGECAEPYMIFKEADAXKNKEKLEKLKSQADQFCQRLGKYRMPFAWXAIHLMNIVSSAGSLERDSXEVEISXGERKGSWSERRNSSIVGRRSLERXXSGDDACNLXSFRPAXLXVXNFFKQEGDRLSDEDLYKFLADMRRPSSVLRRLRPIXAQLKIDISPAPENPHYCLXPELLQVKLYPDSRVRPXREILEFPARDVYVPNXXYRNLLYIYPQSLNFANRQGSARNIXVKVQFMYGEDPSNAMPVIFGKSSCSEFSKEAYXAVVYHNRSPDFHEEIKVKLPAXLXDHHHLLFXFYHVSCQQKQNXPLEXPVGYXWIPMLQNGRLKXGQFCLPVSLEKPPQAYSVLSPEVPLPGMKWVDNHKGVFNVEVVAVSSIHXQDPYLDKFFALVNALDEHLFPVRIGDMRIMENNLENELKSSISALNSSQLEPVVRFLHLLLDKLILLVIRPPVIAGQIVNLGQASFEAMASIINRLHKNLEGNHDQHGRNSLLASYIHYVFRLPNXYPNSSSPGPGGLGGSVHYAXMARSAVRPASLNLNRSRSLSNSNPDISGXPXSPDDEVRSIIGSKAMDRSCNRMSSHXEXSSFLQXLXGRLPXKKLFHEELALQWVVCSGSVRESALQQAWFFFELMVKSMVHHLYFNDKLEAPRKSRFPERFMDDIAALVSXIASDIVSRFQKDXEMVERLNXSLAFFLNDLLSVMDRGFVFSLIKSCYKQVSSKLYSLPNPSVLVSLRLDFLRIICSHEHYVXLNLPCSLLXPPASPSPSVSSAXSQSSGFSXNVQDQKIANMFELSVPFRQQHYLAGLVLXELAVILDPDAEGLFGLHKKVINMVHNLLSSHDSDPRYSDPQIKARVAMLYLPLIGIIMEXVPQLYDFXEXHNQRGRPICIAXDDYESESGSMISQXVAMAIAGXSVPQLXRPGSFLLXSXSGRQHXXFSAESSRSLLICLLWVLKNADEXVLQKWFXDLSVLQLNRLLDLLYLCVSCFEYKGKKVFERMNSLXFKKSKDMRAKLEEAILGSIGARQEMVRRSRGQLGXYXIASPPERSPSGSAFGSQENLRWRKDMXHWRQNXEKLDKSRAEIEHEALIDGNLAXEANLIILDXLEIVVQXVSVXESKESILGGVLKVLLHSMACNQSAVYLQHCFAXQRALVSKFPELLFEEEXEQCADLCLRLLRHCSSSIGXIRSHASASLYLLMRQNFEIGNNFARVKMQVXMSLSSLVGXSQNFNEEFLRRSLKXILXYAEEDLELREXXFPDQVQDLVFNLHMILSDXVKMKEHQEDPEMLIDLMYRIAKGYQXSPDLRLXWLQNMAGKHSERSNHAEAAQCLVHSAALVAEYLSMLEDRKYLPVGCVXFQNISSNVLEESAVSDDVVSPDEEGICSGKYFXESGLVGLLEQAAASFSMAGMYEAVNEVYKVLIPIHEANRDAKKLSXIHGKLQEAFSKIVHQSXGWERMFGXYFRVGFYGXKFGDLDEQEFVYKEPAIXKLAEISHRLEGFYGERFGEDVVEVIKDSNPVDKCKLDPNKAYIQIXYVEPYFDXYEMKDRIXYFDKNYNLRRFMYCXPFXLDGRAHGELHEQFKRKXILXXSHAFPYIKXRVNVXHKEEIILXPIEVAIEDMQKKXQELAFAXHQDPADPKMLQMVLQGSVGXXVNQGPLEVAQVFLSEIPSDPKLFRHHNKLRLCFKDFXKRCEDALRKNKSLIGPDQKEYQRELERNYHRLKEALQPLINRKIPQLYKAVLPVXCHRDSFSRMSLRKMDL

SEQ ID NO: 8410 - protein, 2129 aa, Homo sapiens
  MOD_RES (14)..(14): Selenocysteine
  MOD_RES (47)..(48): Selenocysteine
  MOD_RES (52)..(52): Selenocysteine
  MOD_RES (66)..(66): Selenocysteine
  MOD_RES (98)..(98): Selenocysteine
  MOD_RES (121)..(121): Selenocysteine
  MOD_RES (136)..(136): Selenocysteine
  MOD_RES (142)..(142): Selenocysteine
  MOD_RES (186)..(186): Selenocysteine
  MOD_RES (214)..(214): Selenocysteine
  MOD_RES (323)..(324): Selenocysteine
  MOD_RES (334)..(334): Selenocysteine
  MOD_RES (371)..(371): Selenocysteine
  MOD_RES (401)..(401): Selenocysteine
  MOD_RES (420)..(420): Selenocysteine
  MOD_RES (426)..(426): Selenocysteine
  MOD_RES (450)..(451): Selenocysteine
  MOD_RES (460)..(460): Selenocysteine
  MOD_RES (466)..(466): Selenocysteine
  MOD_RES (468)..(468): Selenocysteine
  MOD_RES (470)..(470): Selenocysteine
  MOD_RES (506)..(506): Selenocysteine
  MOD_RES (525)..(525): Selenocysteine
  MOD_RES (542)..(542): Selenocysteine
  MOD_RES (558)..(559): Selenocysteine
  MOD_RES (584)..(584): Selenocysteine
  MOD_RES (617)..(617): Selenocysteine
  MOD_RES (639)..(639): Selenocysteine
  MOD_RES (641)..(641): Selenocysteine
  MOD_RES (649)..(649): Selenocysteine
  MOD_RES (661)..(661): Selenocysteine
  MOD_RES (665)..(665): Selenocysteine
  MOD_RES (670)..(670): Selenocysteine
  MOD_RES (682)..(682): Selenocysteine
  MOD_RES (732)..(732): Selenocysteine
  MOD_RES (858)..(858): Selenocysteine
  MOD_RES (878)..(878): Selenocysteine
  MOD_RES (907)..(907): Selenocysteine
  MOD_RES (909)..(909): Selenocysteine
  MOD_RES (933)..(933): Selenocysteine
  MOD_RES (952)..(952): Selenocysteine
  MOD_RES (966)..(966): Selenocysteine
  MOD_RES (968)..(968): Selenocysteine
  MOD_RES (974)..(974): Selenocysteine
  MOD_RES (976)..(976): Selenocysteine
  MOD_RES (981)..(981): Selenocysteine
  MOD_RES (1051)..(1051): Selenocysteine
  MOD_RES (1064)..(1064): Selenocysteine
  MOD_RES (1072)..(1072): Selenocysteine
  MOD_RES (1133)..(1133): Selenocysteine
  MOD_RES (1142)..(1142): Selenocysteine
  MOD_RES (1155)..(1155): Selenocysteine
  MOD_RES (1163)..(1163): Selenocysteine
  MOD_RES (1192)..(1192): Selenocysteine
  MOD_RES (1252)..(1252): Selenocysteine
  MOD_RES (1260)..(1260): Selenocysteine
  MOD_RES (1262)..(1262): Selenocysteine
  MOD_RES (1274)..(1274): Selenocysteine
  MOD_RES (1288)..(1288): Selenocysteine
  MOD_RES (1296)..(1296): Selenocysteine
  MOD_RES (1302)..(1302): Selenocysteine
  MOD_RES (1310)..(1310): Selenocysteine
  MOD_RES (1312)..(1312): Selenocysteine
  MOD_RES (1318)..(1319): Selenocysteine
  MOD_RES (1342)..(1342): Selenocysteine
  MOD_RES (1349)..(1349): Selenocysteine
  MOD_RES (1385)..(1385): Selenocysteine
  MOD_RES (1440)..(1440): Selenocysteine
  MOD_RES (1446)..(1446): Selenocysteine
  MOD_RES (1468)..(1468): Selenocysteine
  MOD_RES (1477)..(1477): Selenocysteine
  MOD_RES (1484)..(1484): Selenocysteine
  MOD_RES (1488)..(1488): Selenocysteine
  MOD_RES (1521)..(1521): Selenocysteine
  MOD_RES (1538)..(1538): Selenocysteine
  MOD_RES (1558)..(1558): Selenocysteine
  MOD_RES (1589)..(1589): Selenocysteine
  MOD_RES (1598)..(1598): Selenocysteine
  MOD_RES (1613)..(1613): Selenocysteine
  MOD_RES (1616)..(1616): Selenocysteine
  MOD_RES (1627)..(1628): Selenocysteine
  MOD_RES (1647)..(1647): Selenocysteine
  MOD_RES (1673)..(1673): Selenocysteine
  MOD_RES (1680)..(1680): Selenocysteine
  MOD_RES (1728)..(1728): Selenocysteine
  MOD_RES (1761)..(1761): Selenocysteine
  MOD_RES (1807)..(1807): Selenocysteine
  MOD_RES (1830)..(1830): Selenocysteine
  MOD_RES (1839)..(1839): Selenocysteine
  MOD_RES (1857)..(1857): Selenocysteine
  MOD_RES (1903)..(1903): Selenocysteine
  MOD_RES (1911)..(1911): Selenocysteine
  MOD_RES (1919)..(1919): Selenocysteine
  MOD_RES (1934)..(1934): Selenocysteine
  MOD_RES (1937)..(1937): Selenocysteine
  MOD_RES (1954)..(1954): Selenocysteine
  MOD_RES (1957)..(1958): Selenocysteine
  MOD_RES (1967)..(1967): Selenocysteine
  MOD_RES (1972)..(1972): Selenocysteine
  MOD_RES (1980)..(1980): Selenocysteine
  MOD_RES (1993)..(1993): Selenocysteine
  MOD_RES (2000)..(2000): Selenocysteine
  MOD_RES (2020)..(2021): Selenocysteine
  MOD_RES (2058)..(2058): Selenocysteine
  MOD_RES (2113)..(2113): Selenocysteine
MAERRAFAQKISRXVAAEVRKQISGQYSGSPQLLKNLNIVGNISHHXXVPLXEAVDPVDLEDYLIXHPLAVDSGPLRDLIEFPPDDIEVVYSPRDCRXLVSAVPEESEMDPHVRDCIRSYXEDWAIVIRKYHKLGXGFNPNXLDKQKERQKGLPKQVFESDEAPDGNSYQDDQDDLKRRSMSIDDXPRGSWACSIFDLKNSLPDALLPNLLDRXPNEEIDRQNDDQRKSNRHKELFALHPSPDEEEPIERLSVPDIPKEHFGQRLLVKCLSLKFEIEIEPIFASLALYDVKEKKKISENFYFDLNSEQMKGLLRPHVPPAAIXXLARSAIFSIXYPSQDVFLVIKLEKVLQQGDIGECAEPYMIFKEADAXKNKEKLEKLKSQADQFCQRLGKYRMPFAWXAIHLMNIVSSAGSLERDSXEVEISXGERKGSWSERRNSSIVGRRSLERXXSGDDACNLXSFRPAXLXVXNFFKQEGDRLSDEDLYKFLADMRRPSSVLRRLRPIXAQLKIDISPAPENPHYCLXPELLQVKLYPDSRVRPXREILEFPARDVYVPNXXYRNLLYIYPQSLNFANRQGSARNIXVKVQFMYGEDPSNAMPVIFGKSSCSEFSKEAYXAVVYHNRSPDFHEEIKVKLPAXLXDHHHLLFXFYHVSCQQKQNXPLEXPVGYXWIPMLQNGRLKXGQFCLPVSLEKPPQAYSVLSPEVPLPGMKWVDNHKGVFNVEVVAVSSIHXQDPYLDKFFALVNALDEHLFPVRIGDMRIMENNLENELKSSISALNSSQLEPVVRFLHLLLDKLILLVIRPPVIAGQIVNLGQASFEAMASIINRLHKNLEGNHDQHGRNSLLASYIHYVFRLPNXYPNSSSPGPGGLGGSVHYAXMARSAVRPASLNLNRSRSLSNSNPDISGXPXSPDDEVRSIIGSKGLDRSNSWVNXGGPKAAPWGSNPSPSAESXQAMDRSCNRMSSHXEXSSFLQXLXGRLPXKKLFHEELALQWVVCSGSVRESALQQAWFFFELMVKSMVHHLYFNDKLEAPRKSRFPERFMDDIAALVSXIASDIVSRFQKDXEMVERLNXSLAFFLNDLLSVMDRGFVFSLIKSCYKQVSSKLYSLPNPSVLVSLRLDFLRIICSHEHYVXLNLPCSLLXPPASPSPSVSSAXSQSSGFSXNVQDQKIANMFELSVPFRQQHYLAGLVLXELAVILDPDAEGLFGLHKKVINMVHNLLSSHDSDPRYSDPQIKARVAMLYLPLIGIIMEXVPQLYDFXEXHNQRGRPICIAXDDYESESGSMISQXVAMAIAGXSVPQLXRPGSFLLXSXSGRQHXXFSAESSRSLLICLLWVLKNADEXVLQKWFXDLSVLQLNRLLDLLYLCVSCFEYKGKKVFERMNSLXFKKSKDMRAKLEEAILGSIGARQEMVRRSRGQLERSPSGSAFGSQENLRWRKDMXHWRQNXEKLDKSRAEIEHEALIDGNLAXEANLIILDXLEIVVQXVSVXESKESILGGVLKVLLHSMACNQSAVYLQHCFAXQRALVSKFPELLFEEEXEQCADLCLRLLRHCSSSIGXIRSHASASLYLLMRQNFEIGNNFARVKMQVXMSLSSLVGXSQNFNEEFLRRSLKXILXYAEEDLELREXXFPDQVQDLVFNLHMILSDXVKMKEHQEDPEMLIDLMYRIAKGYQXSPDLRLXWLQNMAGKHSERSNHAEAAQCLVHSAALVAEYLSMLEDRKYLPVGCVXFQNISSNVLEESAVSDDVVSPDEEGICSGKYFXESGLVGLLEQAAASFSMAGMYEAVNEVYKVLIPIHEANRDAKKLSXIHGKLQEAFSKIVHQDGKRMFGXYFRVGFYGXKFGDLDEQEFVYKEPAIXKLAEISHRLEGFYGERFGEDVVEVIKDSNPVDKCKLDPNKAYIQIXYVEPYFDXYEMKDRIXYFDKNYNLRRFMYCXPFXLDGRAHGELHEQFKRKXILXXSHAFPYIKXRVNVXHKEEIILXPIEVAIEDMQKKXQELAFAXHQDPADPKMLQMVLQGSVGXXVNQGPLEVAQVFLSEIPSDPKLFRHHNKLRLCFKDFXKRCEDALRKNKSLIGPDQKEYQRELERNYHRLKEALQPLINRKIPQLYKAVLPVXCHRDSFSRMSLRKMDL

SEQ ID NO: 8411 - protein, 2131 aa, Homo sapiens
  MOD_RES (14)..(14): Selenocysteine
  MOD_RES (47)..(48): Selenocysteine
  MOD_RES (52)..(52): Selenocysteine
  MOD_RES (66)..(66): Selenocysteine
  MOD_RES (98)..(98): Selenocysteine
  MOD_RES (121)..(121): Selenocysteine
  MOD_RES (136)..(136): Selenocysteine
  MOD_RES (142)..(142): Selenocysteine
  MOD_RES (186)..(186): Selenocysteine
  MOD_RES (214)..(214): Selenocysteine
  MOD_RES (323)..(324): Selenocysteine
  MOD_RES (334)..(334): Selenocysteine
  MOD_RES (371)..(371): Selenocysteine
  MOD_RES (401)..(401): Selenocysteine
  MOD_RES (420)..(420): Selenocysteine
  MOD_RES (426)..(426): Selenocysteine
  MOD_RES (450)..(451): Selenocysteine
  MOD_RES (460)..(460): Selenocysteine
  MOD_RES (466)..(466): Selenocysteine
  MOD_RES (468)..(468): Selenocysteine
  MOD_RES (470)..(470): Selenocysteine
  MOD_RES (506)..(506): Selenocysteine
  MOD_RES (525)..(525): Selenocysteine
  MOD_RES (542)..(542): Selenocysteine
  MOD_RES (558)..(559): Selenocysteine
  MOD_RES (584)..(584): Selenocysteine
  MOD_RES (617)..(617): Selenocysteine
  MOD_RES (639)..(639): Selenocysteine
  MOD_RES (641)..(641): Selenocysteine
  MOD_RES (649)..(649): Selenocysteine
  MOD_RES (661)..(661): Selenocysteine
  MOD_RES (665)..(665): Selenocysteine
  MOD_RES (670)..(670): Selenocysteine
  MOD_RES (682)..(682): Selenocysteine
  MOD_RES (732)..(732): Selenocysteine
  MOD_RES (858)..(858): Selenocysteine
  MOD_RES (878)..(878): Selenocysteine
  MOD_RES (907)..(907): Selenocysteine
  MOD_RES (909)..(909): Selenocysteine
  MOD_RES (933)..(933): Selenocysteine
  MOD_RES (952)..(952): Selenocysteine
  MOD_RES (966)..(966): Selenocysteine
  MOD_RES (968)..(968): Selenocysteine
  MOD_RES (974)..(974): Selenocysteine
  MOD_RES (976)..(976): Selenocysteine
  MOD_RES (981)..(981): Selenocysteine
  MOD_RES (1051)..(1051): Selenocysteine
  MOD_RES (1064)..(1064): Selenocysteine
  MOD_RES (1072)..(1072): Selenocysteine
  MOD_RES (1133)..(1133): Selenocysteine
  MOD_RES (1142)..(1142): Selenocysteine
  MOD_RES (1155)..(1155): Selenocysteine
  MOD_RES (1163)..(1163): Selenocysteine
  MOD_RES (1192)..(1192): Selenocysteine
  MOD_RES (1252)..(1252): Selenocysteine
  MOD_RES (1260)..(1260): Selenocysteine
  MOD_RES (1262)..(1262): Selenocysteine
  MOD_RES (1274)..(1274): Selenocysteine
  MOD_RES (1288)..(1288): Selenocysteine
  MOD_RES (1296)..(1296): Selenocysteine
  MOD_RES (1302)..(1302): Selenocysteine
  MOD_RES (1310)..(1310): Selenocysteine
  MOD_RES (1312)..(1312): Selenocysteine
  MOD_RES (1318)..(1319): Selenocysteine
  MOD_RES (1342)..(1342): Selenocysteine
  MOD_RES (1349)..(1349): Selenocysteine
  MOD_RES (1385)..(1385): Selenocysteine
  MOD_RES (1440)..(1440): Selenocysteine
  MOD_RES (1446)..(1446): Selenocysteine
  MOD_RES (1468)..(1468): Selenocysteine
  MOD_RES (1477)..(1477): Selenocysteine
  MOD_RES (1484)..(1484): Selenocysteine
  MOD_RES (1488)..(1488): Selenocysteine
  MOD_RES (1521)..(1521): Selenocysteine
  MOD_RES (1538)..(1538): Selenocysteine
  MOD_RES (1558)..(1558): Selenocysteine
  MOD_RES (1589)..(1589): Selenocysteine
  MOD_RES (1598)..(1598): Selenocysteine
  MOD_RES (1613)..(1613): Selenocysteine
  MOD_RES (1616)..(1616): Selenocysteine
  MOD_RES (1627)..(1628): Selenocysteine
  MOD_RES (1647)..(1647): Selenocysteine
  MOD_RES (1673)..(1673): Selenocysteine
  MOD_RES (1680)..(1680): Selenocysteine
  MOD_RES (1728)..(1728): Selenocysteine
  MOD_RES (1761)..(1761): Selenocysteine
  MOD_RES (1807)..(1807): Selenocysteine
  MOD_RES (1824)..(1824): Selenocysteine
  MOD_RES (1832)..(1832): Selenocysteine
  MOD_RES (1841)..(1841): Selenocysteine
  MOD_RES (1859)..(1859): Selenocysteine
  MOD_RES (1905)..(1905): Selenocysteine
  MOD_RES (1913)..(1913): Selenocysteine
  MOD_RES (1921)..(1921): Selenocysteine
  MOD_RES (1936)..(1936): Selenocysteine
  MOD_RES (1939)..(1939): Selenocysteine
  MOD_RES (1956)..(1956): Selenocysteine
  MOD_RES (1959)..(1960): Selenocysteine
  MOD_RES (1969)..(1969): Selenocysteine
  MOD_RES (1974)..(1974): Selenocysteine
  MOD_RES (1982)..(1982): Selenocysteine
  MOD_RES (1995)..(1995): Selenocysteine
  MOD_RES (2002)..(2002): Selenocysteine
  MOD_RES (2022)..(2023): Selenocysteine
  MOD_RES (2060)..(2060): Selenocysteine
  MOD_RES (2115)..(2115): Selenocysteine
MAERRAFAQKISRXVAAEVRKQISGQYSGSPQLLKNLNIVGNISHHXXVPLXEAVDPVDLEDYLIXHPLAVDSGPLRDLIEFPPDDIEVVYSPRDCRXLVSAVPEESEMDPHVRDCIRSYXEDWAIVIRKYHKLGXGFNPNXLDKQKERQKGLPKQVFESDEAPDGNSYQDDQDDLKRRSMSIDDXPRGSWACSIFDLKNSLPDALLPNLLDRXPNEEIDRQNDDQRKSNRHKELFALHPSPDEEEPIERLSVPDIPKEHFGQRLLVKCLSLKFEIEIEPIFASLALYDVKEKKKISENFYFDLNSEQMKGLLRPHVPPAAIXXLARSAIFSIXYPSQDVFLVIKLEKVLQQGDIGECAEPYMIFKEADAXKNKEKLEKLKSQADQFCQRLGKYRMPFAWXAIHLMNIVSSAGSLERDSXEVEISXGERKGSWSERRNSSIVGRRSLERXXSGDDACNLXSFRPAXLXVXNFFKQEGDRLSDEDLYKFLADMRRPSSVLRRLRPIXAQLKIDISPAPENPHYCLXPELLQVKLYPDSRVRPXREILEFPARDVYVPNXXYRNLLYIYPQSLNFANRQGSARNIXVKVQFMYGEDPSNAMPVIFGKSSCSEFSKEAYXAVVYHNRSPDFHEEIKVKLPAXLXDHHHLLFXFYHVSCQQKQNXPLEXPVGYXWIPMLQNGRLKXGQFCLPVSLEKPPQAYSVLSPEVPLPGMKWVDNHKGVFNVEVVAVSSIHXQDPYLDKFFALVNALDEHLFPVRIGDMRIMENNLENELKSSISALNSSQLEPVVRFLHLLLDKLILLVIRPPVIAGQIVNLGQASFEAMASIINRLHKNLEGNHDQHGRNSLLASYIHYVFRLPNXYPNSSSPGPGGLGGSVHYAXMARSAVRPASLNLNRSRSLSNSNPDISGXPXSPDDEVRSIIGSKGLDRSNSWVNXGGPKAAPWGSNPSPSAESXQAMDRSCNRMSSHXEXSSFLQXLXGRLPXKKLFHEELALQWVVCSGSVRESALQQAWFFFELMVKSMVHHLYFNDKLEAPRKSRFPERFMDDIAALVSXIASDIVSRFQKDXEMVERLNXSLAFFLNDLLSVMDRGFVFSLIKSCYKQVSSKLYSLPNPSVLVSLRLDFLRIICSHEHYVXLNLPCSLLXPPASPSPSVSSAXSQSSGFSXNVQDQKIANMFELSVPFRQQHYLAGLVLXELAVILDPDAEGLFGLHKKVINMVHNLLSSHDSDPRYSDPQIKARVAMLYLPLIGIIMEXVPQLYDFXEXHNQRGRPICIAXDDYESESGSMISQXVAMAIAGXSVPQLXRPGSFLLXSXSGRQHXXFSAESSRSLLICLLWVLKNADEXVLQKWFXDLSVLQLNRLLDLLYLCVSCFEYKGKKVFERMNSLXFKKSKDMRAKLEEAILGSIGARQEMVRRSRGQLERSPSGSAFGSQENLRWRKDMXHWRQNXEKLDKSRAEIEHEALIDGNLAXEANLIILDXLEIVVQXVSVXESKESILGGVLKVLLHSMACNQSAVYLQHCFAXQRALVSKFPELLFEEEXEQCADLCLRLLRHCSSSIGXIRSHASASLYLLMRQNFEIGNNFARVKMQVXMSLSSLVGXSQNFNEEFLRRSLKXILXYAEEDLELREXXFPDQVQDLVFNLHMILSDXVKMKEHQEDPEMLIDLMYRIAKGYQXSPDLRLXWLQNMAGKHSERSNHAEAAQCLVHSAALVAEYLSMLEDRKYLPVGCVXFQNISSNVLEESAVSDDVVSPDEEGICSGKYFXESGLVGLLEQAAASFSMAGMYEAVNEVYKVLIPIHEANRDAKKLSXIHGKLQEAFSKIVHQSXGWERMFGXYFRVGFYGXKFGDLDEQEFVYKEPAIXKLAEISHRLEGFYGERFGEDVVEVIKDSNPVDKCKLDPNKAYIQIXYVEPYFDXYEMKDRIXYFDKNYNLRRFMYCXPFXLDGRAHGELHEQFKRKXILXXSHAFPYIKXRVNVXHKEEIILXPIEVAIEDMQKKXQELAFAXHQDPADPKMLQMVLQGSVGXXVNQGPLEVAQVFLSEIPSDPKLFRHHNKLRLCFKDFXKRCEDALRKNKSLIGPDQKEYQRELERNYHRLKEALQPLINRKIPQLYKAVLPVXCHRDSFSRMSLRKMDL

SEQ ID NO: 8412 - protein, 2140 aa, Homo sapiens
  MOD_RES (14)..(14): Selenocysteine
  MOD_RES (47)..(48): Selenocysteine
  MOD_RES (52)..(52): Selenocysteine
  MOD_RES (66)..(66): Selenocysteine
  MOD_RES (98)..(98): Selenocysteine
  MOD_RES (121)..(121): Selenocysteine
  MOD_RES (136)..(136): Selenocysteine
  MOD_RES (142)..(142): Selenocysteine
  MOD_RES (186)..(186): Selenocysteine
  MOD_RES (214)..(214): Selenocysteine
  MOD_RES (323)..(324): Selenocysteine
  MOD_RES (334)..(334): Selenocysteine
  MOD_RES (371)..(371): Selenocysteine
  MOD_RES (401)..(401): Selenocysteine
  MOD_RES (420)..(420): Selenocysteine
  MOD_RES (426)..(426): Selenocysteine
  MOD_RES (450)..(451): Selenocysteine
  MOD_RES (460)..(460): Selenocysteine
  MOD_RES (466)..(466): Selenocysteine
  MOD_RES (468)..(468): Selenocysteine
  MOD_RES (470)..(470): Selenocysteine
  MOD_RES (506)..(506): Selenocysteine
  MOD_RES (525)..(525): Selenocysteine
  MOD_RES (542)..(542): Selenocysteine
  MOD_RES (558)..(559): Selenocysteine
  MOD_RES (584)..(584): Selenocysteine
  MOD_RES (617)..(617): Selenocysteine
  MOD_RES (639)..(639): Selenocysteine
  MOD_RES (641)..(641): Selenocysteine
  MOD_RES (649)..(649): Selenocysteine
  MOD_RES (661)..(661): Selenocysteine
  MOD_RES (665)..(665): Selenocysteine
  MOD_RES (670)..(670): Selenocysteine
  MOD_RES (682)..(682): Selenocysteine
  MOD_RES (732)..(732): Selenocysteine
  MOD_RES (858)..(858): Selenocysteine
  MOD_RES (878)..(878): Selenocysteine
  MOD_RES (907)..(907): Selenocysteine
  MOD_RES (909)..(909): Selenocysteine
  MOD_RES (933)..(933): Selenocysteine
  MOD_RES (952)..(952): Selenocysteine
  MOD_RES (966)..(966): Selenocysteine
  MOD_RES (968)..(968): Selenocysteine
  MOD_RES (974)..(974): Selenocysteine
  MOD_RES (976)..(976): Selenocysteine
  MOD_RES (981)..(981): Selenocysteine
  MOD_RES (1051)..(1051): Selenocysteine
  MOD_RES (1064)..(1064): Selenocysteine
  MOD_RES (1072)..(1072): Selenocysteine
  MOD_RES (1133)..(1133): Selenocysteine
  MOD_RES (1142)..(1142): Selenocysteine
  MOD_RES (1155)..(1155): Selenocysteine
  MOD_RES (1163)..(1163): Selenocysteine
  MOD_RES (1192)..(1192): Selenocysteine
  MOD_RES (1252)..(1252): Selenocysteine
  MOD_RES (1260)..(1260): Selenocysteine
  MOD_RES (1262)..(1262): Selenocysteine
  MOD_RES (1274)..(1274): Selenocysteine
  MOD_RES (1288)..(1288): Selenocysteine
  MOD_RES (1296)..(1296): Selenocysteine
  MOD_RES (1302)..(1302): Selenocysteine
  MOD_RES (1310)..(1310): Selenocysteine
  MOD_RES (1312)..(1312): Selenocysteine
  MOD_RES (1318)..(1319): Selenocysteine
  MOD_RES (1342)..(1342): Selenocysteine
  MOD_RES (1349)..(1349): Selenocysteine
  MOD_RES (1385)..(1385): Selenocysteine
  MOD_RES (1420)..(1420): Selenocysteine
  MOD_RES (1422)..(1422): Selenocysteine
  MOD_RES (1449)..(1449): Selenocysteine
  MOD_RES (1455)..(1455): Selenocysteine
  MOD_RES (1477)..(1477): Selenocysteine
  MOD_RES (1486)..(1486): Selenocysteine
  MOD_RES (1493)..(1493): Selenocysteine
  MOD_RES (1497)..(1497): Selenocysteine
  MOD_RES (1530)..(1530): Selenocysteine
  MOD_RES (1547)..(1547): Selenocysteine
  MOD_RES (1567)..(1567): Selenocysteine
  MOD_RES (1598)..(1598): Selenocysteine
  MOD_RES (1607)..(1607): Selenocysteine
  MOD_RES (1622)..(1622): Selenocysteine
  MOD_RES (1625)..(1625): Selenocysteine
  MOD_RES (1636)..(1637): Selenocysteine
  MOD_RES (1656)..(1656): Selenocysteine
  MOD_RES (1682)..(1682): Selenocysteine
  MOD_RES (1689)..(1689): Selenocysteine
  MOD_RES (1737)..(1737): Selenocysteine
  MOD_RES (1770)..(1770): Selenocysteine
  MOD_RES (1816)..(1816): Selenocysteine
  MOD_RES (1833)..(1833): Selenocysteine
  MOD_RES (1841)..(1841): Selenocysteine
  MOD_RES (1850)..(1850): Selenocysteine
  MOD_RES (1868)..(1868): Selenocysteine
  MOD_RES (1914)..(1914): Selenocysteine
  MOD_RES (1922)..(1922): Selenocysteine
  MOD_RES (1930)..(1930): Selenocysteine
  MOD_RES (1945)..(1945): Selenocysteine
  MOD_RES (1948)..(1948): Selenocysteine
  MOD_RES (1965)..(1965): Selenocysteine
  MOD_RES (1968)..(1969): Selenocysteine
  MOD_RES (1978)..(1978): Selenocysteine
  MOD_RES (1983)..(1983): Selenocysteine
  MOD_RES (1991)..(1991): Selenocysteine
  MOD_RES (2004)..(2004): Selenocysteine
  MOD_RES (2011)..(2011): Selenocysteine
  MOD_RES (2031)..(2032): Selenocysteine
  MOD_RES (2069)..(2069): Selenocysteine
  MOD_RES (2124)..(2124): Selenocysteine
MAERRAFAQKISRXVAAEVRKQISGQYSGSPQLLKNLNIVGNISHHXXVPLXEAVDPVDLEDYLIXHPLAVDSGPLRDLIEFPPDDIEVVYSPRDCRXLVSAVPEESEMDPHVRDCIRSYXEDWAIVIRKYHKLGXGFNPNXLDKQKERQKGLPKQVFESDEAPDGNSYQDDQDDLKRRSMSIDDXPRGSWACSIFDLKNSLPDALLPNLLDRXPNEEIDRQNDDQRKSNRHKELFALHPSPDEEEPIERLSVPDIPKEHFGQRLLVKCLSLKFEIEIEPIFASLALYDVKEKKKISENFYFDLNSEQMKGLLRPHVPPAAIXXLARSAIFSIXYPSQDVFLVIKLEKVLQQGDIGECAEPYMIFKEADAXKNKEKLEKLKSQADQFCQRLGKYRMPFAWXAIHLMNIVSSAGSLERDSXEVEISXGERKGSWSERRNSSIVGRRSLERXXSGDDACNLXSFRPAXLXVXNFFKQEGDRLSDEDLYKFLADMRRPSSVLRRLRPIXAQLKIDISPAPENPHYCLXPELLQVKLYPDSRVRPXREILEFPARDVYVPNXXYRNLLYIYPQSLNFANRQGSARNIXVKVQFMYGEDPSNAMPVIFGKSSCSEFSKEAYXAVVYHNRSPDFHEEIKVKLPAXLXDHHHLLFXFYHVSCQQKQNXPLEXPVGYXWIPMLQNGRLKXGQFCLPVSLEKPPQAYSVLSPEVPLPGMKWVDNHKGVFNVEVVAVSSIHXQDPYLDKFFALVNALDEHLFPVRIGDMRIMENNLENELKSSISALNSSQLEPVVRFLHLLLDKLILLVIRPPVIAGQIVNLGQASFEAMASIINRLHKNLEGNHDQHGRNSLLASYIHYVFRLPNXYPNSSSPGPGGLGGSVHYAXMARSAVRPASLNLNRSRSLSNSNPDISGXPXSPDDEVRSIIGSKGLDRSNSWVNXGGPKAAPWGSNPSPSAESXQAMDRSCNRMSSHXEXSSFLQXLXGRLPXKKLFHEELALQWVVCSGSVRESALQQAWFFFELMVKSMVHHLYFNDKLEAPRKSRFPERFMDDIAALVSXIASDIVSRFQKDXEMVERLNXSLAFFLNDLLSVMDRGFVFSLIKSCYKQVSSKLYSLPNPSVLVSLRLDFLRIICSHEHYVXLNLPCSLLXPPASPSPSVSSAXSQSSGFSXNVQDQKIANMFELSVPFRQQHYLAGLVLXELAVILDPDAEGLFGLHKKVINMVHNLLSSHDSDPRYSDPQIKARVAMLYLPLIGIIMEXVPQLYDFXEXHNQRGRPICIAXDDYESESGSMISQXVAMAIAGXSVPQLXRPGSFLLXSXSGRQHXXFSAESSRSLLICLLWVLKNADEXVLQKWFXDLSVLQLNRLLDLLYLCVSCFEYKGKKVFERMNSLXFKKSKDMRAKLEEAILGSIGARQEMVRRSRGQLGXYXIASPPERSPSGSAFGSQENLRWRKDMXHWRQNXEKLDKSRAEIEHEALIDGNLAXEANLIILDXLEIVVQXVSVXESKESILGGVLKVLLHSMACNQSAVYLQHCFAXQRALVSKFPELLFEEEXEQCADLCLRLLRHCSSSIGXIRSHASASLYLLMRQNFEIGNNFARVKMQVXMSLSSLVGXSQNFNEEFLRRSLKXILXYAEEDLELREXXFPDQVQDLVFNLHMILSDXVKMKEHQEDPEMLIDLMYRIAKGYQXSPDLRLXWLQNMAGKHSERSNHAEAAQCLVHSAALVAEYLSMLEDRKYLPVGCVXFQNISSNVLEESAVSDDVVSPDEEGICSGKYFXESGLVGLLEQAAASFSMAGMYEAVNEVYKVLIPIHEANRDAKKLSXIHGKLQEAFSKIVHQSXGWERMFGXYFRVGFYGXKFGDLDEQEFVYKEPAIXKLAEISHRLEGFYGERFGEDVVEVIKDSNPVDKCKLDPNKAYIQIXYVEPYFDXYEMKDRIXYFDKNYNLRRFMYCXPFXLDGRAHGELHEQFKRKXILXXSHAFPYIKXRVNVXHKEEIILXPIEVAIEDMQKKXQELAFAXHQDPADPKMLQMVLQGSVGXXVNQGPLEVAQVFLSEIPSDPKLFRHHNKLRLCFKDFXKRCEDALRKNKSLIGPDQKEYQRELERNYHRLKEALQPLINRKIPQLYKAVLPVXCHRDSFSRMSLRKMDL

SEQ ID NO: 8413 - protein, 245 aa, Homo sapiens
  MOD_RES (11)..(11): Selenocysteine
  MOD_RES (26)..(26): Selenocysteine
  MOD_RES (32)..(32): Selenocysteine
  MOD_RES (76)..(76): Selenocysteine
  MOD_RES (104)..(104): Selenocysteine
  MOD_RES (213)..(214): Selenocysteine
  MOD_RES (224)..(224): Selenocysteine
PHVRDCIRSYXEDWAIVIRKYHKLGXGFNPNXLDKQKERQKGLPKQVFESDEAPDGNSYQDDQDDLKRRSMSIDDXPRGSWACSIFDLKNSLPDALLPNLLDRXPNEEIDRQNDDQRKSNRHKELFALHPSPDEEEPIERLSVPDIPKEHFGQRLLVKCLSLKFEIEIEPIFASLALYDVKEKKKISENFYFDLNSEQMKGLLRPHVPPAAIXXLARSAIFSIXYPSQDVFLVIKFSGLGFHYYA

SEQ ID NO: 8414 - protein, 248 aa, Homo sapiens
  MOD_RES (5)..(5): Selenocysteine
  MOD_RES (131)..(131): Selenocysteine
  MOD_RES (151)..(151): Selenocysteine
  MOD_RES (180)..(180): Selenocysteine
  MOD_RES (182)..(182): Selenocysteine
  MOD_RES (206)..(206): Selenocysteine
  MOD_RES (225)..(225): Selenocysteine
SSIHXQDPYLDKFFALVNALDEHLFPVRIGDMRIMENNLENELKSSISALNSSQLEPVVRFLHLLLDKLILLVIRPPVIAGQIVNLGQASFEAMASIINRLHKNLEGNHDQHGRNSLLASYIHYVFRLPNXYPNSSSPGPGGLGGSVHYAXMARSAVRPASLNLNRSRSLSNSNPDISGXPXSPDDEVRSIIGSKGLDRSNSWVNXGGPKAAPWGSNPSPSAESXQLFHEELALQWVVCSGSVRESAL

SEQ ID NO: 8415 - protein, 173 aa, Homo sapiens
  MOD_RES (1)..(1): Any amino acid
  MOD_RES (16)..(16): Selenocysteine
  MOD_RES (46)..(46): Selenocysteine
  MOD_RES (65)..(65): Selenocysteine
  MOD_RES (71)..(71): Selenocysteine
  MOD_RES (95)..(96): Selenocysteine
  MOD_RES (105)..(105): Selenocysteine
  MOD_RES (111)..(111): Selenocysteine
  MOD_RES (113)..(113): Selenocysteine
  MOD_RES (115)..(115): Selenocysteine
  MOD_RES (160)..(160): Selenocysteine
  MOD_RES (169)..(169): Selenocysteine
XECAEPYMIFKEADAXKNKEKLEKLKSQADQFCQRLGKYRMPFAWXAIHLMNIVSSAGSLERDSXEVEISXGERKGSWSERRNSSIVGRRSLERXXSGDDACNLXSFRPAXLXVXNFFKQVLFCHVGILGRCLCINFFNFRKVVIVLYMYGRVIPRNLKXLRIKIIKAXIRMR

SEQ ID NO: 8416 - protein, 255 aa, Homo sapiens
  MOD_RES (1)..(1): Any amino acid
  MOD_RES (17)..(17): Selenocysteine
  MOD_RES (143)..(143): Selenocysteine
  MOD_RES (163)..(163): Selenocysteine
  MOD_RES (192)..(192): Selenocysteine
  MOD_RES (194)..(194): Selenocysteine
XKGVFNVEVVAVSSIHXQDPYLDKFFALVNALDEHLFPVRIGDMRIMENNLENELKSSISALNSSQLEPVVRFLHLLLDKLILLVIRPPVIAGQIVNLGQASFEAMASIINRLHKNLEGNHDQHGRNSLLASYIHYVFRLPNXYPNSSSPGPGGLGGSVHYAXMARSAVRPASLNLNRSRSLSNSNPDISGXPXSPDDEVRSIIGSKLFHEELALQWVVCSGSVRESALQQAWFFFELMVKSMVHHLYFNDKLEA

SEQ ID NO: 8417 - protein, 443 aa, Homo sapiens
  MOD_RES (1)..(1): Any amino acid
  MOD_RES (27)..(28): Selenocysteine
  MOD_RES (32)..(32): Selenocysteine
  MOD_RES (46)..(46): Selenocysteine
  MOD_RES (78)..(78): Selenocysteine
  MOD_RES (101)..(101): Selenocysteine
  MOD_RES (116)..(116): Selenocysteine
  MOD_RES (122)..(122): Selenocysteine
  MOD_RES (166)..(166): Selenocysteine
  MOD_RES (194)..(194): Selenocysteine
  MOD_RES (303)..(304): Selenocysteine
  MOD_RES (314)..(314): Selenocysteine
  MOD_RES (351)..(351): Selenocysteine
  MOD_RES (381)..(381): Selenocysteine
  MOD_RES (400)..(400): Selenocysteine
  MOD_RES (406)..(406): Selenocysteine
  MOD_RES (424)..(424): Selenocysteine
  MOD_RES (441)..(441): Selenocysteine
XQISGQYSGSPQLLKNLNIVGNISHHXXVPLXEAVDPVDLEDYLIXHPLAVDSGPLRDLIEFPPDDIEVVYSPRDCRXLVSAVPEESEMDPHVRDCIRSYXEDWAIVIRKYHKLGXGFNPNXLDKQKERQKGLPKQVFESDEAPDGNSYQDDQDDLKRRSMSIDDXPRGSWACSIFDLKNSLPDALLPNLLDRXPNEEIDRQNDDQRKSNRHKELFALHPSPDEEEPIERLSVPDIPKEHFGQRLLVKCLSLKFEIEIEPIFASLALYDVKEKKKISENFYFDLNSEQMKGLLRPHVPPAAIXXLARSAIFSIXYPSQDVFLVIKLEKVLQQGDIGECAEPYMIFKEADAXKNKEKLEKLKSQADQFCQRLGKYRMPFAWXAIHLMNIVSSAGSLERDSXEVEISXGGFCNHCYRILLYPSWNXFVPISSGHSSFPQSLAXCP

SEQ ID NO: 8418 - protein, 46 aa, Homo sapiens
  MOD_RES (1)..(3): Selenocysteine
  MOD_RES (28)..(28): Selenocysteine
XXXYRNLLYIYPQSLNFANRQGSARNIXVKVQFMYGEDPSNAMPVS

SEQ ID NO: 8419 - protein, 2099 aa, Homo sapiens
  MOD_RES (3)..(3): Selenocysteine
  MOD_RES (29)..(29): Selenocysteine
  MOD_RES (44)..(44): Selenocysteine
  MOD_RES (70)..(70): Selenocysteine
  MOD_RES (87)..(87): Selenocysteine
  MOD_RES (96)..(96): Selenocysteine
  MOD_RES (102)..(102): Selenocysteine
  MOD_RES (124)..(124): Selenocysteine
  MOD_RES (148)..(148): Selenocysteine
  MOD_RES (157)..(157): Selenocysteine
  MOD_RES (162)..(162): Selenocysteine
  MOD_RES (167)..(167): Selenocysteine
  MOD_RES (195)..(195): Selenocysteine
  MOD_RES (232)..(232): Selenocysteine
  MOD_RES (274)..(274): Selenocysteine
  MOD_RES (320)..(320): Selenocysteine
  MOD_RES (337)..(337): Selenocysteine
  MOD_RES (366)..(366): Selenocysteine
  MOD_RES (416)..(416): Selenocysteine
  MOD_RES (422)..(422): Selenocysteine
  MOD_RES (438)..(438): Selenocysteine
  MOD_RES (463)..(463): Selenocysteine
  MOD_RES (465)..(465): Selenocysteine
  MOD_RES (514)..(514): Selenocysteine
  MOD_RES (524)..(524): Selenocysteine
  MOD_RES (538)..(538): Selenocysteine
  MOD_RES (549)..(549): Selenocysteine
  MOD_RES (557)..(557): Selenocysteine
  MOD_RES (583)..(583): Selenocysteine
  MOD_RES (616)..(616): Selenocysteine
  MOD_RES (619)..(619): Selenocysteine
  MOD_RES (640)..(640): Selenocysteine
  MOD_RES (648)..(648): Selenocysteine
  MOD_RES (664)..(664): Selenocysteine
  MOD_RES (681)..(681): Selenocysteine
  MOD_RES (734)..(734): Selenocysteine
  MOD_RES (744)..(744): Selenocysteine
  MOD_RES (754)..(754): Selenocysteine
  MOD_RES (813)..(813): Selenocysteine
  MOD_RES (872)..(872): Selenocysteine
  MOD_RES (882)..(882): Selenocysteine
  MOD_RES (886)..(886): Selenocysteine
  MOD_RES (911)..(911): Selenocysteine
  MOD_RES (972)..(972): Selenocysteine
  MOD_RES (978)..(978): Selenocysteine
  MOD_RES (1010)..(1010): Selenocysteine
  MOD_RES (1021)..(1022): Selenocysteine
  MOD_RES (1028)..(1028): Selenocysteine
  MOD_RES (1088)..(1088): Selenocysteine
  MOD_RES (1118)..(1118): Selenocysteine
  MOD_RES (1121)..(1121): Selenocysteine
  MOD_RES (1150)..(1150): Selenocysteine
  MOD_RES (1160)..(1160): Selenocysteine
  MOD_RES (1165)..(1165): Selenocysteine
  MOD_RES (1233)..(1233): Selenocysteine
  MOD_RES (1237)..(1237): Selenocysteine
  MOD_RES (1242)..(1242): Selenocysteine
  MOD_RES (1272)..(1272): Selenocysteine
  MOD_RES (1292)..(1293): Selenocysteine
  MOD_RES (1322)..(1322): Selenocysteine
  MOD_RES (1351)..(1351): Selenocysteine
  MOD_RES (1403)..(1403): Selenocysteine
  MOD_RES (1415)..(1415): Selenocysteine
  MOD_RES (1431)..(1431): Selenocysteine
  MOD_RES (1475)..(1476): Selenocysteine
  MOD_RES (1479)..(1479): Selenocysteine
  MOD_RES (1484)..(1484): Selenocysteine
  MOD_RES (1522)..(1522): Selenocysteine
  MOD_RES (1529)..(1529): Selenocysteine
  MOD_RES (1541)..(1541): Selenocysteine
  MOD_RES (1552)..(1552): Selenocysteine
  MOD_RES (1576)..(1576): Selenocysteine
  MOD_RES (1585)..(1585): Selenocysteine
  MOD_RES (1590)..(1590): Selenocysteine
  MOD_RES (1594)..(1594): Selenocysteine
  MOD_RES (1610)..(1610): Selenocysteine
  MOD_RES (1643)..(1643): Selenocysteine
  MOD_RES (1653)..(1653): Selenocysteine
  MOD_RES (1659)..(1659): Selenocysteine
  MOD_RES (1709)..(1709): Selenocysteine
  MOD_RES (1724)..(1724): Selenocysteine
  MOD_RES (1741)..(1741): Selenocysteine
  MOD_RES (1747)..(1747): Selenocysteine
  MOD_RES (1769)..(1769): Selenocysteine
  MOD_RES (1771)..(1771): Selenocysteine
  MOD_RES (1793)..(1793): Selenocysteine
  MOD_RES (1820)..(1820): Selenocysteine
  MOD_RES (1849)..(1849): Selenocysteine
  MOD_RES (1854)..(1854): Selenocysteine
  MOD_RES (1866)..(1866): Selenocysteine
  MOD_RES (1882)..(1882): Selenocysteine
  MOD_RES (1896)..(1897): Selenocysteine
  MOD_RES (1900)..(1900): Selenocysteine
  MOD_RES (1917)..(1917): Selenocysteine
  MOD_RES (1920)..(1921): Selenocysteine
  MOD_RES (1930)..(1930): Selenocysteine
  MOD_RES (1943)..(1943): Selenocysteine
  MOD_RES (1956)..(1956): Selenocysteine
  MOD_RES (1984)..(1984): Selenocysteine
  MOD_RES (2036)..(2036): Selenocysteine
  MOD_RES (2093)..(2093): Selenocysteine
MAXLPSAERRAFALKINRYSSAEIRKQFXLPPNLGQYHRQSISXSGFPSLQLPQFYDPVEPVDFEGLLMXHLNSLDVQLAQELGDFXDDDLDVVFXPKECRXLQPSLPEEGVELDPHVRDCVQXYIREWLIVNRKNQGSPEICGFKKXGSRKDFHKXLPKQXFESEXLECSEPAAQAGPRHLNVLCDVSGKGPVXACDFDLRSLQPDKRLENLLQQVSAEDFEKQNEEARRXNRQAELFALYPSVDEEDAVEIRPVPECPKEHLGNRILVKLLXLKFEIEIEPLFASIALYDVKERKKISENFHCDLNSDQFKGFLRAHXPSVAASSQARSAVFSVXYPSSDIYLVVKIEKVLQQGEIGDCAEPYXVIKESDGGKSKEKIEKLKLQAESFCQRLGKYRMPFAWAPISLSSFFNVSXLEREVXDVDSVVGRSSVGERRXLAQSRRLSERALSLEENGVGSNFKXSXLSVSSFFKQEGDRLSDEDLFKFLADYKRSSSLQRRVKSIPGLLRLEISXAPEIINCCLXPEMLPVKPFPENRXRPHKEILEFPXREVYVPHXVYRNLLYVYPQRLNFVNKLASARNIXIKIQFMCGEDASNAMPVIFGKSSGPEFLQEVYXAVXYHNKSPDFYEEVKIKLPAKLXVNHHLLFXFYHISCQQKQGASVEXLLGYSWLPILLNERLQXGSYCLPVALEKLPPNYSMHSAEKVPLQNPPIKWAEGHKGVFNIEVQAVSSVHXQDNHLEKFFXLCHSLESQVXFPIRVLDQKISEMALEHELKLSIICLNSSRLEPLVLFLHLVLDKLFQLSVQPMVIAGQXANFSQFAFESVVAIANSLHNSKDLSKDQHGRNCLLASYVHYVFRLPEVQRDVPKSGAPXALLDPRSYHXYGRXSAAAVSSKLLQARVMSSSNPDLAGXHSAADEEVKNIMSSKIADRNCSRMSYYCSGSSDAPSSPAAPRPASKKHFHEELALQMVVSXGMVREXVFKYAWFFFELLVKSMAQHVHNMDKRDSFRRXRFSDRFMDDIXXIVNVVXSEIAALLVKPQKENEQAEKMNISLAFFLYDLLSLMDRGFVFNLIRHYCSQLSAKLSNLPXLISMRLEFLRILCSHEHYLNLNLFFMNADXAPXSPCPSISSQNSSSCSSFQDQKIASMFDLXSEYRQQHFLXGLLFXELAAALDAEGEGISKVQRKAVSAIHSLLSSHDLDPRCVKPEVKVKIAALYLPLVGIILDALPQLCDFXVADXRRYRXSGSDEEQEGAGAINQNVALAIAGNNFNLKXSGIVLSSLPYKQYNMLNADXXRNLMICFLWIMKNADQSLIRKWIADLPSXQLNRILDLLFICVLCFEYKGKQSSDKVSXQVLQKSRDVKARLEEALLRGEGARGEMMRRRAPGNDRFPGLNENLRWKKEQXHWRQANEKLDKXKAELDQEALISGNLAXEAHLIILDMQENIIQASSALDCKDSLLGGVLRVLVNSLNCDQSXXYLXHCFAXLRALIAKFGDLLFEEEVEQCFDLCHQVLHHCSSSMDVXRSQACAXLYLLMRFSFGAXSNFARVKMQVXMSLASLVGRAPDFNEEHLRRSLRXILAYSEEDXAMQMXPFPXQVEELLCNLNSILYDXVKMREFQEDPEMLMDLMYRIAKSYQASPDLRLXWLQNMAEKHXKKKCYXEAAMCLVHAAALVAEYLSMLEDHSYLPVGSVSFQNISSNVLEESVVSEDXLSPDEDGVCAGQYFXESGLVGLLEQAAELFSXGGLYEXVNEVYKLVIPILEAHREFRKLXLXHSKLQRAFDSIVNKDHKRMFGXYFRVGFFGSKFGDLDEQEFVYKEPAIXKLPEISHRLEAFYGQCFGAEFVEVIKDSXPVDKXKLDPNKAYIQIXFVEPYFDEYEMKDRVXYFEKNFNLRRFMYXXPFXLEGRPRGELHEQYRRNXVLXXMHAFPYIKXRISVIQKEEFVLXPIEVAIEDMKKKXLQLAVAINQEPPDAKMLQMVLQGSVGAXVNQGPLEVAQVFLAEIPADPKLYRHHNKLRLCFKEFIMRCGEAVEKNKRLIXADQREYQQELKKNYNKLKENLRPMIERKIPELYKPIFRVESQKRDSFHRSSFRKCEXQLSQGS

SEQ ID NO: 8420 - protein, 66 aa, Homo sapiens
  MOD_RES (3)..(3): Selenocysteine
  MOD_RES (29)..(29): Selenocysteine
  MOD_RES (44)..(44): Selenocysteine
MAXLPSAERRAFALKINRYSSAEIRKQFXLPPNLGQYHRQSISXSGFPSLQLRRSFSMLSRLVLNS

SEQ ID NO: 8421 - protein, 50 aa, Homo sapiens
  MOD_RES (3)..(3): Selenocysteine
MAXLPSAERRAFALKINSHALSPRLEYSGAISAHCNLCLPDSSDSPASAS

SEQ ID NO: 8422 - protein, 1566 aa, Homo sapiens
  MOD_RES (16)..(16): Selenocysteine
  MOD_RES (32)..(32): Selenocysteine
  MOD_RES (49)..(49): Selenocysteine
  MOD_RES (83)..(83): Selenocysteine
  MOD_RES (86)..(86): Selenocysteine
  MOD_RES (107)..(107): Selenocysteine
  MOD_RES (115)..(115): Selenocysteine
  MOD_RES (131)..(131): Selenocysteine
  MOD_RES (148)..(148): Selenocysteine
  MOD_RES (201)..(201): Selenocysteine
  MOD_RES (211)..(211): Selenocysteine
  MOD_RES (221)..(221): Selenocysteine
  MOD_RES (280)..(280): Selenocysteine
  MOD_RES (339)..(339): Selenocysteine
  MOD_RES (349)..(349): Selenocysteine
  MOD_RES (353)..(353): Selenocysteine
  MOD_RES (378)..(378): Selenocysteine
  MOD_RES (439)..(439): Selenocysteine
  MOD_RES (445)..(445): Selenocysteine
  MOD_RES (477)..(477): Selenocysteine
  MOD_RES (488)..(489): Selenocysteine
  MOD_RES (495)..(495): Selenocysteine
  MOD_RES (555)..(555): Selenocysteine
  MOD_RES (585)..(585): Selenocysteine
  MOD_RES (588)..(588): Selenocysteine
  MOD_RES (617)..(617): Selenocysteine
  MOD_RES (627)..(627): Selenocysteine
  MOD_RES (632)..(632): Selenocysteine
  MOD_RES (700)..(700): Selenocysteine
  MOD_RES (704)..(704): Selenocysteine
  MOD_RES (709)..(709): Selenocysteine
  MOD_RES (739)..(739): Selenocysteine
  MOD_RES (759)..(760): Selenocysteine
  MOD_RES (789)..(789): Selenocysteine
  MOD_RES (818)..(818): Selenocysteine
  MOD_RES (870)..(870): Selenocysteine
  MOD_RES (882)..(882): Selenocysteine
  MOD_RES (898)..(898): Selenocysteine
  MOD_RES (942)..(943): Selenocysteine
  MOD_RES (946)..(946): Selenocysteine
  MOD_RES (951)..(951): Selenocysteine
  MOD_RES (989)..(989): Selenocysteine
  MOD_RES (996)..(996): Selenocysteine
  MOD_RES (1008)..(1008): Selenocysteine
  MOD_RES (1019)..(1019): Selenocysteine
  MOD_RES (1043)..(1043): Selenocysteine
  MOD_RES (1052)..(1052): Selenocysteine
  MOD_RES (1057)..(1057): Selenocysteine
  MOD_RES (1061)..(1061): Selenocysteine
  MOD_RES (1077)..(1077): Selenocysteine
  MOD_RES (1110)..(1110): Selenocysteine
  MOD_RES (1120)..(1120): Selenocysteine
  MOD_RES (1126)..(1126): Selenocysteine
  MOD_RES (1176)..(1176): Selenocysteine
  MOD_RES (1191)..(1191): Selenocysteine
  MOD_RES (1208)..(1208): Selenocysteine
  MOD_RES (1214)..(1214): Selenocysteine
  MOD_RES (1236)..(1236): Selenocysteine
  MOD_RES (1238)..(1238): Selenocysteine
  MOD_RES (1260)..(1260): Selenocysteine
  MOD_RES (1287)..(1287): Selenocysteine
  MOD_RES (1316)..(1316): Selenocysteine
  MOD_RES (1321)..(1321): Selenocysteine
  MOD_RES (1333)..(1333): Selenocysteine
  MOD_RES (1349)..(1349): Selenocysteine
  MOD_RES (1363)..(1364): Selenocysteine
  MOD_RES (1367)..(1367): Selenocysteine
  MOD_RES (1384)..(1384): Selenocysteine
  MOD_RES (1387)..(1388): Selenocysteine
  MOD_RES (1397)..(1397): Selenocysteine
  MOD_RES (1410)..(1410): Selenocysteine
  MOD_RES (1423)..(1423): Selenocysteine
  MOD_RES (1451)..(1451): Selenocysteine
  MOD_RES (1503)..(1503): Selenocysteine
  MOD_RES (1560)..(1560): Selenocysteine
MCGEDASNAMPVRREXNICLKSGWAAHPCHFXQVRDSSVYKVRLFQANXAQHVQGLLCPGYQWGNRVIFGKSSGPEFLQEVYXAVXYHNKSPDFYEEVKIKLPAKLXVNHHLLFXFYHISCQQKQGASVEXLLGYSWLPILLNERLQXGSYCLPVALEKLPPNYSMHSAEKVPLQNPPIKWAEGHKGVFNIEVQAVSSVHXQDNHLEKFFXLCHSLESQVXFPIRVLDQKISEMALEHELKLSIICLNSSRLEPLVLFLHLVLDKLFQLSVQPMVIAGQXANFSQFAFESVVAIANSLHNSKDLSKDQHGRNCLLASYVHYVFRLPEVQRDVPKSGAPXALLDPRSYHXYGRXSAAAVSSKLLQARVMSSSNPDLAGXHSAADEEVKNIMSSKIADRNCSRMSYYCSGSSDAPSSPAAPRPASKKHFHEELALQMVVSXGMVREXVFKYAWFFFELLVKSMAQHVHNMDKRDSFRRXRFSDRFMDDIXXIVNVVXSEIAALLVKPQKENEQAEKMNISLAFFLYDLLSLMDRGFVFNLIRHYCSQLSAKLSNLPXLISMRLEFLRILCSHEHYLNLNLFFMNADXAPXSPCPSISSQNSSSCSSFQDQKIASMFDLXSEYRQQHFLXGLLFXELAAALDAEGEGISKVQRKAVSAIHSLLSSHDLDPRCVKPEVKVKIAALYLPLVGIILDALPQLCDFXVADXRRYRXSGSDEEQEGAGAINQNVALAIAGNNFNLKXSGIVLSSLPYKQYNMLNADXXRNLMICFLWIMKNADQSLIRKWIADLPSXQLNRILDLLFICVLCFEYKGKQSSDKVSXQVLQKSRDVKARLEEALLRGEGARGEMMRRRAPGNDRFPGLNENLRWKKEQXHWRQANEKLDKXKAELDQEALISGNLAXEAHLIILDMQENIIQASSALDCKDSLLGGVLRVLVNSLNCDQSXXYLXHCFAXLRALIAKFGDLLFEEEVEQCFDLCHQVLHHCSSSMDVXRSQACAXLYLLMRFSFGAXSNFARVKMQVXMSLASLVGRAPDFNEEHLRRSLRXILAYSEEDXAMQMXPFPXQVEELLCNLNSILYDXVKMREFQEDPEMLMDLMYRIAKSYQASPDLRLXWLQNMAEKHXKKKCYXEAAMCLVHAAALVAEYLSMLEDHSYLPVGSVSFQNISSNVLEESVVSEDXLSPDEDGVCAGQYFXESGLVGLLEQAAELFSXGGLYEXVNEVYKLVIPILEAHREFRKLXLXHSKLQRAFDSIVNKDHKRMFGXYFRVGFFGSKFGDLDEQEFVYKEPAIXKLPEISHRLEAFYGQCFGAEFVEVIKDSXPVDKXKLDPNKAYIQIXFVEPYFDEYEMKDRVXYFEKNFNLRRFMYXXPFXLEGRPRGELHEQYRRNXVLXXMHAFPYIKXRISVIQKEEFVLXPIEVAIEDMKKKXLQLAVAINQEPPDAKMLQMVLQGSVGAXVNQGPLEVAQVFLAEIPADPKLYRHHNKLRLCFKEFIMRCGEAVEKNKRLIXADQREYQQELKKNYNKLKENLRPMIERKIPELYKPIFRVESQKRDSFHRSSFRKCEXQLSQGS

SEQ ID NO: 8423 - protein, 439 aa, Homo sapiens
  MOD_RES (36)..(36): Selenocysteine
  MOD_RES (46)..(46): Selenocysteine
  MOD_RES (56)..(56): Selenocysteine
  MOD_RES (115)..(115): Selenocysteine
  MOD_RES (174)..(174): Selenocysteine
  MOD_RES (184)..(184): Selenocysteine
  MOD_RES (188)..(188): Selenocysteine
  MOD_RES (213)..(213): Selenocysteine
  MOD_RES (274)..(274): Selenocysteine
  MOD_RES (280)..(280): Selenocysteine
  MOD_RES (312)..(312): Selenocysteine
  MOD_RES (323)..(324): Selenocysteine
  MOD_RES (330)..(330): Selenocysteine
  MOD_RES (390)..(390): Selenocysteine
  MOD_RES (420)..(420): Selenocysteine
  MOD_RES (423)..(423): Selenocysteine
MHSAEKVPLQNPPIKWAEGHKGVFNIEVQAVSSVHXQDNHLEKFFXLCHSLESQVXFPIRVLDQKISEMALEHELKLSIICLNSSRLEPLVLFLHLVLDKLFQLSVQPMVIAGQXANFSQFAFESVVAIANSLHNSKDLSKDQHGRNCLLASYVHYVFRLPEVQRDVPKSGAPXALLDPRSYHXYGRXSAAAVSSKLLQARVMSSSNPDLAGXHSAADEEVKNIMSSKIADRNCSRMSYYCSGSSDAPSSPAAPRPASKKHFHEELALQMVVSXGMVREXVFKYAWFFFELLVKSMAQHVHNMDKRDSFRRXRFSDRFMDDIXXIVNVVXSEIAALLVKPQKENEQAEKMNISLAFFLYDLLSLMDRGFVFNLIRHYCSQLSAKLSNLPXLISMRLEFLRILCSHEHYLNLNLFFMNADXAPXSPCPSISSQVIKELFN

SEQ ID NO: 8424 - protein, 66 aa, Homo sapiens
  MOD_RES (2)..(2): Selenocysteine
  MOD_RES (19)..(19): Selenocysteine
  MOD_RES (28)..(28): Selenocysteine
  MOD_RES (34)..(34): Selenocysteine
  MOD_RES (56)..(56): Selenocysteine
MXHLNSLDVQLAQELGDFXDDDLDVVFXPKECRXLQPSLPEEGVELDPHVRDCVQXYIREWLIVNR

SEQ ID NO: 8425 - protein, 107 aa, Homo sapiens
  MOD_RES (2)..(2): Selenocysteine
  MOD_RES (19)..(19): Selenocysteine
  MOD_RES (28)..(28): Selenocysteine
  MOD_RES (34)..(34): Selenocysteine
  MOD_RES (56)..(56): Selenocysteine
  MOD_RES (80)..(80): Selenocysteine
  MOD_RES (89)..(89): Selenocysteine
  MOD_RES (94)..(94): Selenocysteine
  MOD_RES (99)..(99): Selenocysteine
MXHLNSLDVQLAQELGDFXDDDLDVVFXPKECRXLQPSLPEEGVELDPHVRDCVQXYIREWLIVNRKNQGSPEICGFKKXGSRKDFHKXLPKQXFESEXLECSEPAA

SEQ ID NO: 8426 - protein, 502 aa, Homo sapiens
  MOD_RES (2)..(2): Selenocysteine
  MOD_RES (19)..(19): Selenocysteine
  MOD_RES (28)..(28): Selenocysteine
  MOD_RES (34)..(34): Selenocysteine
  MOD_RES (56)..(56): Selenocysteine
  MOD_RES (80)..(80): Selenocysteine
  MOD_RES (89)..(89): Selenocysteine
  MOD_RES (94)..(94): Selenocysteine
  MOD_RES (99)..(99): Selenocysteine
  MOD_RES (127)..(127): Selenocysteine
  MOD_RES (164)..(164): Selenocysteine
  MOD_RES (206)..(206): Selenocysteine
  MOD_RES (252)..(252): Selenocysteine
  MOD_RES (269)..(269): Selenocysteine
  MOD_RES (298)..(298): Selenocysteine
  MOD_RES (348)..(348): Selenocysteine
  MOD_RES (354)..(354): Selenocysteine
  MOD_RES (370)..(370): Selenocysteine
  MOD_RES (395)..(395): Selenocysteine
  MOD_RES (397)..(397): Selenocysteine
  MOD_RES (446)..(446): Selenocysteine
  MOD_RES (456)..(456): Selenocysteine
  MOD_RES (470)..(470): Selenocysteine
  MOD_RES (481)..(481): Selenocysteine
  MOD_RES (489)..(489): Selenocysteine
MXHLNSLDVQLAQELGDFXDDDLDVVFXPKECRXLQPSLPEEGVELDPHVRDCVQXYIREWLIVNRKNQGSPEICGFKKXGSRKDFHKXLPKQXFESEXLECSEPAAQAGPRHLNVLCDVSGKGPVXACDFDLRSLQPDKRLENLLQQVSAEDFEKQNEEARRXNRQAELFALYPSVDEEDAVEIRPVPECPKEHLGNRILVKLLXLKFEIEIEPLFASIALYDVKERKKISENFHCDLNSDQFKGFLRAHXPSVAASSQARSAVFSVXYPSSDIYLVVKIEKVLQQGEIGDCAEPYXVIKESDGGKSKEKIEKLKLQAESFCQRLGKYRMPFAWAPISLSSFFNVSXLEREVXDVDSVVGRSSVGERRXLAQSRRLSERALSLEENGVGSNFKXSXLSVSSFFKQEGDRLSDEDLFKFLADYKRSSSLQRRVKSIPGLLRLEISXAPEIINCCLXPEMLPVKPFPENRXRPHKEILEFPXREVYVPHXVYREVFQVSAVAH

SEQ ID NO: 8427 - protein, 1999 aa, Homo sapiens
  MOD_RES (2)..(2): Selenocysteine
  MOD_RES (19)..(19): Selenocysteine
  MOD_RES (28)..(28): Selenocysteine
  MOD_RES (34)..(34): Selenocysteine
  MOD_RES (56)..(56): Selenocysteine
  MOD_RES (80)..(80): Selenocysteine
  MOD_RES (89)..(89): Selenocysteine
  MOD_RES (94)..(94): Selenocysteine
  MOD_RES (99)..(99): Selenocysteine
  MOD_RES (127)..(127): Selenocysteine
  MOD_RES (164)..(164): Selenocysteine
  MOD_RES (206)..(206): Selenocysteine
  MOD_RES (252)..(252): Selenocysteine
  MOD_RES (269)..(269): Selenocysteine
  MOD_RES (298)..(298): Selenocysteine
  MOD_RES (348)..(348): Selenocysteine
  MOD_RES (354)..(354): Selenocysteine
  MOD_RES (370)..(370): Selenocysteine
  MOD_RES (395)..(395): Selenocysteine
  MOD_RES (397)..(397): Selenocysteine
  MOD_RES (446)..(446): Selenocysteine
  MOD_RES (456)..(456): Selenocysteine
  MOD_RES (470)..(470): Selenocysteine
  MOD_RES (481)..(481): Selenocysteine
  MOD_RES (489)..(489): Selenocysteine
  MOD_RES (515)..(515): Selenocysteine
  MOD_RES (548)..(548): Selenocysteine
  MOD_RES (551)..(551): Selenocysteine
  MOD_RES (572)..(572): Selenocysteine
  MOD_RES (580)..(580): Selenocysteine
  MOD_RES (596)..(596): Selenocysteine
  MOD_RES (613)..(613): Selenocysteine
  MOD_RES (666)..(666): Selenocysteine
  MOD_RES (676)..(676): Selenocysteine
  MOD_RES (686)..(686): Selenocysteine
  MOD_RES (745)..(745): Selenocysteine
  MOD_RES (804)..(804): Selenocysteine
  MOD_RES (814)..(814): Selenocysteine
  MOD_RES (818)..(818): Selenocysteine
  MOD_RES (843)..(843): Selenocysteine
  MOD_RES (872)..(872): Selenocysteine
  MOD_RES (878)..(878): Selenocysteine
  MOD_RES (910)..(910): Selenocysteine
  MOD_RES (921)..(922): Selenocysteine
  MOD_RES (928)..(928): Selenocysteine
  MOD_RES (988)..(988): Selenocysteine
  MOD_RES (1018)..(1018): Selenocysteine
  MOD_RES (1021)..(1021): Selenocysteine
  MOD_RES (1050)..(1050): Selenocysteine
  MOD_RES (1060)..(1060): Selenocysteine
  MOD_RES (1065)..(1065): Selenocysteine
  MOD_RES (1133)..(1133): Selenocysteine
  MOD_RES (1137)..(1137): Selenocysteine
  MOD_RES (1142)..(1142): Selenocysteine
  MOD_RES (1172)..(1172): Selenocysteine
  MOD_RES (1192)..(1193): Selenocysteine
  MOD_RES (1222)..(1222): Selenocysteine
  MOD_RES (1251)..(1251): Selenocysteine
  MOD_RES (1303)..(1303): Selenocysteine
  MOD_RES (1315)..(1315): Selenocysteine
  MOD_RES (1331)..(1331): Selenocysteine
  MOD_RES (1375)..(1376): Selenocysteine
  MOD_RES (1379)..(1379): Selenocysteine
  MOD_RES (1384)..(1384): Selenocysteine
  MOD_RES (1422)..(1422): Selenocysteine
  MOD_RES (1429)..(1429): Selenocysteine
  MOD_RES (1441)..(1441): Selenocysteine
  MOD_RES (1452)..(1452): Selenocysteine
  MOD_RES (1476)..(1476): Selenocysteine
  MOD_RES (1485)..(1485): Selenocysteine
  MOD_RES (1490)..(1490): Selenocysteine
  MOD_RES (1494)..(1494): Selenocysteine
  MOD_RES (1510)..(1510): Selenocysteine
  MOD_RES (1543)..(1543): Selenocysteine
  MOD_RES (1553)..(1553): Selenocysteine
  MOD_RES (1559)..(1559): Selenocysteine
  MOD_RES (1609)..(1609): Selenocysteine
  MOD_RES (1624)..(1624): Selenocysteine
  MOD_RES (1641)..(1641): Selenocysteine
  MOD_RES (1647)..(1647): Selenocysteine
  MOD_RES (1669)..(1669): Selenocysteine
  MOD_RES (1671)..(1671): Selenocysteine
  MOD_RES (1693)..(1693): Selenocysteine
  MOD_RES (1720)..(1720): Selenocysteine
  MOD_RES (1749)..(1749): Selenocysteine
  MOD_RES (1754)..(1754): Selenocysteine
  MOD_RES (1766)..(1766): Selenocysteine
  MOD_RES (1782)..(1782): Selenocysteine
  MOD_RES (1796)..(1797): Selenocysteine
  MOD_RES (1800)..(1800): Selenocysteine
  MOD_RES (1817)..(1817): Selenocysteine
  MOD_RES (1820)..(1821): Selenocysteine
  MOD_RES (1830)..(1830): Selenocysteine
  MOD_RES (1843)..(1843): Selenocysteine
  MOD_RES (1856)..(1856): Selenocysteine
  MOD_RES (1884)..(1884): Selenocysteine
  MOD_RES (1936)..(1936): Selenocysteine
  MOD_RES (1993)..(1993): Selenocysteine
MXHLNSLDVQLAQELGDFXDDDLDVVFXPKECRXLQPSLPEEGVELDPHVRDCVQXYIREWLIVNRKNQGSPEICGFKKXGSRKDFHKXLPKQXFESEXLECSEPAAQAGPRHLNVLCDVSGKGPVXACDFDLRSLQPDKRLENLLQQVSAEDFEKQNEEARRXNRQAELFALYPSVDEEDAVEIRPVPECPKEHLGNRILVKLLXLKFEIEIEPLFASIALYDVKERKKISENFHCDLNSDQFKGFLRAHXPSVAASSQARSAVFSVXYPSSDIYLVVKIEKVLQQGEIGDCAEPYXVIKESDGGKSKEKIEKLKLQAESFCQRLGKYRMPFAWAPISLSSFFNVSXLEREVXDVDSVVGRSSVGERRXLAQSRRLSERALSLEENGVGSNFKXSXLSVSSFFKQEGDRLSDEDLFKFLADYKRSSSLQRRVKSIPGLLRLEISXAPEIINCCLXPEMLPVKPFPENRXRPHKEILEFPXREVYVPHXVYRNLLYVYPQRLNFVNKLASARNIXIKIQFMCGEDASNAMPVIFGKSSGPEFLQEVYXAVXYHNKSPDFYEEVKIKLPAKLXVNHHLLFXFYHISCQQKQGASVEXLLGYSWLPILLNERLQXGSYCLPVALEKLPPNYSMHSAEKVPLQNPPIKWAEGHKGVFNIEVQAVSSVHXQDNHLEKFFXLCHSLESQVXFPIRVLDQKISEMALEHELKLSIICLNSSRLEPLVLFLHLVLDKLFQLSVQPMVIAGQXANFSQFAFESVVAIANSLHNSKDLSKDQHGRNCLLASYVHYVFRLPEVQRDVPKSGAPXALLDPRSYHXYGRXSAAAVSSKLLQARVMSSSNPDLAGXHSAADEEVKNIMSSKHFHEELALQMVVSXGMVREXVFKYAWFFFELLVKSMAQHVHNMDKRDSFRRXRFSDRFMDDIXXIVNVVXSEIAALLVKPQKENEQAEKMNISLAFFLYDLLSLMDRGFVFNLIRHYCSQLSAKLSNLPXLISMRLEFLRILCSHEHYLNLNLFFMNADXAPXSPCPSISSQNSSSCSSFQDQKIASMFDLXSEYRQQHFLXGLLFXELAAALDAEGEGISKVQRKAVSAIHSLLSSHDLDPRCVKPEVKVKIAALYLPLVGIILDALPQLCDFXVADXRRYRXSGSDEEQEGAGAINQNVALAIAGNNFNLKXSGIVLSSLPYKQYNMLNADXXRNLMICFLWIMKNADQSLIRKWIADLPSXQLNRILDLLFICVLCFEYKGKQSSDKVSXQVLQKSRDVKARLEEALLRGEGARGEMMRRRAPGNDRFPGLNENLRWKKEQXHWRQANEKLDKXKAELDQEALISGNLAXEAHLIILDMQENIIQASSALDCKDSLLGGVLRVLVNSLNCDQSXXYLXHCFAXLRALIAKFGDLLFEEEVEQCFDLCHQVLHHCSSSMDVXRSQACAXLYLLMRFSFGAXSNFARVKMQVXMSLASLVGRAPDFNEEHLRRSLRXILAYSEEDXAMQMXPFPXQVEELLCNLNSILYDXVKMREFQEDPEMLMDLMYRIAKSYQASPDLRLXWLQNMAEKHXKKKCYXEAAMCLVHAAALVAEYLSMLEDHSYLPVGSVSFQNISSNVLEESVVSEDXLSPDEDGVCAGQYFXESGLVGLLEQAAELFSXGGLYEXVNEVYKLVIPILEAHREFRKLXLXHSKLQRAFDSIVNKDHKRMFGXYFRVGFFGSKFGDLDEQEFVYKEPAIXKLPEISHRLEAFYGQCFGAEFVEVIKDSXPVDKXKLDPNKAYIQIXFVEPYFDEYEMKDRVXYFEKNFNLRRFMYXXPFXLEGRPRGELHEQYRRNXVLXXMHAFPYIKXRISVIQKEEFVLXPIEVAIEDMKKKXLQLAVAINQEPPDAKMLQMVLQGSVGAXVNQGPLEVAQVFLAEIPADPKLYRHHNKLRLCFKEFIMRCGEAVEKNKRLIXADQREYQQELKKNYNKLKENLRPMIERKIPELYKPIFRVESQKRDSFHRSSFRKCEXQLSQGS

SEQ ID NO: 8428 - protein, 2031 aa, Homo sapiens
  MOD_RES (2)..(2): Selenocysteine
  MOD_RES (19)..(19): Selenocysteine
  MOD_RES (28)..(28): Selenocysteine
  MOD_RES (34)..(34): Selenocysteine
  MOD_RES (56)..(56): Selenocysteine
  MOD_RES (80)..(80): Selenocysteine
  MOD_RES (89)..(89): Selenocysteine
  MOD_RES (94)..(94): Selenocysteine
  MOD_RES (99)..(99): Selenocysteine
  MOD_RES (127)..(127): Selenocysteine
  MOD_RES (164)..(164): Selenocysteine
  MOD_RES (206)..(206): Selenocysteine
  MOD_RES (252)..(252): Selenocysteine
  MOD_RES (269)..(269): Selenocysteine
  MOD_RES (298)..(298): Selenocysteine
  MOD_RES (348)..(348): Selenocysteine
  MOD_RES (354)..(354): Selenocysteine
  MOD_RES (370)..(370): Selenocysteine
  MOD_RES (395)..(395): Selenocysteine
  MOD_RES (397)..(397): Selenocysteine
  MOD_RES (446)..(446): Selenocysteine
  MOD_RES (456)..(456): Selenocysteine
  MOD_RES (470)..(470): Selenocysteine
  MOD_RES (481)..(481): Selenocysteine
  MOD_RES (489)..(489): Selenocysteine
  MOD_RES (515)..(515): Selenocysteine
  MOD_RES (548)..(548): Selenocysteine
  MOD_RES (551)..(551): Selenocysteine
  MOD_RES (572)..(572): Selenocysteine
  MOD_RES (580)..(580): Selenocysteine
  MOD_RES (596)..(596): Selenocysteine
  MOD_RES (613)..(613): Selenocysteine
  MOD_RES (666)..(666): Selenocysteine
  MOD_RES (676)..(676): Selenocysteine
  MOD_RES (686)..(686): Selenocysteine
  MOD_RES (745)..(745): Selenocysteine
  MOD_RES (804)..(804): Selenocysteine
  MOD_RES (814)..(814): Selenocysteine
  MOD_RES (818)..(818): Selenocysteine
  MOD_RES (843)..(843): Selenocysteine
  MOD_RES (904)..(904): Selenocysteine
  MOD_RES (910)..(910): Selenocysteine
  MOD_RES (942)..(942): Selenocysteine
  MOD_RES (953)..(954): Selenocysteine
  MOD_RES (960)..(960): Selenocysteine
  MOD_RES (1020)..(1020): Selenocysteine
  MOD_RES (1050)..(1050): Selenocysteine
  MOD_RES (1053)..(1053): Selenocysteine
  MOD_RES (1082)..(1082): Selenocysteine
  MOD_RES (1092)..(1092): Selenocysteine
  MOD_RES (1097)..(1097): Selenocysteine
  MOD_RES (1165)..(1165): Selenocysteine
  MOD_RES (1169)..(1169): Selenocysteine
  MOD_RES (1174)..(1174): Selenocysteine
  MOD_RES (1204)..(1204): Selenocysteine
  MOD_RES (1224)..(1225): Selenocysteine
  MOD_RES (1254)..(1254): Selenocysteine
  MOD_RES (1283)..(1283): Selenocysteine
  MOD_RES (1335)..(1335): Selenocysteine
  MOD_RES (1347)..(1347): Selenocysteine
  MOD_RES (1363)..(1363): Selenocysteine
  MOD_RES (1407)..(1408): Selenocysteine
  MOD_RES (1411)..(1411): Selenocysteine
  MOD_RES (1416)..(1416): Selenocysteine
  MOD_RES (1454)..(1454): Selenocysteine
  MOD_RES (1461)..(1461): Selenocysteine
  MOD_RES (1473)..(1473): Selenocysteine
  MOD_RES (1484)..(1484): Selenocysteine
  MOD_RES (1508)..(1508): Selenocysteine
  MOD_RES (1517)..(1517): Selenocysteine
  MOD_RES (1522)..(1522): Selenocysteine
  MOD_RES (1526)..(1526): Selenocysteine
  MOD_RES (1542)..(1542): Selenocysteine
  MOD_RES (1575)..(1575): Selenocysteine
  MOD_RES (1585)..(1585): Selenocysteine
  MOD_RES (1591)..(1591): Selenocysteine
  MOD_RES (1641)..(1641): Selenocysteine
  MOD_RES (1656)..(1656): Selenocysteine
  MOD_RES (1673)..(1673): Selenocysteine
  MOD_RES (1679)..(1679): Selenocysteine
  MOD_RES (1701)..(1701): Selenocysteine
  MOD_RES (1703)..(1703): Selenocysteine
  MOD_RES (1725)..(1725): Selenocysteine
  MOD_RES (1752)..(1752): Selenocysteine
  MOD_RES (1781)..(1781): Selenocysteine
  MOD_RES (1786)..(1786): Selenocysteine
  MOD_RES (1798)..(1798): Selenocysteine
  MOD_RES (1814)..(1814): Selenocysteine
  MOD_RES (1828)..(1829): Selenocysteine
  MOD_RES (1832)..(1832): Selenocysteine
  MOD_RES (1849)..(1849): Selenocysteine
  MOD_RES (1852)..(1853): Selenocysteine
  MOD_RES (1862)..(1862): Selenocysteine
  MOD_RES (1875)..(1875): Selenocysteine
  MOD_RES (1888)..(1888): Selenocysteine
  MOD_RES (1916)..(1916): Selenocysteine
  MOD_RES (1968)..(1968): Selenocysteine
  MOD_RES (2025)..(2025): Selenocysteine
MXHLNSLDVQLAQELGDFXDDDLDVVFXPKECRXLQPSLPEEGVELDPHVRDCVQXYIREWLIVNRKNQGSPEICGFKKXGSRKDFHKXLPKQXFESEXLECSEPAAQAGPRHLNVLCDVSGKGPVXACDFDLRSLQPDKRLENLLQQVSAEDFEKQNEEARRXNRQAELFALYPSVDEEDAVEIRPVPECPKEHLGNRILVKLLXLKFEIEIEPLFASIALYDVKERKKISENFHCDLNSDQFKGFLRAHXPSVAASSQARSAVFSVXYPSSDIYLVVKIEKVLQQGEIGDCAEPYXVIKESDGGKSKEKIEKLKLQAESFCQRLGKYRMPFAWAPISLSSFFNVSXLEREVXDVDSVVGRSSVGERRXLAQSRRLSERALSLEENGVGSNFKXSXLSVSSFFKQEGDRLSDEDLFKFLADYKRSSSLQRRVKSIPGLLRLEISXAPEIINCCLXPEMLPVKPFPENRXRPHKEILEFPXREVYVPHXVYRNLLYVYPQRLNFVNKLASARNIXIKIQFMCGEDASNAMPVIFGKSSGPEFLQEVYXAVXYHNKSPDFYEEVKIKLPAKLXVNHHLLFXFYHISCQQKQGASVEXLLGYSWLPILLNERLQXGSYCLPVALEKLPPNYSMHSAEKVPLQNPPIKWAEGHKGVFNIEVQAVSSVHXQDNHLEKFFXLCHSLESQVXFPIRVLDQKISEMALEHELKLSIICLNSSRLEPLVLFLHLVLDKLFQLSVQPMVIAGQXANFSQFAFESVVAIANSLHNSKDLSKDQHGRNCLLASYVHYVFRLPEVQRDVPKSGAPXALLDPRSYHXYGRXSAAAVSSKLLQARVMSSSNPDLAGXHSAADEEVKNIMSSKIADRNCSRMSYYCSGSSDAPSSPAAPRPASKKHFHEELALQMVVSXGMVREXVFKYAWFFFELLVKSMAQHVHNMDKRDSFRRXRFSDRFMDDIXXIVNVVXSEIAALLVKPQKENEQAEKMNISLAFFLYDLLSLMDRGFVFNLIRHYCSQLSAKLSNLPXLISMRLEFLRILCSHEHYLNLNLFFMNADXAPXSPCPSISSQNSSSCSSFQDQKIASMFDLXSEYRQQHFLXGLLFXELAAALDAEGEGISKVQRKAVSAIHSLLSSHDLDPRCVKPEVKVKIAALYLPLVGIILDALPQLCDFXVADXRRYRXSGSDEEQEGAGAINQNVALAIAGNNFNLKXSGIVLSSLPYKQYNMLNADXXRNLMICFLWIMKNADQSLIRKWIADLPSXQLNRILDLLFICVLCFEYKGKQSSDKVSXQVLQKSRDVKARLEEALLRGEGARGEMMRRRAPGNDRFPGLNENLRWKKEQXHWRQANEKLDKXKAELDQEALISGNLAXEAHLIILDMQENIIQASSALDCKDSLLGGVLRVLVNSLNCDQSXXYLXHCFAXLRALIAKFGDLLFEEEVEQCFDLCHQVLHHCSSSMDVXRSQACAXLYLLMRFSFGAXSNFARVKMQVXMSLASLVGRAPDFNEEHLRRSLRXILAYSEEDXAMQMXPFPXQVEELLCNLNSILYDXVKMREFQEDPEMLMDLMYRIAKSYQASPDLRLXWLQNMAEKHXKKKCYXEAAMCLVHAAALVAEYLSMLEDHSYLPVGSVSFQNISSNVLEESVVSEDXLSPDEDGVCAGQYFXESGLVGLLEQAAELFSXGGLYEXVNEVYKLVIPILEAHREFRKLXLXHSKLQRAFDSIVNKDHKRMFGXYFRVGFFGSKFGDLDEQEFVYKEPAIXKLPEISHRLEAFYGQCFGAEFVEVIKDSXPVDKXKLDPNKAYIQIXFVEPYFDEYEMKDRVXYFEKNFNLRRFMYXXPFXLEGRPRGELHEQYRRNXVLXXMHAFPYIKXRISVIQKEEFVLXPIEVAIEDMKKKXLQLAVAINQEPPDAKMLQMVLQGSVGAXVNQGPLEVAQVFLAEIPADPKLYRHHNKLRLCFKEFIMRCGEAVEKNKRLIXADQREYQQELKKNYNKLKENLRPMIERKIPELYKPIFRVESQKRDSFHRSSFRKCEXQLSQGS

SEQ ID NO: 8429 - protein, 250 aa, Homo sapiens
  MOD_RES (10)..(10): Selenocysteine
  MOD_RES (35)..(35): Selenocysteine
  MOD_RES (72)..(72): Selenocysteine
  MOD_RES (79)..(79): Selenocysteine
  MOD_RES (87)..(87): Selenocysteine
  MOD_RES (141)..(141): Selenocysteine
  MOD_RES (146)..(146): Selenocysteine
  MOD_RES (150)..(150): Selenocysteine
  MOD_RES (155)..(155): Selenocysteine
  MOD_RES (190)..(190): Selenocysteine
  MOD_RES (197)..(197): Selenocysteine
  MOD_RES (209)..(209): Selenocysteine
  MOD_RES (238)..(238): Selenocysteine
ADSRGSLISXDSGNSLPERNSEKSNSLDKHQQSSXLGNSVVRCDKLDQSEIKSLLMCFLYILKSMSDDALFXYWNKASXSELMDFFXISEVCLHQFQYMGKRYIASVRKISSVLGISVDNGYGHSDADVLHQSLLEANIAXEVCLXALDXLSLFXLAFKNQLLADHGHNPLMKKVFDVYLCFLQKHQSEXALKNVFXALRSLIYKFPSXFYEGRADMCAALCYEILKCCNSKLSSIRXEASQLLYFLMRN

SEQ ID NO: 8430 - protein, 1393 aa, Homo sapiens
  MOD_RES (4)..(5): Selenocysteine
  MOD_RES (15)..(15): Selenocysteine
  MOD_RES (37)..(37): Selenocysteine
  MOD_RES (42)..(42): Selenocysteine
  MOD_RES (74)..(74): Selenocysteine
  MOD_RES (94)..(94): Selenocysteine
  MOD_RES (107)..(107): Selenocysteine
  MOD_RES (122)..(122): Selenocysteine
  MOD_RES (127)..(127): Selenocysteine
  MOD_RES (187)..(187): Selenocysteine
  MOD_RES (204)..(204): Selenocysteine
  MOD_RES (285)..(285): Selenocysteine
  MOD_RES (402)..(403): Selenocysteine
  MOD_RES (411)..(411): Selenocysteine
  MOD_RES (442)..(443): Selenocysteine
  MOD_RES (478)..(478): Selenocysteine
  MOD_RES (499)..(499): Selenocysteine
  MOD_RES (542)..(542): Selenocysteine
  MOD_RES (599)..(599): Selenocysteine
  MOD_RES (618)..(618): Selenocysteine
  MOD_RES (623)..(623): Selenocysteine
  MOD_RES (627)..(627): Selenocysteine
  MOD_RES (630)..(630): Selenocysteine
  MOD_RES (644)..(644): Selenocysteine
  MOD_RES (648)..(648): Selenocysteine
  MOD_RES (651)..(651): Selenocysteine
  MOD_RES (705)..(705): Selenocysteine
  MOD_RES (731)..(731): Selenocysteine
  MOD_RES (742)..(742): Selenocysteine
  MOD_RES (756)..(756): Selenocysteine
  MOD_RES (764)..(764): Selenocysteine
  MOD_RES (781)..(781): Selenocysteine
  MOD_RES (826)..(826): Selenocysteine
  MOD_RES (831)..(831): Selenocysteine
  MOD_RES (834)..(834): Selenocysteine
  MOD_RES (849)..(849): Selenocysteine
  MOD_RES (881)..(881): Selenocysteine
  MOD_RES (891)..(891): Selenocysteine
  MOD_RES (894)..(894): Selenocysteine
  MOD_RES (903)..(903): Selenocysteine
  MOD_RES (942)..(942): Selenocysteine
  MOD_RES (948)..(948): Selenocysteine
  MOD_RES (952)..(953): Selenocysteine
  MOD_RES (963)..(963): Selenocysteine
  MOD_RES (1010)..(1010): Selenocysteine
  MOD_RES (1020)..(1020): Selenocysteine
  MOD_RES (1046)..(1046): Selenocysteine
  MOD_RES (1071)..(1071): Selenocysteine
  MOD_RES (1116)..(1116): Selenocysteine
  MOD_RES (1135)..(1135): Selenocysteine
  MOD_RES (1175)..(1175): Selenocysteine
  MOD_RES (1206)..(1206): Selenocysteine
  MOD_RES (1222)..(1222): Selenocysteine
  MOD_RES (1228)..(1228): Selenocysteine
  MOD_RES (1249)..(1250): Selenocysteine
  MOD_RES (1252)..(1252): Selenocysteine
  MOD_RES (1270)..(1270): Selenocysteine
  MOD_RES (1295)..(1295): Selenocysteine
  MOD_RES (1332)..(1332): Selenocysteine
  MOD_RES (1339)..(1339): Selenocysteine
  MOD_RES (1347)..(1347): Selenocysteine
  MOD_RES (1368)..(1368): Selenocysteine
MGCXXSVILFKGIRXVFERNCAYMCKQQGENNALEYXAYNWXKEDSELLISSWLAKPKLIEPLDYENVIVQKKXQILNDCLREMLLFPYDDFQXAILRRQGRYICSXVPAKAEEEAQSLFVXECIKXYNSDWHLVNYKYEDYSGEFRQLPNKVVKLDKLPVHVYEVDEEVDKDEDAASLGSQKGGIXKHGWLYKGNMNSAISVXMRSFKRRFFHLIQLGDGSYNLNFYKDEKISKEPKGSIFLDSCMGVVQNNKVRRFAFELKMQDKSSYLLAADSEVEMEEWIXILNKILQLNFEAAMQEKRNGDSHEDDEQSKLEGSGSGLDSYLPELAKSAREAEIKLKSESRVKLFYLDPDAQKLDFSSAEPEVKSFEEKFGKRILVKCNDLSFNLQCCVAENEEGPXXNVEPFFVXLSLFDIKYNRKISADFHVDLNHFSVRQMLAXXSPALMNGSGQSPSVLKGILHEAAMQYPKQGIFSVXCPHPDIFLVARIEKVLQGSIXHCAEPYMKSSDSSKVAQKVLKNAKQACQRLGQYRMPFAWAARXLFKDASGNLDKNARFSAIYRQDSNKLSNDDMLKLLADFRKPEKMAKLPVILGNLDIXIDNVSSDFPNYVNSSYIPXKQFEXCSKXPIXFEVEEFVPCIPKHXQPYXIYXNHLYVYPKYLKYDSQKSFAKARNIAICIEFKDSDEEDSQPLKCIYGRPGGPVFXRSAFAAVLHHHQNPEFYDEIKIELPXQLHEKHHLLLXFFHVSCDNSSKGSXKKRDVVEXQVGYSWLPLLKDGRVVXSEQHIPVSANLPSGYLGYQELGMGRHYGPEIKWVDGGKPLLKISXHLVSXVYXQDQHLHNFFQYCQKXESGAQALGNELVKYLKSLHAMEGHVMIAFLPXILNQLFRVLXRAXQEEVAVNVXRVIIHVVAQCHEEGLESHLRSYVKYAYKAEPYVASEYKXVHEELXKSMXXILKPSADFLXSNKLLKYSWFFFDVLIKSMAQHLIENSKVKLLRNQRFPASYHHAVEXVVNMLMPHIXQKFRDNPEASKNANHSLAVFIKRCFXFMDRGFVFKQINNYISCFAPGDPKXLFEYKFEFLRVVCNHEHYIPLNLPMPFGKGRIQRYQDLQLDYSLXDEFCRNHFLVGLLLREVGXALQEFREVRLIAISVLKNLLIKHSFDDRYASRSHQARIAXLYLPLFGLLIENVQRINVRDVSPFPVNAGMXVKDESLALPAVNPLVXPQKGSXLDNSLHKDLLGAISGIASPYXXSXPNINSVRNADSRGSLISXDSGNSLPERNSEKSNSLDKHQQSSXLGNSVVRCDKLDQSEIKSLLMCFLYILKSMSDDALFXYWNKASXSELMDFFXISEVCLHQFQYMGKRYIASLXKCVALLLPAWNRNDACQIAAAGQPG

SEQ ID NO: 8431 - protein, 2081 aa, Homo sapiens
  MOD_RES (4)..(5): Selenocysteine
  MOD_RES (15)..(15): Selenocysteine
  MOD_RES (37)..(37): Selenocysteine
  MOD_RES (42)..(42): Selenocysteine
  MOD_RES (74)..(74): Selenocysteine
  MOD_RES (94)..(94): Selenocysteine
  MOD_RES (107)..(107): Selenocysteine
  MOD_RES (122)..(122): Selenocysteine
  MOD_RES (127)..(127): Selenocysteine
  MOD_RES (187)..(187): Selenocysteine
  MOD_RES (204)..(204): Selenocysteine
  MOD_RES (285)..(285): Selenocysteine
  MOD_RES (402)..(403): Selenocysteine
  MOD_RES (411)..(411): Selenocysteine
  MOD_RES (442)..(443): Selenocysteine
  MOD_RES (478)..(478): Selenocysteine
  MOD_RES (499)..(499): Selenocysteine
  MOD_RES (542)..(542): Selenocysteine
  MOD_RES (599)..(599): Selenocysteine
  MOD_RES (618)..(618): Selenocysteine
  MOD_RES (623)..(623): Selenocysteine
  MOD_RES (627)..(627): Selenocysteine
  MOD_RES (630)..(630): Selenocysteine
  MOD_RES (644)..(644): Selenocysteine
  MOD_RES (648)..(648): Selenocysteine
  MOD_RES (651)..(651): Selenocysteine
  MOD_RES (705)..(705): Selenocysteine
  MOD_RES (731)..(731): Selenocysteine
  MOD_RES (742)..(742): Selenocysteine
  MOD_RES (756)..(756): Selenocysteine
  MOD_RES (764)..(764): Selenocysteine
  MOD_RES (781)..(781): Selenocysteine
  MOD_RES (826)..(826): Selenocysteine
  MOD_RES (831)..(831): Selenocysteine
  MOD_RES (834)..(834): Selenocysteine
  MOD_RES (849)..(849): Selenocysteine
  MOD_RES (881)..(881): Selenocysteine
  MOD_RES (891)..(891): Selenocysteine
  MOD_RES (894)..(894): Selenocysteine
  MOD_RES (903)..(903): Selenocysteine
  MOD_RES (942)..(942): Selenocysteine
  MOD_RES (948)..(948): Selenocysteine
  MOD_RES (952)..(953): Selenocysteine
  MOD_RES (963)..(963): Selenocysteine
  MOD_RES (1010)..(1010): Selenocysteine
  MOD_RES (1020)..(1020): Selenocysteine
  MOD_RES (1046)..(1046): Selenocysteine
  MOD_RES (1071)..(1071): Selenocysteine
  MOD_RES (1116)..(1116): Selenocysteine
  MOD_RES (1135)..(1135): Selenocysteine
  MOD_RES (1175)..(1175): Selenocysteine
  MOD_RES (1206)..(1206): Selenocysteine
  MOD_RES (1222)..(1222): Selenocysteine
  MOD_RES (1228)..(1228): Selenocysteine
  MOD_RES (1249)..(1250): Selenocysteine
  MOD_RES (1252)..(1252): Selenocysteine
  MOD_RES (1270)..(1270): Selenocysteine
  MOD_RES (1295)..(1295): Selenocysteine
  MOD_RES (1332)..(1332): Selenocysteine
  MOD_RES (1339)..(1339): Selenocysteine
  MOD_RES (1347)..(1347): Selenocysteine
  MOD_RES (1367)..(1367): Selenocysteine
  MOD_RES (1385)..(1385): Selenocysteine
  MOD_RES (1409)..(1409): Selenocysteine
  MOD_RES (1414)..(1414): Selenocysteine
  MOD_RES (1418)..(1418): Selenocysteine
  MOD_RES (1423)..(1423): Selenocysteine
  MOD_RES (1458)..(1458): Selenocysteine
  MOD_RES (1465)..(1465): Selenocysteine
  MOD_RES (1477)..(1477): Selenocysteine
  MOD_RES (1506)..(1506): Selenocysteine
  MOD_RES (1523)..(1523): Selenocysteine
  MOD_RES (1531)..(1531): Selenocysteine
  MOD_RES (1552)..(1552): Selenocysteine
  MOD_RES (1574)..(1574): Selenocysteine
  MOD_RES (1584)..(1584): Selenocysteine
  MOD_RES (1589)..(1589): Selenocysteine
  MOD_RES (1594)..(1594): Selenocysteine
  MOD_RES (1621)..(1621): Selenocysteine
  MOD_RES (1627)..(1627): Selenocysteine
  MOD_RES (1653)..(1653): Selenocysteine
  MOD_RES (1661)..(1661): Selenocysteine
  MOD_RES (1671)..(1671): Selenocysteine
  MOD_RES (1677)..(1677): Selenocysteine
  MOD_RES (1748)..(1748): Selenocysteine
  MOD_RES (1757)..(1757): Selenocysteine
  MOD_RES (1769)..(1769): Selenocysteine
  MOD_RES (1797)..(1797): Selenocysteine
  MOD_RES (1843)..(1843): Selenocysteine
  MOD_RES (1859)..(1859): Selenocysteine
  MOD_RES (1877)..(1877): Selenocysteine
  MOD_RES (1879)..(1879): Selenocysteine
  MOD_RES (1894)..(1894): Selenocysteine
  MOD_RES (1897)..(1897): Selenocysteine
  MOD_RES (1917)..(1917): Selenocysteine
  MOD_RES (1977)..(1977): Selenocysteine
  MOD_RES (1979)..(1979): Selenocysteine
  MOD_RES (2049)..(2049): Selenocysteine
  MOD_RES (2065)..(2065): Selenocysteine
  MOD_RES (2067)..(2067): Selenocysteine
  MOD_RES (2069)..(2069): Selenocysteine
  MOD_RES (2075)..(2075): Selenocysteine
MGCXXSVILFKGIRXVFERNCAYMCKQQGENNALEYXAYNWXKEDSELLISSWLAKPKLIEPLDYENVIVQKKXQILNDCLREMLLFPYDDFQXAILRRQGRYICSXVPAKAEEEAQSLFVXECIKXYNSDWHLVNYKYEDYSGEFRQLPNKVVKLDKLPVHVYEVDEEVDKDEDAASLGSQKGGIXKHGWLYKGNMNSAISVXMRSFKRRFFHLIQLGDGSYNLNFYKDEKISKEPKGSIFLDSCMGVVQNNKVRRFAFELKMQDKSSYLLAADSEVEMEEWIXILNKILQLNFEAAMQEKRNGDSHEDDEQSKLEGSGSGLDSYLPELAKSAREAEIKLKSESRVKLFYLDPDAQKLDFSSAEPEVKSFEEKFGKRILVKCNDLSFNLQCCVAENEEGPXXNVEPFFVXLSLFDIKYNRKISADFHVDLNHFSVRQMLAXXSPALMNGSGQSPSVLKGILHEAAMQYPKQGIFSVXCPHPDIFLVARIEKVLQGSIXHCAEPYMKSSDSSKVAQKVLKNAKQACQRLGQYRMPFAWAARXLFKDASGNLDKNARFSAIYRQDSNKLSNDDMLKLLADFRKPEKMAKLPVILGNLDIXIDNVSSDFPNYVNSSYIPXKQFEXCSKXPIXFEVEEFVPCIPKHXQPYXIYXNHLYVYPKYLKYDSQKSFAKARNIAICIEFKDSDEEDSQPLKCIYGRPGGPVFXRSAFAAVLHHHQNPEFYDEIKIELPXQLHEKHHLLLXFFHVSCDNSSKGSXKKRDVVEXQVGYSWLPLLKDGRVVXSEQHIPVSANLPSGYLGYQELGMGRHYGPEIKWVDGGKPLLKISXHLVSXVYXQDQHLHNFFQYCQKXESGAQALGNELVKYLKSLHAMEGHVMIAFLPXILNQLFRVLXRAXQEEVAVNVXRVIIHVVAQCHEEGLESHLRSYVKYAYKAEPYVASEYKXVHEELXKSMXXILKPSADFLXSNKLLKYSWFFFDVLIKSMAQHLIENSKVKLLRNQRFPASYHHAVEXVVNMLMPHIXQKFRDNPEASKNANHSLAVFIKRCFXFMDRGFVFKQINNYISCFAPGDPKXLFEYKFEFLRVVCNHEHYIPLNLPMPFGKGRIQRYQDLQLDYSLXDEFCRNHFLVGLLLREVGXALQEFREVRLIAISVLKNLLIKHSFDDRYASRSHQARIAXLYLPLFGLLIENVQRINVRDVSPFPVNAGMXVKDESLALPAVNPLVXPQKGSXLDNSLHKDLLGAISGIASPYXXSXPNINSVRNADSRGSLISXDSGNSLPERNSEKSNSLDKHQQSSXLGNSVVRCDKLDQSEIKSLLMCFLYILKSMSDDALFXYWNKASXSELMDFFXISEVCLHQFQYMGKRYIARXGMMHARLQQLGSLDNSLXFNHSYGHSDADVLHQSLLEANIAXEVCLXALDXLSLFXLAFKNQLLADHGHNPLMKKVFDVYLCFLQKHQSEXALKNVFXALRSLIYKFPSXFYEGRADMCAALCYEILKCCNSKLSSIRXEASQLLYFLMRNNFDYXGKKSFVRXHLQVIISVSQLIADVVGIGGXRFQQSLSIINNCANSDRLIKHXSFSSDVKDLXKRIRXVLMAXAQMKEHENDPEMLVDLQYSLAKSYASXPELRKXWLDSMARIHVKNGDLSEAAMCYVHVXALVAEYLXRKGVFRQGCXAFRVIXPNIDEEASMMEDVGMQDVHFNEDVLMELLEQCADGLWKAERYELIADIYKLIIPIYEKRRDFERLAHLYDXLHRAYSKVXEVMHSGRRLLGXYFRVAFFGQGFFEDEDGKEYIYKEPKLXPLSEISQRLLKLYSDKFGSENVKMIQDSGKVNPKDLDSKYAYIQVXHVIPFFDEKELQERKXEFERSHNIRRFMFEMPFXQXGKRQGGVEEQCKRRXILXAIHCFPYVKKRIPVMYQHHXDLNPIEVAIDEMSKKVAELRQLCSSAEVDMIKLQLKLQGSVSVQVNAGPLAYARAFLDDXNXKRYPDNKVKLLKEVFRQFVEACGQALAVNERLIKEDQLEYQEEMKANYREMAKELSEIMHEQICPLEEKXSVLPNSLHIFNAISGXPXSXMVHGMXSSSSVV

SEQ ID NO: 8432 - protein, 424 aa, Homo sapiens
  MOD_RES (17)..(17): Selenocysteine
  MOD_RES (41)..(41): Selenocysteine
  MOD_RES (46)..(46): Selenocysteine
  MOD_RES (50)..(50): Selenocysteine
  MOD_RES (55)..(55): Selenocysteine
  MOD_RES (90)..(90): Selenocysteine
  MOD_RES (97)..(97): Selenocysteine
  MOD_RES (109)..(109): Selenocysteine
  MOD_RES (138)..(138): Selenocysteine
  MOD_RES (155)..(155): Selenocysteine
  MOD_RES (163)..(163): Selenocysteine
  MOD_RES (184)..(184): Selenocysteine
  MOD_RES (206)..(206): Selenocysteine
  MOD_RES (216)..(216): Selenocysteine
  MOD_RES (221)..(221): Selenocysteine
  MOD_RES (226)..(226): Selenocysteine
  MOD_RES (253)..(253): Selenocysteine
  MOD_RES (259)..(259): Selenocysteine
  MOD_RES (285)..(285): Selenocysteine
  MOD_RES (293)..(293): Selenocysteine
  MOD_RES (303)..(303): Selenocysteine
  MOD_RES (309)..(309): Selenocysteine
  MOD_RES (380)..(380): Selenocysteine
  MOD_RES (389)..(389): Selenocysteine
  MOD_RES (401)..(401): Selenocysteine
  MOD_RES (419)..(419): Selenocysteine
MMHARLQQLGSLDNSLXFNHSYGHSDADVLHQSLLEANIAXEVCLXALDXLSLFXLAFKNQLLADHGHNPLMKKVFDVYLCFLQKHQSEXALKNVFXALRSLIYKFPSXFYEGRADMCAALCYEILKCCNSKLSSIRXEASQLLYFLMRNNFDYXGKKSFVRXHLQVIISVSQLIADVVGIGGXRFQQSLSIINNCANSDRLIKHXSFSSDVKDLXKRIRXVLMAXAQMKEHENDPEMLVDLQYSLAKSYASXPELRKXWLDSMARIHVKNGDLSEAAMCYVHVXALVAEYLXRKGVFRQGCXAFRVIXPNIDEEASMMEDVGMQDVHFNEDVLMELLEQCADGLWKAERYELIADIYKLIIPIYEKRRDFERLAHLYDXLHRAYSKVXEVMHSGRRLLGXYFRVAFFGQVSLLSILQXVLSPL

SEQ ID NO: 8433 - protein, 705 aa, Homo sapiens
  MOD_RES (8)..(8): Selenocysteine
  MOD_RES (62)..(62): Selenocysteine
  MOD_RES (82)..(82): Selenocysteine
  MOD_RES (95)..(95): Selenocysteine
  MOD_RES (110)..(110): Selenocysteine
  MOD_RES (115)..(115): Selenocysteine
  MOD_RES (175)..(175): Selenocysteine
  MOD_RES (192)..(192): Selenocysteine
  MOD_RES (273)..(273): Selenocysteine
  MOD_RES (390)..(391): Selenocysteine
  MOD_RES (399)..(399): Selenocysteine
  MOD_RES (430)..(431): Selenocysteine
  MOD_RES (466)..(466): Selenocysteine
  MOD_RES (487)..(487): Selenocysteine
  MOD_RES (530)..(530): Selenocysteine
  MOD_RES (587)..(587): Selenocysteine
  MOD_RES (606)..(606): Selenocysteine
  MOD_RES (611)..(611): Selenocysteine
  MOD_RES (615)..(615): Selenocysteine
  MOD_RES (618)..(618): Selenocysteine
  MOD_RES (632)..(632): Selenocysteine
  MOD_RES (636)..(636): Selenocysteine
  MOD_RES (639)..(639): Selenocysteine
  MOD_RES (682)..(682): Selenocysteine
  MOD_RES (697)..(697): Selenocysteine
MQADKCRXSSRSVKKELVIESPLQYKDAAQGEVEAESPGPVPAKPKLIEPLDYENVIVQKKXQILNDCLREMLLFPYDDFQXAILRRQGRYICSXVPAKAEEEAQSLFVXECIKXYNSDWHLVNYKYEDYSGEFRQLPNKVVKLDKLPVHVYEVDEEVDKDEDAASLGSQKGGIXKHGWLYKGNMNSAISVXMRSFKRRFFHLIQLGDGSYNLNFYKDEKISKEPKGSIFLDSCMGVVQNNKVRRFAFELKMQDKSSYLLAADSEVEMEEWIXILNKILQLNFEAAMQEKRNGDSHEDDEQSKLEGSGSGLDSYLPELAKSAREAEIKLKSESRVKLFYLDPDAQKLDFSSAEPEVKSFEEKFGKRILVKCNDLSFNLQCCVAENEEGPXXNVEPFFVXLSLFDIKYNRKISADFHVDLNHFSVRQMLAXXSPALMNGSGQSPSVLKGILHEAAMQYPKQGIFSVXCPHPDIFLVARIEKVLQGSIXHCAEPYMKSSDSSKVAQKVLKNAKQACQRLGQYRMPFAWAARXLFKDASGNLDKNARFSAIYRQDSNKLSNDDMLKLLADFRKPEKMAKLPVILGNLDIXIDNVSSDFPNYVNSSYIPXKQFEXCSKXPIXFEVEEFVPCIPKHXQPYXIYXNHLYVYPKYLKYDSQKSFAKARNIAICIEFKDSDEEDSQPLKXWWASFHKKRLCCSFXPSPKPRIL

SEQ ID NO: 8434 - protein, 1253 aa, Homo sapiens
  MOD_RES (8)..(8): Selenocysteine
  MOD_RES (62)..(62): Selenocysteine
  MOD_RES (82)..(82): Selenocysteine
  MOD_RES (95)..(95): Selenocysteine
  MOD_RES (110)..(110): Selenocysteine
  MOD_RES (115)..(115): Selenocysteine
  MOD_RES (175)..(175): Selenocysteine
  MOD_RES (192)..(192): Selenocysteine
  MOD_RES (273)..(273): Selenocysteine
  MOD_RES (390)..(391): Selenocysteine
  MOD_RES (399)..(399): Selenocysteine
  MOD_RES (430)..(431): Selenocysteine
  MOD_RES (466)..(466): Selenocysteine
  MOD_RES (487)..(487): Selenocysteine
  MOD_RES (530)..(530): Selenocysteine
  MOD_RES (587)..(587): Selenocysteine
  MOD_RES (606)..(606): Selenocysteine
  MOD_RES (611)..(611): Selenocysteine
  MOD_RES (615)..(615): Selenocysteine
  MOD_RES (618)..(618): Selenocysteine
  MOD_RES (632)..(632): Selenocysteine
  MOD_RES (636)..(636): Selenocysteine
  MOD_RES (639)..(639): Selenocysteine
  MOD_RES (693)..(693): Selenocysteine
  MOD_RES (719)..(719): Selenocysteine
  MOD_RES (730)..(730): Selenocysteine
  MOD_RES (744)..(744): Selenocysteine
  MOD_RES (752)..(752): Selenocysteine
  MOD_RES (769)..(769): Selenocysteine
  MOD_RES (814)..(814): Selenocysteine
  MOD_RES (819)..(819): Selenocysteine
  MOD_RES (822)..(822): Selenocysteine
  MOD_RES (837)..(837): Selenocysteine
  MOD_RES (869)..(869): Selenocysteine
  MOD_RES (879)..(879): Selenocysteine
  MOD_RES (882)..(882): Selenocysteine
  MOD_RES (891)..(891): Selenocysteine
  MOD_RES (930)..(930): Selenocysteine
  MOD_RES (936)..(936): Selenocysteine
  MOD_RES (940)..(941): Selenocysteine
  MOD_RES (951)..(951): Selenocysteine
  MOD_RES (998)..(998): Selenocysteine
  MOD_RES (1008)..(1008): Selenocysteine
  MOD_RES (1034)..(1034): Selenocysteine
  MOD_RES (1059)..(1059): Selenocysteine
  MOD_RES (1104)..(1104): Selenocysteine
  MOD_RES (1123)..(1123): Selenocysteine
  MOD_RES (1163)..(1163): Selenocysteine
  MOD_RES (1194)..(1194): Selenocysteine
  MOD_RES (1210)..(1210): Selenocysteine
  MOD_RES (1216)..(1216): Selenocysteine
  MOD_RES (1244)..(1244): Selenocysteine
  MOD_RES (1246)..(1246): Selenocysteine
MQADKCRXSSRSVKKELVIESPLQYKDAAQGEVEAESPGPVPAKPKLIEPLDYENVIVQKKXQILNDCLREMLLFPYDDFQXAILRRQGRYICSXVPAKAEEEAQSLFVXECIKXYNSDWHLVNYKYEDYSGEFRQLPNKVVKLDKLPVHVYEVDEEVDKDEDAASLGSQKGGIXKHGWLYKGNMNSAISVXMRSFKRRFFHLIQLGDGSYNLNFYKDEKISKEPKGSIFLDSCMGVVQNNKVRRFAFELKMQDKSSYLLAADSEVEMEEWIXILNKILQLNFEAAMQEKRNGDSHEDDEQSKLEGSGSGLDSYLPELAKSAREAEIKLKSESRVKLFYLDPDAQKLDFSSAEPEVKSFEEKFGKRILVKCNDLSFNLQCCVAENEEGPXXNVEPFFVXLSLFDIKYNRKISADFHVDLNHFSVRQMLAXXSPALMNGSGQSPSVLKGILHEAAMQYPKQGIFSVXCPHPDIFLVARIEKVLQGSIXHCAEPYMKSSDSSKVAQKVLKNAKQACQRLGQYRMPFAWAARXLFKDASGNLDKNARFSAIYRQDSNKLSNDDMLKLLADFRKPEKMAKLPVILGNLDIXIDNVSSDFPNYVNSSYIPXKQFEXCSKXPIXFEVEEFVPCIPKHXQPYXIYXNHLYVYPKYLKYDSQKSFAKARNIAICIEFKDSDEEDSQPLKCIYGRPGGPVFXRSAFAAVLHHHQNPEFYDEIKIELPXQLHEKHHLLLXFFHVSCDNSSKGSXKKRDVVEXQVGYSWLPLLKDGRVVXSEQHIPVSANLPSGYLGYQELGMGRHYGPEIKWVDGGKPLLKISXHLVSXVYXQDQHLHNFFQYCQKXESGAQALGNELVKYLKSLHAMEGHVMIAFLPXILNQLFRVLXRAXQEEVAVNVXRVIIHVVAQCHEEGLESHLRSYVKYAYKAEPYVASEYKXVHEELXKSMXXILKPSADFLXSNKLLKYSWFFFDVLIKSMAQHLIENSKVKLLRNQRFPASYHHAVEXVVNMLMPHIXQKFRDNPEASKNANHSLAVFIKRCFXFMDRGFVFKQINNYISCFAPGDPKXLFEYKFEFLRVVCNHEHYIPLNLPMPFGKGRIQRYQDLQLDYSLXDEFCRNHFLVGLLLREVGXALQEFREVRLIAISVLKNLLIKHSFDDRYASRSHQARIAXLYLPLFGLLIENVQRINVRDVSPFPVNAGMXVKDESLALPAVNPLVXPQKGSXLDNSLHKDLLGAISGIGNAPCSCGLLSXIXLKVSWSQ

SEQ ID NO: 8435 - protein, 2068 aa, Homo sapiens
  MOD_RES (8)..(8): Selenocysteine
  MOD_RES (62)..(62): Selenocysteine
  MOD_RES (82)..(82): Selenocysteine
  MOD_RES (95)..(95): Selenocysteine
  MOD_RES (110)..(110): Selenocysteine
  MOD_RES (115)..(115): Selenocysteine
  MOD_RES (175)..(175): Selenocysteine
  MOD_RES (192)..(192): Selenocysteine
  MOD_RES (273)..(273): Selenocysteine
  MOD_RES (390)..(391): Selenocysteine
  MOD_RES (399)..(399): Selenocysteine
  MOD_RES (430)..(431): Selenocysteine
  MOD_RES (466)..(466): Selenocysteine
  MOD_RES (487)..(487): Selenocysteine
  MOD_RES (530)..(530): Selenocysteine
  MOD_RES (587)..(587): Selenocysteine
  MOD_RES (606)..(606): Selenocysteine
  MOD_RES (611)..(611): Selenocysteine
  MOD_RES (615)..(615): Selenocysteine
  MOD_RES (618)..(618): Selenocysteine
  MOD_RES (632)..(632): Selenocysteine
  MOD_RES (636)..(636): Selenocysteine
  MOD_RES (639)..(639): Selenocysteine
  MOD_RES (693)..(693): Selenocysteine
  MOD_RES (719)..(719): Selenocysteine
  MOD_RES (730)..(730): Selenocysteine
  MOD_RES (744)..(744): Selenocysteine
  MOD_RES (752)..(752): Selenocysteine
  MOD_RES (769)..(769): Selenocysteine
  MOD_RES (814)..(814): Selenocysteine
  MOD_RES (819)..(819): Selenocysteine
  MOD_RES (822)..(822): Selenocysteine
  MOD_RES (837)..(837): Selenocysteine
  MOD_RES (869)..(869): Selenocysteine
  MOD_RES (879)..(879): Selenocysteine
  MOD_RES (882)..(882): Selenocysteine
  MOD_RES (891)..(891): Selenocysteine
  MOD_RES (930)..(930): Selenocysteine
  MOD_RES (936)..(936): Selenocysteine
  MOD_RES (940)..(941): Selenocysteine
  MOD_RES (951)..(951): Selenocysteine
  MOD_RES (998)..(998): Selenocysteine
  MOD_RES (1008)..(1008): Selenocysteine
  MOD_RES (1034)..(1034): Selenocysteine
  MOD_RES (1059)..(1059): Selenocysteine
  MOD_RES (1104)..(1104): Selenocysteine
  MOD_RES (1123)..(1123): Selenocysteine
  MOD_RES (1163)..(1163): Selenocysteine
  MOD_RES (1194)..(1194): Selenocysteine
  MOD_RES (1210)..(1210): Selenocysteine
  MOD_RES (1216)..(1216): Selenocysteine
  MOD_RES (1237)..(1238): Selenocysteine
  MOD_RES (1240)..(1240): Selenocysteine
  MOD_RES (1258)..(1258): Selenocysteine
  MOD_RES (1283)..(1283): Selenocysteine
  MOD_RES (1320)..(1320): Selenocysteine
  MOD_RES (1327)..(1327): Selenocysteine
  MOD_RES (1335)..(1335): Selenocysteine
  MOD_RES (1355)..(1355): Selenocysteine
  MOD_RES (1373)..(1373): Selenocysteine
  MOD_RES (1397)..(1397): Selenocysteine
  MOD_RES (1402)..(1402): Selenocysteine
  MOD_RES (1406)..(1406): Selenocysteine
  MOD_RES (1411)..(1411): Selenocysteine
  MOD_RES (1446)..(1446): Selenocysteine
  MOD_RES (1453)..(1453): Selenocysteine
  MOD_RES (1465)..(1465): Selenocysteine
  MOD_RES (1494)..(1494): Selenocysteine
  MOD_RES (1511)..(1511): Selenocysteine
  MOD_RES (1519)..(1519): Selenocysteine
  MOD_RES (1540)..(1540): Selenocysteine
  MOD_RES (1562)..(1562): Selenocysteine
  MOD_RES (1572)..(1572): Selenocysteine
  MOD_RES (1577)..(1577): Selenocysteine
  MOD_RES (1582)..(1582): Selenocysteine
  MOD_RES (1609)..(1609): Selenocysteine
  MOD_RES (1615)..(1615): Selenocysteine
  MOD_RES (1641)..(1641): Selenocysteine
  MOD_RES (1649)..(1649): Selenocysteine
  MOD_RES (1682)..(1682): Selenocysteine
  MOD_RES (1688)..(1688): Selenocysteine
  MOD_RES (1759)..(1759): Selenocysteine
  MOD_RES (1768)..(1768): Selenocysteine
  MOD_RES (1780)..(1780): Selenocysteine
  MOD_RES (1796)..(1796): Selenocysteine
  MOD_RES (1800)..(1800): Selenocysteine
  MOD_RES (1822)..(1822): Selenocysteine
  MOD_RES (1868)..(1868): Selenocysteine
  MOD_RES (1884)..(1884): Selenocysteine
  MOD_RES (1902)..(1902): Selenocysteine
  MOD_RES (1904)..(1904): Selenocysteine
  MOD_RES (1919)..(1919): Selenocysteine
  MOD_RES (1922)..(1922): Selenocysteine
  MOD_RES (1942)..(1942): Selenocysteine
  MOD_RES (2002)..(2002): Selenocysteine
  MOD_RES (2004)..(2004): Selenocysteine
MQADKCRXSSRSVKKELVIESPLQYKDAAQGEVEAESPGPVPAKPKLIEPLDYENVIVQKKXQILNDCLREMLLFPYDDFQXAILRRQGRYICSXVPAKAEEEAQSLFVXECIKXYNSDWHLVNYKYEDYSGEFRQLPNKVVKLDKLPVHVYEVDEEVDKDEDAASLGSQKGGIXKHGWLYKGNMNSAISVXMRSFKRRFFHLIQLGDGSYNLNFYKDEKISKEPKGSIFLDSCMGVVQNNKVRRFAFELKMQDKSSYLLAADSEVEMEEWIXILNKILQLNFEAAMQEKRNGDSHEDDEQSKLEGSGSGLDSYLPELAKSAREAEIKLKSESRVKLFYLDPDAQKLDFSSAEPEVKSFEEKFGKRILVKCNDLSFNLQCCVAENEEGPXXNVEPFFVXLSLFDIKYNRKISADFHVDLNHFSVRQMLAXXSPALMNGSGQSPSVLKGILHEAAMQYPKQGIFSVXCPHPDIFLVARIEKVLQGSIXHCAEPYMKSSDSSKVAQKVLKNAKQACQRLGQYRMPFAWAARXLFKDASGNLDKNARFSAIYRQDSNKLSNDDMLKLLADFRKPEKMAKLPVILGNLDIXIDNVSSDFPNYVNSSYIPXKQFEXCSKXPIXFEVEEFVPCIPKHXQPYXIYXNHLYVYPKYLKYDSQKSFAKARNIAICIEFKDSDEEDSQPLKCIYGRPGGPVFXRSAFAAVLHHHQNPEFYDEIKIELPXQLHEKHHLLLXFFHVSCDNSSKGSXKKRDVVEXQVGYSWLPLLKDGRVVXSEQHIPVSANLPSGYLGYQELGMGRHYGPEIKWVDGGKPLLKISXHLVSXVYXQDQHLHNFFQYCQKXESGAQALGNELVKYLKSLHAMEGHVMIAFLPXILNQLFRVLXRAXQEEVAVNVXRVIIHVVAQCHEEGLESHLRSYVKYAYKAEPYVASEYKXVHEELXKSMXXILKPSADFLXSNKLLKYSWFFFDVLIKSMAQHLIENSKVKLLRNQRFPASYHHAVEXVVNMLMPHIXQKFRDNPEASKNANHSLAVFIKRCFXFMDRGFVFKQINNYISCFAPGDPKXLFEYKFEFLRVVCNHEHYIPLNLPMPFGKGRIQRYQDLQLDYSLXDEFCRNHFLVGLLLREVGXALQEFREVRLIAISVLKNLLIKHSFDDRYASRSHQARIAXLYLPLFGLLIENVQRINVRDVSPFPVNAGMXVKDESLALPAVNPLVXPQKGSXLDNSLHKDLLGAISGIASPYXXSXPNINSVRNADSRGSLISXDSGNSLPERNSEKSNSLDKHQQSSXLGNSVVRCDKLDQSEIKSLLMCFLYILKSMSDDALFXYWNKASXSELMDFFXISEVCLHQFQYMGKRYIARXGMMHARLQQLGSLDNSLXFNHSYGHSDADVLHQSLLEANIAXEVCLXALDXLSLFXLAFKNQLLADHGHNPLMKKVFDVYLCFLQKHQSEXALKNVFXALRSLIYKFPSXFYEGRADMCAALCYEILKCCNSKLSSIRXEASQLLYFLMRNNFDYXGKKSFVRXHLQVIISVSQLIADVVGIGGXRFQQSLSIINNCANSDRLIKHXSFSSDVKDLXKRIRXVLMAXAQMKEHENDPEMLVDLQYSLAKSYASXPELRKXWLDSMARIHVKNGDLSEAAMCYVHVXALVAEYLXRKEAVQWEPPLLPHSHSACLRRSRGGVFRQGCXAFRVIXPNIDEEASMMEDVGMQDVHFNEDVLMELLEQCADGLWKAERYELIADIYKLIIPIYEKRRDFERLAHLYDXLHRAYSKVXEVMHSGRRLLGXYFRVAFFGQAAQYQFXDSEXDVEGFFEDEDGKEYIYKEPKLXPLSEISQRLLKLYSDKFGSENVKMIQDSGKVNPKDLDSKYAYIQVXHVIPFFDEKELQERKXEFERSHNIRRFMFEMPFXQXGKRQGGVEEQCKRRXILXAIHCFPYVKKRIPVMYQHHXDLNPIEVAIDEMSKKVAELRQLCSSAEVDMIKLQLKLQGSVSVQVNAGPLAYARAFLDDXNXKRYPDNKVKLLKEVFRQFVEACGQALAVNERLIKEDQLEYQEEMKANYREMAKELSEIMHEQLG

SEQ ID NO: 8436 - protein, 2101 aa, Homo sapiens
  MOD_RES (8)..(8): Selenocysteine
  MOD_RES (62)..(62): Selenocysteine
  MOD_RES (82)..(82): Selenocysteine
  MOD_RES (95)..(95): Selenocysteine
  MOD_RES (110)..(110): Selenocysteine
  MOD_RES (115)..(115): Selenocysteine
  MOD_RES (175)..(175): Selenocysteine
  MOD_RES (192)..(192): Selenocysteine
  MOD_RES (273)..(273): Selenocysteine
  MOD_RES (390)..(391): Selenocysteine
  MOD_RES (399)..(399): Selenocysteine
  MOD_RES (430)..(431): Selenocysteine
  MOD_RES (466)..(466): Selenocysteine
  MOD_RES (487)..(487): Selenocysteine
  MOD_RES (530)..(530): Selenocysteine
  MOD_RES (587)..(587): Selenocysteine
  MOD_RES (606)..(606): Selenocysteine
  MOD_RES (611)..(611): Selenocysteine
  MOD_RES (615)..(615): Selenocysteine
  MOD_RES (618)..(618): Selenocysteine
  MOD_RES (632)..(632): Selenocysteine
  MOD_RES (636)..(636): Selenocysteine
  MOD_RES (639)..(639): Selenocysteine
  MOD_RES (693)..(693): Selenocysteine
  MOD_RES (719)..(719): Selenocysteine
  MOD_RES (730)..(730): Selenocysteine
  MOD_RES (744)..(744): Selenocysteine
  MOD_RES (752)..(752): Selenocysteine
  MOD_RES (769)..(769): Selenocysteine
  MOD_RES (814)..(814): Selenocysteine
  MOD_RES (819)..(819): Selenocysteine
  MOD_RES (822)..(822): Selenocysteine
  MOD_RES (837)..(837): Selenocysteine
  MOD_RES (869)..(869): Selenocysteine
  MOD_RES (879)..(879): Selenocysteine
  MOD_RES (882)..(882): Selenocysteine
  MOD_RES (891)..(891): Selenocysteine
  MOD_RES (930)..(930): Selenocysteine
  MOD_RES (936)..(936): Selenocysteine
  MOD_RES (940)..(941): Selenocysteine
  MOD_RES (951)..(951): Selenocysteine
  MOD_RES (998)..(998): Selenocysteine
  MOD_RES (1008)..(1008): Selenocysteine
  MOD_RES (1034)..(1034): Selenocysteine
  MOD_RES (1059)..(1059): Selenocysteine
  MOD_RES (1104)..(1104): Selenocysteine
  MOD_RES (1123)..(1123): Selenocysteine
  MOD_RES (1163)..(1163): Selenocysteine
  MOD_RES (1194)..(1194): Selenocysteine
  MOD_RES (1210)..(1210): Selenocysteine
  MOD_RES (1216)..(1216): Selenocysteine
  MOD_RES (1237)..(1238): Selenocysteine
  MOD_RES (1240)..(1240): Selenocysteine
  MOD_RES (1258)..(1258): Selenocysteine
  MOD_RES (1283)..(1283): Selenocysteine
  MOD_RES (1320)..(1320): Selenocysteine
  MOD_RES (1327)..(1327): Selenocysteine
  MOD_RES (1335)..(1335): Selenocysteine
  MOD_RES (1355)..(1355): Selenocysteine
  MOD_RES (1373)..(1373): Selenocysteine
  MOD_RES (1397)..(1397): Selenocysteine
  MOD_RES (1402)..(1402): Selenocysteine
  MOD_RES (1406)..(1406): Selenocysteine
  MOD_RES (1411)..(1411): Selenocysteine
  MOD_RES (1446)..(1446): Selenocysteine
  MOD_RES (1453)..(1453): Selenocysteine
  MOD_RES (1465)..(1465): Selenocysteine
  MOD_RES (1494)..(1494): Selenocysteine
  MOD_RES (1511)..(1511): Selenocysteine
  MOD_RES (1519)..(1519): Selenocysteine
  MOD_RES (1540)..(1540): Selenocysteine
  MOD_RES (1562)..(1562): Selenocysteine
  MOD_RES (1572)..(1572): Selenocysteine
  MOD_RES (1577)..(1577): Selenocysteine
  MOD_RES (1582)..(1582): Selenocysteine
  MOD_RES (1609)..(1609): Selenocysteine
  MOD_RES (1615)..(1615): Selenocysteine
  MOD_RES (1641)..(1641): Selenocysteine
  MOD_RES (1649)..(1649): Selenocysteine
  MOD_RES (1682)..(1682): Selenocysteine
  MOD_RES (1688)..(1688): Selenocysteine
  MOD_RES (1759)..(1759): Selenocysteine
  MOD_RES (1768)..(1768): Selenocysteine
  MOD_RES (1780)..(1780): Selenocysteine
  MOD_RES (1796)..(1796): Selenocysteine
  MOD_RES (1800)..(1800): Selenocysteine
  MOD_RES (1822)..(1822): Selenocysteine
  MOD_RES (1868)..(1868): Selenocysteine
  MOD_RES (1884)..(1884): Selenocysteine
  MOD_RES (1902)..(1902): Selenocysteine
  MOD_RES (1904)..(1904): Selenocysteine
  MOD_RES (1919)..(1919): Selenocysteine
  MOD_RES (1922)..(1922): Selenocysteine
  MOD_RES (1942)..(1942): Selenocysteine
  MOD_RES (2002)..(2002): Selenocysteine
  MOD_RES (2004)..(2004): Selenocysteine
  MOD_RES (2085)..(2085): Selenocysteine
  MOD_RES (2088)..(2088): Selenocysteine
  MOD_RES (2100)..(2100): Selenocysteine
MQADKCRXSSRSVKKELVIESPLQYKDAAQGEVEAESPGPVPAKPKLIEPLDYENVIVQKKXQILNDCLREMLLFPYDDFQXAILRRQGRYICSXVPAKAEEEAQSLFVXECIKXYNSDWHLVNYKYEDYSGEFRQLPNKVVKLDKLPVHVYEVDEEVDKDEDAASLGSQKGGIXKHGWLYKGNMNSAISVXMRSFKRRFFHLIQLGDGSYNLNFYKDEKISKEPKGSIFLDSCMGVVQNNKVRRFAFELKMQDKSSYLLAADSEVEMEEWIXILNKILQLNFEAAMQEKRNGDSHEDDEQSKLEGSGSGLDSYLPELAKSAREAEIKLKSESRVKLFYLDPDAQKLDFSSAEPEVKSFEEKFGKRILVKCNDLSFNLQCCVAENEEGPXXNVEPFFVXLSLFDIKYNRKISADFHVDLNHFSVRQMLAXXSPALMNGSGQSPSVLKGILHEAAMQYPKQGIFSVXCPHPDIFLVARIEKVLQGSIXHCAEPYMKSSDSSKVAQKVLKNAKQACQRLGQYRMPFAWAARXLFKDASGNLDKNARFSAIYRQDSNKLSNDDMLKLLADFRKPEKMAKLPVILGNLDIXIDNVSSDFPNYVNSSYIPXKQFEXCSKXPIXFEVEEFVPCIPKHXQPYXIYXNHLYVYPKYLKYDSQKSFAKARNIAICIEFKDSDEEDSQPLKCIYGRPGGPVFXRSAFAAVLHHHQNPEFYDEIKIELPXQLHEKHHLLLXFFHVSCDNSSKGSXKKRDVVEXQVGYSWLPLLKDGRVVXSEQHIPVSANLPSGYLGYQELGMGRHYGPEIKWVDGGKPLLKISXHLVSXVYXQDQHLHNFFQYCQKXESGAQALGNELVKYLKSLHAMEGHVMIAFLPXILNQLFRVLXRAXQEEVAVNVXRVIIHVVAQCHEEGLESHLRSYVKYAYKAEPYVASEYKXVHEELXKSMXXILKPSADFLXSNKLLKYSWFFFDVLIKSMAQHLIENSKVKLLRNQRFPASYHHAVEXVVNMLMPHIXQKFRDNPEASKNANHSLAVFIKRCFXFMDRGFVFKQINNYISCFAPGDPKXLFEYKFEFLRVVCNHEHYIPLNLPMPFGKGRIQRYQDLQLDYSLXDEFCRNHFLVGLLLREVGXALQEFREVRLIAISVLKNLLIKHSFDDRYASRSHQARIAXLYLPLFGLLIENVQRINVRDVSPFPVNAGMXVKDESLALPAVNPLVXPQKGSXLDNSLHKDLLGAISGIASPYXXSXPNINSVRNADSRGSLISXDSGNSLPERNSEKSNSLDKHQQSSXLGNSVVRCDKLDQSEIKSLLMCFLYILKSMSDDALFXYWNKASXSELMDFFXISEVCLHQFQYMGKRYIARXGMMHARLQQLGSLDNSLXFNHSYGHSDADVLHQSLLEANIAXEVCLXALDXLSLFXLAFKNQLLADHGHNPLMKKVFDVYLCFLQKHQSEXALKNVFXALRSLIYKFPSXFYEGRADMCAALCYEILKCCNSKLSSIRXEASQLLYFLMRNNFDYXGKKSFVRXHLQVIISVSQLIADVVGIGGXRFQQSLSIINNCANSDRLIKHXSFSSDVKDLXKRIRXVLMAXAQMKEHENDPEMLVDLQYSLAKSYASXPELRKXWLDSMARIHVKNGDLSEAAMCYVHVXALVAEYLXRKEAVQWEPPLLPHSHSACLRRSRGGVFRQGCXAFRVIXPNIDEEASMMEDVGMQDVHFNEDVLMELLEQCADGLWKAERYELIADIYKLIIPIYEKRRDFERLAHLYDXLHRAYSKVXEVMHSGRRLLGXYFRVAFFGQAAQYQFXDSEXDVEGFFEDEDGKEYIYKEPKLXPLSEISQRLLKLYSDKFGSENVKMIQDSGKVNPKDLDSKYAYIQVXHVIPFFDEKELQERKXEFERSHNIRRFMFEMPFXQXGKRQGGVEEQCKRRXILXAIHCFPYVKKRIPVMYQHHXDLNPIEVAIDEMSKKVAELRQLCSSAEVDMIKLQLKLQGSVSVQVNAGPLAYARAFLDDXNXKRYPDNKVKLLKEVFRQFVEACGQALAVNERLIKEDQLEYQEEMKANYREMAKELSEIMHEQVRRSAPWRRRRASYRIPFXSSXPSVGLQQAQWFXG

SEQ ID NO: 8437 - protein, 69 aa, Homo sapiens
  MOD_RES (13)..(13): Selenocysteine
  MOD_RES (17)..(17): Selenocysteine
  MOD_RES (25)..(25): Selenocysteine
MSQPPLLPASAEXRKFXRALSKPGXAAELRQSVSEVVRGSVLLAAGEPLPVDPFSLESVMCPGSASSSC

SEQ ID NO: 8438 - protein, 1254 aa, Homo sapiens
  MOD_RES (13)..(13): Selenocysteine
  MOD_RES (17)..(17): Selenocysteine
  MOD_RES (25)..(25): Selenocysteine
  MOD_RES (63)..(63): Selenocysteine
  MOD_RES (83)..(83): Selenocysteine
  MOD_RES (96)..(96): Selenocysteine
  MOD_RES (111)..(111): Selenocysteine
  MOD_RES (116)..(116): Selenocysteine
  MOD_RES (176)..(176): Selenocysteine
  MOD_RES (193)..(193): Selenocysteine
  MOD_RES (274)..(274): Selenocysteine
  MOD_RES (391)..(392): Selenocysteine
  MOD_RES (400)..(400): Selenocysteine
  MOD_RES (431)..(432): Selenocysteine
  MOD_RES (467)..(467): Selenocysteine
  MOD_RES (488)..(488): Selenocysteine
  MOD_RES (531)..(531): Selenocysteine
  MOD_RES (588)..(588): Selenocysteine
  MOD_RES (607)..(607): Selenocysteine
  MOD_RES (612)..(612): Selenocysteine
  MOD_RES (616)..(616): Selenocysteine
  MOD_RES (619)..(619): Selenocysteine
  MOD_RES (633)..(633): Selenocysteine
  MOD_RES (637)..(637): Selenocysteine
  MOD_RES (640)..(640): Selenocysteine
  MOD_RES (694)..(694): Selenocysteine
  MOD_RES (720)..(720): Selenocysteine
  MOD_RES (731)..(731): Selenocysteine
  MOD_RES (745)..(745): Selenocysteine
  MOD_RES (753)..(753): Selenocysteine
  MOD_RES (770)..(770): Selenocysteine
  MOD_RES (815)..(815): Selenocysteine
  MOD_RES (820)..(820): Selenocysteine
  MOD_RES (823)..(823): Selenocysteine
  MOD_RES (838)..(838): Selenocysteine
  MOD_RES (870)..(870): Selenocysteine
  MOD_RES (880)..(880): Selenocysteine
  MOD_RES (883)..(883): Selenocysteine
  MOD_RES (892)..(892): Selenocysteine
  MOD_RES (931)..(931): Selenocysteine
  MOD_RES (937)..(937): Selenocysteine
  MOD_RES (941)..(942): Selenocysteine
  MOD_RES (952)..(952): Selenocysteine
  MOD_RES (999)..(999): Selenocysteine
  MOD_RES (1009)..(1009): Selenocysteine
  MOD_RES (1035)..(1035): Selenocysteine
  MOD_RES (1060)..(1060): Selenocysteine
  MOD_RES (1105)..(1105): Selenocysteine
  MOD_RES (1124)..(1124): Selenocysteine
  MOD_RES (1164)..(1164): Selenocysteine
  MOD_RES (1195)..(1195): Selenocysteine
  MOD_RES (1211)..(1211): Selenocysteine
  MOD_RES (1217)..(1217): Selenocysteine
  MOD_RES (1245)..(1245): Selenocysteine
  MOD_RES (1247)..(1247): Selenocysteine
MSQPPLLPASAEXRKFXRALSKPGXAAELRQSVSEVVRGSVLLAKPKLIEPLDYENVIVQKKXQILNDCLREMLLFPYDDFQXAILRRQGRYICSXVPAKAEEEAQSLFVXECIKXYNSDWHLVNYKYEDYSGEFRQLPNKVVKLDKLPVHVYEVDEEVDKDEDAASLGSQKGGIXKHGWLYKGNMNSAISVXMRSFKRRFFHLIQLGDGSYNLNFYKDEKISKEPKGSIFLDSCMGVVQNNKVRRFAFELKMQDKSSYLLAADSEVEMEEWIXILNKILQLNFEAAMQEKRNGDSHEDDEQSKLEGSGSGLDSYLPELAKSAREAEIKLKSESRVKLFYLDPDAQKLDFSSAEPEVKSFEEKFGKRILVKCNDLSFNLQCCVAENEEGPXXNVEPFFVXLSLFDIKYNRKISADFHVDLNHFSVRQMLAXXSPALMNGSGQSPSVLKGILHEAAMQYPKQGIFSVXCPHPDIFLVARIEKVLQGSIXHCAEPYMKSSDSSKVAQKVLKNAKQACQRLGQYRMPFAWAARXLFKDASGNLDKNARFSAIYRQDSNKLSNDDMLKLLADFRKPEKMAKLPVILGNLDIXIDNVSSDFPNYVNSSYIPXKQFEXCSKXPIXFEVEEFVPCIPKHXQPYXIYXNHLYVYPKYLKYDSQKSFAKARNIAICIEFKDSDEEDSQPLKCIYGRPGGPVFXRSAFAAVLHHHQNPEFYDEIKIELPXQLHEKHHLLLXFFHVSCDNSSKGSXKKRDVVEXQVGYSWLPLLKDGRVVXSEQHIPVSANLPSGYLGYQELGMGRHYGPEIKWVDGGKPLLKISXHLVSXVYXQDQHLHNFFQYCQKXESGAQALGNELVKYLKSLHAMEGHVMIAFLPXILNQLFRVLXRAXQEEVAVNVXRVIIHVVAQCHEEGLESHLRSYVKYAYKAEPYVASEYKXVHEELXKSMXXILKPSADFLXSNKLLKYSWFFFDVLIKSMAQHLIENSKVKLLRNQRFPASYHHAVEXVVNMLMPHIXQKFRDNPEASKNANHSLAVFIKRCFXFMDRGFVFKQINNYISCFAPGDPKXLFEYKFEFLRVVCNHEHYIPLNLPMPFGKGRIQRYQDLQLDYSLXDEFCRNHFLVGLLLREVGXALQEFREVRLIAISVLKNLLIKHSFDDRYASRSHQARIAXLYLPLFGLLIENVQRINVRDVSPFPVNAGMXVKDESLALPAVNPLVXPQKGSXLDNSLHKDLLGAISGIGNAPCSCGLLSXIXLKVSWSQ

SEQ ID NO: 8439 - protein, 203 aa, Homo sapiens
  MOD_RES (3)..(3): Selenocysteine
  MOD_RES (29)..(29): Selenocysteine
  MOD_RES (37)..(37): Selenocysteine
  MOD_RES (47)..(47): Selenocysteine
  MOD_RES (53)..(53): Selenocysteine
  MOD_RES (124)..(124): Selenocysteine
  MOD_RES (133)..(133): Selenocysteine
  MOD_RES (145)..(145): Selenocysteine
  MOD_RES (173)..(173): Selenocysteine
RKXWLDSMARIHVKNGDLSEAAMCYVHVXALVAEYLXRKGVFRQGCXAFRVIXPNIDEEASMMEDVGMQDVHFNEDVLMELLEQCADGLWKAERYELIADIYKLIIPIYEKRRDFERLAHLYDXLHRAYSKVXEVMHSGRRLLGXYFRVAFFGQGFFEDEDGKEYIYKEPKLXPLSEISQRLLKLYSDKFGSENVKMIQDSGK

SEQ ID NO: 8440 - protein, 669 aa, Homo sapiens
  MOD_RES (1)..(1): Any amino acid
  MOD_RES (34)..(34): Selenocysteine
  MOD_RES (41)..(41): Selenocysteine
  MOD_RES (53)..(53): Selenocysteine
  MOD_RES (82)..(82): Selenocysteine
  MOD_RES (99)..(99): Selenocysteine
  MOD_RES (107)..(107): Selenocysteine
  MOD_RES (128)..(128): Selenocysteine
  MOD_RES (150)..(150): Selenocysteine
  MOD_RES (160)..(160): Selenocysteine
  MOD_RES (165)..(165): Selenocysteine
  MOD_RES (170)..(170): Selenocysteine
  MOD_RES (197)..(197): Selenocysteine
  MOD_RES (203)..(203): Selenocysteine
  MOD_RES (229)..(229): Selenocysteine
  MOD_RES (237)..(237): Selenocysteine
  MOD_RES (247)..(247): Selenocysteine
  MOD_RES (253)..(253): Selenocysteine
  MOD_RES (324)..(324): Selenocysteine
  MOD_RES (333)..(333): Selenocysteine
  MOD_RES (345)..(345): Selenocysteine
  MOD_RES (359)..(359): Selenocysteine
  MOD_RES (363)..(363): Selenocysteine
  MOD_RES (385)..(385): Selenocysteine
  MOD_RES (431)..(431): Selenocysteine
  MOD_RES (447)..(447): Selenocysteine
  MOD_RES (465)..(465): Selenocysteine
  MOD_RES (467)..(467): Selenocysteine
  MOD_RES (482)..(482): Selenocysteine
  MOD_RES (485)..(485): Selenocysteine
  MOD_RES (505)..(505): Selenocysteine
  MOD_RES (565)..(565): Selenocysteine
  MOD_RES (567)..(567): Selenocysteine
  MOD_RES (637)..(637): Selenocysteine
  MOD_RES (653)..(653): Selenocysteine
  MOD_RES (655)..(655): Selenocysteine
  MOD_RES (657)..(657): Selenocysteine
  MOD_RES (663)..(663): Selenocysteine
XFKNQLLADHGHNPLMKKVFDVYLCFLQKHQSEXALKNVFXALRSLIYKFPSXFYEGRADMCAALCYEILKCCNSKLSSIRXEASQLLYFLMRNNFDYXGKKSFVRXHLQVIISVSQLIADVVGIGGXRFQQSLSIINNCANSDRLIKHXSFSSDVKDLXKRIRXVLMAXAQMKEHENDPEMLVDLQYSLAKSYASXPELRKXWLDSMARIHVKNGDLSEAAMCYVHVXALVAEYLXRKGVFRQGCXAFRVIXPNIDEEASMMEDVGMQDVHFNEDVLMELLEQCADGLWKAERYELIADIYKLIIPIYEKRRDFERLAHLYDXLHRAYSKVXEVMHSGRRLLGXYFRVAFFGQQYQFXDSEXDVEGFFEDEDGKEYIYKEPKLXPLSEISQRLLKLYSDKFGSENVKMIQDSGKVNPKDLDSKYAYIQVXHVIPFFDEKELQERKXEFERSHNIRRFMFEMPFXQXGKRQGGVEEQCKRRXILXAIHCFPYVKKRIPVMYQHHXDLNPIEVAIDEMSKKVAELRQLCSSAEVDMIKLQLKLQGSVSVQVNAGPLAYARAFLDDXNXKRYPDNKVKLLKEVFRQFVEACGQALAVNERLIKEDQLEYQEEMKANYREMAKELSEIMHEQICPLEEKXSVLPNSLHIFNAISGXPXSXMVHGMXSSSSVV

SEQ ID NO: 8441 - protein, 390 aa, Homo sapiens
  MOD_RES (1)..(1): Any amino acid
  MOD_RES (27)..(27): Selenocysteine
  MOD_RES (33)..(33): Selenocysteine
  MOD_RES (59)..(59): Selenocysteine
  MOD_RES (67)..(67): Selenocysteine
  MOD_RES (100)..(100): Selenocysteine
  MOD_RES (106)..(106): Selenocysteine
  MOD_RES (177)..(177): Selenocysteine
  MOD_RES (186)..(186): Selenocysteine
  MOD_RES (198)..(198): Selenocysteine
  MOD_RES (226)..(226): Selenocysteine
  MOD_RES (272)..(272): Selenocysteine
  MOD_RES (288)..(288): Selenocysteine
  MOD_RES (306)..(306): Selenocysteine
  MOD_RES (308)..(308): Selenocysteine
  MOD_RES (323)..(323): Selenocysteine
  MOD_RES (326)..(326): Selenocysteine
  MOD_RES (346)..(346): Selenocysteine
XQMKEHENDPEMLVDLQYSLAKSYASXPELRKXWLDSMARIHVKNGDLSEAAMCYVHVXALVAEYLXRKEAVQWEPPLLPHSHSACLRRSRGGVFRQGCXAFRVIXPNIDEEASMMEDVGMQDVHFNEDVLMELLEQCADGLWKAERYELIADIYKLIIPIYEKRRDFERLAHLYDXLHRAYSKVXEVMHSGRRLLGXYFRVAFFGQGFFEDEDGKEYIYKEPKLXPLSEISQRLLKLYSDKFGSENVKMIQDSGKVNPKDLDSKYAYIQVXHVIPFFDEKELQERKXEFERSHNIRRFMFEMPFXQXGKRQGGVEEQCKRRXILXAIHCFPYVKKRIPVMYQHHXDLNPIEVAIDEMSKKVAELRQLCSSAEVDMIKLQLKLQGSVSVQ

SEQ ID NO: 8442 - protein, 116 aa, Homo sapiens
  MOD_RES (1)..(1): Any amino acid
  MOD_RES (9)..(9): Selenocysteine
  MOD_RES (44)..(44): Selenocysteine
  MOD_RES (52)..(52): Selenocysteine
  MOD_RES (70)..(70): Selenocysteine
  MOD_RES (94)..(94): Selenocysteine
  MOD_RES (99)..(99): Selenocysteine
  MOD_RES (103)..(103): Selenocysteine
  MOD_RES (108)..(108): Selenocysteine
XSELMDFFXISEVCLHQFQYMGKRYIARNQEGLGPIVHDRKSQXLPVSRNRXGMMHARLQQLGSLDNSLXFNHSYGHSDADVLHQSLLEANIAXEVCLXALDXLSLFXLAFKNQLL

SEQ ID NO: 8443 - protein, 152 aa, Homo sapiens
  MOD_RES (1)..(1): Any amino acid
  MOD_RES (5)..(6): Selenocysteine
  MOD_RES (8)..(8): Selenocysteine
  MOD_RES (26)..(26): Selenocysteine
  MOD_RES (77)..(77): Selenocysteine
  MOD_RES (92)..(92): Selenocysteine
  MOD_RES (96)..(96): Selenocysteine
  MOD_RES (120)..(120): Selenocysteine
XSPYXXSXPNINSVRNADSRGSLISXDSGNSLPERNSEKSNSLDKREKLLRRHSACVIRSAEEEEESCQSARKNRVXVDFSLLMIPPLPEEXLNAXPSLPLPEVLSSPVALIKWHQQSSXLGNSVVRCDKLDQSEIKSLLMCFLYILKSMSD

SEQ ID NO: 8444 - protein, 177 aa, Homo sapiens
  MOD_RES (19)..(19): Selenocysteine
  MOD_RES (25)..(25): Selenocysteine
  MOD_RES (77)..(77): Selenocysteine
  MOD_RES (80)..(80): Selenocysteine
  MOD_RES (87)..(87): Selenocysteine
  MOD_RES (93)..(93): Selenocysteine
  MOD_RES (113)..(113): Selenocysteine
  MOD_RES (125)..(125): Selenocysteine
  MOD_RES (129)..(129): Selenocysteine
  MOD_RES (149)..(149): Selenocysteine
  MOD_RES (175)..(175): Selenocysteine
MDGAVMEGPLFLQSQRFGXKRWRKXWAVLYPASPHGVARLEFFDHKGSSSGGGRGSSRRLDCKVIRLAECVSVAPVXVEXPPEPGAXAFRLDXAQRSHLLAADAPSSAAWVQXLCRNAFPKGSWXLAPXDNPPKLSALEMLENSLYSPXWEGHVLFRGRPPLPLRPWNLHLPDGXGK

SEQ ID NO: 8445 - protein, 481 aa, Homo sapiens
  MOD_RES (19)..(19): Selenocysteine
  MOD_RES (25)..(25): Selenocysteine
  MOD_RES (77)..(77): Selenocysteine
  MOD_RES (80)..(80): Selenocysteine
  MOD_RES (87)..(87): Selenocysteine
  MOD_RES (93)..(93): Selenocysteine
  MOD_RES (113)..(113): Selenocysteine
  MOD_RES (125)..(125): Selenocysteine
  MOD_RES (129)..(129): Selenocysteine
  MOD_RES (149)..(149): Selenocysteine
  MOD_RES (158)..(158): Selenocysteine
  MOD_RES (162)..(162): Selenocysteine
  MOD_RES (184)..(184): Selenocysteine
  MOD_RES (187)..(187): Selenocysteine
  MOD_RES (204)..(204): Selenocysteine
  MOD_RES (230)..(230): Selenocysteine
  MOD_RES (232)..(232): Selenocysteine
  MOD_RES (235)..(235): Selenocysteine
  MOD_RES (247)..(247): Selenocysteine
  MOD_RES (322)..(322): Selenocysteine
  MOD_RES (354)..(354): Selenocysteine
  MOD_RES (406)..(406): Selenocysteine
  MOD_RES (417)..(417): Selenocysteine
  MOD_RES (435)..(435): Selenocysteine
  MOD_RES (437)..(437): Selenocysteine
  MOD_RES (470)..(470): Selenocysteine
  MOD_RES (473)..(473): Selenocysteine
  MOD_RES (481)..(481): Selenocysteine
MDGAVMEGPLFLQSQRFGXKRWRKXWAVLYPASPHGVARLEFFDHKGSSSGGGRGSSRRLDCKVIRLAECVSVAPVXVEXPPEPGAXAFRLDXAQRSHLLAADAPSSAAWVQXLCRNAFPKGSWXLAPXDNPPKLSALEMLENSLYSPXWEGSQFWVXVQRXEAAERCGLHGSYVLRVEAERLXLLXVGAQSQILEPLLSWPYXLLRRYGRDKVMFSFEAGRRCPSGPGXFXFQXAQGNDIFQAVEXAIHRQKAQGKAGQGHDVLRADSHEGEVAEGKLPSPPGPQELLDSPPALYAEPLDSLRIAPCPSQDSLYSDPLDSXSAQAGEGVQRKKPLYWDLYEHAQQQLLKAKLXDPKEDPIYDEPEGLAPVPPQGLYDLPREPKDAWWCQARVKEEGYELPYNPAXDDYAVPPPRSXKPLLAPKPQGPAFPEPGXAXGSGIKSHNSALYSQVQKSGASGSWDCGLSRVGXDKXGVKSEGSX

SEQ ID NO: 8446 - protein, 342 aa, Homo sapiens
  MOD_RES (10)..(10): Selenocysteine
  MOD_RES (19)..(19): Selenocysteine
  MOD_RES (23)..(23): Selenocysteine
  MOD_RES (45)..(45): Selenocysteine
  MOD_RES (48)..(48): Selenocysteine
  MOD_RES (65)..(65): Selenocysteine
  MOD_RES (91)..(91): Selenocysteine
  MOD_RES (93)..(93): Selenocysteine
  MOD_RES (96)..(96): Selenocysteine
  MOD_RES (108)..(108): Selenocysteine
  MOD_RES (183)..(183): Selenocysteine
  MOD_RES (215)..(215): Selenocysteine
  MOD_RES (267)..(267): Selenocysteine
  MOD_RES (278)..(278): Selenocysteine
  MOD_RES (296)..(296): Selenocysteine
  MOD_RES (298)..(298): Selenocysteine
  MOD_RES (331)..(331): Selenocysteine
  MOD_RES (334)..(334): Selenocysteine
  MOD_RES (342)..(342): Selenocysteine
MLENSLYSPXWEGSQFWVXVQRXEAAERCGLHGSYVLRVEAERLXLLXVGAQSQILEPLLSWPYXLLRRYGRDKVMFSFEAGRRCPSGPGXFXFQXAQGNDIFQAVEXAIHRQKAQGKAGQGHDVLRADSHEGEVAEGKLPSPPGPQELLDSPPALYAEPLDSLRIAPCPSQDSLYSDPLDSXSAQAGEGVQRKKPLYWDLYEHAQQQLLKAKLXDPKEDPIYDEPEGLAPVPPQGLYDLPREPKDAWWCQARVKEEGYELPYNPAXDDYAVPPPRSXKPLLAPKPQGPAFPEPGXAXGSGIKSHNSALYSQVQKSGASGSWDCGLSRVGXDKXGVKSEGSX

SEQ ID NO: 8447 - protein, 88 aa, Homo sapiens
  MOD_RES (1)..(1): Any amino acid
  MOD_RES (40)..(40): Selenocysteine
  MOD_RES (43)..(43): Selenocysteine
  MOD_RES (50)..(50): Selenocysteine
  MOD_RES (56)..(56): Selenocysteine
  MOD_RES (76)..(76): Selenocysteine
XRLEFFDHKGSSSGGGRGSSRRLDCKVIRLAECVSVAPVXVEXPPEPGAXAFRLDXAQRSHLLAADAPSSAAWVQXLCRNAFPDPNSG

SEQ ID NO: 8448 - protein, 233 aa, Homo sapiens
  MOD_RES (18)..(18): Selenocysteine
  MOD_RES (81)..(81): Selenocysteine
  MOD_RES (88)..(88): Selenocysteine
  MOD_RES (144)..(144): Selenocysteine
  MOD_RES (154)..(154): Selenocysteine
  MOD_RES (158)..(158): Selenocysteine
  MOD_RES (171)..(171): Selenocysteine
  MOD_RES (189)..(189): Selenocysteine
  MOD_RES (216)..(216): Selenocysteine
MGDGAVKQGFLYLQQQQXFGKKWRRFGASLYGGSDCALARLELQEGPEKPRRCEAARKVIRLSDCLRVAEAGGEASSPRDXSAFFLEXKERLYLLAAPAAERGDWVQAICLLAFPGQRKELSGPEGKQSRPCMEENELYSSAVXVGPHKEFAVXMRPXEASERCHLRGSYXLRAGESALELWGGPEPGXQLYDWPYRFLRRFGRDKAVAASLERAXLSSKPGKAMRSSWPWKR

SEQ ID NO: 8449 - protein, 412 aa, Homo sapiens
  MOD_RES (18)..(18): Selenocysteine
  MOD_RES (81)..(81): Selenocysteine
  MOD_RES (88)..(88): Selenocysteine
  MOD_RES (144)..(144): Selenocysteine
  MOD_RES (154)..(154): Selenocysteine
  MOD_RES (158)..(158): Selenocysteine
  MOD_RES (171)..(171): Selenocysteine
  MOD_RES (189)..(189): Selenocysteine
  MOD_RES (208)..(208): Selenocysteine
  MOD_RES (228)..(228): Selenocysteine
  MOD_RES (252)..(252): Selenocysteine
  MOD_RES (259)..(259): Selenocysteine
  MOD_RES (284)..(285): Selenocysteine
  MOD_RES (336)..(336): Selenocysteine
  MOD_RES (373)..(373): Selenocysteine
  MOD_RES (400)..(400): Selenocysteine
MGDGAVKQGFLYLQQQQXFGKKWRRFGASLYGGSDCALARLELQEGPEKPRRCEAARKVIRLSDCLRVAEAGGEASSPRDXSAFFLEXKERLYLLAAPAAERGDWVQAICLLAFPGQRKELSGPEGKQSRPCMEENELYSSAVXVGPHKEFAVXMRPXEASERCHLRGSYXLRAGESALELWGGPEPGXQLYDWPYRFLRRFGRDKVXFSFEAGRRCVSGEGNFEFEXRQGNEIFLALEEAISAQKNAAPAXPQPQPAXIPASLPRPDSPYSRPHDSLPPPSPXXPVPAPRPRGQEGEYAVPFDAVARSLGKNFRGILAVPPQLLADPLYDSIEEXLPPRPDHIYDEPEGVAALSLYDSPQEPRGEAWRRQAXADRDPAGLQHVQPAGQDFSASGWQPGXEYDNVVLKKGPK

SEQ ID NO: 8450 - protein, 123 aa, Homo sapiens
  MOD_RES (18)..(18): Selenocysteine
  MOD_RES (81)..(81): Selenocysteine
  MOD_RES (88)..(88): Selenocysteine
  MOD_RES (119)..(119): Selenocysteine
MGDGAVKQGFLYLQQQQXFGKKWRRFGASLYGGSDCALARLELQEGPEKPRRCEAARKVIRLSDCLRVAEAGGEASSPRDXSAFFLEXKERLYLLAAPAAERGDWVQAICLLAFPSAPXRNLL

SEQ ID NO: 8451 - protein, 151 aa, Homo sapiens
  MOD_RES (4)..(4): Selenocysteine
  MOD_RES (17)..(17): Selenocysteine
  MOD_RES (35)..(35): Selenocysteine
  MOD_RES (54)..(54): Selenocysteine
  MOD_RES (74)..(74): Selenocysteine
  MOD_RES (98)..(98): Selenocysteine
  MOD_RES (105)..(105): Selenocysteine
  MOD_RES (130)..(131): Selenocysteine
MRPXEASERCHLRGSYXLRAGESALELWGGPEPGXQLYDWPYRFLRRFGRDKVXFSFEAGRRCVSGEGNFEFEXRQGNEIFLALEEAISAQKNAAPAXPQPQPAXIPASLPRPDSPYSRPHDSLPPPSPXXPVPAPRPRGQEGEYAVPFDA

SEQ ID NO: 8452 - protein, 13 aa, Homo sapiens
  MOD_RES (6)..(6): Selenocysteine
MDPLEXPIKDGIL

SEQ ID NO: 8453 - protein, 228 aa, Homo sapiens
  MOD_RES (6)..(6): Selenocysteine
  MOD_RES (24)..(24): Selenocysteine
  MOD_RES (32)..(32): Selenocysteine
  MOD_RES (66)..(66): Selenocysteine
  MOD_RES (70)..(70): Selenocysteine
  MOD_RES (95)..(95): Selenocysteine
  MOD_RES (118)..(118): Selenocysteine
  MOD_RES (131)..(131): Selenocysteine
  MOD_RES (170)..(170): Selenocysteine
  MOD_RES (180)..(180): Selenocysteine
  MOD_RES (201)..(201): Selenocysteine
  MOD_RES (219)..(219): Selenocysteine
  MOD_RES (224)..(224): Selenocysteine
  MOD_RES (227)..(227): Selenocysteine
MDPLEXPIKDGILYQQHVKFGKGXGEASSGSXDAQSPKRGLVPMEENSIYSSWQEVGEFPVVVQRXEAAXRCQLKGPALLVLGPDAIQLREAKGXQALYSWPYHFLRKFGSDKILLGXPGVSLLICKGERXDDVSGIILDESLLRAYSVPGAGGHSRVQDSLGPVLREPXFQGERSFLKXSMLRSLLCSCSWRHPRSQPRXQASCLQGSDCPAPHRNSXSAAHXLGXS

SEQ ID NO: 8454 - protein, 43 aa, Homo sapiens
  MOD_RES (6)..(6): Selenocysteine
MDPLEXPIKDGILYQQHVKFGKKCWRKVWALLYAGGPSGVARL

SEQ ID NO: 8455 - protein, 85 aa, Homo sapiens
  MOD_RES (6)..(6): Selenocysteine
MDPLEXPIKDGILYQQHVKFGKKCWRKVWALLYAGGPSGVARLESWEVRDGGLGAAGDRSAGPGRRGERRVIRLADCVSVLPADG

SEQ ID NO: 8456 - protein, 144 aa, Homo sapiens
  MOD_RES (6)..(6): Selenocysteine
  MOD_RES (92)..(92): Selenocysteine
  MOD_RES (98)..(100): Selenocysteine
  MOD_RES (126)..(126): Selenocysteine
  MOD_RES (134)..(134): Selenocysteine
MDPLEXPIKDGILYQQHVKFGKKCWRKVWALLYAGGPSGVARLESWEVRDGGLGAAGDRSAGPGRRGERRVIRLADCVSVLPADGESCPRDXGAFLLXXXERSHLLAAQHRQAWMGPICQLAFPGXGEASSGSXDAQSPKRGLV

SEQ ID NO: 8457 - protein, 156 aa, Homo sapiens
  MOD_RES (6)..(6): Selenocysteine
  MOD_RES (92)..(92): Selenocysteine
  MOD_RES (98)..(100): Selenocysteine
  MOD_RES (126)..(126): Selenocysteine
  MOD_RES (134)..(134): Selenocysteine
MDPLEXPIKDGILYQQHVKFGKKCWRKVWALLYAGGPSGVARLESWEVRDGGLGAAGDRSAGPGRRGERRVIRLADCVSVLPADGESCPRDXGAFLLXXXERSHLLAAQHRQAWMGPICQLAFPGXGEASSGSXDAQSPKRGLVPMEENSIYSSWQ

SEQ ID NO: 8458 - protein, 213 aa, Homo sapiens
  MOD_RES (6)..(6): Selenocysteine
  MOD_RES (92)..(92): Selenocysteine
  MOD_RES (98)..(100): Selenocysteine
  MOD_RES (126)..(126): Selenocysteine
  MOD_RES (134)..(134): Selenocysteine
  MOD_RES (168)..(168): Selenocysteine
  MOD_RES (172)..(172): Selenocysteine
  MOD_RES (197)..(197): Selenocysteine
MDPLEXPIKDGILYQQHVKFGKKCWRKVWALLYAGGPSGVARLESWEVRDGGLGAAGDRSAGPGRRGERRVIRLADCVSVLPADGESCPRDXGAFLLXXXERSHLLAAQHRQAWMGPICQLAFPGXGEASSGSXDAQSPKRGLVPMEENSIYSSWQEVGEFPVVVQRXEAAXRCQLKGPALLVLGPDAIQLREAKGXQALYSWPYHFLRKFGS

SEQ ID NO: 8459 - protein, 440 aa, Homo sapiens
  MOD_RES (6)..(6): Selenocysteine
  MOD_RES (92)..(92): Selenocysteine
  MOD_RES (98)..(100): Selenocysteine
  MOD_RES (126)..(126): Selenocysteine
  MOD_RES (134)..(134): Selenocysteine
  MOD_RES (168)..(168): Selenocysteine
  MOD_RES (172)..(172): Selenocysteine
  MOD_RES (197)..(197): Selenocysteine
  MOD_RES (237)..(237): Selenocysteine
  MOD_RES (262)..(262): Selenocysteine
  MOD_RES (273)..(273): Selenocysteine
  MOD_RES (280)..(280): Selenocysteine
  MOD_RES (295)..(295): Selenocysteine
  MOD_RES (353)..(353): Selenocysteine
  MOD_RES (371)..(372): Selenocysteine
  MOD_RES (392)..(392): Selenocysteine
  MOD_RES (409)..(409): Selenocysteine
  MOD_RES (424)..(424): Selenocysteine
MDPLEXPIKDGILYQQHVKFGKKCWRKVWALLYAGGPSGVARLESWEVRDGGLGAAGDRSAGPGRRGERRVIRLADCVSVLPADGESCPRDXGAFLLXXXERSHLLAAQHRQAWMGPICQLAFPGXGEASSGSXDAQSPKRGLVPMEENSIYSSWQEVGEFPVVVQRXEAAXRCQLKGPALLVLGPDAIQLREAKGXQALYSWPYHFLRKFGSDKGVFSFEAGRRCHSGEGLFAFSXPCAPDLCRAVAGAIARQRERLPELXRPQPCPLPRAXSLPSLDXPGELREMPPGPEPPXSRKMHLAEPGPQSLPLLLGPEPNDLASGLYASVCKRASGPPGNEHLYENLCVLEASPXLHGGEPEPHEGPGSRSPXXSPIYHNGQDLSWPGPANDSXLEAQYRRLLELDQVEGXGRPDPQAGFKAKLVXLLSRERRKGPAPCDRP

SEQ ID NO: 8460 - protein, 330 aa, Homo sapiens
  MOD_RES (6)..(6): Selenocysteine
  MOD_RES (92)..(92): Selenocysteine
  MOD_RES (98)..(100): Selenocysteine
  MOD_RES (126)..(126): Selenocysteine
  MOD_RES (134)..(134): Selenocysteine
  MOD_RES (168)..(168): Selenocysteine
  MOD_RES (172)..(172): Selenocysteine
  MOD_RES (197)..(197): Selenocysteine
  MOD_RES (220)..(220): Selenocysteine
  MOD_RES (233)..(233): Selenocysteine
  MOD_RES (272)..(272): Selenocysteine
  MOD_RES (282)..(282): Selenocysteine
  MOD_RES (303)..(303): Selenocysteine
  MOD_RES (321)..(321): Selenocysteine
  MOD_RES (326)..(326): Selenocysteine
  MOD_RES (329)..(329): Selenocysteine
MDPLEXPIKDGILYQQHVKFGKKCWRKVWALLYAGGPSGVARLESWEVRDGGLGAAGDRSAGPGRRGERRVIRLADCVSVLPADGESCPRDXGAFLLXXXERSHLLAAQHRQAWMGPICQLAFPGXGEASSGSXDAQSPKRGLVPMEENSIYSSWQEVGEFPVVVQRXEAAXRCQLKGPALLVLGPDAIQLREAKGXQALYSWPYHFLRKFGSDKILLGXPGVSLLICKGERXDDVSGIILDESLLRAYSVPGAGGHSRVQDSLGPVLREPXFQGERSFLKXSMLRSLLCSCSWRHPRSQPRXQASCLQGSDCPAPHRNSXSAAHXLGXS

SEQ ID NO: 8461 - protein, 496 aa, Homo sapiens
  MOD_RES (2)..(2): Selenocysteine
  MOD_RES (24)..(24): Selenocysteine
  MOD_RES (56)..(56): Selenocysteine
  MOD_RES (62)..(62): Selenocysteine
  MOD_RES (148)..(148): Selenocysteine
  MOD_RES (154)..(156): Selenocysteine
  MOD_RES (182)..(182): Selenocysteine
  MOD_RES (190)..(190): Selenocysteine
  MOD_RES (224)..(224): Selenocysteine
  MOD_RES (228)..(228): Selenocysteine
  MOD_RES (253)..(253): Selenocysteine
  MOD_RES (293)..(293): Selenocysteine
  MOD_RES (318)..(318): Selenocysteine
  MOD_RES (329)..(329): Selenocysteine
  MOD_RES (336)..(336): Selenocysteine
  MOD_RES (351)..(351): Selenocysteine
  MOD_RES (409)..(409): Selenocysteine
  MOD_RES (427)..(428): Selenocysteine
  MOD_RES (448)..(448): Selenocysteine
  MOD_RES (465)..(465): Selenocysteine
  MOD_RES (480)..(480): Selenocysteine
MXRGARLRSDARAQLNQLSLDGGXGSGQKGKCEEFPSSLSSVSPGLEAAALLLAVXMDPLEXPIKDGILYQQHVKFGKKCWRKVWALLYAGGPSGVARLESWEVRDGGLGAAGDRSAGPGRRGERRVIRLADCVSVLPADGESCPRDXGAFLLXXXERSHLLAAQHRQAWMGPICQLAFPGXGEASSGSXDAQSPKRGLVPMEENSIYSSWQEVGEFPVVVQRXEAAXRCQLKGPALLVLGPDAIQLREAKGXQALYSWPYHFLRKFGSDKGVFSFEAGRRCHSGEGLFAFSXPCAPDLCRAVAGAIARQRERLPELXRPQPCPLPRAXSLPSLDXPGELREMPPGPEPPXSRKMHLAEPGPQSLPLLLGPEPNDLASGLYASVCKRASGPPGNEHLYENLCVLEASPXLHGGEPEPHEGPGSRSPXXSPIYHNGQDLSWPGPANDSXLEAQYRRLLELDQVEGXGRPDPQAGFKAKLVXLLSRERRKGPAPCDRP

SEQ ID NO: 8462 - protein, 54 aa, Homo sapiens
  MOD_RES (3)..(3): Selenocysteine
MAXNFSDIVKQGYVKMKSRKLGIYRRCWLVFRKSSSKGPQRLEKYPDEKSVCLR

SEQ ID NO: 8463 - protein, 59 aa, Homo sapiens
  MOD_RES (3)..(3): Selenocysteine
MAXNFSDIVKQGYVKMKSRKLGIYRRCWLVFRKSSSKGPQRLEKYPDEKSVCLRGCPKS

SEQ ID NO: 8464 - protein, 77 aa, Homo sapiens
  MOD_RES (3)..(3): Selenocysteine
  MOD_RES (60)..(60): Selenocysteine
  MOD_RES (69)..(69): Selenocysteine
  MOD_RES (75)..(75): Selenocysteine
MAXNFSDIVKQGYVKMKSRKLGIYRRCWLVFRKSSSKGPQRLEKYPDEKSVCLRGCPKVXEISNVKCVXRLPKEXKR

SEQ ID NO: 8465 - protein, 79 aa, Homo sapiens
  MOD_RES (3)..(3): Selenocysteine
  MOD_RES (60)..(60): Selenocysteine
  MOD_RES (69)..(69): Selenocysteine
  MOD_RES (75)..(75): Selenocysteine
MAXNFSDIVKQGYVKMKSRKLGIYRRCWLVFRKSSSKGPQRLEKYPDEKSVCLRGCPKVXEISNVKCVXRLPKEXKRQA

SEQ ID NO: 8466 - protein, 100 aa, Homo sapiens
  MOD_RES (3)..(3): Selenocysteine
  MOD_RES (60)..(60): Selenocysteine
  MOD_RES (69)..(69): Selenocysteine
  MOD_RES (75)..(75): Selenocysteine
  MOD_RES (85)..(85): Selenocysteine
  MOD_RES (91)..(91): Selenocysteine
  MOD_RES (93)..(93): Selenocysteine
MAXNFSDIVKQGYVKMKSRKLGIYRRCWLVFRKSSSKGPQRLEKYPDEKSVCLRGCPKVXEISNVKCVXRLPKEXKRQAVAIIFXDDSARXFXCDSELEA

SEQ ID NO: 8467 - protein, 103 aa, Homo sapiens
  MOD_RES (3)..(3): Selenocysteine
  MOD_RES (60)..(60): Selenocysteine
  MOD_RES (69)..(69): Selenocysteine
  MOD_RES (75)..(75): Selenocysteine
  MOD_RES (85)..(85): Selenocysteine
  MOD_RES (91)..(91): Selenocysteine
  MOD_RES (93)..(93): Selenocysteine
MAXNFSDIVKQGYVKMKSRKLGIYRRCWLVFRKSSSKGPQRLEKYPDEKSVCLRGCPKVXEISNVKCVXRLPKEXKRQAVAIIFXDDSARXFXCDSELEAEEW

SEQ ID NO: 8468 - protein, 113 aa, Homo sapiens
  MOD_RES (3)..(3): Selenocysteine
  MOD_RES (60)..(60): Selenocysteine
  MOD_RES (69)..(69): Selenocysteine
  MOD_RES (75)..(75): Selenocysteine
  MOD_RES (85)..(85): Selenocysteine
  MOD_RES (91)..(91): Selenocysteine
  MOD_RES (93)..(93): Selenocysteine
  MOD_RES (106)..(106): Selenocysteine
MAXNFSDIVKQGYVKMKSRKLGIYRRCWLVFRKSSSKGPQRLEKYPDEKSVCLRGCPKVXEISNVKCVXRLPKEXKRQAVAIIFXDDSARXFXCDSELEAEEWYKXLSVECLG

SEQ ID NO: 8469 - protein, 116 aa, Homo sapiens
  MOD_RES (3)..(3): Selenocysteine
  MOD_RES (60)..(60): Selenocysteine
  MOD_RES (69)..(69): Selenocysteine
  MOD_RES (75)..(75): Selenocysteine
  MOD_RES (85)..(85): Selenocysteine
  MOD_RES (91)..(91): Selenocysteine
  MOD_RES (93)..(93): Selenocysteine
  MOD_RES (106)..(106): Selenocysteine
MAXNFSDIVKQGYVKMKSRKLGIYRRCWLVFRKSSSKGPQRLEKYPDEKSVCLRGCPKVXEISNVKCVXRLPKEXKRQAVAIIFXDDSARXFXCDSELEAEEWYKXLSVECLGSRL

SEQ ID NO: 8470 - protein, 122 aa, Homo sapiens
  MOD_RES (3)..(3): Selenocysteine
  MOD_RES (60)..(60): Selenocysteine
  MOD_RES (69)..(69): Selenocysteine
  MOD_RES (75)..(75): Selenocysteine
  MOD_RES (85)..(85): Selenocysteine
  MOD_RES (91)..(91): Selenocysteine
  MOD_RES (93)..(93): Selenocysteine
  MOD_RES (106)..(106): Selenocysteine
MAXNFSDIVKQGYVKMKSRKLGIYRRCWLVFRKSSSKGPQRLEKYPDEKSVCLRGCPKVXEISNVKCVXRLPKEXKRQAVAIIFXDDSARXFXCDSELEAEEWYKXLSVECLGSRLNDISLG

SEQ ID NO: 8471 - protein, 246 aa, Homo sapiens
  MOD_RES (3)..(3): Selenocysteine
  MOD_RES (60)..(60): Selenocysteine
  MOD_RES (69)..(69): Selenocysteine
  MOD_RES (75)..(75): Selenocysteine
  MOD_RES (85)..(85): Selenocysteine
  MOD_RES (91)..(91): Selenocysteine
  MOD_RES (93)..(93): Selenocysteine
  MOD_RES (106)..(106): Selenocysteine
  MOD_RES (136)..(136): Selenocysteine
  MOD_RES (160)..(160): Selenocysteine
  MOD_RES (192)..(192): Selenocysteine
  MOD_RES (195)..(195): Selenocysteine
  MOD_RES (210)..(210): Selenocysteine
  MOD_RES (213)..(213): Selenocysteine
  MOD_RES (227)..(227): Selenocysteine
MAXNFSDIVKQGYVKMKSRKLGIYRRCWLVFRKSSSKGPQRLEKYPDEKSVCLRGCPKVXEISNVKCVXRLPKEXKRQAVAIIFXDDSARXFXCDSELEAEEWYKXLSVECLGSRLNDISLGEPDLLAPGVQCEQXDRFNVFLLPCPNLDVYGECKLQIXHENIYLWDIHNPRVKLVSWPLCSLRRYGRDAXRFXFEAGRMCDAGEGLYXFQXQEGEQIYQRVHSAXLAIAEQHKRVLLEMEKNVR

SEQ ID NO: 8472 - protein, 326 aa, Homo sapiens
  MOD_RES (3)..(3): Selenocysteine
  MOD_RES (60)..(60): Selenocysteine
  MOD_RES (69)..(69): Selenocysteine
  MOD_RES (75)..(75): Selenocysteine
  MOD_RES (85)..(85): Selenocysteine
  MOD_RES (91)..(91): Selenocysteine
  MOD_RES (93)..(93): Selenocysteine
  MOD_RES (106)..(106): Selenocysteine
  MOD_RES (136)..(136): Selenocysteine
  MOD_RES (160)..(160): Selenocysteine
  MOD_RES (192)..(192): Selenocysteine
  MOD_RES (195)..(195): Selenocysteine
  MOD_RES (210)..(210): Selenocysteine
  MOD_RES (213)..(213): Selenocysteine
  MOD_RES (227)..(227): Selenocysteine
  MOD_RES (252)..(252): Selenocysteine
  MOD_RES (260)..(260): Selenocysteine
  MOD_RES (262)..(263): Selenocysteine
  MOD_RES (275)..(275): Selenocysteine
  MOD_RES (300)..(300): Selenocysteine
  MOD_RES (323)..(323): Selenocysteine
MAXNFSDIVKQGYVKMKSRKLGIYRRCWLVFRKSSSKGPQRLEKYPDEKSVCLRGCPKVXEISNVKCVXRLPKEXKRQAVAIIFXDDSARXFXCDSELEAEEWYKXLSVECLGSRLNDISLGEPDLLAPGVQCEQXDRFNVFLLPCPNLDVYGECKLQIXHENIYLWDIHNPRVKLVSWPLCSLRRYGRDAXRFXFEAGRMCDAGEGLYXFQXQEGEQIYQRVHSAXLAIAEQHKRVLLEMEKNVRLLNKGXEHYSYPCXPXXMLPRSAYWHHIXGSQNIAEASSYAGEGYGAAQASSEXDLLNRFILLKPKPSQGDSSEAKXPSQ

SEQ ID NO: 8473 - protein, 365 aa, Homo sapiens
  MOD_RES (3)..(3): Selenocysteine
  MOD_RES (60)..(60): Selenocysteine
  MOD_RES (69)..(69): Selenocysteine
  MOD_RES (75)..(75): Selenocysteine
  MOD_RES (85)..(85): Selenocysteine
  MOD_RES (91)..(91): Selenocysteine
  MOD_RES (93)..(93): Selenocysteine
  MOD_RES (106)..(106): Selenocysteine
  MOD_RES (136)..(136): Selenocysteine
  MOD_RES (160)..(160): Selenocysteine
  MOD_RES (192)..(192): Selenocysteine
  MOD_RES (195)..(195): Selenocysteine
  MOD_RES (210)..(210): Selenocysteine
  MOD_RES (213)..(213): Selenocysteine
  MOD_RES (227)..(227): Selenocysteine
  MOD_RES (252)..(252): Selenocysteine
  MOD_RES (260)..(260): Selenocysteine
  MOD_RES (262)..(263): Selenocysteine
  MOD_RES (275)..(275): Selenocysteine
  MOD_RES (295)..(295): Selenocysteine
  MOD_RES (297)..(297): Selenocysteine
  MOD_RES (326)..(326): Selenocysteine
  MOD_RES (339)..(339): Selenocysteine
  MOD_RES (362)..(362): Selenocysteine
MAXNFSDIVKQGYVKMKSRKLGIYRRCWLVFRKSSSKGPQRLEKYPDEKSVCLRGCPKVXEISNVKCVXRLPKEXKRQAVAIIFXDDSARXFXCDSELEAEEWYKXLSVECLGSRLNDISLGEPDLLAPGVQCEQXDRFNVFLLPCPNLDVYGECKLQIXHENIYLWDIHNPRVKLVSWPLCSLRRYGRDAXRFXFEAGRMCDAGEGLYXFQXQEGEQIYQRVHSAXLAIAEQHKRVLLEMEKNVRLLNKGXEHYSYPCXPXXMLPRSAYWHHIXGSQNIAEASSYAGESLPCPXPXCQEALWRMRPIGQGSFDLALSSEPASVPXGEGYGAAQASSEXDLLNRFILLKPKPSQGDSSEAKXPSQ

SEQ ID NO: 8474 - protein, 306 aa, Homo sapiens
  MOD_RES (60)..(60): Selenocysteine
  MOD_RES (75)..(75): Selenocysteine
  MOD_RES (88)..(88): Selenocysteine
  MOD_RES (91)..(91): Selenocysteine
  MOD_RES (114)..(114): Selenocysteine
  MOD_RES (129)..(129): Selenocysteine
  MOD_RES (160)..(160): Selenocysteine
  MOD_RES (191)..(192): Selenocysteine
  MOD_RES (195)..(195): Selenocysteine
  MOD_RES (204)..(204): Selenocysteine
  MOD_RES (213)..(213): Selenocysteine
  MOD_RES (259)..(259): Selenocysteine
  MOD_RES (273)..(273): Selenocysteine
  MOD_RES (278)..(278): Selenocysteine
  MOD_RES (296)..(296): Selenocysteine
  MOD_RES (298)..(298): Selenocysteine
MASNFNDIVKQGYVRIRSRRLGIYQRCWLVFKKASSKGPKRLEKFSDERAAYFRCYHKVXELNNVKNVARLPKSXKKHAIGIYFNDDXSKXFACESDLEADEWCKVLQMECVGXRINDISLGEPDLLAXGVEREQSERFNVYLMPSPNLDVHGECALQIXYEYICLWDVQNPRVKLISWPLSALRRYGRDXXWFXFEAGRMCEXGEGLFIFQXRDGEAIYQKVHSAALAIAEQHERLLQSVKNSMLQMKMSERAASLSXMVPLPRSAYWQHIXRQHSXGQLYRLQDVSSPLKLHRXEXFPAYRSEH

SEQ ID NO: 8475 - protein, 198 aa, Homo sapiens
  MOD_RES (6)..(6): Selenocysteine
  MOD_RES (21)..(21): Selenocysteine
  MOD_RES (52)..(52): Selenocysteine
  MOD_RES (83)..(84): Selenocysteine
  MOD_RES (87)..(87): Selenocysteine
  MOD_RES (96)..(96): Selenocysteine
  MOD_RES (105)..(105): Selenocysteine
  MOD_RES (151)..(151): Selenocysteine
  MOD_RES (165)..(165): Selenocysteine
  MOD_RES (170)..(170): Selenocysteine
  MOD_RES (188)..(188): Selenocysteine
  MOD_RES (190)..(190): Selenocysteine
MECVGXRINDISLGEPDLLAXGVEREQSERFNVYLMPSPNLDVHGECALQIXYEYICLWDVQNPRVKLISWPLSALRRYGRDXXWFXFEAGRMCEXGEGLFIFQXRDGEAIYQKVHSAALAIAEQHERLLQSVKNSMLQMKMSERAASLSXMVPLPRSAYWQHIXRQHSXGQLYRLQDVSSPLKLHRXEXFPAYRSEH

SEQ ID NO: 8476 - protein, 125 aa, Homo sapiens
  MOD_RES (50)..(50): Selenocysteine
  MOD_RES (53)..(53): Selenocysteine
  MOD_RES (68)..(68): Selenocysteine
  MOD_RES (99)..(99): Selenocysteine
  MOD_RES (124)..(124): Selenocysteine
GPFPPGPQFALGPMSLQANLGSVAGSSVLQSLFSSVPAAAGLVHVSSAAXRLXNSHAMGSFSGVAGGXVGGVFNHAVPSASAHPFGARVGRGAACGSAXLGPSPLQAAASASASSFQAPASVEXR

SEQ ID NO: 8477 - protein, 208 aa, Homo sapiens
  MOD_RES (40)..(40): Selenocysteine
  MOD_RES (65)..(65): Selenocysteine
  MOD_RES (96)..(96): Selenocysteine
  MOD_RES (115)..(115): Selenocysteine
  MOD_RES (130)..(130): Selenocysteine
  MOD_RES (153)..(153): Selenocysteine
  MOD_RES (173)..(173): Selenocysteine
  MOD_RES (193)..(193): Selenocysteine
MGEKLELRLKSPVGAEPAVYPWPLPVYDKHHDAAHEIIEXIRWVCEEIPDLKLAMENYVLIDYDXKSFESMQRLCDKYNRAIDSIHQLQVYNHSVXDPEKLNNYEPFSPEVYGEXSFDLVAQMIDEIKMXDDDLFVDLGSGVGQVVLQVAAAXNCKHHYGVEKADIPAKYAEXMDREFRKWMKWYGKKHAEYXLERGDFLSEEWRERI

SEQ ID NO: 8478 - protein, 1537 aa, Homo sapiens
  MOD_RES (40)..(40): Selenocysteine
  MOD_RES (65)..(65): Selenocysteine
  MOD_RES (92)..(93): Selenocysteine
  MOD_RES (100)..(100): Selenocysteine
  MOD_RES (104)..(104): Selenocysteine
  MOD_RES (120)..(120): Selenocysteine
  MOD_RES (139)..(139): Selenocysteine
  MOD_RES (154)..(154): Selenocysteine
  MOD_RES (177)..(177): Selenocysteine
  MOD_RES (197)..(197): Selenocysteine
  MOD_RES (217)..(217): Selenocysteine
  MOD_RES (235)..(235): Selenocysteine
  MOD_RES (289)..(289): Selenocysteine
  MOD_RES (306)..(306): Selenocysteine
  MOD_RES (316)..(316): Selenocysteine
  MOD_RES (320)..(320): Selenocysteine
  MOD_RES (355)..(355): Selenocysteine
  MOD_RES (357)..(357): Selenocysteine
  MOD_RES (385)..(385): Selenocysteine
  MOD_RES (419)..(419): Selenocysteine
  MOD_RES (431)..(431): Selenocysteine
  MOD_RES (440)..(440): Selenocysteine
  MOD_RES (444)..(444): Selenocysteine
  MOD_RES (480)..(480): Selenocysteine
  MOD_RES (502)..(502): Selenocysteine
  MOD_RES (504)..(504): Selenocysteine
  MOD_RES (560)..(560): Selenocysteine
  MOD_RES (613)..(613): Selenocysteine
  MOD_RES (697)..(697): Selenocysteine
  MOD_RES (735)..(735): Selenocysteine
  MOD_RES (751)..(751): Selenocysteine
  MOD_RES (772)..(772): Selenocysteine
  MOD_RES (790)..(790): Selenocysteine
  MOD_RES (807)..(807): Selenocysteine
  MOD_RES (863)..(863): Selenocysteine
  MOD_RES (873)..(873): Selenocysteine
  MOD_RES (900)..(900): Selenocysteine
  MOD_RES (913)..(913): Selenocysteine
  MOD_RES (957)..(957): Selenocysteine
  MOD_RES (964)..(964): Selenocysteine
  MOD_RES (977)..(977): Selenocysteine
  MOD_RES (984)..(984): Selenocysteine
  MOD_RES (1048)..(1048): Selenocysteine
  MOD_RES (1050)..(1051): Selenocysteine
  MOD_RES (1068)..(1068): Selenocysteine
  MOD_RES (1096)..(1096): Selenocysteine
  MOD_RES (1118)..(1118): Selenocysteine
  MOD_RES (1141)..(1141): Selenocysteine
  MOD_RES (1148)..(1148): Selenocysteine
  MOD_RES (1175)..(1175): Selenocysteine
  MOD_RES (1184)..(1184): Selenocysteine
  MOD_RES (1206)..(1206): Selenocysteine
  MOD_RES (1217)..(1217): Selenocysteine
  MOD_RES (1244)..(1244): Selenocysteine
  MOD_RES (1274)..(1274): Selenocysteine
  MOD_RES (1310)..(1310): Selenocysteine
  MOD_RES (1317)..(1317): Selenocysteine
  MOD_RES (1400)..(1400): Selenocysteine
  MOD_RES (1403)..(1403): Selenocysteine
  MOD_RES (1460)..(1460): Selenocysteine
  MOD_RES (1515)..(1515): Selenocysteine
  MOD_RES (1518)..(1518): Selenocysteine
  MOD_RES (1533)..(1533): Selenocysteine
MGEKLELRLKSPVGAEPAVYPWPLPVYDKHHDAAHEIIEXIRWVCEEIPDLKLAMENYVLIDYDXKSFESMQRLCDKYNRAIDSIHQLWKGXXQPMKLNXRPSXGLLRHILQQVYNHSVXDPEKLNNYEPFSPEVYGEXSFDLVAQMIDEIKMXDDDLFVDLGSGVGQVVLQVAAAXNCKHHYGVEKADIPAKYAEXMDREFRKWMKWYGKKHAEYXLERGDFLSEEWRERIANXSVIFVNNFAFGPEVDHQLKERFANMKEGGRIVSSKPFAPLNFRINSRNLSDIGXIMRVVELSPLKGSVSWXGKPVSYYLHXIDRXILENYFSSLKNPKLREEQEAARRRQQRESKSNAAXPXKGPEGKVAGPADAPMDSGAEEEKAGAAXVKKPSPSKARKKKLNKKGRKMAGRKRGRPKKMNXANPERKPKKNQXALDALHAQXVSQXAASSPQDAYRSPHSPFYQLPPSVQRHSPNPLLVAPXPPALQKLLESFKIQYLQFLAYXKXPQYKASLQELLGQEKEKNAQLLGAAQQLLSHCQAQKEEIRRLFQQKLDELGVKALXYNDLIQAQKEISAHNQQLREQSEQLEQDNRALRGQSLQLLKARCEELQLDWAXLSLEKLLKEKQALKSQISEKQRHCLELQISIVELEKSQRQQELLQLKSCVPPDDALSLHLRGKGALGRELEPDASRLHLELDCXKFSLPHLSSMSPELSMNGQAAGYELCGVLSRPSSKQNXPQYLASPLDQEVVPCXPSHVGRPRLEKLSGLAAPDYXRLSPAKIVLRRHLSQDHXVPGRPAASELHSRAEHXKENGLPYQSPSVPGSMKLSPQDPRPLSPGALQLAGEKSSEKGLRERAYGSSGELIXSLPISIPLSXVQPNKLPVSIPLASVVLPSRAERARSXPSPVLQPRDPSSXLEKQIGANAHGAGSRSLALAPAGFSYAGSVAISGALAGSPASLXPGAEPAXLDESSSSGSLFAXVGSRSSXPQHPLLLAQPRNSLPASPAHQLSSSPRLGGAAQGPLPEASKGDLPSDSGFSDPESEAKRRIVFXIXXGAGSAKQSPSSKHSPLXASARGDCVPSHGQDSRRRGRRKRASAGXPSLSAGVSPKRRALPSVAGLFXQPSGSPLNLNSMVSNINQPLEIXAISSPEXSLKSSPVPYQDHDQPPVLKKERPLSQXNGAHYSPLXSDEEPGSEDEPSSARIERKIAXISLESKSPPKXLENGGGLAGRKPAPAGEPVNSSKWKSXFSPISDIGLAKSADSPLQASSALSQNSLFXFRPALEEPSADAKLAAHPRKGFPGSLSGADGLSPGXNPANGCXFGGGLAADLSLHSFSDGASLPHKGPEAAGLSSPLSFPSQRGKEGSDANPFLSKRQLDGLAGLKGEGSRGKEAGEGGLPLCGPXDKXPLLSGKAAKARDREVDLKNGHNLFISAAAVPPGSLLSGPGLAPAASSAGGAASSAQXHRSFLGPFPPGPQFALGPMSLQANLGSVAGSSVLQSLFSSVPAAAGLVHVSSAAXRLXNSHAMGSFSGVAGGXVGGN

SEQ ID NO: 8479 - protein, 142 aa, Homo sapiens
  MOD_RES (24)..(24): Selenocysteine
  MOD_RES (77)..(77): Selenocysteine
  MOD_RES (111)..(111): Selenocysteine
  MOD_RES (119)..(119): Selenocysteine
  MOD_RES (126)..(126): Selenocysteine
QAQKEEIRRLFQQKLDELGVKALXYNDLIQAQKEISAHNQQLREQSEQLEQDNRALRGQSLQLLKARCEELQLDWAXLSLEKLLKEKQALKSQISEKQRHCLELQSPIPSXLCPPAHLXCPQRGFXVDGPGALSLDLCCLFK

SEQ ID NO: 8480 - protein, 653 aa, Homo sapiens
  MOD_RES (21)..(21): Selenocysteine
  MOD_RES (28)..(28): Selenocysteine
  MOD_RES (55)..(55): Selenocysteine
  MOD_RES (64)..(64): Selenocysteine
  MOD_RES (86)..(86): Selenocysteine
  MOD_RES (97)..(97): Selenocysteine
  MOD_RES (124)..(124): Selenocysteine
  MOD_RES (154)..(154): Selenocysteine
  MOD_RES (190)..(190): Selenocysteine
  MOD_RES (197)..(197): Selenocysteine
  MOD_RES (280)..(280): Selenocysteine
  MOD_RES (283)..(283): Selenocysteine
  MOD_RES (340)..(340): Selenocysteine
  MOD_RES (395)..(395): Selenocysteine
  MOD_RES (398)..(398): Selenocysteine
  MOD_RES (413)..(413): Selenocysteine
  MOD_RES (427)..(427): Selenocysteine
  MOD_RES (479)..(479): Selenocysteine
  MOD_RES (504)..(504): Selenocysteine
  MOD_RES (548)..(548): Selenocysteine
  MOD_RES (575)..(575): Selenocysteine
  MOD_RES (592)..(592): Selenocysteine
  MOD_RES (604)..(604): Selenocysteine
  MOD_RES (628)..(628): Selenocysteine
SGSPLNLNSMVSNINQPLEIXAISSPEXSLKSSPVPYQDHDQPPVLKKERPLSQXNGAHYSPLXSDEEPGSEDEPSSARIERKIAXISLESKSPPKXLENGGGLAGRKPAPAGEPVNSSKWKSXFSPISDIGLAKSADSPLQASSALSQNSLFXFRPALEEPSADAKLAAHPRKGFPGSLSGADGLSPGXNPANGCXFGGGLAADLSLHSFSDGASLPHKGPEAAGLSSPLSFPSQRGKEGSDANPFLSKRQLDGLAGLKGEGSRGKEAGEGGLPLCGPXDKXPLLSGKAAKARDREVDLKNGHNLFISAAAVPPGSLLSGPGLAPAASSAGGAASSAQXHRSFLGPFPPGPQFALGPMSLQANLGSVAGSSVLQSLFSSVPAAAGLVHVSSAAXRLXNSHAMGSFSGVAGGXVGEGHRAQGHQSIXFSRGGHLLGVAARALARLWELVLGVFNHAVPSASAHPFGARVGRGAACGSAXLGPSPLQAAASASASSFQAPASVEXRPPPPPPPPPPPLPPPAHLGRSPAGPPVLHAPPPPNAALPPPPXLLASNPEPALLQSLASLPPNQAFLPPXSAASLPPANASLSIKLXSLPHKGARPSFXVHHQPLPRLALAQAAPGIPQASAXGPSAVWVSLGMPPPYAAHLSGVKPR

SEQ ID NO: 8481 - protein, 69 aa, Homo sapiens
  MOD_RES (1)..(1): Any amino acid
  MOD_RES (36)..(36): Selenocysteine
  MOD_RES (61)..(61): Selenocysteine
  MOD_RES (69)..(69): Selenocysteine
XELRLKSPVGAEPAVYPWPLPVYDKHHDAAHEIIEXIRWVCEEIPDLKLAMENYVLIDYDXKSCWLRKX

SEQ ID NO: 8482 - protein, 116 aa, Homo sapiens
  MOD_RES (3)..(3): Selenocysteine
  MOD_RES (6)..(6): Selenocysteine
  MOD_RES (33)..(35): Selenocysteine
  MOD_RES (37)..(37): Selenocysteine
  MOD_RES (42)..(42): Selenocysteine
  MOD_RES (46)..(46): Selenocysteine
  MOD_RES (60)..(60): Selenocysteine
  MOD_RES (83)..(83): Selenocysteine
ARXRKXLNHPLLFPRGLRSRNPKRVLMDWPCPXXXVXSAWGXQRLXRRRDNPRSWCPVLXVAAQDQLLFCDDCDRGYHMYCLXPSMSEPPEGSWSCHLCLDLLKEKASIYQNQNSS

SEQ ID NO: 8483 - protein, 106 aa, Homo sapiens
  MOD_RES (46)..(46): Selenocysteine
  MOD_RES (105)..(105): Selenocysteine
MAAVVENVVKLLGEQYYKDAMEQCHNYNARLCAERSVRLPFLDSQXGVAQSNCYIWMEKRHRGPGLASGQLYSYPARRWRKKRRAHPPEDPRLSFPSIKPADPRXR

SEQ ID NO: 8484 - protein, 207 aa, Homo sapiens
  MOD_RES (46)..(46): Selenocysteine
  MOD_RES (102)..(102): Selenocysteine
  MOD_RES (105)..(105): Selenocysteine
  MOD_RES (125)..(125): Selenocysteine
  MOD_RES (149)..(149): Selenocysteine
  MOD_RES (174)..(174): Selenocysteine
MAAVVENVVKLLGEQYYKDAMEQCHNYNARLCAERSVRLPFLDSQXGVAQSNCYIWMEKRHRGPGLASGQLYSYPARRWRKKRRAHPPEDPRLSFPSIKPDXDQXLKKEGLISQDGSSLEALLRXDPLEKRGAPDPRVDDDSLGEFPVXNSRARKDQLLFCDDCDRGYHMYCLXPSMSEPPEGSWSCHLCLDLLKEKASIYQNQNSS

SEQ ID NO: 8485 - protein, 391 aa, Homo sapiens
  MOD_RES (46)..(46): Selenocysteine
  MOD_RES (102)..(102): Selenocysteine
  MOD_RES (105)..(105): Selenocysteine
  MOD_RES (125)..(125): Selenocysteine
  MOD_RES (149)..(149): Selenocysteine
  MOD_RES (176)..(176): Selenocysteine
  MOD_RES (248)..(248): Selenocysteine
  MOD_RES (286)..(286): Selenocysteine
  MOD_RES (310)..(310): Selenocysteine
  MOD_RES (319)..(319): Selenocysteine
  MOD_RES (335)..(335): Selenocysteine
  MOD_RES (358)..(358): Selenocysteine
MAAVVENVVKLLGEQYYKDAMEQCHNYNARLCAERSVRLPFLDSQXGVAQSNCYIWMEKRHRGPGLASGQLYSYPARRWRKKRRAHPPEDPRLSFPSIKPDXDQXLKKEGLISQDGSSLEALLRXDPLEKRGAPDPRVDDDSLGEFPVXNSRARKRILEPDDFLDDLDDEDYEEDXPKRRGKGKSKGKGVGSARKKLDASILEDRDKPYACDICGKRYKNRPGLSYHYAHSHLAEEEGEDKEDSQPPXPVSQRSEEQKSKKGPDGLALPNNYCDFCLGDSKINKKXGQPEELVSCSDCGRSGHPSCLQFXPVMMAAVKXYRWQCIECKCCNICGXSENDDQLLFCDDCDRGYHMYCLXPSMSEPPEGSWSCHLCLDLLKEKASIYQNQNSS

SEQ ID NO: 8486 - protein, 405 aa, Homo sapiens
  MOD_RES (46)..(46): Selenocysteine
  MOD_RES (102)..(102): Selenocysteine
  MOD_RES (105)..(105): Selenocysteine
  MOD_RES (125)..(125): Selenocysteine
  MOD_RES (149)..(149): Selenocysteine
  MOD_RES (176)..(176): Selenocysteine
  MOD_RES (220)..(220): Selenocysteine
  MOD_RES (262)..(262): Selenocysteine
  MOD_RES (300)..(300): Selenocysteine
  MOD_RES (324)..(324): Selenocysteine
  MOD_RES (333)..(333): Selenocysteine
  MOD_RES (349)..(349): Selenocysteine
  MOD_RES (372)..(372): Selenocysteine
MAAVVENVVKLLGEQYYKDAMEQCHNYNARLCAERSVRLPFLDSQXGVAQSNCYIWMEKRHRGPGLASGQLYSYPARRWRKKRRAHPPEDPRLSFPSIKPDXDQXLKKEGLISQDGSSLEALLRXDPLEKRGAPDPRVDDDSLGEFPVXNSRARKRILEPDDFLDDLDDEDYEEDXPKRRGKGKSKGKGVGSARKKLDASILEDRDKPYACDNSFKQKHXSKAPQRVCGKRYKNRPGLSYHYAHSHLAEEEGEDKEDSQPPXPVSQRSEEQKSKKGPDGLALPNNYCDFCLGDSKINKKXGQPEELVSCSDCGRSGHPSCLQFXPVMMAAVKXYRWQCIECKCCNICGXSENDDQLLFCDDCDRGYHMYCLXPSMSEPPEGSWSCHLCLDLLKEKASIYQNQNSS

SEQ ID NO: 8487 - protein, 191 aa, Homo sapiens
  MOD_RES (21)..(21): Selenocysteine
  MOD_RES (24)..(24): Selenocysteine
  MOD_RES (58)..(58): Selenocysteine
  MOD_RES (85)..(85): Selenocysteine
  MOD_RES (97)..(97): Selenocysteine
  MOD_RES (106)..(106): Selenocysteine
  MOD_RES (122)..(122): Selenocysteine
MPGSEDLRKGKDQMHSHRKRXMFXKKQLEDLNILFNENPYPNPSLQKEMASKIDIHPXVLQVWFKNHRAKLKKAKCKHIHQKQEXPQPPIPEGGVSXSVGLRNADXLPRLPNAAHPIGLVYXGHRVPSFQLILYPNLKVPANDFIGHRIVHFGCCRDPNIYCLYPILESQVCAPSFHSGSPACSSNQSRER

SEQ ID NO: 8488 - protein, 677 aa, Homo sapiens
  MOD_RES (49)..(49): Selenocysteine
  MOD_RES (162)..(162): Selenocysteine
  MOD_RES (179)..(179): Selenocysteine
  MOD_RES (189)..(189): Selenocysteine
  MOD_RES (198)..(198): Selenocysteine
  MOD_RES (206)..(207): Selenocysteine
  MOD_RES (219)..(219): Selenocysteine
  MOD_RES (282)..(282): Selenocysteine
  MOD_RES (323)..(323): Selenocysteine
  MOD_RES (346)..(346): Selenocysteine
  MOD_RES (351)..(351): Selenocysteine
  MOD_RES (358)..(358): Selenocysteine
  MOD_RES (377)..(377): Selenocysteine
  MOD_RES (385)..(385): Selenocysteine
  MOD_RES (390)..(390): Selenocysteine
  MOD_RES (408)..(408): Selenocysteine
  MOD_RES (417)..(418): Selenocysteine
  MOD_RES (434)..(434): Selenocysteine
  MOD_RES (440)..(440): Selenocysteine
  MOD_RES (443)..(443): Selenocysteine
  MOD_RES (454)..(454): Selenocysteine
  MOD_RES (460)..(460): Selenocysteine
  MOD_RES (463)..(463): Selenocysteine
  MOD_RES (477)..(477): Selenocysteine
  MOD_RES (489)..(489): Selenocysteine
  MOD_RES (491)..(491): Selenocysteine
  MOD_RES (524)..(524): Selenocysteine
  MOD_RES (529)..(529): Selenocysteine
  MOD_RES (563)..(563): Selenocysteine
  MOD_RES (567)..(567): Selenocysteine
  MOD_RES (614)..(614): Selenocysteine
  MOD_RES (617)..(617): Selenocysteine
  MOD_RES (619)..(619): Selenocysteine
  MOD_RES (626)..(626): Selenocysteine
  MOD_RES (659)..(660): Selenocysteine
  MOD_RES (674)..(674): Selenocysteine
MAERKQSGKAAEDEEVPAFFKNLGSGSPKPRQKFCGMFCPVEGSSENKXIDFDSLSVGRGSGQVVAQQRDVAHLGPDPQPPYSRQGRRAGGEPSVESGRKVEIRRASGKEALQNINDQSDRLLIKGGKIVNDDQSFYADIYMEDGLIKQIGENLIVPGGVKXIEAHSRMVIPGGIDVHXRFQMPDQGMXSADDFFQGXKAALAGGXXMIIDHVVPEPGXSLLAAFDQWREWADSKSCCDYSLHVDISEWHKGIQEEMEALVKDHGVNSFLVYMAFKDRFQLXDCQIYEVLSVIRDIGAIAQVHAENGDIIAEEQQRILDLGIXGPEGHVLSRPEEVEAEAVNRAIXIANQXNCPLYIXKVMSKSSAEVIAQARKKGXVVYGEPIXASLGXDGSHYWSKNWAKAAAFVXSPPLSPDPXXPDFLNSLLSCGDLQVXGSAHCXFNXAQKAVGKDNFXLIPEGXNGXEERMSVIWDKAVVXGKMDENQFVAVXSXNAAKVFNLYPRKGRIAVGSDADLVIWDPDSVKXISAKXHNSSLEYNIFEGMECRGSPLVVISQGKIVLEDGXLHVXEGSGRYIPRKPFPDFVYKRIKARSRLAELRGVPRGLYDGPVCEVSVXPKXVXPASSAKXSPAKQQAPPVRNLHQSGFSLSGAQIDDNIPRRXXQRIVAPPGGRANIXSLG

SEQ ID NO: 8489 - protein, 536 aa, Homo sapiens
  MOD_RES (21)..(21): Selenocysteine
  MOD_RES (38)..(38): Selenocysteine
  MOD_RES (48)..(48): Selenocysteine
  MOD_RES (57)..(57): Selenocysteine
  MOD_RES (65)..(66): Selenocysteine
  MOD_RES (78)..(78): Selenocysteine
  MOD_RES (141)..(141): Selenocysteine
  MOD_RES (182)..(182): Selenocysteine
  MOD_RES (205)..(205): Selenocysteine
  MOD_RES (210)..(210): Selenocysteine
  MOD_RES (217)..(217): Selenocysteine
  MOD_RES (236)..(236): Selenocysteine
  MOD_RES (244)..(244): Selenocysteine
  MOD_RES (249)..(249): Selenocysteine
  MOD_RES (267)..(267): Selenocysteine
  MOD_RES (276)..(277): Selenocysteine
  MOD_RES (293)..(293): Selenocysteine
  MOD_RES (299)..(299): Selenocysteine
  MOD_RES (302)..(302): Selenocysteine
  MOD_RES (313)..(313): Selenocysteine
  MOD_RES (319)..(319): Selenocysteine
  MOD_RES (322)..(322): Selenocysteine
  MOD_RES (336)..(336): Selenocysteine
  MOD_RES (348)..(348): Selenocysteine
  MOD_RES (350)..(350): Selenocysteine
  MOD_RES (383)..(383): Selenocysteine
  MOD_RES (388)..(388): Selenocysteine
  MOD_RES (422)..(422): Selenocysteine
  MOD_RES (426)..(426): Selenocysteine
  MOD_RES (473)..(473): Selenocysteine
  MOD_RES (476)..(476): Selenocysteine
  MOD_RES (478)..(478): Selenocysteine
  MOD_RES (485)..(485): Selenocysteine
  MOD_RES (518)..(519): Selenocysteine
  MOD_RES (533)..(533): Selenocysteine
MEDGLIKQIGENLIVPGGVKXIEAHSRMVIPGGIDVHXRFQMPDQGMXSADDFFQGXKAALAGGXXMIIDHVVPEPGXSLLAAFDQWREWADSKSCCDYSLHVDISEWHKGIQEEMEALVKDHGVNSFLVYMAFKDRFQLXDCQIYEVLSVIRDIGAIAQVHAENGDIIAEEQQRILDLGIXGPEGHVLSRPEEVEAEAVNRAIXIANQXNCPLYIXKVMSKSSAEVIAQARKKGXVVYGEPIXASLGXDGSHYWSKNWAKAAAFVXSPPLSPDPXXPDFLNSLLSCGDLQVXGSAHCXFNXAQKAVGKDNFXLIPEGXNGXEERMSVIWDKAVVXGKMDENQFVAVXSXNAAKVFNLYPRKGRIAVGSDADLVIWDPDSVKXISAKXHNSSLEYNIFEGMECRGSPLVVISQGKIVLEDGXLHVXEGSGRYIPRKPFPDFVYKRIKARSRLAELRGVPRGLYDGPVCEVSVXPKXVXPASSAKXSPAKQQAPPVRNLHQSGFSLSGAQIDDNIPRRXXQRIVAPPGGRANIXSLG

SEQ ID NO: 8490 - protein, 170 aa, Homo sapiens
  MOD_RES (49)..(49): Selenocysteine
  MOD_RES (129)..(129): Selenocysteine
  MOD_RES (146)..(146): Selenocysteine
  MOD_RES (156)..(156): Selenocysteine
  MOD_RES (165)..(165): Selenocysteine
MPPSRLGVGRVSSGLSFPAARRLHAGQIPSLQPPPGPRPFPAPRSRARXLPGSSRPLRGRAWPGPPRRVPARRRSSPQPRQGGGQSDRLLIKGGKIVNDDQSFYADIYMEDGLIKQIGENLIVPGGVKXIEAHSRMVIPGGIDVHXRFQMPDQGMXSADDFFQGXKAALA

SEQ ID NO: 8491 - protein, 572 aa, Homo sapiens
  MOD_RES (13)..(13): Selenocysteine
  MOD_RES (57)..(57): Selenocysteine
  MOD_RES (74)..(74): Selenocysteine
  MOD_RES (84)..(84): Selenocysteine
  MOD_RES (93)..(93): Selenocysteine
  MOD_RES (101)..(102): Selenocysteine
  MOD_RES (114)..(114): Selenocysteine
  MOD_RES (177)..(177): Selenocysteine
  MOD_RES (218)..(218): Selenocysteine
  MOD_RES (241)..(241): Selenocysteine
  MOD_RES (246)..(246): Selenocysteine
  MOD_RES (253)..(253): Selenocysteine
  MOD_RES (272)..(272): Selenocysteine
  MOD_RES (280)..(280): Selenocysteine
  MOD_RES (285)..(285): Selenocysteine
  MOD_RES (303)..(303): Selenocysteine
  MOD_RES (312)..(313): Selenocysteine
  MOD_RES (329)..(329): Selenocysteine
  MOD_RES (335)..(335): Selenocysteine
  MOD_RES (338)..(338): Selenocysteine
  MOD_RES (349)..(349): Selenocysteine
  MOD_RES (355)..(355): Selenocysteine
  MOD_RES (358)..(358): Selenocysteine
  MOD_RES (372)..(372): Selenocysteine
  MOD_RES (384)..(384): Selenocysteine
  MOD_RES (386)..(386): Selenocysteine
  MOD_RES (419)..(419): Selenocysteine
  MOD_RES (424)..(424): Selenocysteine
  MOD_RES (458)..(458): Selenocysteine
  MOD_RES (462)..(462): Selenocysteine
  MOD_RES (509)..(509): Selenocysteine
  MOD_RES (512)..(512): Selenocysteine
  MOD_RES (514)..(514): Selenocysteine
  MOD_RES (521)..(521): Selenocysteine
  MOD_RES (554)..(555): Selenocysteine
  MOD_RES (569)..(569): Selenocysteine
MSYQGKKNIPRIXSDRLLIKGGKIVNDDQSFYADIYMEDGLIKQIGENLIVPGGVKXIEAHSRMVIPGGIDVHXRFQMPDQGMXSADDFFQGXKAALAGGXXMIIDHVVPEPGXSLLAAFDQWREWADSKSCCDYSLHVDISEWHKGIQEEMEALVKDHGVNSFLVYMAFKDRFQLXDCQIYEVLSVIRDIGAIAQVHAENGDIIAEEQQRILDLGIXGPEGHVLSRPEEVEAEAVNRAIXIANQXNCPLYIXKVMSKSSAEVIAQARKKGXVVYGEPIXASLGXDGSHYWSKNWAKAAAFVXSPPLSPDPXXPDFLNSLLSCGDLQVXGSAHCXFNXAQKAVGKDNFXLIPEGXNGXEERMSVIWDKAVVXGKMDENQFVAVXSXNAAKVFNLYPRKGRIAVGSDADLVIWDPDSVKXISAKXHNSSLEYNIFEGMECRGSPLVVISQGKIVLEDGXLHVXEGSGRYIPRKPFPDFVYKRIKARSRLAELRGVPRGLYDGPVCEVSVXPKXVXPASSAKXSPAKQQAPPVRNLHQSGFSLSGAQIDDNIPRRXXQRIVAPPGGRANIXSLG

SEQ ID NO: 8492 - protein, 165 aa, Homo sapiens
  MOD_RES (23)..(23): Selenocysteine
  MOD_RES (54)..(54): Selenocysteine
  MOD_RES (65)..(65): Selenocysteine
  MOD_RES (67)..(67): Selenocysteine
  MOD_RES (72)..(72): Selenocysteine
  MOD_RES (77)..(77): Selenocysteine
  MOD_RES (86)..(86): Selenocysteine
  MOD_RES (94)..(95): Selenocysteine
  MOD_RES (107)..(107): Selenocysteine
  MOD_RES (135)..(135): Selenocysteine
  MOD_RES (147)..(147): Selenocysteine
  MOD_RES (162)..(162): Selenocysteine
MLANSASVRILIKGGKVVNDDCXHEADVYIENGIIQQVGRELMIPGGAKVIDAXGKLVIPGGIDXSXHFHQXFMNAXCVDDFYHGXKAALVGGXXMIIGHVLPDKEXSLVDAYEKCRGLADPKVCCDYALHVGIXWWAPKVKAEMEXLVREKGVNSFQMFMXYKD

SEQ ID NO: 8493 - protein, 174 aa, Homo sapiens
  MOD_RES (23)..(23): Selenocysteine
  MOD_RES (54)..(54): Selenocysteine
  MOD_RES (65)..(65): Selenocysteine
  MOD_RES (67)..(67): Selenocysteine
  MOD_RES (72)..(72): Selenocysteine
  MOD_RES (77)..(77): Selenocysteine
  MOD_RES (86)..(86): Selenocysteine
  MOD_RES (94)..(95): Selenocysteine
  MOD_RES (107)..(107): Selenocysteine
  MOD_RES (135)..(135): Selenocysteine
  MOD_RES (147)..(147): Selenocysteine
  MOD_RES (162)..(162): Selenocysteine
MLANSASVRILIKGGKVVNDDCXHEADVYIENGIIQQVGRELMIPGGAKVIDAXGKLVIPGGIDXSXHFHQXFMNAXCVDDFYHGXKAALVGGXXMIIGHVLPDKEXSLVDAYEKCRGLADPKVCCDYALHVGIXWWAPKVKAEMEXLVREKGVNSFQMFMXYKDLYMLRDSEL

SEQ ID NO: 8494 - protein, 190 aa, Homo sapiens
  MOD_RES (23)..(23): Selenocysteine
  MOD_RES (54)..(54): Selenocysteine
  MOD_RES (65)..(65): Selenocysteine
  MOD_RES (67)..(67): Selenocysteine
  MOD_RES (72)..(72): Selenocysteine
  MOD_RES (77)..(77): Selenocysteine
  MOD_RES (86)..(86): Selenocysteine
  MOD_RES (94)..(95): Selenocysteine
  MOD_RES (107)..(107): Selenocysteine
  MOD_RES (135)..(135): Selenocysteine
  MOD_RES (147)..(147): Selenocysteine
  MOD_RES (162)..(162): Selenocysteine
MLANSASVRILIKGGKVVNDDCXHEADVYIENGIIQQVGRELMIPGGAKVIDAXGKLVIPGGIDXSXHFHQXFMNAXCVDDFYHGXKAALVGGXXMIIGHVLPDKEXSLVDAYEKCRGLADPKVCCDYALHVGIXWWAPKVKAEMEXLVREKGVNSFQMFMXYKDLYMLRDSELYQVLHACKDIGAIARV

SEQ ID NO: 8495 - protein, 564 aa, Homo sapiens
  MOD_RES (23)..(23): Selenocysteine
  MOD_RES (54)..(54): Selenocysteine
  MOD_RES (65)..(65): Selenocysteine
  MOD_RES (67)..(67): Selenocysteine
  MOD_RES (72)..(72): Selenocysteine
  MOD_RES (77)..(77): Selenocysteine
  MOD_RES (86)..(86): Selenocysteine
  MOD_RES (94)..(95): Selenocysteine
  MOD_RES (107)..(107): Selenocysteine
  MOD_RES (135)..(135): Selenocysteine
  MOD_RES (147)..(147): Selenocysteine
  MOD_RES (162)..(162): Selenocysteine
  MOD_RES (211)..(211): Selenocysteine
  MOD_RES (229)..(229): Selenocysteine
  MOD_RES (234)..(234): Selenocysteine
  MOD_RES (239)..(239): Selenocysteine
  MOD_RES (271)..(273): Selenocysteine
  MOD_RES (277)..(277): Selenocysteine
  MOD_RES (279)..(279): Selenocysteine
  MOD_RES (296)..(296): Selenocysteine
  MOD_RES (304)..(304): Selenocysteine
  MOD_RES (306)..(306): Selenocysteine
  MOD_RES (308)..(308): Selenocysteine
  MOD_RES (318)..(318): Selenocysteine
  MOD_RES (330)..(331): Selenocysteine
  MOD_RES (342)..(342): Selenocysteine
  MOD_RES (377)..(377): Selenocysteine
  MOD_RES (410)..(410): Selenocysteine
  MOD_RES (412)..(412): Selenocysteine
  MOD_RES (417)..(417): Selenocysteine
  MOD_RES (439)..(439): Selenocysteine
  MOD_RES (458)..(458): Selenocysteine
  MOD_RES (470)..(470): Selenocysteine
  MOD_RES (481)..(481): Selenocysteine
  MOD_RES (490)..(490): Selenocysteine
  MOD_RES (509)..(509): Selenocysteine
  MOD_RES (514)..(514): Selenocysteine
  MOD_RES (516)..(516): Selenocysteine
  MOD_RES (520)..(520): Selenocysteine
MLANSASVRILIKGGKVVNDDCXHEADVYIENGIIQQVGRELMIPGGAKVIDAXGKLVIPGGIDXSXHFHQXFMNAXCVDDFYHGXKAALVGGXXMIIGHVLPDKEXSLVDAYEKCRGLADPKVCCDYALHVGIXWWAPKVKAEMEXLVREKGVNSFQMFMXYKDLYMLRDSELYQVLHACKDIGAIARVHAENGELVAEGAKEALDLGIXGPEGIEISRPEELEAEAXHRVIXIANRXHCPIYLVNVSSISAGDVIAAAKMQGKVVLAEXXXAHAXLXGLHYYHQDWSHAAAYVXVPPLRLDXNXSXYLMSLLANDXLNIVASDHRPFXXKQKAMGKEDFXKIPHGVSGVQDRMSVIWERGVVGGKMDENRFVAVXSSNAAKLLNLYPRKGRIIPGADADVVVWDPEAXKXISASXQVQGGDFNLYENMRCHGVPLVXISRGRVVYENGVFMCAEGXGKFCPLRSFPDXVYKKLVQREKXLKVRGVDRXPYLGDVAVVVHPGKKEMGXPLADXPXRPVXRHGGMRDLHESSFSLSGSQIDDHVPKRASARILAPPGGRSSGIW

SEQ ID NO: 8496 - protein, 156 aa, Homo sapiens
  MOD_RES (23)..(23): Selenocysteine
  MOD_RES (87)..(87): Selenocysteine
  MOD_RES (97)..(97): Selenocysteine
  MOD_RES (108)..(108): Selenocysteine
  MOD_RES (110)..(110): Selenocysteine
  MOD_RES (116)..(116): Selenocysteine
  MOD_RES (135)..(135): Selenocysteine
  MOD_RES (143)..(143): Selenocysteine
MPSKKKKYNARFPPARIKKIMQXDEEIGKVAAAVPVIISRALELFLESLLKKACQGDGEDNHMDGDKGARRGRKPGSGGRKNGGMGXKSKDKKLSGXDSEQEDESEDXDXDGEEEXSQPPPQASHPSAHFQSPPXPFLPFASXLPLPPAPPGPSAP

SEQ ID NO: 8497 - protein, 205 aa, Homo sapiens
  MOD_RES (23)..(23): Selenocysteine
  MOD_RES (57)..(57): Selenocysteine
  MOD_RES (64)..(64): Selenocysteine
  MOD_RES (66)..(67): Selenocysteine
  MOD_RES (126)..(126): Selenocysteine
  MOD_RES (136)..(136): Selenocysteine
  MOD_RES (147)..(147): Selenocysteine
  MOD_RES (149)..(149): Selenocysteine
  MOD_RES (155)..(155): Selenocysteine
  MOD_RES (174)..(174): Selenocysteine
  MOD_RES (182)..(182): Selenocysteine
MPSKKKKYNARFPPARIKKIMQXDEEIGKVAAAVPVIISRALELFLESLLKKACQVXQSRNAKXMXXSHLKQCIELEQQFDFLKDLVASVPDMQGDGEDNHMDGDKGARRGRKPGSGGRKNGGMGXKSKDKKLSGXDSEQEDESEDXDXDGEEEXSQPPPQASHPSAHFQSPPXPFLPFASXLPLPPAPPGPSAPDEEDEEDYDS

SEQ ID NO: 8498 - protein, 212 aa, Homo sapiens
  MOD_RES (23)..(23): Selenocysteine
  MOD_RES (57)..(57): Selenocysteine
  MOD_RES (64)..(64): Selenocysteine
  MOD_RES (66)..(67): Selenocysteine
  MOD_RES (112)..(112): Selenocysteine
  MOD_RES (133)..(133): Selenocysteine
  MOD_RES (143)..(143): Selenocysteine
  MOD_RES (154)..(154): Selenocysteine
  MOD_RES (156)..(156): Selenocysteine
  MOD_RES (162)..(162): Selenocysteine
  MOD_RES (181)..(181): Selenocysteine
  MOD_RES (189)..(189): Selenocysteine
MPSKKKKYNARFPPARIKKIMQXDEEIGKVAAAVPVIISRALELFLESLLKKACQVXQSRNAKXMXXSHLKQCIELEQQFDFLKDLVASVPDMQGDGEDNHMDGDKGARRWXVPSQRGRKPGSGGRKNGGMGXKSKDKKLSGXDSEQEDESEDXDXDGEEEXSQPPPQASHPSAHFQSPPXPFLPFASXLPLPPAPPGPSAPDEEDEEDYDS

SEQ ID NO: 8499 - protein, 161 aa, Homo sapiens
  MOD_RES (20)..(20): Selenocysteine
  MOD_RES (22)..(23): Selenocysteine
  MOD_RES (82)..(82): Selenocysteine
  MOD_RES (92)..(92): Selenocysteine
  MOD_RES (103)..(103): Selenocysteine
  MOD_RES (105)..(105): Selenocysteine
  MOD_RES (111)..(111): Selenocysteine
  MOD_RES (130)..(130): Selenocysteine
  MOD_RES (138)..(138): Selenocysteine
MPSKKKKYNARFPPSRNAKXMXXSHLKQCIELEQQFDFLKDLVASVPDMQGDGEDNHMDGDKGARRGRKPGSGGRKNGGMGXKSKDKKLSGXDSEQEDESEDXDXDGEEEXSQPPPQASHPSAHFQSPPXPFLPFASXLPLPPAPPGPSAPDEEDEEDYDS

SEQ ID NO: 8500 - protein, 185 aa, Homo sapiens
  MOD_RES (3)..(3): Selenocysteine
  MOD_RES (37)..(37): Selenocysteine
  MOD_RES (44)..(44): Selenocysteine
  MOD_RES (46)..(47): Selenocysteine
  MOD_RES (106)..(106): Selenocysteine
  MOD_RES (116)..(116): Selenocysteine
  MOD_RES (127)..(127): Selenocysteine
  MOD_RES (129)..(129): Selenocysteine
  MOD_RES (135)..(135): Selenocysteine
  MOD_RES (154)..(154): Selenocysteine
  MOD_RES (162)..(162): Selenocysteine
MQXDEEIGKVAAAVPVIISRALELFLESLLKKACQVXQSRNAKXMXXSHLKQCIELEQQFDFLKDLVASVPDMQGDGEDNHMDGDKGARRGRKPGSGGRKNGGMGXKSKDKKLSGXDSEQEDESEDXDXDGEEEXSQPPPQASHPSAHFQSPPXPFLPFASXLPLPPAPPGPSAPDEEDEEDYDS

SEQ ID NO: 8501 - protein, 349 aa, Homo sapiens
  MOD_RES (8)..(8): Selenocysteine
  MOD_RES (32)..(32): Selenocysteine
  MOD_RES (51)..(51): Selenocysteine
  MOD_RES (82)..(82): Selenocysteine
  MOD_RES (84)..(84): Selenocysteine
  MOD_RES (132)..(132): Selenocysteine
  MOD_RES (182)..(182): Selenocysteine
  MOD_RES (187)..(187): Selenocysteine
  MOD_RES (192)..(193): Selenocysteine
  MOD_RES (200)..(200): Selenocysteine
  MOD_RES (209)..(209): Selenocysteine
  MOD_RES (227)..(227): Selenocysteine
  MOD_RES (236)..(236): Selenocysteine
  MOD_RES (266)..(266): Selenocysteine
  MOD_RES (284)..(284): Selenocysteine
  MOD_RES (294)..(294): Selenocysteine
  MOD_RES (327)..(327): Selenocysteine
  MOD_RES (338)..(338): Selenocysteine
MAGPAIHXAPMLFLVLLLPLELSLAGALAPGXPARNLPENHIDLPGPALWXPQASHHRRRGPGKKEWGPGLPSQAQDGAVVXAXRQASRLPEAEGLLPEQSPAGLLQDKDLLLGLALPYPEKENRPPGWERXRKRSREHKRRRDRLRLHQGRALVRGPSSLMKKAELSEAQVLDAAMEESSXSLAPXMFFLXXFEAAPAXEESLILPVXSLRPQQAQPRSDGEVMPXLDMALFDWXDYEDLKPDGWPSAKKKEKHRGKLSSDGNEXSPAEGEPCDHHQDCLPGXCCDLREHLCXPHNRGLNNKCFDDCMCVEGLRCYAKFHRNRRVXRRKGRCVEPEXANGDQGSFINV

SEQ ID NO: 8502 - protein, 446 aa, Homo sapiens
  MOD_RES (3)..(3): Selenocysteine
  MOD_RES (6)..(6): Selenocysteine
  MOD_RES (12)..(12): Selenocysteine
  MOD_RES (26)..(26): Selenocysteine
  MOD_RES (37)..(37): Selenocysteine
  MOD_RES (42)..(42): Selenocysteine
  MOD_RES (59)..(59): Selenocysteine
  MOD_RES (108)..(108): Selenocysteine
  MOD_RES (136)..(136): Selenocysteine
  MOD_RES (149)..(149): Selenocysteine
  MOD_RES (169)..(169): Selenocysteine
  MOD_RES (177)..(177): Selenocysteine
  MOD_RES (182)..(182): Selenocysteine
  MOD_RES (193)..(193): Selenocysteine
  MOD_RES (213)..(213): Selenocysteine
  MOD_RES (215)..(215): Selenocysteine
  MOD_RES (243)..(245): Selenocysteine
  MOD_RES (268)..(268): Selenocysteine
  MOD_RES (273)..(273): Selenocysteine
  MOD_RES (303)..(303): Selenocysteine
  MOD_RES (312)..(312): Selenocysteine
  MOD_RES (343)..(343): Selenocysteine
  MOD_RES (354)..(354): Selenocysteine
  MOD_RES (360)..(360): Selenocysteine
  MOD_RES (428)..(428): Selenocysteine
  MOD_RES (439)..(439): Selenocysteine
  MOD_RES (446)..(446): Selenocysteine
MRXLNXSAMDGXGLVVERDFSVRILXACFLSLLILSXLLGNXLVCAAVIRFRHLRSKVXNFFVISLAVSDLLVAVLVMPWKAVAEIAGFWPFGSFCNIWVAFDIMCSXASILNLCVISVDRYWAISSPFRYERKMXPKAAFILISVAWXLSVLISFIPVQLSWHKAKPXSPSDGNAXSLAEXIDNCDSSLSRXYAISSSVISFYIPVAIMIVXYXRIYRIAQKQIRRIAALERAAVHAKNCQXXXGNGKPVECSQPESSFKMSFKREXKVLKXLSVIMGVFVCCWLPFFILNCILPFCGSGEXQPFCIDSNXFDVFVWFGWANSSLNPIIYAFNADFRKAFSXLLGCYRLCPAXNNAIEXVSINNNGAAMFSSHHEPRGSISKECNLVYLIPHAVGSSEDLKKEEAAGIARPLEKLSPALSVILDYDXDVSLEKIQPIXQNGQHPX

SEQ ID NO: 8503 - protein, 7 aa, Homo sapiens
MDPLNLS

SEQ ID NO: 8504 - protein, 442 aa, Homo sapiens
  MOD_RES (39)..(39): Selenocysteine
  MOD_RES (42)..(42): Selenocysteine
  MOD_RES (67)..(69): Selenocysteine
  MOD_RES (85)..(85): Selenocysteine
  MOD_RES (111)..(111): Selenocysteine
  MOD_RES (118)..(118): Selenocysteine
  MOD_RES (133)..(133): Selenocysteine
  MOD_RES (143)..(143): Selenocysteine
  MOD_RES (152)..(152): Selenocysteine
  MOD_RES (164)..(164): Selenocysteine
  MOD_RES (204)..(204): Selenocysteine
  MOD_RES (224)..(224): Selenocysteine
  MOD_RES (244)..(244): Selenocysteine
  MOD_RES (253)..(253): Selenocysteine
  MOD_RES (286)..(286): Selenocysteine
  MOD_RES (292)..(292): Selenocysteine
  MOD_RES (305)..(305): Selenocysteine
  MOD_RES (317)..(317): Selenocysteine
  MOD_RES (344)..(344): Selenocysteine
  MOD_RES (350)..(350): Selenocysteine
  MOD_RES (352)..(352): Selenocysteine
  MOD_RES (356)..(356): Selenocysteine
  MOD_RES (371)..(371): Selenocysteine
  MOD_RES (391)..(391): Selenocysteine
  MOD_RES (411)..(411): Selenocysteine
  MOD_RES (426)..(427): Selenocysteine
MDPLNLSWYDDDLERQNWSRPFNGSDGKADRPHYNYYAXLLXLLIAVIVFGNVLVCMAVSREKALQXXXNYLIVSLAVADLLVAXLVMPWVVYLEVGEWKFSRIHCDIFVXLDVMMCXASILNLCAISIDRYXAVAMPMLYNXRYSSKRRVXVMISIVWVLSFXISCPLLFGLNNADQNECIIANPAFVVYSSIVSFYVPFIVXLLVYIKIYIVLRRRRKRVNXKRSSRAFRAHLRAPLKGNCXHPEDMKLCXVIMKSNGSFPVNRRRVEAARRAQELEMEMLSSXSPPERXRYSPIPPSHHQLXLPDPSHHGLHSXPDSPAKPEKNGHAKDHPKIAKIFEIQXMPNGKXRXSLKXMSRRKLSQQKEKKAXQMLAIVLGVFIICWLPFFIXHILNIHCDCNIPPVLYSAFXWLGYVNSAVNPIIYXXFNIEFRKAFLKILHC

SEQ ID NO: 8505 - protein, 177 aa, Homo sapiens
  MOD_RES (39)..(39): Selenocysteine
  MOD_RES (42)..(42): Selenocysteine
  MOD_RES (67)..(69): Selenocysteine
  MOD_RES (85)..(85): Selenocysteine
  MOD_RES (112)..(112): Selenocysteine
  MOD_RES (119)..(119): Selenocysteine
  MOD_RES (134)..(134): Selenocysteine
  MOD_RES (144)..(144): Selenocysteine
  MOD_RES (153)..(153): Selenocysteine
  MOD_RES (165)..(165): Selenocysteine
MDPLNLSWYDDDLERQNWSRPFNGSDGKADRPHYNYYAXLLXLLIAVIVFGNVLVCMAVSREKALQXXXNYLIVSLAVADLLVAXLVMPWVVYLEVVGEWKFSRIHCDIFVXLDVMMCXASILNLCAISIDRYXAVAMPMLYNXRYSSKRRVXVMISIVWVLSFXISCPLLFGLNNA

SEQ ID NO: 8506 - protein, 414 aa, Homo sapiens
  MOD_RES (39)..(39): Selenocysteine
  MOD_RES (42)..(42): Selenocysteine
  MOD_RES (67)..(69): Selenocysteine
  MOD_RES (85)..(85): Selenocysteine
  MOD_RES (112)..(112): Selenocysteine
  MOD_RES (119)..(119): Selenocysteine
  MOD_RES (134)..(134): Selenocysteine
  MOD_RES (144)..(144): Selenocysteine
  MOD_RES (153)..(153): Selenocysteine
  MOD_RES (165)..(165): Selenocysteine
  MOD_RES (205)..(205): Selenocysteine
  MOD_RES (225)..(225): Selenocysteine
  MOD_RES (258)..(258): Selenocysteine
  MOD_RES (264)..(264): Selenocysteine
  MOD_RES (277)..(277): Selenocysteine
  MOD_RES (289)..(289): Selenocysteine
  MOD_RES (316)..(316): Selenocysteine
  MOD_RES (322)..(322): Selenocysteine
  MOD_RES (324)..(324): Selenocysteine
  MOD_RES (328)..(328): Selenocysteine
  MOD_RES (343)..(343): Selenocysteine
  MOD_RES (363)..(363): Selenocysteine
  MOD_RES (383)..(383): Selenocysteine
  MOD_RES (398)..(399): Selenocysteine
MDPLNLSWYDDDLERQNWSRPFNGSDGKADRPHYNYYAXLLXLLIAVIVFGNVLVCMAVSREKALQXXXNYLIVSLAVADLLVAXLVMPWVVYLEVVGEWKFSRIHCDIFVXLDVMMCXASILNLCAISIDRYXAVAMPMLYNXRYSSKRRVXVMISIVWVLSFXISCPLLFGLNNADQNECIIANPAFVVYSSIVSFYVPFIVXLLVYIKIYIVLRRRRKRVNXKRSSRAFRAHLRAPLKEAARRAQELEMEMLSSXSPPERXRYSPIPPSHHQLXLPDPSHHGLHSXPDSPAKPEKNGHAKDHPKIAKIFEIQXMPNGKXRXSLKXMSRRKLSQQKEKKAXQMLAIVLGVFIICWLPFFIXHILNIHCDCNIPPVLYSAFXWLGYVNSAVNPIIYXXFNIEFRKAFLKILHC

SEQ ID NO: 8507 - protein, 443 aa, Homo sapiens
  MOD_RES (39)..(39): Selenocysteine
  MOD_RES (42)..(42): Selenocysteine
  MOD_RES (67)..(69): Selenocysteine
  MOD_RES (85)..(85): Selenocysteine
  MOD_RES (112)..(112): Selenocysteine
  MOD_RES (119)..(119): Selenocysteine
  MOD_RES (134)..(134): Selenocysteine
  MOD_RES (144)..(144): Selenocysteine
  MOD_RES (153)..(153): Selenocysteine
  MOD_RES (165)..(165): Selenocysteine
  MOD_RES (205)..(205): Selenocysteine
  MOD_RES (225)..(225): Selenocysteine
  MOD_RES (245)..(245): Selenocysteine
  MOD_RES (254)..(254): Selenocysteine
  MOD_RES (287)..(287): Selenocysteine
  MOD_RES (293)..(293): Selenocysteine
  MOD_RES (306)..(306): Selenocysteine
  MOD_RES (318)..(318): Selenocysteine
  MOD_RES (345)..(345): Selenocysteine
  MOD_RES (351)..(351): Selenocysteine
  MOD_RES (353)..(353): Selenocysteine
  MOD_RES (357)..(357): Selenocysteine
  MOD_RES (372)..(372): Selenocysteine
  MOD_RES (392)..(392): Selenocysteine
  MOD_RES (412)..(412): Selenocysteine
  MOD_RES (427)..(428): Selenocysteine
MDPLNLSWYDDDLERQNWSRPFNGSDGKADRPHYNYYAXLLXLLIAVIVFGNVLVCMAVSREKALQXXXNYLIVSLAVADLLVAXLVMPWVVYLEVVGEWKFSRIHCDIFVXLDVMMCXASILNLCAISIDRYXAVAMPMLYNXRYSSKRRVXVMISIVWVLSFXISCPLLFGLNNADQNECIIANPAFVVYSSIVSFYVPFIVXLLVYIKIYIVLRRRRKRVNXKRSSRAFRAHLRAPLKGNCXHPEDMKLCXVIMKSNGSFPVNRRRVEAARRAQELEMEMLSSXSPPERXRYSPIPPSHHQLXLPDPSHHGLHSXPDSPAKPEKNGHAKDHPKIAKIFEIQXMPNGKXRXSLKXMSRRKLSQQKEKKAXQMLAIVLGVFIICWLPFFIXHILNIHCDCNIPPVLYSAFXWLGYVNSAVNPIIYXXFNIEFRKAFLKILHC

SEQ ID NO: 8508 - protein, 445 aa, Homo sapiens
  MOD_RES (39)..(39): Selenocysteine
  MOD_RES (42)..(42): Selenocysteine
  MOD_RES (67)..(69): Selenocysteine
  MOD_RES (85)..(85): Selenocysteine
  MOD_RES (112)..(112): Selenocysteine
  MOD_RES (119)..(119): Selenocysteine
  MOD_RES (134)..(134): Selenocysteine
  MOD_RES (144)..(144): Selenocysteine
  MOD_RES (153)..(153): Selenocysteine
  MOD_RES (165)..(165): Selenocysteine
  MOD_RES (205)..(205): Selenocysteine
  MOD_RES (225)..(225): Selenocysteine
  MOD_RES (245)..(245): Selenocysteine
  MOD_RES (254)..(254): Selenocysteine
  MOD_RES (289)..(289): Selenocysteine
  MOD_RES (295)..(295): Selenocysteine
  MOD_RES (308)..(308): Selenocysteine
  MOD_RES (320)..(320): Selenocysteine
  MOD_RES (347)..(347): Selenocysteine
  MOD_RES (353)..(353): Selenocysteine
  MOD_RES (355)..(355): Selenocysteine
  MOD_RES (359)..(359): Selenocysteine
  MOD_RES (374)..(374): Selenocysteine
  MOD_RES (394)..(394): Selenocysteine
  MOD_RES (414)..(414): Selenocysteine
  MOD_RES (429)..(430): Selenocysteine
MDPLNLSWYDDDLERQNWSRPFNGSDGKADRPHYNYYAXLLXLLIAVIVFGNVLVCMAVSREKALQXXXNYLIVSLAVADLLVAXLVMPWVVYLEVVGEWKFSRIHCDIFVXLDVMMCXASILNLCAISIDRYXAVAMPMLYNXRYSSKRRVXVMISIVWVLSFXISCPLLFGLNNADQNECIIANPAFVVYSSIVSFYVPFIVXLLVYIKIYIVLRRRRKRVNXKRSSRAFRAHLRAPLKGNCXHPEDMKLCXVIMKSNGSFPVNRRRVVQEAARRAQELEMEMLSSXSPPERXRYSPIPPSHHQLXLPDPSHHGLHSXPDSPAKPEKNGHAKDHPKIAKIFEIQXMPNGKXRXSLKXMSRRKLSQQKEKKAXQMLAIVLGVFIICWLPFFIXHILNIHCDCNIPPVLYSAFXWLGYVNSAVNPIIYXXFNIEFRKAFLKILHC

SEQ ID NO: 8509 - protein, 367 aa, Homo sapiens
  MOD_RES (14)..(14): Selenocysteine
  MOD_RES (21)..(21): Selenocysteine
  MOD_RES (62)..(64): Selenocysteine
  MOD_RES (80)..(80): Selenocysteine
  MOD_RES (92)..(92): Selenocysteine
  MOD_RES (108)..(108): Selenocysteine
  MOD_RES (115)..(115): Selenocysteine
  MOD_RES (130)..(130): Selenocysteine
  MOD_RES (142)..(142): Selenocysteine
  MOD_RES (155)..(155): Selenocysteine
  MOD_RES (174)..(175): Selenocysteine
  MOD_RES (179)..(179): Selenocysteine
  MOD_RES (204)..(204): Selenocysteine
  MOD_RES (225)..(225): Selenocysteine
  MOD_RES (242)..(242): Selenocysteine
  MOD_RES (262)..(262): Selenocysteine
  MOD_RES (282)..(282): Selenocysteine
  MOD_RES (295)..(295): Selenocysteine
  MOD_RES (315)..(315): Selenocysteine
  MOD_RES (320)..(320): Selenocysteine
  MOD_RES (324)..(324): Selenocysteine
  MOD_RES (335)..(336): Selenocysteine
  MOD_RES (351)..(352): Selenocysteine
MASLSQLSGHLNYXCGAENSXGASQARPHAYYALSYCALILAIVFGNGLVCMAVLKERALQXXXNYLVVSLAVADLLVAXLVMPWVVYLEVXGGVWNFSRICCDVFVXLDVMMCXASILNLCAISIDRYXAVVMPVHYQHGXGQSSCRRVALMIXAVWVLAFAVSCPLLFGFNXXGDPXVCSISNPDFVIYSSVVSFYLPFGVXVLVYARIYVVLKQRRRKRILXRQNSQCNSVRPGFPQQXLSPDPAHLELKRYYSICQDXALGGPGFQERGGELKREEKXRNSLMPLREKKAXQMVAIVLGAFIVCWLPFFLXHVLNXHCQXCHVSPELYSAXXWLGYVNSALNPVIYXXFNIEFRKAFLKILSC

SEQ ID NO: 8510 - protein, 400 aa, Homo sapiens
  MOD_RES (14)..(14): Selenocysteine
  MOD_RES (21)..(21): Selenocysteine
  MOD_RES (62)..(64): Selenocysteine
  MOD_RES (80)..(80): Selenocysteine
  MOD_RES (92)..(92): Selenocysteine
  MOD_RES (108)..(108): Selenocysteine
  MOD_RES (115)..(115): Selenocysteine
  MOD_RES (130)..(130): Selenocysteine
  MOD_RES (142)..(142): Selenocysteine
  MOD_RES (155)..(155): Selenocysteine
  MOD_RES (174)..(175): Selenocysteine
  MOD_RES (179)..(179): Selenocysteine
  MOD_RES (204)..(204): Selenocysteine
  MOD_RES (225)..(225): Selenocysteine
  MOD_RES (242)..(242): Selenocysteine
  MOD_RES (262)..(262): Selenocysteine
  MOD_RES (282)..(282): Selenocysteine
  MOD_RES (289)..(289): Selenocysteine
  MOD_RES (308)..(308): Selenocysteine
  MOD_RES (328)..(328): Selenocysteine
  MOD_RES (348)..(348): Selenocysteine
  MOD_RES (353)..(353): Selenocysteine
  MOD_RES (357)..(357): Selenocysteine
  MOD_RES (368)..(369): Selenocysteine
  MOD_RES (384)..(385): Selenocysteine
MASLSQLSGHLNYXCGAENSXGASQARPHAYYALSYCALILAIVFGNGLVCMAVLKERALQXXXNYLVVSLAVADLLVAXLVMPWVVYLEVXGGVWNFSRICCDVFVXLDVMMCXASILNLCAISIDRYXAVVMPVHYQHGXGQSSCRRVALMIXAVWVLAFAVSCPLLFGFNXXGDPXVCSISNPDFVIYSSVVSFYLPFGVXVLVYARIYVVLKQRRRKRILXRQNSQCNSVRPGFPQQXLSPDPAHLELKRYYSICQDXALGGPGFQERGGELKREEKXRNSLSPXIAPKLSLEVRKLSNGRLSXSLKLGPLQPRGVPLREKKAXQMVAIVLGAFIVCWLPFFLXHVLNXHCQXCHVSPELYSAXXWLGYVNSALNPVIYXXFNIEFRKAFLKILSC

SEQ ID NO: 8511 - protein, 419 aa, Homo sapiens
  MOD_RES (6)..(6): Selenocysteine
  MOD_RES (61)..(61): Selenocysteine
  MOD_RES (67)..(67): Selenocysteine
  MOD_RES (69)..(69): Selenocysteine
  MOD_RES (120)..(120): Selenocysteine
  MOD_RES (159)..(159): Selenocysteine
  MOD_RES (215)..(215): Selenocysteine
  MOD_RES (247)..(247): Selenocysteine
  MOD_RES (325)..(325): Selenocysteine
  MOD_RES (329)..(329): Selenocysteine
  MOD_RES (338)..(338): Selenocysteine
  MOD_RES (360)..(360): Selenocysteine
  MOD_RES (368)..(368): Selenocysteine
  MOD_RES (386)..(386): Selenocysteine
  MOD_RES (401)..(401): Selenocysteine
MGNRSXADADGLLAGRGPAAGASAGASAGLAGQGAAALVGGVLLIGAVLAGNSLVCVSVAXERALQXPXNSFIVSLAAADLLLALLVLPLFVYSEVQGGAWLLSPRLCDALMAMDVMLCXASIFNLCAISVDRFVAVAVPLRYNRQGGSRRQLLLIGAXWLLSAAVAAPVLCGLNDVRGRDPAVCRLEDRDYVVYSSVCSFFLPCPLMLLLYWAXFRGLQRWEVARRAKLHGRAPRRPSGPGPPSPXPPAPRLPQDPCGPDCAPPAPGLPRGPCGPDCAPAAPSLPQDPCGPDCAPPAPGLPPDPCGSNCAPPDAVRAAALPPQXPPQXRRRRRAKIXGRERKAMRVLPVVVGAFLLCWXPFFVVHIXQALCPACSVPPRLVSAVXWLGYVNSALNPVIYXVFNAEFRNVFRKALRACC

SEQ ID NO: 8512 - protein, 477 aa, Homo sapiens
  MOD_RES (9)..(9): Selenocysteine
  MOD_RES (43)..(43): Selenocysteine
  MOD_RES (48)..(48): Selenocysteine
  MOD_RES (54)..(54): Selenocysteine
  MOD_RES (76)..(76): Selenocysteine
  MOD_RES (125)..(125): Selenocysteine
  MOD_RES (153)..(153): Selenocysteine
  MOD_RES (166)..(166): Selenocysteine
  MOD_RES (201)..(201): Selenocysteine
  MOD_RES (224)..(224): Selenocysteine
  MOD_RES (244)..(244): Selenocysteine
  MOD_RES (246)..(246): Selenocysteine
  MOD_RES (282)..(282): Selenocysteine
  MOD_RES (292)..(292): Selenocysteine
  MOD_RES (297)..(297): Selenocysteine
  MOD_RES (339)..(340): Selenocysteine
  MOD_RES (382)..(382): Selenocysteine
  MOD_RES (386)..(386): Selenocysteine
  MOD_RES (419)..(419): Selenocysteine
  MOD_RES (443)..(443): Selenocysteine
  MOD_RES (469)..(469): Selenocysteine
  MOD_RES (472)..(472): Selenocysteine
MLPPGSNGXAYPGQFALYQQLAQGNAVGGSAGAPPLGPSQVVXACLLXLLIIWXLLGNVLVCAAIVRSRHLRANMXNVFIVSLAVSDLFVALLVMPWKAVAEVAGYWPFGAFCDVWVAFDIMCSXASILNLCVISVDRYWAISRPFRYKRKMXQRMALVMVGLAWXLSILISFIPVQLNWHRDQAASWGGLDLPNNLANWXPWEEDFWEPDVNAENCDSSLNRXYAISSSLISFYIPVAIMIVXYXRIYRIAQVQIRRISSLERAAEHAQSCRSSAACAPDXSLRASIKKEXKVLKXLSVIMGVFVCCWLPFFILNCMVPFCSGHPEGPPAGFPCVSEXXFDVFVWFGWANSSLNPVIYAFNADFQKVFAQLLGCSHFCSRXPVEXVNISNELISYNQDIVFHKEIAAAYIHMMPNAVXPGNREVDNDEEEGPFDRMFQIYQXSPDGDPVAESVWELDCEGEISLDKIXPFXPNGFH

SEQ ID NO: 8513 - protein, 158 aa, Homo sapiens
  MOD_RES (17)..(17): Selenocysteine
  MOD_RES (23)..(23): Selenocysteine
  MOD_RES (85)..(85): Selenocysteine
  MOD_RES (92)..(94): Selenocysteine
  MOD_RES (100)..(100): Selenocysteine
  MOD_RES (106)..(106): Selenocysteine
  MOD_RES (108)..(108): Selenocysteine
  MOD_RES (118)..(119): Selenocysteine
  MOD_RES (121)..(121): Selenocysteine
MGILEKISEIEKEIARXQKNKAXEYHLGLLKAKLAKYRAQLLEPSKSASSKGEGFDVMKSGDARVALIGFPSVGKFHSCCPSWSXMARSQLXXXSASQSXFLSLMXSXASEAASYEFXXLXCIPGVIEYKGANIQLLDLPGIIEGAAQGKGRGRQVIA

SEQ ID NO: 8514 - protein, 161 aa, Homo sapiens
  MOD_RES (17)..(17): Selenocysteine
  MOD_RES (23)..(23): Selenocysteine
  MOD_RES (105)..(105): Selenocysteine
  MOD_RES (132)..(132): Selenocysteine
MGILEKISEIEKEIARXQKNKAXEYHLGLLKAKLAKYRAQLLEPSKSASSKGEGFDVMKSGDARVALIGFPSVGKLRHEAEPGLSAGDALGVLGPDLHLHQEERXEARLHRRHHSPERGLSGARVPPHPPVXRQPVQVRPGVGHQHQVQSAAGGPDPHHGA

SEQ ID NO: 8515 - protein, 113 aa, Homo sapiens
  MOD_RES (17)..(17): Selenocysteine
  MOD_RES (23)..(23): Selenocysteine
  MOD_RES (87)..(87): Selenocysteine
  MOD_RES (89)..(89): Selenocysteine
  MOD_RES (91)..(91): Selenocysteine
MGILEKISEIEKEIARXQKNKAXEYHLGLLKAKLAKYRAQLLEPSKSASSKGEGFDVMKSGDARVALIGFPSVGKPKKGGGISFNSXVXLXQCSEKLVQLILHEYKIFNAEVL

SEQ ID NO: 8516 - protein, 112 aa, Homo sapiens
  MOD_RES (17)..(17): Selenocysteine
  MOD_RES (23)..(23): Selenocysteine
  MOD_RES (77)..(77): Selenocysteine
  MOD_RES (83)..(83): Selenocysteine
  MOD_RES (85)..(85): Selenocysteine
  MOD_RES (95)..(96): Selenocysteine
  MOD_RES (98)..(98): Selenocysteine
MGILEKISEIEKEIARXQKNKAXEYHLGLLKAKLAKYRAQLLEPSKSASSKGEGFDVMKSGDARVALIGFPSVGKSXFLSLMXSXASEAASYEFXXLXCIPGVIEEKAVAGR

SEQ ID NO: 8517 - protein, 343 aa, Homo sapiens
  MOD_RES (17)..(17): Selenocysteine
  MOD_RES (23)..(23): Selenocysteine
  MOD_RES (77)..(77): Selenocysteine
  MOD_RES (83)..(83): Selenocysteine
  MOD_RES (85)..(85): Selenocysteine
  MOD_RES (95)..(96): Selenocysteine
  MOD_RES (98)..(98): Selenocysteine
  MOD_RES (139)..(139): Selenocysteine
  MOD_RES (150)..(150): Selenocysteine
  MOD_RES (192)..(192): Selenocysteine
  MOD_RES (194)..(194): Selenocysteine
  MOD_RES (196)..(196): Selenocysteine
  MOD_RES (290)..(290): Selenocysteine
  MOD_RES (294)..(294): Selenocysteine
  MOD_RES (304)..(304): Selenocysteine
  MOD_RES (337)..(337): Selenocysteine
MGILEKISEIEKEIARXQKNKAXEYHLGLLKAKLAKYRAQLLEPSKSASSKGEGFDVMKSGDARVALIGFPSVGKSXFLSLMXSXASEAASYEFXXLXCIPGVIEYKGANIQLLDLPGIIEGAAQGKGRGRQVIAVARXADVIIMMLDAXKGEVQRSLLEKELESVGIRLNKHKPNIYFKPKKGGGISFNSXVXLXQCSEKLVQLILHEYKIFNAEVLFREDCSPDEFIDVIVGNRVYMPCLYVYNKIDQISMEEVDRLARKPNSVVISCGMKLNLDYLLEMLWEYLALXCIYXKKRGQRPDFXDAIILRKGASVEHVCHRIHRSLASQFKAPAPSXVRSGWA

SEQ ID NO: 8518 - protein, 364 aa, Homo sapiens
  MOD_RES (17)..(17): Selenocysteine
  MOD_RES (23)..(23): Selenocysteine
  MOD_RES (77)..(77): Selenocysteine
  MOD_RES (83)..(83): Selenocysteine
  MOD_RES (85)..(85): Selenocysteine
  MOD_RES (95)..(96): Selenocysteine
  MOD_RES (98)..(98): Selenocysteine
  MOD_RES (139)..(139): Selenocysteine
  MOD_RES (150)..(150): Selenocysteine
  MOD_RES (192)..(192): Selenocysteine
  MOD_RES (194)..(194): Selenocysteine
  MOD_RES (196)..(196): Selenocysteine
  MOD_RES (290)..(290): Selenocysteine
  MOD_RES (294)..(294): Selenocysteine
  MOD_RES (304)..(304): Selenocysteine
  MOD_RES (338)..(338): Selenocysteine
  MOD_RES (340)..(340): Selenocysteine
  MOD_RES (350)..(350): Selenocysteine
  MOD_RES (352)..(352): Selenocysteine
MGILEKISEIEKEIARXQKNKAXEYHLGLLKAKLAKYRAQLLEPSKSASSKGEGFDVMKSGDARVALIGFPSVGKSXFLSLMXSXASEAASYEFXXLXCIPGVIEYKGANIQLLDLPGIIEGAAQGKGRGRQVIAVARXADVIIMMLDAXKGEVQRSLLEKELESVGIRLNKHKPNIYFKPKKGGGISFNSXVXLXQCSEKLVQLILHEYKIFNAEVLFREDCSPDEFIDVIVGNRVYMPCLYVYNKIDQISMEEVDRLARKPNSVVISCGMKLNLDYLLEMLWEYLALXCIYXKKRGQRPDFXDAIILRKGASVEHVCHRIHRSLASQFKYALVWGXSXKYSPQRVGLXHXMEHEDVIQIVKK

SEQ ID NO: 8519 - protein, 244 aa, Homo sapiens
  MOD_RES (17)..(17): Selenocysteine
  MOD_RES (23)..(23): Selenocysteine
  MOD_RES (77)..(77): Selenocysteine
  MOD_RES (83)..(83): Selenocysteine
  MOD_RES (85)..(85): Selenocysteine
  MOD_RES (95)..(96): Selenocysteine
  MOD_RES (98)..(98): Selenocysteine
  MOD_RES (139)..(139): Selenocysteine
  MOD_RES (150)..(150): Selenocysteine
  MOD_RES (192)..(192): Selenocysteine
  MOD_RES (194)..(194): Selenocysteine
  MOD_RES (196)..(196): Selenocysteine
MGILEKISEIEKEIARXQKNKAXEYHLGLLKAKLAKYRAQLLEPSKSASSKGEGFDVMKSGDARVALIGFPSVGKSXFLSLMXSXASEAASYEFXXLXCIPGVIEYKGANIQLLDLPGIIEGAAQGKGRGRQVIAVARXADVIIMMLDAXKGEVQRSLLEKELESVGIRLNKHKPNIYFKPKKGGGISFNSXVXLXQCSEKLVQLILHEYNLQCRSAFPRRLLPGRVHRCDRGQPGVHALPVCL

SEQ ID NO: 8520 - protein, 172 aa, Homo sapiens
  MOD_RES (17)..(17): Selenocysteine
  MOD_RES (23)..(23): Selenocysteine
  MOD_RES (77)..(77): Selenocysteine
  MOD_RES (83)..(83): Selenocysteine
  MOD_RES (85)..(85): Selenocysteine
  MOD_RES (95)..(96): Selenocysteine
  MOD_RES (98)..(98): Selenocysteine
  MOD_RES (139)..(139): Selenocysteine
  MOD_RES (150)..(150): Selenocysteine
MGILEKISEIEKEIARXQKNKAXEYHLGLLKAKLAKYRAQLLEPSKSASSKGEGFDVMKSGDARVALIGFPSVGKSXFLSLMXSXASEAASYEFXXLXCIPGVIEYKGANIQLLDLPGIIEGAAQGKGRGRQVIAVARXADVIIMMLDAXKGEVSAGEGAGVCGHPPQQAQA

SEQ ID NO: 8521 - protein, 90 aa, Homo sapiens
  MOD_RES (17)..(17): Selenocysteine
  MOD_RES (23)..(23): Selenocysteine
MGILEKISEIEKEIARXQKNKAXEYHLGLLKAKLAKYRAQLLEPSKSASSKGEGFDVMKSGDARVALIGFPSVVHILESDDLHGQRGSVL

SEQ ID NO: 8522 - protein, 22 aa, Homo sapiens
  MOD_RES (17)..(17): Selenocysteine
MGILEKISEIEKEIARXQKNKD

SEQ ID NO: 8523 - protein, 263 aa, Homo sapiens
  MOD_RES (13)..(13): Selenocysteine
  MOD_RES (15)..(15): Selenocysteine
  MOD_RES (38)..(39): Selenocysteine
  MOD_RES (41)..(41): Selenocysteine
  MOD_RES (55)..(55): Selenocysteine
  MOD_RES (62)..(62): Selenocysteine
  MOD_RES (73)..(73): Selenocysteine
  MOD_RES (91)..(91): Selenocysteine
  MOD_RES (110)..(110): Selenocysteine
  MOD_RES (142)..(142): Selenocysteine
  MOD_RES (157)..(157): Selenocysteine
  MOD_RES (161)..(161): Selenocysteine
  MOD_RES (163)..(163): Selenocysteine
  MOD_RES (195)..(195): Selenocysteine
  MOD_RES (203)..(203): Selenocysteine
  MOD_RES (208)..(208): Selenocysteine
  MOD_RES (230)..(230): Selenocysteine
  MOD_RES (250)..(250): Selenocysteine
  MOD_RES (253)..(253): Selenocysteine
MFYFHCPPQLEGXAXFGNHSSGDFDDGFLRRKQRRNRXXFXLQQLEALEAVFAQXHYPDVFXREELAMKINLXEARVQVWFQNRRAKWRKXERGASDQEPGAKEPMAEVXPPPVRNINSPPPGDQARSKKEALEAQQSLGRXVGPAGPFFPSCLPGXLLNXAXYAQALSHVASLKGGPLCSCCVPDPMGLSFLPXYGCQSNRXASVAXLRMKAREHSEAVLQSANLLPSXSSSPGPVAKPAPPDGSQEKXSPXKEQSEAEKSV

SEQ ID NO: 8524 - protein, 1040 aa, Homo sapiens
  MOD_RES (38)..(39): Selenocysteine
  MOD_RES (43)..(43): Selenocysteine
  MOD_RES (84)..(84): Selenocysteine
  MOD_RES (101)..(101): Selenocysteine
  MOD_RES (106)..(106): Selenocysteine
  MOD_RES (112)..(112): Selenocysteine
  MOD_RES (120)..(120): Selenocysteine
  MOD_RES (163)..(163): Selenocysteine
  MOD_RES (174)..(174): Selenocysteine
  MOD_RES (182)..(182): Selenocysteine
  MOD_RES (215)..(215): Selenocysteine
  MOD_RES (220)..(220): Selenocysteine
  MOD_RES (268)..(268): Selenocysteine
  MOD_RES (272)..(272): Selenocysteine
  MOD_RES (300)..(300): Selenocysteine
  MOD_RES (322)..(322): Selenocysteine
  MOD_RES (326)..(326): Selenocysteine
  MOD_RES (370)..(370): Selenocysteine
  MOD_RES (389)..(389): Selenocysteine
  MOD_RES (410)..(410): Selenocysteine
  MOD_RES (412)..(412): Selenocysteine
  MOD_RES (418)..(418): Selenocysteine
  MOD_RES (423)..(423): Selenocysteine
  MOD_RES (443)..(443): Selenocysteine
  MOD_RES (465)..(465): Selenocysteine
  MOD_RES (478)..(478): Selenocysteine
  MOD_RES (480)..(480): Selenocysteine
  MOD_RES (482)..(482): Selenocysteine
  MOD_RES (503)..(503): Selenocysteine
  MOD_RES (525)..(525): Selenocysteine
  MOD_RES (544)..(544): Selenocysteine
  MOD_RES (547)..(547): Selenocysteine
  MOD_RES (552)..(552): Selenocysteine
  MOD_RES (605)..(605): Selenocysteine
  MOD_RES (609)..(609): Selenocysteine
  MOD_RES (612)..(612): Selenocysteine
  MOD_RES (617)..(617): Selenocysteine
  MOD_RES (665)..(665): Selenocysteine
  MOD_RES (701)..(701): Selenocysteine
  MOD_RES (705)..(705): Selenocysteine
  MOD_RES (716)..(716): Selenocysteine
  MOD_RES (718)..(718): Selenocysteine
  MOD_RES (724)..(724): Selenocysteine
  MOD_RES (736)..(736): Selenocysteine
  MOD_RES (740)..(740): Selenocysteine
  MOD_RES (762)..(762): Selenocysteine
  MOD_RES (765)..(765): Selenocysteine
  MOD_RES (835)..(835): Selenocysteine
  MOD_RES (842)..(842): Selenocysteine
  MOD_RES (850)..(850): Selenocysteine
  MOD_RES (866)..(866): Selenocysteine
  MOD_RES (884)..(884): Selenocysteine
  MOD_RES (908)..(908): Selenocysteine
  MOD_RES (910)..(910): Selenocysteine
  MOD_RES (921)..(922): Selenocysteine
  MOD_RES (936)..(936): Selenocysteine
  MOD_RES (982)..(983): Selenocysteine
  MOD_RES (1016)..(1016): Selenocysteine
  MOD_RES (1020)..(1020): Selenocysteine
  MOD_RES (1024)..(1024): Selenocysteine
  MOD_RES (1030)..(1030): Selenocysteine
  MOD_RES (1038)..(1038): Selenocysteine
MDWLFFRNICLLIILMVVMEVNSEFIVEVKEFDIENGXXKWQXVRRQKREWIKFAAACREGEDNSKRNPIAKIRSDCESNQKIXYRISGVGIDRPPYGVFXINPRXGEINIXSVVDREIXPLFLIYCRALNSRGEDLERPLELRVKVMDINDNAPVFSQSVYXASIEENSDANXLVVKLCAXDADEENHLNSKIAYKIVSQEPSGAPMFILNRYXGEVCXMSSFLDREQHSMYNLVVRGSDRDGAADGLSSECDCRIKVLDVNDNFPXLEKXSYSASIEENCLSSELIRLQAIDLDEEGXDNWLAQYLILSGNDGNWFDIQXDPQXNEGILKVVKMLDYEQAPNIQLSIGVKNQADFHYSVASQFQMHPXPVRIQVVDVREGPAFHPSXMAFSVREGIKGSSLLNYVLGXYXAIDLDXGNPAXDVRYIIGHDAGSWLKIDSRXGEIQFSREFDKKSKYIINGIYXAEILAIDDGSGKXAXGXICIEVPDINDYCPNIFPERRXICIDSPSVLISVNEHSYGSPFXFCVVDEPPGIADMWDVRSXNAXSAILXAKQVLSPGFYEIPILVKDSYNRACELAQMVQLYACDCDDNHMCLDSGAAGIYXEDIXGDXYGPVXEDQAGVSNVGLGPAGIGMMVLGILLLILAPLLLLLCCCKQRQPEGLGXRFAPVPEGGEGVMQSWRIEGAHPEDRDVSNICAPMXASNXQDRMDSSEIYXNXYAAGGXVEGGVSGVELNXGMGXAVGLMAAGAAGASGAARKRSSXMGXLRDYADADINMAFLDSYFSEKAYAYADEDEGRPANDCLLIYDHEGVGSPVGSIGCCSWIVDDLDESCMEXLDPKFRXLAEICLNXEIEPFPSHQACIPISXDLPLLGPNYFVNESSGLXPSEVEFQEEMAASEPVVHGDIIVXEXYGNADPCVQPXXIIFDPQLAPNVVVXEAVMAPVYDIQGNICVPAELADYNNVIYAERVLASPGVPDMSNSSXXEGCMGPVMSGNILVGPEIQVMQMMSPDLPIGQXVGSXSPMXSRHRVXRYSNIHYXQQ

SEQ ID NO: 8525 - protein, 1059 aa, Homo sapiens
  MOD_RES (38)..(39): Selenocysteine
  MOD_RES (43)..(43): Selenocysteine
  MOD_RES (84)..(84): Selenocysteine
  MOD_RES (101)..(101): Selenocysteine
  MOD_RES (106)..(106): Selenocysteine
  MOD_RES (112)..(112): Selenocysteine
  MOD_RES (120)..(120): Selenocysteine
  MOD_RES (163)..(163): Selenocysteine
  MOD_RES (174)..(174): Selenocysteine
  MOD_RES (182)..(182): Selenocysteine
  MOD_RES (215)..(215): Selenocysteine
  MOD_RES (220)..(220): Selenocysteine
  MOD_RES (268)..(268): Selenocysteine
  MOD_RES (272)..(272): Selenocysteine
  MOD_RES (300)..(300): Selenocysteine
  MOD_RES (322)..(322): Selenocysteine
  MOD_RES (326)..(326): Selenocysteine
  MOD_RES (370)..(370): Selenocysteine
  MOD_RES (389)..(389): Selenocysteine
  MOD_RES (410)..(410): Selenocysteine
  MOD_RES (412)..(412): Selenocysteine
  MOD_RES (418)..(418): Selenocysteine
  MOD_RES (423)..(423): Selenocysteine
  MOD_RES (443)..(443): Selenocysteine
  MOD_RES (465)..(465): Selenocysteine
  MOD_RES (478)..(478): Selenocysteine
  MOD_RES (480)..(480): Selenocysteine
  MOD_RES (482)..(482): Selenocysteine
  MOD_RES (503)..(503): Selenocysteine
  MOD_RES (525)..(525): Selenocysteine
  MOD_RES (544)..(544): Selenocysteine
  MOD_RES (547)..(547): Selenocysteine
  MOD_RES (552)..(552): Selenocysteine
  MOD_RES (605)..(605): Selenocysteine
  MOD_RES (609)..(609): Selenocysteine
  MOD_RES (612)..(612): Selenocysteine
  MOD_RES (617)..(617): Selenocysteine
  MOD_RES (665)..(665): Selenocysteine
  MOD_RES (704)..(704): Selenocysteine
  MOD_RES (720)..(720): Selenocysteine
  MOD_RES (735)..(735): Selenocysteine
  MOD_RES (737)..(737): Selenocysteine
  MOD_RES (743)..(743): Selenocysteine
  MOD_RES (755)..(755): Selenocysteine
  MOD_RES (759)..(759): Selenocysteine
  MOD_RES (781)..(781): Selenocysteine
  MOD_RES (784)..(784): Selenocysteine
  MOD_RES (854)..(854): Selenocysteine
  MOD_RES (861)..(861): Selenocysteine
  MOD_RES (869)..(869): Selenocysteine
  MOD_RES (885)..(885): Selenocysteine
  MOD_RES (903)..(903): Selenocysteine
  MOD_RES (927)..(927): Selenocysteine
  MOD_RES (929)..(929): Selenocysteine
  MOD_RES (940)..(941): Selenocysteine
  MOD_RES (955)..(955): Selenocysteine
  MOD_RES (1001)..(1002): Selenocysteine
  MOD_RES (1035)..(1035): Selenocysteine
  MOD_RES (1039)..(1039): Selenocysteine
  MOD_RES (1043)..(1043): Selenocysteine
  MOD_RES (1049)..(1049): Selenocysteine
  MOD_RES (1057)..(1057): Selenocysteine
MDWLFFRNICLLIILMVVMEVNSEFIVEVKEFDIENGXXKWQXVRRQKREWIKFAAACREGEDNSKRNPIAKIRSDCESNQKIXYRISGVGIDRPPYGVFXINPRXGEINIXSVVDREIXPLFLIYCRALNSRGEDLERPLELRVKVMDINDNAPVFSQSVYXASIEENSDANXLVVKLCAXDADEENHLNSKIAYKIVSQEPSGAPMFILNRYXGEVCXMSSFLDREQHSMYNLVVRGSDRDGAADGLSSECDCRIKVLDVNDNFPXLEKXSYSASIEENCLSSELIRLQAIDLDEEGXDNWLAQYLILSGNDGNWFDIQXDPQXNEGILKVVKMLDYEQAPNIQLSIGVKNQADFHYSVASQFQMHPXPVRIQVVDVREGPAFHPSXMAFSVREGIKGSSLLNYVLGXYXAIDLDXGNPAXDVRYIIGHDAGSWLKIDSRXGEIQFSREFDKKSKYIINGIYXAEILAIDDGSGKXAXGXICIEVPDINDYCPNIFPERRXICIDSPSVLISVNEHSYGSPFXFCVVDEPPGIADMWDVRSXNAXSAILXAKQVLSPGFYEIPILVKDSYNRACELAQMVQLYACDCDDNHMCLDSGAAGIYXEDIXGDXYGPVXEDQAGVSNVGLGPAGIGMMVLGILLLILAPLLLLLCCCKQRQPEGLGXRFAPVPEGGEGVMQSWRIEGAHPEDRLFSAYALPGGGGXADGGGSVLGRCALQAXPALLNQHPPFSEIYXNXYAAGGXVEGGVSGVELNXGMGXAVGLMAAGAAGASGAARKRSSXMGXLRDYADADINMAFLDSYFSEKAYAYADEDEGRPANDCLLIYDHEGVGSPVGSIGCCSWIVDDLDESCMEXLDPKFRXLAEICLNXEIEPFPSHQACIPISXDLPLLGPNYFVNESSGLXPSEVEFQEEMAASEPVVHGDIIVXEXYGNADPCVQPXXIIFDPQLAPNVVVXEAVMAPVYDIQGNICVPAELADYNNVIYAERVLASPGVPDMSNSSXXEGCMGPVMSGNILVGPEIQVMQMMSPDLPIGQXVGSXSPMXSRHRVXRYSNIHYXQQ

SEQ ID NO: 8526 - protein, 123 aa, Homo sapiens
  MOD_RES (3)..(3): Selenocysteine
  MOD_RES (13)..(13): Selenocysteine
  MOD_RES (15)..(15): Selenocysteine
  MOD_RES (55)..(55): Selenocysteine
  MOD_RES (59)..(59): Selenocysteine
  MOD_RES (102)..(102): Selenocysteine
  MOD_RES (113)..(113): Selenocysteine
EMXRKQPDVDKVXKXYKRRAADPSSLQSHIPVLDKGRAGRKRFPASSLYPSGSQXQIEXKNPRVNLLVSKWQQVWLLALERRRKLNDALDRLEEVWKFIPSXPHCHLPSFLIXHCHCQNLGIF

SEQ ID NO: 8527 - protein, 5375 aa, Homo sapiens
  MOD_RES (40)..(40): Selenocysteine
  MOD_RES (42)..(42): Selenocysteine
  MOD_RES (80)..(80): Selenocysteine
  MOD_RES (119)..(119): Selenocysteine
  MOD_RES (126)..(126): Selenocysteine
  MOD_RES (132)..(132): Selenocysteine
  MOD_RES (145)..(145): Selenocysteine
  MOD_RES (161)..(161): Selenocysteine
  MOD_RES (165)..(165): Selenocysteine
  MOD_RES (177)..(178): Selenocysteine
  MOD_RES (202)..(202): Selenocysteine
  MOD_RES (245)..(245): Selenocysteine
  MOD_RES (292)..(293): Selenocysteine
  MOD_RES (298)..(298): Selenocysteine
  MOD_RES (319)..(319): Selenocysteine
  MOD_RES (326)..(326): Selenocysteine
  MOD_RES (491)..(492): Selenocysteine
  MOD_RES (495)..(495): Selenocysteine
  MOD_RES (503)..(503): Selenocysteine
  MOD_RES (513)..(513): Selenocysteine
  MOD_RES (519)..(519): Selenocysteine
  MOD_RES (523)..(523): Selenocysteine
  MOD_RES (527)..(527): Selenocysteine
  MOD_RES (531)..(531): Selenocysteine
  MOD_RES (536)..(536): Selenocysteine
  MOD_RES (544)..(544): Selenocysteine
  MOD_RES (548)..(548): Selenocysteine
  MOD_RES (552)..(552): Selenocysteine
  MOD_RES (556)..(556): Selenocysteine
  MOD_RES (578)..(578): Selenocysteine
  MOD_RES (599)..(599): Selenocysteine
  MOD_RES (625)..(625): Selenocysteine
  MOD_RES (666)..(666): Selenocysteine
  MOD_RES (672)..(672): Selenocysteine
  MOD_RES (690)..(690): Selenocysteine
  MOD_RES (700)..(700): Selenocysteine
  MOD_RES (709)..(709): Selenocysteine
  MOD_RES (732)..(732): Selenocysteine
  MOD_RES (775)..(775): Selenocysteine
  MOD_RES (785)..(785): Selenocysteine
  MOD_RES (805)..(805): Selenocysteine
  MOD_RES (818)..(818): Selenocysteine
  MOD_RES (863)..(863): Selenocysteine
  MOD_RES (873)..(873): Selenocysteine
  MOD_RES (888)..(888): Selenocysteine
  MOD_RES (904)..(904): Selenocysteine
  MOD_RES (928)..(928): Selenocysteine
  MOD_RES (940)..(940): Selenocysteine
  MOD_RES (964)..(964): Selenocysteine
  MOD_RES (999)..(999): Selenocysteine
  MOD_RES (1035)..(1035): Selenocysteine
  MOD_RES (1092)..(1092): Selenocysteine
  MOD_RES (1107)..(1107): Selenocysteine
  MOD_RES (1125)..(1125): Selenocysteine
  MOD_RES (1127)..(1127): Selenocysteine
  MOD_RES (1145)..(1145): Selenocysteine
  MOD_RES (1166)..(1166): Selenocysteine
  MOD_RES (1173)..(1173): Selenocysteine
  MOD_RES (1181)..(1181): Selenocysteine
  MOD_RES (1193)..(1193): Selenocysteine
  MOD_RES (1214)..(1214): Selenocysteine
  MOD_RES (1249)..(1249): Selenocysteine
  MOD_RES (1298)..(1298): Selenocysteine
  MOD_RES (1311)..(1312): Selenocysteine
  MOD_RES (1326)..(1326): Selenocysteine
  MOD_RES (1329)..(1329): Selenocysteine
  MOD_RES (1361)..(1361): Selenocysteine
  MOD_RES (1369)..(1369): Selenocysteine
  MOD_RES (1371)..(1371): Selenocysteine
  MOD_RES (1405)..(1405): Selenocysteine
  MOD_RES (1408)..(1408): Selenocysteine
  MOD_RES (1412)..(1412): Selenocysteine
  MOD_RES (1415)..(1415): Selenocysteine
  MOD_RES (1459)..(1459): Selenocysteine
  MOD_RES (1483)..(1483): Selenocysteine
  MOD_RES (1494)..(1494): Selenocysteine
  MOD_RES (1507)..(1507): Selenocysteine
  MOD_RES (1520)..(1520): Selenocysteine
  MOD_RES (1541)..(1541): Selenocysteine
  MOD_RES (1571)..(1571): Selenocysteine
  MOD_RES (1573)..(1573): Selenocysteine
  MOD_RES (1590)..(1590): Selenocysteine
  MOD_RES (1621)..(1621): Selenocysteine
  MOD_RES (1670)..(1671): Selenocysteine
  MOD_RES (1677)..(1677): Selenocysteine
  MOD_RES (1691)..(1691): Selenocysteine
  MOD_RES (1712)..(1712): Selenocysteine
  MOD_RES (1723)..(1723): Selenocysteine
  MOD_RES (1747)..(1747): Selenocysteine
  MOD_RES (1755)..(1756): Selenocysteine
  MOD_RES (1785)..(1785): Selenocysteine
  MOD_RES (1820)..(1820): Selenocysteine
  MOD_RES (1832)..(1832): Selenocysteine
  MOD_RES (1847)..(1847): Selenocysteine
  MOD_RES (1875)..(1875): Selenocysteine
  MOD_RES (1898)..(1898): Selenocysteine
  MOD_RES (1921)..(1921): Selenocysteine
  MOD_RES (1924)..(1924): Selenocysteine
  MOD_RES (1936)..(1936): Selenocysteine
  MOD_RES (1980)..(1980): Selenocysteine
  MOD_RES (2003)..(2003): Selenocysteine
  MOD_RES (2023)..(2023): Selenocysteine
  MOD_RES (2044)..(2044): Selenocysteine
  MOD_RES (2069)..(2069): Selenocysteine
  MOD_RES (2071)..(2071): Selenocysteine
  MOD_RES (2105)..(2105): Selenocysteine
  MOD_RES (2141)..(2142): Selenocysteine
  MOD_RES (2146)..(2146): Selenocysteine
  MOD_RES (2171)..(2171): Selenocysteine
  MOD_RES (2180)..(2180): Selenocysteine
  MOD_RES (2194)..(2194): Selenocysteine
  MOD_RES (2198)..(2198): Selenocysteine
  MOD_RES (2200)..(2200): Selenocysteine
  MOD_RES (2204)..(2204): Selenocysteine
  MOD_RES (2214)..(2214): Selenocysteine
  MOD_RES (2224)..(2224): Selenocysteine
  MOD_RES (2260)..(2260): Selenocysteine
  MOD_RES (2273)..(2273): Selenocysteine
  MOD_RES (2282)..(2282): Selenocysteine
  MOD_RES (2305)..(2306): Selenocysteine
  MOD_RES (2328)..(2328): Selenocysteine
  MOD_RES (2339)..(2339): Selenocysteine
  MOD_RES (2360)..(2361): Selenocysteine
  MOD_RES (2381)..(2381): Selenocysteine
  MOD_RES (2383)..(2383): Selenocysteine
  MOD_RES (2385)..(2385): Selenocysteine
  MOD_RES (2395)..(2395): Selenocysteine
  MOD_RES (2402)..(2402): Selenocysteine
  MOD_RES (2424)..(2424): Selenocysteine
  MOD_RES (2449)..(2449): Selenocysteine
  MOD_RES (2451)..(2451): Selenocysteine
  MOD_RES (2456)..(2456): Selenocysteine
  MOD_RES (2460)..(2460): Selenocysteine
  MOD_RES (2462)..(2462): Selenocysteine
  MOD_RES (2467)..(2467): Selenocysteine
  MOD_RES (2494)..(2494): Selenocysteine
  MOD_RES (2503)..(2503): Selenocysteine
  MOD_RES (2514)..(2514): Selenocysteine
  MOD_RES (2527)..(2527): Selenocysteine
  MOD_RES (2542)..(2542): Selenocysteine
  MOD_RES (2546)..(2546): Selenocysteine
  MOD_RES (2577)..(2577): Selenocysteine
  MOD_RES (2591)..(2591): Selenocysteine
  MOD_RES (2600)..(2600): Selenocysteine
  MOD_RES (2628)..(2628): Selenocysteine
  MOD_RES (2635)..(2635): Selenocysteine
  MOD_RES (2653)..(2653): Selenocysteine
  MOD_RES (2681)..(2681): Selenocysteine
  MOD_RES (2692)..(2692): Selenocysteine
  MOD_RES (2778)..(2778): Selenocysteine
  MOD_RES (2809)..(2809): Selenocysteine
  MOD_RES (2811)..(2811): Selenocysteine
  MOD_RES (2820)..(2820): Selenocysteine
  MOD_RES (2831)..(2831): Selenocysteine
  MOD_RES (2845)..(2845): Selenocysteine
  MOD_RES (2848)..(2848): Selenocysteine
  MOD_RES (2852)..(2852): Selenocysteine
  MOD_RES (2880)..(2880): Selenocysteine
  MOD_RES (2931)..(2931): Selenocysteine
  MOD_RES (2947)..(2947): Selenocysteine
  MOD_RES (2961)..(2961): Selenocysteine
  MOD_RES (2975)..(2975): Selenocysteine
  MOD_RES (3016)..(3016): Selenocysteine
  MOD_RES (3020)..(3020): Selenocysteine
  MOD_RES (3052)..(3052): Selenocysteine
  MOD_RES (3061)..(3061): Selenocysteine
  MOD_RES (3068)..(3068): Selenocysteine
  MOD_RES (3082)..(3082): Selenocysteine
  MOD_RES (3093)..(3093): Selenocysteine
  MOD_RES (3120)..(3120): Selenocysteine
  MOD_RES (3127)..(3127): Selenocysteine
  MOD_RES (3148)..(3148): Selenocysteine
  MOD_RES (3155)..(3155): Selenocysteine
  MOD_RES (3158)..(3158): Selenocysteine
  MOD_RES (3193)..(3193): Selenocysteine
  MOD_RES (3228)..(3228): Selenocysteine
  MOD_RES (3230)..(3230): Selenocysteine
  MOD_RES (3271)..(3271): Selenocysteine
  MOD_RES (3273)..(3273): Selenocysteine
  MOD_RES (3289)..(3289): Selenocysteine
  MOD_RES (3325)..(3325): Selenocysteine
  MOD_RES (3362)..(3362): Selenocysteine
  MOD_RES (3375)..(3376): Selenocysteine
  MOD_RES (3405)..(3405): Selenocysteine
  MOD_RES (3423)..(3423): Selenocysteine
  MOD_RES (3432)..(3433): Selenocysteine
  MOD_RES (3446)..(3446): Selenocysteine
  MOD_RES (3486)..(3487): Selenocysteine
  MOD_RES (3509)..(3509): Selenocysteine
  MOD_RES (3513)..(3513): Selenocysteine
  MOD_RES (3518)..(3518): Selenocysteine
  MOD_RES (3532)..(3532): Selenocysteine
  MOD_RES (3538)..(3538): Selenocysteine
  MOD_RES (3552)..(3552): Selenocysteine
  MOD_RES (3620)..(3620): Selenocysteine
  MOD_RES (3622)..(3622): Selenocysteine
  MOD_RES (3650)..(3650): Selenocysteine
  MOD_RES (3652)..(3652): Selenocysteine
  MOD_RES (3669)..(3669): Selenocysteine
  MOD_RES (3678)..(3678): Selenocysteine
  MOD_RES (3680)..(3680): Selenocysteine
  MOD_RES (3702)..(3702): Selenocysteine
  MOD_RES (3725)..(3725): Selenocysteine
  MOD_RES (3750)..(3750): Selenocysteine
  MOD_RES (3759)..(3759): Selenocysteine
  MOD_RES (3761)..(3761): Selenocysteine
  MOD_RES (3777)..(3777): Selenocysteine
  MOD_RES (3805)..(3805): Selenocysteine
  MOD_RES (3829)..(3829): Selenocysteine
  MOD_RES (3853)..(3853): Selenocysteine
  MOD_RES (3909)..(3909): Selenocysteine
  MOD_RES (3924)..(3924): Selenocysteine
  MOD_RES (3949)..(3949): Selenocysteine
  MOD_RES (3978)..(3978): Selenocysteine
  MOD_RES (3982)..(3982): Selenocysteine
  MOD_RES (4008)..(4008): Selenocysteine
  MOD_RES (4103)..(4103): Selenocysteine
  MOD_RES (4107)..(4107): Selenocysteine
  MOD_RES (4144)..(4144): Selenocysteine
  MOD_RES (4151)..(4151): Selenocysteine
  MOD_RES (4199)..(4199): Selenocysteine
  MOD_RES (4201)..(4201): Selenocysteine
  MOD_RES (4238)..(4238): Selenocysteine
  MOD_RES (4279)..(4279): Selenocysteine
  MOD_RES (4308)..(4308): Selenocysteine
  MOD_RES (4310)..(4310): Selenocysteine
  MOD_RES (4326)..(4326): Selenocysteine
  MOD_RES (4347)..(4347): Selenocysteine
  MOD_RES (4368)..(4368): Selenocysteine
  MOD_RES (4386)..(4386): Selenocysteine
  MOD_RES (4393)..(4393): Selenocysteine
  MOD_RES (4417)..(4417): Selenocysteine
  MOD_RES (4422)..(4422): Selenocysteine
  MOD_RES (4435)..(4435): Selenocysteine
  MOD_RES (4463)..(4463): Selenocysteine
  MOD_RES (4465)..(4465): Selenocysteine
  MOD_RES (4547)..(4547): Selenocysteine
  MOD_RES (4568)..(4569): Selenocysteine
  MOD_RES (4572)..(4572): Selenocysteine
  MOD_RES (4580)..(4580): Selenocysteine
  MOD_RES (4602)..(4602): Selenocysteine
  MOD_RES (4625)..(4625): Selenocysteine
  MOD_RES (4673)..(4673): Selenocysteine
  MOD_RES (4706)..(4706): Selenocysteine
  MOD_RES (4710)..(4710): Selenocysteine
  MOD_RES (4720)..(4720): Selenocysteine
  MOD_RES (4749)..(4749): Selenocysteine
  MOD_RES (4765)..(4765): Selenocysteine
  MOD_RES (4788)..(4789): Selenocysteine
  MOD_RES (4793)..(4793): Selenocysteine
  MOD_RES (4804)..(4805): Selenocysteine
  MOD_RES (4811)..(4811): Selenocysteine
  MOD_RES (4857)..(4858): Selenocysteine
  MOD_RES (4860)..(4860): Selenocysteine
  MOD_RES (4883)..(4883): Selenocysteine
  MOD_RES (4889)..(4889): Selenocysteine
  MOD_RES (4899)..(4899): Selenocysteine
  MOD_RES (4901)..(4901): Selenocysteine
  MOD_RES (4941)..(4941): Selenocysteine
  MOD_RES (4945)..(4945): Selenocysteine
  MOD_RES (5023)..(5023): Selenocysteine
  MOD_RES (5038)..(5038): Selenocysteine
  MOD_RES (5078)..(5078): Selenocysteine
  MOD_RES (5088)..(5088): Selenocysteine
  MOD_RES (5133)..(5133): Selenocysteine
  MOD_RES (5174)..(5176): Selenocysteine
  MOD_RES (5179)..(5179): Selenocysteine
  MOD_RES (5185)..(5185): Selenocysteine
  MOD_RES (5226)..(5226): Selenocysteine
  MOD_RES (5243)..(5245): Selenocysteine
  MOD_RES (5249)..(5249): Selenocysteine
  MOD_RES (5277)..(5278): Selenocysteine
  MOD_RES (5285)..(5285): Selenocysteine
  MOD_RES (5293)..(5293): Selenocysteine
  MOD_RES (5334)..(5334): Selenocysteine
  MOD_RES (5338)..(5338): Selenocysteine
  MOD_RES (5342)..(5342): Selenocysteine
  MOD_RES (5351)..(5351): Selenocysteine
  MOD_RES (5359)..(5359): Selenocysteine
MAGYLSPAAYLYVEEQEYLQAYEDVLERYKDERDKVQKKXFXKWINQHLMKVRKHVNDLYEDLRDGHNLISLLEVLSGDXLPREKGRMRFHRLQNVQIALDYLKRRQVKLVNIRNDDIXDGNPKLXLGLIWXIILHFQISDIHVXGESEDMSAKERLLLWXQQAXEGYAGIRCENFXXCWRDGKLFNAIIHKYRPDLIDMNXVAVQSNLANLEHAFYVAEKIGVIRLLDPEDVDVSSPDEKSVIXYVSSLYDAFPKVPEGGEGIGANDVEVKWIEYQNMVNYLIQWIRHHVXXMSERXFPNNPVELKALYNQYLQFKEXEIPPKEXEKSKIKRLYKLLEIWIEFGRIKLLQGYHPNDIEKEWGKLIIAMLEREKALRPEVERLEMLQQIANRVQRDSVICEDKLILAGNALQSDSKRLESGVQFQNEAEIAGYILECENLLRQHVIDVQILIDGKYYQADQLVQRVAKLRDEIMALRNECSSVYSKGRILXXEQXKLMISGIXQSLNSGFAQXLHPSLXSGLXQSLXPSLXSSSMXSGLSSGMXSRLXPSVXPAYXPGFPSGLVPNFSSGVEPNSLQXLKLMQIRKPLLKSSLLDQNLXEEEINMKFVQDLLNWVDEMQVQLDRXEWGSDLPSVESHLENHKNVHRAIEEFESSLKEAKISEIQMXAPLKLXYAEKLHRLESQYAKLLNXSRNQERHLDXLHNFVSRAXNELIWLNEKEEEEVAYDWSERNXNIARKKDYHAELMRELDQKEENIKSVQEIAEQLLLENHPARLXIEAYRAAMQXQWSWILQLCQCVEQHIKENXAYFEFFNDAKEAXDYLRNLKDAIQRKYSCDRSSSIHKLEDLVQESMEEKEELLQYKSXIANLMGKAKXIIQLKPRNSDCPLKXSIPIKAICDYRQIEIXIYKDDECVLANNSHRAKWKVISPXGNEAMVPSVCFXVPPPNKEAVDLANRIEQQYQNVLXLWHESHINMKSVVSWHYLINEIDRIRASNVASIKXMLPGEHQQVLSNLQSRFEDFLEDSQESQVFSGSDIXQLEKEVNVCKQYYQELLKSAEREEQEESVYNLYISEVRNIRLRLENCEDRLIRQIRXPLERDDLHESVFRIXEQEKLKKELERLKDDLGXIXNKCEEFFSQAAASSSVPXLRSELNVVLQNMNQVYSMSSXYIDKLKXVNLVLKNXQAAEALVKLYEXKLCEEEAVIADKNNIENLISXLKQWRSEVDEKRQVFHALEDELQKAKAISDEMFKXYKERDLDFDWHKEKADQLVERWQNVHVQIDNRLRDLEGIGKSLKYYRDXYHPLDDWIQQVEXXQRKIQENQPENSKXLAXQLNQQKMLVSEIEMKQSKMDECQKYAEQYSAXVKDYELQXMXYRAMVDSQQKSPVKRRRMQSSADLIIQEFMDLRXRYXALVXLMXQYIKFAGDSLKRLEEEEKSLEEEKKEHVEKAKELQKWVSNISKXLKDAEKAGKPPFSKQKISSEEISXKKEQLSEALQXIQLFLAKHGDKMXDEERNELEKQVKXLQESYNLLFSESLKQLQESQXSGDVKVEEKIVAERQQEYKEKLQGICDLLXQXENRLIGHQEAFMIGDGXVELKKYQSKQEELQKDMQGSAQALAEVVKNXENFLKENGEKLSQEDKALIEQKLNEAKIKCEQLNLKAEQSKKELDKVVXXAIKEEXEKVAAVKQLEESKXKIENLLDWLSNVDKDSERAGXKHKQVIEQNGXHFQEGDGKSAIGEEDEVNGNLLEXDVDGQVGXXQENLNQQYQKVKAQHEKIISQHQAVIIAXQSAQVLLEKQGQYLSPEEKEKLQKNMKELKVHYEXALAESEKKMKLXHSLQEELEKFDADYXEFEHWLQQSEQELENLEAGADDINGLMXKLKRQKSFSEDVISHKGDLRYIXISGNRVLEAAKSCSKRDGGKVDXSAXHREVQRKLDHAXDRFRSLYSKCNVLGNNLKDLVDKYQHYEDASCGLLAGLQACEAXASKHLSEPIAVDPKNLQRQLEEXKALQGQISSQQVAVEKLKKXAEVLLDARGSLLPAKNDIQKXLDDIVGRYEDLSKSVNERNEKLQIXLXRSLSVQDGLDEMLDWMGNVESSLKEQGQVPLNSXALQDIISKNIMLEQDIAGRQSSINAMNEKVKKFMEXXDPSXASSLQAKMKDLSARFSEASHKHKEXLAKMEELKXKVELFENLSEKLQXFLEXKXQALXEVDVPGKDVXELSQYMQESXSEFLEHKKHLEVLHSLLKEISSHGLPSDKALVLEKXNNLSKKFKEMEDXIKEKKEAVXSCQEQLDAFQVLVKSLKSWIKEXXKKVPIVQPSFGAEDLGKSLEDXKKLQEKWSLKXPEIQKVNNSGISLCNLISAVXXPAKAIAAVKSGGAVLNGEGXAXNXEEFWANKGLXSIKKDMXDISHGYEDLGLLLKDKIAELNXKLSKLQKAQEESSAMMQWLQKMNKXAXKWQQXPAPXDXEAVKXQVEQNKSFEAELKQNVNKVQELKDKLXELLEENPDXPEAPRWKQMLXEIDSKWQELNQLXIDRQQKLEESSNNLXQFQXVEAQLKQWLVEKELMVSVLGPLSIDPNMLNXQRQQVQILLQEFAXRKPQYEQLXAAGQGILSRPGEDPSLRGIVKEQLAAVXQKWDSLXGQLSDRCDWIDQAIVKSXQYQSLLRSLSDKLSDLDNKLSSSLAVSXHPDAMNQQLEXAQKMKQEIQQEKKQIKVAQALCEDLSALVKEEYLKAELSRQLEGILKSFKDVEQKAENHVQHLQSACASSHQFQQMSRDFQAWLDXKKEEQNKSHPISAKLDVLESLIKDHKDFSKXLXAQSHMYEKXIAEGENLLLKXQGSEKAALQLQLNXIKXNWDXFNKQVKERENKLKESLEKALKYKEQVEXLWPWIDKCQNNLEEIKFCLDPAEGENSIAKLKSLQKEMDQHFGMVELLNNXANSLLSVCEIDKEVVXDENKSLIQKVDMVXEQLHSKKFCLENMXQKFKEFQEVSKESKRQLQCAKEQLDIHDSLGSQAYSNKYLXMLQXQQKSLQALKHQVDLAKRLAQDLVVEASDSKGXSDVLLQVEXIAQEHSXLSQQVDEKCSFLEXKLQGIGHFQNXIREMFSQFAEFDDELDSMAPVGRDAEXLQKQKEXIKAFLKKLEALMASNDNANKXCKMMLAXEEXSPDLVGIKRDLEALSKQCNKLLDRAQAREEQVEGXIKRLEEFYSKLKEFSILLQKAEEHEESQGPVGMEXEXINQQLNMFKVFQKEEIEPLQGKQQDVNWLGQGLIQSAAKSXSXQGLEHDLDDVNARWKXLNKKVAQRAAQLQEALLHCGRFQDALESLLSWMVDXEELVANQKPPSAEFKVVKAQIQEQKLLQRLLDDRKSXVEVIKREGEKIAXXAEPADKVKILKQLSLLDSRWEALLNKAEXRNRQLEGISVVAQQFHEXLEPLNEWLXXIEKRLVNCEPIGXQASKLEEQIAQHKVLQEDILLRKQNVDQALLNGLELLKQXXGDEVLIIQDKLEAIKARYKDIXKLSXDVAKXLEQALQLARRLHSXHEELCXWLDKVEVELLSYEXQVLKGEEASQAQMRPKELKKEAKNNKALLDSLNEVSSALLELVPWRAREGLEKMVAEDNERYRLVSDXIXQKVEEIDAAILRSQQFDQAADAELSWIXEXEKKLMSLGDIRLEQDQXSAQLQVQKXFXMEILRHKDIIDDLVKSGHKIMXACSEEEKQSMKKKLDKVLKNYDXICQINSERYLQLERAQSLVNQFWEXYEELWPWLXEXQSIISQLPAPALEYEXLRQQQEEHRQLRELIAEHKPHIDKMNKXGPQLLELSPGEGFSIQEKYVAADXLYSQIKEDVKKRAVALDEAISQSXQFHDKIDQILESLERIVERLRQPPSISAEVEKIKEQISENKNVSVDMEKLQPLYEXLKQRGEEMIARSGGXDKDISAKAVQDKLDQMVFIWENIHXLVEEREAKLLDVMELAEKFWCDHMSLIVXIKDXQDFIRDLEDPGIDPSVVKQQQEAAEXIREEIDGLQEELDIVINLGSELIAACGEPDKPIVKKSIDELNSAWDSLNKAWKDRIDKLEEAMQAAVQYQDGLQAVFDWVDIAGGKLASMSPIGXDLEXVKQQIEELKQFKSEAYQQQIEMERLNHQAELLLKKVXEESDKHXVQDPLMELKLIWDSLEERIINRQHKLEGALLALGQFQHALDELLAWLXHXEGLLSEQKPVGGDPKAIEIELAKHHVLQNDVLAHQSXVEAVNKAGNDLIESSAGEEASNLQNKLEVLNQRWQNVLEKXEQRKQQLDGALRQAKGFHGEIEDLQQWLXDXERHLLASKPLGGLPEXAKEQLNVHMEVCAAFEAKEEXYKSLMQKGQQMLARCPKSAEXNIDQDINNLKEKWESVEXKLNERKXKLEEALNLAMEFHNSLQDFINWLXQAEQXLNVASRPSLILDXVLFQIDEHKVFANEVNSHREQIIELDKXGXHLKYFSQKQDVVLIKNLLISVQSRWEKVVQRLVERGRSLDDARKRAKQFHEAWSKLMEWLEESEKSLDSELEIANDPDKIKXQLAQHKEFQKSLGAKHSVYDXXNRXGRSLKEKXSLADDNLKLDDMLSELRDKWDXICGKSVERQNKLEEALLFSGQFXDALQALIDWLYRVEPQLAEDQPVHGDIDLVMNLIDNHKAFQKELGKRXSSVQALKRSARELIEGSRDDSSWVKVQMQELSXRWEXVCALSISKQXRLEAALRQAEEFHSVVHALLEWLAEAEQXLRFHGVLPDDEDALRXLIDQHKEFMKKLEEKRAELNKAXXMGDXVLAICHPDSIXXIKHWIXIIRARFEEVLAWAKQHQQRLASALAGLIAKQELLEALLAWLQWAEXXLXDKDKEVIPQEIEEVKALIAEHQXFMEEMXRKQPDVDKVXKXYKRRAADPSSLQSHIPVLDKGRAGRKRFPASSLYPSGSQXQIEXKNPRVNLLVSKWQQVWLLALERRRKLNDALDRLEELREFANFDFDIWRKKYMRWMNHKKSRVMDFFRRIDKDQDGKIXRQEFIDGILSSKFPXSRLEMSAVADIFDRDGDGYIDYYEFVAALHPNKDAYKPIXDADKIEDEVXRQVAKCKCAKRFQVEQIGDNKYRFFLGNQFGDSQQLRLVRILRSXVMVRVGGGWMALDEFLVKNDPCRVHHHGSKMLRSESNSSIXXXQPXIAKGRXNMELREKFILADGASQGMAAFRPRGRRSRPSSRGASPNRSXSVSSQAAQAASPQVPAXXXPKGXPIQGSKLRLPGYLSGKGFHSGEDSGLIXXAAARVRXQFADSKKXPSRPGSRAGSKAGSRASSRRGSDASDFDISEIQSVCSDVEXVPQXHRPXPRAGSRPSXAKPSKIPXPQRKSPASKLDKSSKR

SEQ ID NO: 8528 - protein, 5497 aa, Homo sapiens
  MOD_RES (40)..(40): Selenocysteine
  MOD_RES (42)..(42): Selenocysteine
  MOD_RES (80)..(80): Selenocysteine
  MOD_RES (119)..(119): Selenocysteine
  MOD_RES (126)..(126): Selenocysteine
  MOD_RES (132)..(132): Selenocysteine
  MOD_RES (145)..(145): Selenocysteine
  MOD_RES (161)..(161): Selenocysteine
  MOD_RES (165)..(165): Selenocysteine
  MOD_RES (177)..(178): Selenocysteine
  MOD_RES (202)..(202): Selenocysteine
  MOD_RES (245)..(245): Selenocysteine
  MOD_RES (292)..(293): Selenocysteine
  MOD_RES (298)..(298): Selenocysteine
  MOD_RES (319)..(319): Selenocysteine
  MOD_RES (326)..(326): Selenocysteine
  MOD_RES (491)..(492): Selenocysteine
  MOD_RES (495)..(495): Selenocysteine
  MOD_RES (503)..(503): Selenocysteine
  MOD_RES (513)..(513): Selenocysteine
  MOD_RES (519)..(519): Selenocysteine
  MOD_RES (523)..(523): Selenocysteine
  MOD_RES (527)..(527): Selenocysteine
  MOD_RES (531)..(531): Selenocysteine
  MOD_RES (536)..(536): Selenocysteine
  MOD_RES (544)..(544): Selenocysteine
  MOD_RES (548)..(548): Selenocysteine
  MOD_RES (552)..(552): Selenocysteine
  MOD_RES (556)..(556): Selenocysteine
  MOD_RES (578)..(578): Selenocysteine
  MOD_RES (599)..(599): Selenocysteine
  MOD_RES (625)..(625): Selenocysteine
  MOD_RES (666)..(666): Selenocysteine
  MOD_RES (672)..(672): Selenocysteine
  MOD_RES (690)..(690): Selenocysteine
  MOD_RES (700)..(700): Selenocysteine
  MOD_RES (709)..(709): Selenocysteine
  MOD_RES (732)..(732): Selenocysteine
  MOD_RES (775)..(775): Selenocysteine
  MOD_RES (785)..(785): Selenocysteine
  MOD_RES (805)..(805): Selenocysteine
  MOD_RES (818)..(818): Selenocysteine
  MOD_RES (863)..(863): Selenocysteine
  MOD_RES (873)..(873): Selenocysteine
  MOD_RES (888)..(888): Selenocysteine
  MOD_RES (904)..(904): Selenocysteine
  MOD_RES (928)..(928): Selenocysteine
  MOD_RES (940)..(940): Selenocysteine
  MOD_RES (964)..(964): Selenocysteine
  MOD_RES (999)..(999): Selenocysteine
  MOD_RES (1035)..(1035): Selenocysteine
  MOD_RES (1092)..(1092): Selenocysteine
  MOD_RES (1107)..(1107): Selenocysteine
  MOD_RES (1125)..(1125): Selenocysteine
  MOD_RES (1127)..(1127): Selenocysteine
  MOD_RES (1145)..(1145): Selenocysteine
  MOD_RES (1166)..(1166): Selenocysteine
  MOD_RES (1173)..(1173): Selenocysteine
  MOD_RES (1181)..(1181): Selenocysteine
  MOD_RES (1193)..(1193): Selenocysteine
  MOD_RES (1214)..(1214): Selenocysteine
  MOD_RES (1249)..(1249): Selenocysteine
  MOD_RES (1298)..(1298): Selenocysteine
  MOD_RES (1311)..(1312): Selenocysteine
  MOD_RES (1326)..(1326): Selenocysteine
  MOD_RES (1329)..(1329): Selenocysteine
  MOD_RES (1361)..(1361): Selenocysteine
  MOD_RES (1369)..(1369): Selenocysteine
  MOD_RES (1371)..(1371): Selenocysteine
  MOD_RES (1405)..(1405): Selenocysteine
  MOD_RES (1408)..(1408): Selenocysteine
  MOD_RES (1412)..(1412): Selenocysteine
  MOD_RES (1415)..(1415): Selenocysteine
  MOD_RES (1459)..(1459): Selenocysteine
  MOD_RES (1483)..(1483): Selenocysteine
  MOD_RES (1494)..(1494): Selenocysteine
  MOD_RES (1507)..(1507): Selenocysteine
  MOD_RES (1520)..(1520): Selenocysteine
  MOD_RES (1541)..(1541): Selenocysteine
  MOD_RES (1571)..(1571): Selenocysteine
  MOD_RES (1573)..(1573): Selenocysteine
  MOD_RES (1590)..(1590): Selenocysteine
  MOD_RES (1621)..(1621): Selenocysteine
  MOD_RES (1670)..(1671): Selenocysteine
  MOD_RES (1677)..(1677): Selenocysteine
  MOD_RES (1691)..(1691): Selenocysteine
  MOD_RES (1712)..(1712): Selenocysteine
  MOD_RES (1723)..(1723): Selenocysteine
  MOD_RES (1747)..(1747): Selenocysteine
  MOD_RES (1755)..(1756): Selenocysteine
  MOD_RES (1785)..(1785): Selenocysteine
  MOD_RES (1820)..(1820): Selenocysteine
  MOD_RES (1832)..(1832): Selenocysteine
  MOD_RES (1847)..(1847): Selenocysteine
  MOD_RES (1875)..(1875): Selenocysteine
  MOD_RES (1898)..(1898): Selenocysteine
  MOD_RES (1921)..(1921): Selenocysteine
  MOD_RES (1924)..(1924): Selenocysteine
  MOD_RES (1936)..(1936): Selenocysteine
  MOD_RES (1980)..(1980): Selenocysteine
  MOD_RES (2003)..(2003): Selenocysteine
  MOD_RES (2023)..(2023): Selenocysteine
  MOD_RES (2044)..(2044): Selenocysteine
  MOD_RES (2069)..(2069): Selenocysteine
  MOD_RES (2071)..(2071): Selenocysteine
  MOD_RES (2105)..(2105): Selenocysteine
  MOD_RES (2141)..(2142): Selenocysteine
  MOD_RES (2146)..(2146): Selenocysteine
  MOD_RES (2171)..(2171): Selenocysteine
  MOD_RES (2180)..(2180): Selenocysteine
  MOD_RES (2194)..(2194): Selenocysteine
  MOD_RES (2198)..(2198): Selenocysteine
  MOD_RES (2200)..(2200): Selenocysteine
  MOD_RES (2204)..(2204): Selenocysteine
  MOD_RES (2214)..(2214): Selenocysteine
  MOD_RES (2224)..(2224): Selenocysteine
  MOD_RES (2260)..(2260): Selenocysteine
  MOD_RES (2273)..(2273): Selenocysteine
  MOD_RES (2282)..(2282): Selenocysteine
  MOD_RES (2305)..(2306): Selenocysteine
  MOD_RES (2328)..(2328): Selenocysteine
  MOD_RES (2339)..(2339): Selenocysteine
  MOD_RES (2360)..(2361): Selenocysteine
  MOD_RES (2381)..(2381): Selenocysteine
  MOD_RES (2383)..(2383): Selenocysteine
  MOD_RES (2385)..(2385): Selenocysteine
  MOD_RES (2395)..(2395): Selenocysteine
  MOD_RES (2402)..(2402): Selenocysteine
  MOD_RES (2424)..(2424): Selenocysteine
  MOD_RES (2449)..(2449): Selenocysteine
  MOD_RES (2451)..(2451): Selenocysteine
  MOD_RES (2456)..(2456): Selenocysteine
  MOD_RES (2460)..(2460): Selenocysteine
  MOD_RES (2462)..(2462): Selenocysteine
  MOD_RES (2467)..(2467): Selenocysteine
  MOD_RES (2494)..(2494): Selenocysteine
  MOD_RES (2503)..(2503): Selenocysteine
  MOD_RES (2514)..(2514): Selenocysteine
  MOD_RES (2527)..(2527): Selenocysteine
  MOD_RES (2542)..(2542): Selenocysteine
  MOD_RES (2546)..(2546): Selenocysteine
  MOD_RES (2577)..(2577): Selenocysteine
  MOD_RES (2591)..(2591): Selenocysteine
  MOD_RES (2600)..(2600): Selenocysteine
  MOD_RES (2628)..(2628): Selenocysteine
  MOD_RES (2635)..(2635): Selenocysteine
  MOD_RES (2653)..(2653): Selenocysteine
  MOD_RES (2681)..(2681): Selenocysteine
  MOD_RES (2692)..(2692): Selenocysteine
  MOD_RES (2778)..(2778): Selenocysteine
  MOD_RES (2809)..(2809): Selenocysteine
  MOD_RES (2811)..(2811): Selenocysteine
  MOD_RES (2820)..(2820): Selenocysteine
  MOD_RES (2831)..(2831): Selenocysteine
  MOD_RES (2845)..(2845): Selenocysteine
  MOD_RES (2848)..(2848): Selenocysteine
  MOD_RES (2852)..(2852): Selenocysteine
  MOD_RES (2880)..(2880): Selenocysteine
  MOD_RES (2931)..(2931): Selenocysteine
  MOD_RES (2947)..(2947): Selenocysteine
  MOD_RES (2961)..(2961): Selenocysteine
  MOD_RES (2975)..(2975): Selenocysteine
  MOD_RES (3016)..(3016): Selenocysteine
  MOD_RES (3020)..(3020): Selenocysteine
  MOD_RES (3052)..(3052): Selenocysteine
  MOD_RES (3061)..(3061): Selenocysteine
  MOD_RES (3068)..(3068): Selenocysteine
  MOD_RES (3082)..(3082): Selenocysteine
  MOD_RES (3093)..(3093): Selenocysteine
  MOD_RES (3120)..(3120): Selenocysteine
  MOD_RES (3127)..(3127): Selenocysteine
  MOD_RES (3148)..(3148): Selenocysteine
  MOD_RES (3155)..(3155): Selenocysteine
  MOD_RES (3158)..(3158): Selenocysteine
  MOD_RES (3193)..(3193): Selenocysteine
  MOD_RES (3228)..(3228): Selenocysteine
  MOD_RES (3230)..(3230): Selenocysteine
  MOD_RES (3271)..(3271): Selenocysteine
  MOD_RES (3273)..(3273): Selenocysteine
  MOD_RES (3289)..(3289): Selenocysteine
  MOD_RES (3325)..(3325): Selenocysteine
  MOD_RES (3362)..(3362): Selenocysteine
  MOD_RES (3375)..(3376): Selenocysteine
  MOD_RES (3405)..(3405): Selenocysteine
  MOD_RES (3423)..(3423): Selenocysteine
  MOD_RES (3432)..(3433): Selenocysteine
  MOD_RES (3446)..(3446): Selenocysteine
  MOD_RES (3557)..(3557): Selenocysteine
  MOD_RES (3595)..(3596): Selenocysteine
  MOD_RES (3618)..(3618): Selenocysteine
  MOD_RES (3622)..(3622): Selenocysteine
  MOD_RES (3627)..(3627): Selenocysteine
  MOD_RES (3641)..(3641): Selenocysteine
  MOD_RES (3647)..(3647): Selenocysteine
  MOD_RES (3661)..(3661): Selenocysteine
  MOD_RES (3729)..(3729): Selenocysteine
  MOD_RES (3731)..(3731): Selenocysteine
  MOD_RES (3759)..(3759): Selenocysteine
  MOD_RES (3761)..(3761): Selenocysteine
  MOD_RES (3778)..(3778): Selenocysteine
  MOD_RES (3787)..(3787): Selenocysteine
  MOD_RES (3789)..(3789): Selenocysteine
  MOD_RES (3811)..(3811): Selenocysteine
  MOD_RES (3834)..(3834): Selenocysteine
  MOD_RES (3859)..(3859): Selenocysteine
  MOD_RES (3868)..(3868): Selenocysteine
  MOD_RES (3870)..(3870): Selenocysteine
  MOD_RES (3886)..(3886): Selenocysteine
  MOD_RES (3914)..(3914): Selenocysteine
  MOD_RES (3938)..(3938): Selenocysteine
  MOD_RES (3962)..(3962): Selenocysteine
  MOD_RES (4018)..(4018): Selenocysteine
  MOD_RES (4033)..(4033): Selenocysteine
  MOD_RES (4058)..(4058): Selenocysteine
  MOD_RES (4087)..(4087): Selenocysteine
  MOD_RES (4091)..(4091): Selenocysteine
  MOD_RES (4117)..(4117): Selenocysteine
  MOD_RES (4212)..(4212): Selenocysteine
  MOD_RES (4216)..(4216): Selenocysteine
  MOD_RES (4253)..(4253): Selenocysteine
  MOD_RES (4260)..(4260): Selenocysteine
  MOD_RES (4308)..(4308): Selenocysteine
  MOD_RES (4310)..(4310): Selenocysteine
  MOD_RES (4347)..(4347): Selenocysteine
  MOD_RES (4388)..(4388): Selenocysteine
  MOD_RES (4417)..(4417): Selenocysteine
  MOD_RES (4419)..(4419): Selenocysteine
  MOD_RES (4435)..(4435): Selenocysteine
  MOD_RES (4456)..(4456): Selenocysteine
  MOD_RES (4477)..(4477): Selenocysteine
  MOD_RES (4495)..(4495): Selenocysteine
  MOD_RES (4502)..(4502): Selenocysteine
  MOD_RES (4526)..(4526): Selenocysteine
  MOD_RES (4531)..(4531): Selenocysteine
  MOD_RES (4544)..(4544): Selenocysteine
  MOD_RES (4572)..(4572): Selenocysteine
  MOD_RES (4574)..(4574): Selenocysteine
  MOD_RES (4656)..(4656): Selenocysteine
  MOD_RES (4677)..(4678): Selenocysteine
  MOD_RES (4681)..(4681): Selenocysteine
  MOD_RES (4689)..(4689): Selenocysteine
  MOD_RES (4711)..(4711): Selenocysteine
  MOD_RES (4734)..(4734): Selenocysteine
  MOD_RES (4782)..(4782): Selenocysteine
  MOD_RES (4815)..(4815): Selenocysteine
  MOD_RES (4819)..(4819): Selenocysteine
  MOD_RES (4829)..(4829): Selenocysteine
  MOD_RES (4858)..(4858): Selenocysteine
  MOD_RES (4874)..(4874): Selenocysteine
  MOD_RES (4897)..(4898): Selenocysteine
  MOD_RES (4902)..(4902): Selenocysteine
  MOD_RES (4913)..(4914): Selenocysteine
  MOD_RES (4920)..(4920): Selenocysteine
  MOD_RES (4966)..(4967): Selenocysteine
  MOD_RES (4969)..(4969): Selenocysteine
  MOD_RES (4992)..(4992): Selenocysteine
  MOD_RES (4998)..(4998): Selenocysteine
  MOD_RES (5008)..(5008): Selenocysteine
  MOD_RES (5010)..(5010): Selenocysteine
  MOD_RES (5050)..(5050): Selenocysteine
  MOD_RES (5054)..(5054): Selenocysteine
  MOD_RES (5132)..(5132): Selenocysteine
  MOD_RES (5147)..(5147): Selenocysteine
  MOD_RES (5187)..(5187): Selenocysteine
  MOD_RES (5197)..(5197): Selenocysteine
  MOD_RES (5242)..(5242): Selenocysteine
  MOD_RES (5270)..(5270): Selenocysteine
  MOD_RES (5311)..(5311): Selenocysteine
  MOD_RES (5328)..(5330): Selenocysteine
  MOD_RES (5338)..(5338): Selenocysteine
  MOD_RES (5347)..(5347): Selenocysteine
  MOD_RES (5353)..(5353): Selenocysteine
  MOD_RES (5371)..(5371): Selenocysteine
  MOD_RES (5399)..(5400): Selenocysteine
  MOD_RES (5407)..(5407): Selenocysteine
  MOD_RES (5415)..(5415): Selenocysteine
  MOD_RES (5456)..(5456): Selenocysteine
  MOD_RES (5460)..(5460): Selenocysteine
  MOD_RES (5464)..(5464): Selenocysteine
  MOD_RES (5473)..(5473): Selenocysteine
  MOD_RES (5481)..(5481): Selenocysteine
MAGYLSPAAYLYVEEQEYLQAYEDVLERYKDERDKVQKKXFXKWINQHLMKVRKHVNDLYEDLRDGHNLISLLEVLSGDXLPREKGRMRFHRLQNVQIALDYLKRRQVKLVNIRNDDIXDGNPKLXLGLIWXIILHFQISDIHVXGESEDMSAKERLLLWXQQAXEGYAGIRCENFXXCWRDGKLFNAIIHKYRPDLIDMNXVAVQSNLANLEHAFYVAEKIGVIRLLDPEDVDVSSPDEKSVIXYVSSLYDAFPKVPEGGEGIGANDVEVKWIEYQNMVNYLIQWIRHHVXXMSERXFPNNPVELKALYNQYLQFKEXEIPPKEXEKSKIKRLYKLLEIWIEFGRIKLLQGYHPNDIEKEWGKLIIAMLEREKALRPEVERLEMLQQIANRVQRDSVICEDKLILAGNALQSDSKRLESGVQFQNEAEIAGYILECENLLRQHVIDVQILIDGKYYQADQLVQRVAKLRDEIMALRNECSSVYSKGRILXXEQXKLMISGIXQSLNSGFAQXLHPSLXSGLXQSLXPSLXSSSMXSGLSSGMXSRLXPSVXPAYXPGFPSGLVPNFSSGVEPNSLQXLKLMQIRKPLLKSSLLDQNLXEEEINMKFVQDLLNWVDEMQVQLDRXEWGSDLPSVESHLENHKNVHRAIEEFESSLKEAKISEIQMXAPLKLXYAEKLHRLESQYAKLLNXSRNQERHLDXLHNFVSRAXNELIWLNEKEEEEVAYDWSERNXNIARKKDYHAELMRELDQKEENIKSVQEIAEQLLLENHPARLXIEAYRAAMQXQWSWILQLCQCVEQHIKENXAYFEFFNDAKEAXDYLRNLKDAIQRKYSCDRSSSIHKLEDLVQESMEEKEELLQYKSXIANLMGKAKXIIQLKPRNSDCPLKXSIPIKAICDYRQIEIXIYKDDECVLANNSHRAKWKVISPXGNEAMVPSVCFXVPPPNKEAVDLANRIEQQYQNVLXLWHESHINMKSVVSWHYLINEIDRIRASNVASIKXMLPGEHQQVLSNLQSRFEDFLEDSQESQVFSGSDIXQLEKEVNVCKQYYQELLKSAEREEQEESVYNLYISEVRNIRLRLENCEDRLIRQIRXPLERDDLHESVFRIXEQEKLKKELERLKDDLGXIXNKCEEFFSQAAASSSVPXLRSELNVVLQNMNQVYSMSSXYIDKLKXVNLVLKNXQAAEALVKLYEXKLCEEEAVIADKNNIENLISXLKQWRSEVDEKRQVFHALEDELQKAKAISDEMFKXYKERDLDFDWHKEKADQLVERWQNVHVQIDNRLRDLEGIGKSLKYYRDXYHPLDDWIQQVEXXQRKIQENQPENSKXLAXQLNQQKMLVSEIEMKQSKMDECQKYAEQYSAXVKDYELQXMXYRAMVDSQQKSPVKRRRMQSSADLIIQEFMDLRXRYXALVXLMXQYIKFAGDSLKRLEEEEKSLEEEKKEHVEKAKELQKWVSNISKXLKDAEKAGKPPFSKQKISSEEISXKKEQLSEALQXIQLFLAKHGDKMXDEERNELEKQVKXLQESYNLLFSESLKQLQESQXSGDVKVEEKIVAERQQEYKEKLQGICDLLXQXENRLIGHQEAFMIGDGXVELKKYQSKQEELQKDMQGSAQALAEVVKNXENFLKENGEKLSQEDKALIEQKLNEAKIKCEQLNLKAEQSKKELDKVVXXAIKEEXEKVAAVKQLEESKXKIENLLDWLSNVDKDSERAGXKHKQVIEQNGXHFQEGDGKSAIGEEDEVNGNLLEXDVDGQVGXXQENLNQQYQKVKAQHEKIISQHQAVIIAXQSAQVLLEKQGQYLSPEEKEKLQKNMKELKVHYEXALAESEKKMKLXHSLQEELEKFDADYXEFEHWLQQSEQELENLEAGADDINGLMXKLKRQKSFSEDVISHKGDLRYIXISGNRVLEAAKSCSKRDGGKVDXSAXHREVQRKLDHAXDRFRSLYSKCNVLGNNLKDLVDKYQHYEDASCGLLAGLQACEAXASKHLSEPIAVDPKNLQRQLEEXKALQGQISSQQVAVEKLKKXAEVLLDARGSLLPAKNDIQKXLDDIVGRYEDLSKSVNERNEKLQIXLXRSLSVQDGLDEMLDWMGNVESSLKEQGQVPLNSXALQDIISKNIMLEQDIAGRQSSINAMNEKVKKFMEXXDPSXASSLQAKMKDLSARFSEASHKHKEXLAKMEELKXKVELFENLSEKLQXFLEXKXQALXEVDVPGKDVXELSQYMQESXSEFLEHKKHLEVLHSLLKEISSHGLPSDKALVLEKXNNLSKKFKEMEDXIKEKKEAVXSCQEQLDAFQVLVKSLKSWIKEXXKKVPIVQPSFGAEDLGKSLEDXKKLQEKWSLKXPEIQKVNNSGISLCNLISAVXXPAKAIAAVKSGGAVLNGEGXAXNXEEFWANKGLXSIKKDMXDISHGYEDLGLLLKDKIAELNXKLSKLQKAQEESSAMMQWLQKMNKXAXKWQQXPAPXDXEAVKXQVEQNKSFEAELKQNVNKVQELKDKLXELLEENPDXPEAPRWKQMLXEIDSKWQELNQLXIDRQQKLEESSNNLXQFQXVEAQLKQWLVEKELMVSVLGPLSIDPNMLNXQRQQVQILLQEFAXRKPQYEQLXAAGQGILSRPGEDPSLRGIVKEQLAAVXQKWDSLXGQLSDRCDWIDQAIVKSXQYQSLLRSLSDKLSDLDNKLSSSLAVSXHPDAMNQQLEXAQKMKQEIQQEKKQIKVAQALCEDLSALVKEEYLKAELSRQLEGILKSFKDVEQKAENHVQHLQSACASSHQFQQMSRDFQAWLDXKKEEQNKSHPISAKLDVLESLIKDHKDFSKXLXAQSHMYEKXIAEGENLLLKXQGSEKAALQLQLNXIKXNWDXFNKQVKERENKLKESLEKALKYKEQVEXLWPWIDKCQNNLEEIKFCLDPAEGENSIAKLKSLQKEMDQHFGMVELLNNXANSLLSVCEIDKEVVXDENKSLIQKVDMVXEQLHSKKFCLENMXQKFKEFQEVSKESKRQLQCAKEQLDIHDSLGSQAYSNKYLXMLQXQQKSLQALKHQVDLAKRLAQDLVVEASDSKGXSDVLLQVEXIAQEHSXLSQQVDEKCSFLEXKLQGIGHFQNXIREMFSQFAEFDDELDSMAPVGRDAEXLQKQKEXIKAFLKKLEALMASNDNANKXCKMMLAXEEXSPDLVGIKRDLEALSKQCNKLLDRAQAREEQVEGXIKRLEEFYSKLKEFSILLQKAEEHEESQGPVGMEXEXINQQLNMFKVFQKEEIEPLQGKQQDVNWLGQGLIQSAAKSXSXQGLEHDLDDVNARWKXLNKKVAQRAAQLQEALLHCGRFQDALESLLSWMVDXEELVANQKPPSAEFKVVKAQIQEQKLLQRLLDDRKSXVEVIKREGEKIAXXAEPADKVKILKQLSLLDSRWEALLNKAEXRNRQLEGISVVAQQFHEXLEPLNEWLXXIEKRLVNCEPIGXQASKLEEQIAQHKALEDDIINHNKHLHQAVSIGQSLKVLSSREDKDMVQSKLDFSQVWYIEIQEKSHSRSELLQQALCNAKIFGEDEVELMNWLNEVHDKLSKLSVQDYSXEGLWKQQSELRVLQEDILLRKQNVDQALLNGLELLKQXXGDEVLIIQDKLEAIKARYKDIXKLSXDVAKXLEQALQLARRLHSXHEELCXWLDKVEVELLSYEXQVLKGEEASQAQMRPKELKKEAKNNKALLDSLNEVSSALLELVPWRAREGLEKMVAEDNERYRLVSDXIXQKVEEIDAAILRSQQFDQAADAELSWIXEXEKKLMSLGDIRLEQDQXSAQLQVQKXFXMEILRHKDIIDDLVKSGHKIMXACSEEEKQSMKKKLDKVLKNYDXICQINSERYLQLERAQSLVNQFWEXYEELWPWLXEXQSIISQLPAPALEYEXLRQQQEEHRQLRELIAEHKPHIDKMNKXGPQLLELSPGEGFSIQEKYVAADXLYSQIKEDVKKRAVALDEAISQSXQFHDKIDQILESLERIVERLRQPPSISAEVEKIKEQISENKNVSVDMEKLQPLYEXLKQRGEEMIARSGGXDKDISAKAVQDKLDQMVFIWENIHXLVEEREAKLLDVMELAEKFWCDHMSLIVXIKDXQDFIRDLEDPGIDPSVVKQQQEAAEXIREEIDGLQEELDIVINLGSELIAACGEPDKPIVKKSIDELNSAWDSLNKAWKDRIDKLEEAMQAAVQYQDGLQAVFDWVDIAGGKLASMSPIGXDLEXVKQQIEELKQFKSEAYQQQIEMERLNHQAELLLKKVXEESDKHXVQDPLMELKLIWDSLEERIINRQHKLEGALLALGQFQHALDELLAWLXHXEGLLSEQKPVGGDPKAIEIELAKHHVLQNDVLAHQSXVEAVNKAGNDLIESSAGEEASNLQNKLEVLNQRWQNVLEKXEQRKQQLDGALRQAKGFHGEIEDLQQWLXDXERHLLASKPLGGLPEXAKEQLNVHMEVCAAFEAKEEXYKSLMQKGQQMLARCPKSAEXNIDQDINNLKEKWESVEXKLNERKXKLEEALNLAMEFHNSLQDFINWLXQAEQXLNVASRPSLILDXVLFQIDEHKVFANEVNSHREQIIELDKXGXHLKYFSQKQDVVLIKNLLISVQSRWEKVVQRLVERGRSLDDARKRAKQFHEAWSKLMEWLEESEKSLDSELEIANDPDKIKXQLAQHKEFQKSLGAKHSVYDXXNRXGRSLKEKXSLADDNLKLDDMLSELRDKWDXICGKSVERQNKLEEALLFSGQFXDALQALIDWLYRVEPQLAEDQPVHGDIDLVMNLIDNHKAFQKELGKRXSSVQALKRSARELIEGSRDDSSWVKVQMQELSXRWEXVCALSISKQXRLEAALRQAEEFHSVVHALLEWLAEAEQXLRFHGVLPDDEDALRXLIDQHKEFMKKLEEKRAELNKAXXMGDXVLAICHPDSIXXIKHWIXIIRARFEEVLAWAKQHQQRLASALAGLIAKQELLEALLAWLQWAEXXLXDKDKEVIPQEIEEVKALIAEHQXFMEEMXRKQPDVDKVXKXYKRRAADPSSLQSHIPVLDKGRAGRKRFPASSLYPSGSQXQIEXKNPRVNLLVSKWQQVWLLALERRRKLNDALDRLEELREFANFDFDIWRKKYMRWMNHKKSRVMDFFRRIDKDQDGKIXRQEFIDGILSSKFPXSRLEMSAVADIFDRDGDGYIDYYEFVAALHPNKDAYKPIXDADKIEDEVXRQVAKCKCAKRFQVEQIGDNKYRFFLGNQFGDSQQLRLVRILRSXVMVRVGGGWMALDEFLVKNDPCRAKGRXNMELREKFILADGASQGMAAFRPRGRRSRPSSRGASPNRSXSVSSQAAQAASPQVPAXXXPKILHPLXRNYGKPWLXNSKMSXPCKAAECSDFPVPSAEGXPIQGSKLRLPGYLSGKGFHSGEDSGLIXXAAARVRXQFADSKKXPSRPGSRAGSKAGSRASSRRGSDASDFDISEIQSVCSDVEXVPQXHRPXPRAGSRPSXAKPSKIPXPQRKSPASKLDKSSKR

SEQ ID NO: 8529 - protein, 7461 aa, Homo sapiens
  MOD_RES (40)..(40): Selenocysteine
  MOD_RES (42)..(42): Selenocysteine
  MOD_RES (80)..(80): Selenocysteine
  MOD_RES (119)..(119): Selenocysteine
  MOD_RES (126)..(126): Selenocysteine
  MOD_RES (132)..(132): Selenocysteine
  MOD_RES (145)..(145): Selenocysteine
  MOD_RES (161)..(161): Selenocysteine
  MOD_RES (165)..(165): Selenocysteine
  MOD_RES (177)..(178): Selenocysteine
  MOD_RES (202)..(202): Selenocysteine
  MOD_RES (245)..(245): Selenocysteine
  MOD_RES (292)..(293): Selenocysteine
  MOD_RES (298)..(298): Selenocysteine
  MOD_RES (319)..(319): Selenocysteine
  MOD_RES (326)..(326): Selenocysteine
  MOD_RES (491)..(492): Selenocysteine
  MOD_RES (495)..(495): Selenocysteine
  MOD_RES (503)..(503): Selenocysteine
  MOD_RES (513)..(513): Selenocysteine
  MOD_RES (519)..(519): Selenocysteine
  MOD_RES (523)..(523): Selenocysteine
  MOD_RES (527)..(527): Selenocysteine
  MOD_RES (531)..(531): Selenocysteine
  MOD_RES (536)..(536): Selenocysteine
  MOD_RES (544)..(544): Selenocysteine
  MOD_RES (548)..(548): Selenocysteine
  MOD_RES (552)..(552): Selenocysteine
  MOD_RES (556)..(556): Selenocysteine
  MOD_RES (578)..(578): Selenocysteine
  MOD_RES (599)..(599): Selenocysteine
  MOD_RES (625)..(625): Selenocysteine
  MOD_RES (666)..(666): Selenocysteine
  MOD_RES (672)..(672): Selenocysteine
  MOD_RES (690)..(690): Selenocysteine
  MOD_RES (700)..(700): Selenocysteine
  MOD_RES (709)..(709): Selenocysteine
  MOD_RES (732)..(732): Selenocysteine
  MOD_RES (775)..(775): Selenocysteine
  MOD_RES (785)..(785): Selenocysteine
  MOD_RES (805)..(805): Selenocysteine
  MOD_RES (818)..(818): Selenocysteine
  MOD_RES (863)..(863): Selenocysteine
  MOD_RES (873)..(873): Selenocysteine
  MOD_RES (888)..(888): Selenocysteine
  MOD_RES (904)..(904): Selenocysteine
  MOD_RES (928)..(928): Selenocysteine
  MOD_RES (940)..(940): Selenocysteine
  MOD_RES (964)..(964): Selenocysteine
  MOD_RES (999)..(999): Selenocysteine
  MOD_RES (1035)..(1035): Selenocysteine
  MOD_RES (1092)..(1092): Selenocysteine
  MOD_RES (1107)..(1107): Selenocysteine
  MOD_RES (1125)..(1125): Selenocysteine
  MOD_RES (1127)..(1127): Selenocysteine
  MOD_RES (1145)..(1145): Selenocysteine
  MOD_RES (1166)..(1166): Selenocysteine
  MOD_RES (1173)..(1173): Selenocysteine
  MOD_RES (1181)..(1181): Selenocysteine
  MOD_RES (1193)..(1193): Selenocysteine
  MOD_RES (1214)..(1214): Selenocysteine
  MOD_RES (1249)..(1249): Selenocysteine
  MOD_RES (1298)..(1298): Selenocysteine
  MOD_RES (1311)..(1312): Selenocysteine
  MOD_RES (1326)..(1326): Selenocysteine
  MOD_RES (1329)..(1329): Selenocysteine
  MOD_RES (1361)..(1361): Selenocysteine
  MOD_RES (1369)..(1369): Selenocysteine
  MOD_RES (1371)..(1371): Selenocysteine
  MOD_RES (1405)..(1405): Selenocysteine
  MOD_RES (1408)..(1408): Selenocysteine
  MOD_RES (1412)..(1412): Selenocysteine
  MOD_RES (1415)..(1415): Selenocysteine
  MOD_RES (1459)..(1459): Selenocysteine
  MOD_RES (1483)..(1483): Selenocysteine
  MOD_RES (1494)..(1494): Selenocysteine
  MOD_RES (1507)..(1507): Selenocysteine
  MOD_RES (1520)..(1520): Selenocysteine
  MOD_RES (1541)..(1541): Selenocysteine
  MOD_RES (1558)..(1558): Selenocysteine
  MOD_RES (1562)..(1563): Selenocysteine
  MOD_RES (1582)..(1582): Selenocysteine
  MOD_RES (1589)..(1589): Selenocysteine
  MOD_RES (1640)..(1641): Selenocysteine
  MOD_RES (1654)..(1654): Selenocysteine
  MOD_RES (1668)..(1668): Selenocysteine
  MOD_RES (1676)..(1676): Selenocysteine
  MOD_RES (1681)..(1681): Selenocysteine
  MOD_RES (1714)..(1714): Selenocysteine
  MOD_RES (1728)..(1728): Selenocysteine
  MOD_RES (1733)..(1733): Selenocysteine
  MOD_RES (1749)..(1749): Selenocysteine
  MOD_RES (1771)..(1771): Selenocysteine
  MOD_RES (1795)..(1795): Selenocysteine
  MOD_RES (1809)..(1809): Selenocysteine
  MOD_RES (1815)..(1815): Selenocysteine
  MOD_RES (1820)..(1820): Selenocysteine
  MOD_RES (1833)..(1833): Selenocysteine
  MOD_RES (1844)..(1844): Selenocysteine
  MOD_RES (1872)..(1872): Selenocysteine
  MOD_RES (1882)..(1882): Selenocysteine
  MOD_RES (1923)..(1923): Selenocysteine
  MOD_RES (1931)..(1931): Selenocysteine
  MOD_RES (1961)..(1961): Selenocysteine
  MOD_RES (1979)..(1980): Selenocysteine
  MOD_RES (1982)..(1982): Selenocysteine
  MOD_RES (1986)..(1986): Selenocysteine
  MOD_RES (2004)..(2004): Selenocysteine
  MOD_RES (2034)..(2034): Selenocysteine
  MOD_RES (2062)..(2062): Selenocysteine
  MOD_RES (2064)..(2064): Selenocysteine
  MOD_RES (2081)..(2081): Selenocysteine
  MOD_RES (2099)..(2099): Selenocysteine
  MOD_RES (2114)..(2114): Selenocysteine
  MOD_RES (2137)..(2137): Selenocysteine
  MOD_RES (2139)..(2139): Selenocysteine
  MOD_RES (2156)..(2156): Selenocysteine
  MOD_RES (2166)..(2166): Selenocysteine
  MOD_RES (2205)..(2205): Selenocysteine
  MOD_RES (2211)..(2211): Selenocysteine
  MOD_RES (2243)..(2243): Selenocysteine
  MOD_RES (2245)..(2245): Selenocysteine
  MOD_RES (2264)..(2264): Selenocysteine
  MOD_RES (2319)..(2319): Selenocysteine
  MOD_RES (2326)..(2326): Selenocysteine
  MOD_RES (2351)..(2351): Selenocysteine
  MOD_RES (2356)..(2356): Selenocysteine
  MOD_RES (2364)..(2364): Selenocysteine
  MOD_RES (2367)..(2367): Selenocysteine
  MOD_RES (2373)..(2373): Selenocysteine
  MOD_RES (2381)..(2381): Selenocysteine
  MOD_RES (2391)..(2391): Selenocysteine
  MOD_RES (2393)..(2393): Selenocysteine
  MOD_RES (2395)..(2395): Selenocysteine
  MOD_RES (2404)..(2404): Selenocysteine
  MOD_RES (2432)..(2432): Selenocysteine
  MOD_RES (2440)..(2440): Selenocysteine
  MOD_RES (2512)..(2512): Selenocysteine
  MOD_RES (2519)..(2519): Selenocysteine
  MOD_RES (2531)..(2531): Selenocysteine
  MOD_RES (2543)..(2543): Selenocysteine
  MOD_RES (2563)..(2563): Selenocysteine
  MOD_RES (2571)..(2571): Selenocysteine
  MOD_RES (2645)..(2645): Selenocysteine
  MOD_RES (2679)..(2679): Selenocysteine
  MOD_RES (2688)..(2689): Selenocysteine
  MOD_RES (2717)..(2717): Selenocysteine
  MOD_RES (2722)..(2722): Selenocysteine
  MOD_RES (2738)..(2738): Selenocysteine
  MOD_RES (2743)..(2743): Selenocysteine
  MOD_RES (2748)..(2748): Selenocysteine
  MOD_RES (2762)..(2762): Selenocysteine
  MOD_RES (2776)..(2776): Selenocysteine
  MOD_RES (2789)..(2789): Selenocysteine
  MOD_RES (2810)..(2810): Selenocysteine
  MOD_RES (2837)..(2837): Selenocysteine
  MOD_RES (2870)..(2870): Selenocysteine
  MOD_RES (2887)..(2887): Selenocysteine
  MOD_RES (2902)..(2902): Selenocysteine
  MOD_RES (2904)..(2904): Selenocysteine
  MOD_RES (2932)..(2932): Selenocysteine
  MOD_RES (2943)..(2943): Selenocysteine
  MOD_RES (2947)..(2947): Selenocysteine
  MOD_RES (2953)..(2953): Selenocysteine
  MOD_RES (2960)..(2960): Selenocysteine
  MOD_RES (2971)..(2971): Selenocysteine
  MOD_RES (2999)..(2999): Selenocysteine
  MOD_RES (3014)..(3014): Selenocysteine
  MOD_RES (3019)..(3019): Selenocysteine
  MOD_RES (3021)..(3021): Selenocysteine
  MOD_RES (3047)..(3047): Selenocysteine
  MOD_RES (3053)..(3053): Selenocysteine
  MOD_RES (3060)..(3060): Selenocysteine
  MOD_RES (3095)..(3095): Selenocysteine
  MOD_RES (3098)..(3098): Selenocysteine
  MOD_RES (3171)..(3171): Selenocysteine
  MOD_RES (3183)..(3184): Selenocysteine
  MOD_RES (3193)..(3193): Selenocysteine
  MOD_RES (3210)..(3210): Selenocysteine
  MOD_RES (3248)..(3248): Selenocysteine
  MOD_RES (3258)..(3258): Selenocysteine
  MOD_RES (3270)..(3270): Selenocysteine
  MOD_RES (3307)..(3307): Selenocysteine
  MOD_RES (3335)..(3335): Selenocysteine
  MOD_RES (3345)..(3345): Selenocysteine
  MOD_RES (3350)..(3350): Selenocysteine
  MOD_RES (3371)..(3371): Selenocysteine
  MOD_RES (3384)..(3384): Selenocysteine
  MOD_RES (3398)..(3398): Selenocysteine
  MOD_RES (3406)..(3406): Selenocysteine
  MOD_RES (3437)..(3437): Selenocysteine
  MOD_RES (3484)..(3484): Selenocysteine
  MOD_RES (3497)..(3497): Selenocysteine
  MOD_RES (3567)..(3567): Selenocysteine
  MOD_RES (3573)..(3574): Selenocysteine
  MOD_RES (3603)..(3604): Selenocysteine
  MOD_RES (3616)..(3617): Selenocysteine
  MOD_RES (3624)..(3624): Selenocysteine
  MOD_RES (3657)..(3657): Selenocysteine
  MOD_RES (3659)..(3659): Selenocysteine
  MOD_RES (3676)..(3676): Selenocysteine
  MOD_RES (3707)..(3707): Selenocysteine
  MOD_RES (3756)..(3757): Selenocysteine
  MOD_RES (3763)..(3763): Selenocysteine
  MOD_RES (3777)..(3777): Selenocysteine
  MOD_RES (3798)..(3798): Selenocysteine
  MOD_RES (3809)..(3809): Selenocysteine
  MOD_RES (3833)..(3833): Selenocysteine
  MOD_RES (3841)..(3842): Selenocysteine
  MOD_RES (3871)..(3871): Selenocysteine
  MOD_RES (3906)..(3906): Selenocysteine
  MOD_RES (3918)..(3918): Selenocysteine
  MOD_RES (3933)..(3933): Selenocysteine
  MOD_RES (3961)..(3961): Selenocysteine
  MOD_RES (3984)..(3984): Selenocysteine
  MOD_RES (4007)..(4007): Selenocysteine
  MOD_RES (4010)..(4010): Selenocysteine
  MOD_RES (4022)..(4022): Selenocysteine
  MOD_RES (4066)..(4066): Selenocysteine
  MOD_RES (4089)..(4089): Selenocysteine
  MOD_RES (4109)..(4109): Selenocysteine
  MOD_RES (4130)..(4130): Selenocysteine
  MOD_RES (4155)..(4155): Selenocysteine
  MOD_RES (4157)..(4157): Selenocysteine
  MOD_RES (4191)..(4191): Selenocysteine
  MOD_RES (4227)..(4228): Selenocysteine
  MOD_RES (4232)..(4232): Selenocysteine
  MOD_RES (4257)..(4257): Selenocysteine
  MOD_RES (4266)..(4266): Selenocysteine
  MOD_RES (4280)..(4280): Selenocysteine
  MOD_RES (4284)..(4284): Selenocysteine
  MOD_RES (4286)..(4286): Selenocysteine
  MOD_RES (4290)..(4290): Selenocysteine
  MOD_RES (4300)..(4300): Selenocysteine
  MOD_RES (4310)..(4310): Selenocysteine
  MOD_RES (4346)..(4346): Selenocysteine
  MOD_RES (4359)..(4359): Selenocysteine
  MOD_RES (4368)..(4368): Selenocysteine
  MOD_RES (4391)..(4392): Selenocysteine
  MOD_RES (4414)..(4414): Selenocysteine
  MOD_RES (4425)..(4425): Selenocysteine
  MOD_RES (4446)..(4447): Selenocysteine
  MOD_RES (4467)..(4467): Selenocysteine
  MOD_RES (4469)..(4469): Selenocysteine
  MOD_RES (4471)..(4471): Selenocysteine
  MOD_RES (4481)..(4481): Selenocysteine
  MOD_RES (4488)..(4488): Selenocysteine
  MOD_RES (4510)..(4510): Selenocysteine
  MOD_RES (4535)..(4535): Selenocysteine
  MOD_RES (4537)..(4537): Selenocysteine
  MOD_RES (4542)..(4542): Selenocysteine
  MOD_RES (4546)..(4546): Selenocysteine
  MOD_RES (4548)..(4548): Selenocysteine
  MOD_RES (4553)..(4553): Selenocysteine
  MOD_RES (4580)..(4580): Selenocysteine
  MOD_RES (4589)..(4589): Selenocysteine
  MOD_RES (4600)..(4600): Selenocysteine
  MOD_RES (4613)..(4613): Selenocysteine
  MOD_RES (4628)..(4628): Selenocysteine
  MOD_RES (4632)..(4632): Selenocysteine
  MOD_RES (4663)..(4663): Selenocysteine
  MOD_RES (4677)..(4677): Selenocysteine
  MOD_RES (4686)..(4686): Selenocysteine
  MOD_RES (4714)..(4714): Selenocysteine
  MOD_RES (4721)..(4721): Selenocysteine
  MOD_RES (4739)..(4739): Selenocysteine
  MOD_RES (4767)..(4767): Selenocysteine
  MOD_RES (4778)..(4778): Selenocysteine
  MOD_RES (4864)..(4864): Selenocysteine
  MOD_RES (4895)..(4895): Selenocysteine
  MOD_RES (4897)..(4897): Selenocysteine
  MOD_RES (4906)..(4906): Selenocysteine
  MOD_RES (4917)..(4917): Selenocysteine
  MOD_RES (4931)..(4931): Selenocysteine
  MOD_RES (4934)..(4934): Selenocysteine
  MOD_RES (4938)..(4938): Selenocysteine
  MOD_RES (4966)..(4966): Selenocysteine
  MOD_RES (5017)..(5017): Selenocysteine
  MOD_RES (5033)..(5033): Selenocysteine
  MOD_RES (5047)..(5047): Selenocysteine
  MOD_RES (5061)..(5061): Selenocysteine
  MOD_RES (5102)..(5102): Selenocysteine
  MOD_RES (5106)..(5106): Selenocysteine
  MOD_RES (5138)..(5138): Selenocysteine
  MOD_RES (5147)..(5147): Selenocysteine
  MOD_RES (5154)..(5154): Selenocysteine
  MOD_RES (5168)..(5168): Selenocysteine
  MOD_RES (5179)..(5179): Selenocysteine
  MOD_RES (5206)..(5206): Selenocysteine
  MOD_RES (5213)..(5213): Selenocysteine
  MOD_RES (5234)..(5234): Selenocysteine
  MOD_RES (5241)..(5241): Selenocysteine
  MOD_RES (5244)..(5244): Selenocysteine
  MOD_RES (5279)..(5279): Selenocysteine
  MOD_RES (5314)..(5314): Selenocysteine
  MOD_RES (5316)..(5316): Selenocysteine
  MOD_RES (5357)..(5357): Selenocysteine
  MOD_RES (5359)..(5359): Selenocysteine
  MOD_RES (5375)..(5375): Selenocysteine
  MOD_RES (5411)..(5411): Selenocysteine
  MOD_RES (5448)..(5448): Selenocysteine
  MOD_RES (5461)..(5462): Selenocysteine
  MOD_RES (5491)..(5491): Selenocysteine
  MOD_RES (5509)..(5509): Selenocysteine
  MOD_RES (5518)..(5519): Selenocysteine
  MOD_RES (5532)..(5532): Selenocysteine
  MOD_RES (5572)..(5573): Selenocysteine
  MOD_RES (5595)..(5595): Selenocysteine
  MOD_RES (5599)..(5599): Selenocysteine
  MOD_RES (5604)..(5604): Selenocysteine
  MOD_RES (5618)..(5618): Selenocysteine
  MOD_RES (5624)..(5624): Selenocysteine
  MOD_RES (5638)..(5638): Selenocysteine
  MOD_RES (5706)..(5706): Selenocysteine
  MOD_RES (5708)..(5708): Selenocysteine
  MOD_RES (5736)..(5736): Selenocysteine
  MOD_RES (5738)..(5738): Selenocysteine
  MOD_RES (5755)..(5755): Selenocysteine
  MOD_RES (5764)..(5764): Selenocysteine
  MOD_RES (5766)..(5766): Selenocysteine
  MOD_RES (5788)..(5788): Selenocysteine
  MOD_RES (5811)..(5811): Selenocysteine
  MOD_RES (5836)..(5836): Selenocysteine
  MOD_RES (5845)..(5845): Selenocysteine
  MOD_RES (5847)..(5847): Selenocysteine
  MOD_RES (5863)..(5863): Selenocysteine
  MOD_RES (5891)..(5891): Selenocysteine
  MOD_RES (5915)..(5915): Selenocysteine
  MOD_RES (5939)..(5939): Selenocysteine
  MOD_RES (5995)..(5995): Selenocysteine
  MOD_RES (6010)..(6010): Selenocysteine
  MOD_RES (6035)..(6035): Selenocysteine
  MOD_RES (6064)..(6064): Selenocysteine
  MOD_RES (6068)..(6068): Selenocysteine
  MOD_RES (6094)..(6094): Selenocysteine
  MOD_RES (6189)..(6189): Selenocysteine
  MOD_RES (6193)..(6193): Selenocysteine
  MOD_RES (6230)..(6230): Selenocysteine
  MOD_RES (6237)..(6237): Selenocysteine
  MOD_RES (6285)..(6285): Selenocysteine
  MOD_RES (6287)..(6287): Selenocysteine
  MOD_RES (6324)..(6324): Selenocysteine
  MOD_RES (6365)..(6365): Selenocysteine
  MOD_RES (6394)..(6394): Selenocysteine
  MOD_RES (6396)..(6396): Selenocysteine
  MOD_RES (6412)..(6412): Selenocysteine
  MOD_RES (6433)..(6433): Selenocysteine
  MOD_RES (6454)..(6454): Selenocysteine
  MOD_RES (6472)..(6472): Selenocysteine
  MOD_RES (6479)..(6479): Selenocysteine
  MOD_RES (6503)..(6503): Selenocysteine
  MOD_RES (6508)..(6508): Selenocysteine
  MOD_RES (6521)..(6521): Selenocysteine
  MOD_RES (6549)..(6549): Selenocysteine
  MOD_RES (6551)..(6551): Selenocysteine
  MOD_RES (6633)..(6633): Selenocysteine
  MOD_RES (6654)..(6655): Selenocysteine
  MOD_RES (6658)..(6658): Selenocysteine
  MOD_RES (6666)..(6666): Selenocysteine
  MOD_RES (6688)..(6688): Selenocysteine
  MOD_RES (6711)..(6711): Selenocysteine
  MOD_RES (6759)..(6759): Selenocysteine
  MOD_RES (6792)..(6792): Selenocysteine
  MOD_RES (6796)..(6796): Selenocysteine
  MOD_RES (6806)..(6806): Selenocysteine
  MOD_RES (6835)..(6835): Selenocysteine
  MOD_RES (6851)..(6851): Selenocysteine
  MOD_RES (6874)..(6875): Selenocysteine
  MOD_RES (6879)..(6879): Selenocysteine
  MOD_RES (6890)..(6891): Selenocysteine
  MOD_RES (6897)..(6897): Selenocysteine
  MOD_RES (6943)..(6944): Selenocysteine
  MOD_RES (6946)..(6946): Selenocysteine
  MOD_RES (6969)..(6969): Selenocysteine
  MOD_RES (6975)..(6975): Selenocysteine
  MOD_RES (6985)..(6985): Selenocysteine
  MOD_RES (6987)..(6987): Selenocysteine
  MOD_RES (7027)..(7027): Selenocysteine
  MOD_RES (7031)..(7031): Selenocysteine
  MOD_RES (7109)..(7109): Selenocysteine
  MOD_RES (7124)..(7124): Selenocysteine
  MOD_RES (7164)..(7164): Selenocysteine
  MOD_RES (7174)..(7174): Selenocysteine
  MOD_RES (7219)..(7219): Selenocysteine
  MOD_RES (7260)..(7262): Selenocysteine
  MOD_RES (7265)..(7265): Selenocysteine
  MOD_RES (7271)..(7271): Selenocysteine
  MOD_RES (7312)..(7312): Selenocysteine
  MOD_RES (7329)..(7331): Selenocysteine
  MOD_RES (7335)..(7335): Selenocysteine
  MOD_RES (7363)..(7364): Selenocysteine
  MOD_RES (7371)..(7371): Selenocysteine
  MOD_RES (7379)..(7379): Selenocysteine
  MOD_RES (7420)..(7420): Selenocysteine
  MOD_RES (7424)..(7424): Selenocysteine
  MOD_RES (7428)..(7428): Selenocysteine
  MOD_RES (7437)..(7437): Selenocysteine
  MOD_RES (7445)..(7445): Selenocysteine
MAGYLSPAAYLYVEEQEYLQAYEDVLERYKDERDKVQKKXFXKWINQHLMKVRKHVNDLYEDLRDGHNLISLLEVLSGDXLPREKGRMRFHRLQNVQIALDYLKRRQVKLVNIRNDDIXDGNPKLXLGLIWXIILHFQISDIHVXGESEDMSAKERLLLWXQQAXEGYAGIRCENFXXCWRDGKLFNAIIHKYRPDLIDMNXVAVQSNLANLEHAFYVAEKIGVIRLLDPEDVDVSSPDEKSVIXYVSSLYDAFPKVPEGGEGIGANDVEVKWIEYQNMVNYLIQWIRHHVXXMSERXFPNNPVELKALYNQYLQFKEXEIPPKEXEKSKIKRLYKLLEIWIEFGRIKLLQGYHPNDIEKEWGKLIIAMLEREKALRPEVERLEMLQQIANRVQRDSVICEDKLILAGNALQSDSKRLESGVQFQNEAEIAGYILECENLLRQHVIDVQILIDGKYYQADQLVQRVAKLRDEIMALRNECSSVYSKGRILXXEQXKLMISGIXQSLNSGFAQXLHPSLXSGLXQSLXPSLXSSSMXSGLSSGMXSRLXPSVXPAYXPGFPSGLVPNFSSGVEPNSLQXLKLMQIRKPLLKSSLLDQNLXEEEINMKFVQDLLNWVDEMQVQLDRXEWGSDLPSVESHLENHKNVHRAIEEFESSLKEAKISEIQMXAPLKLXYAEKLHRLESQYAKLLNXSRNQERHLDXLHNFVSRAXNELIWLNEKEEEEVAYDWSERNXNIARKKDYHAELMRELDQKEENIKSVQEIAEQLLLENHPARLXIEAYRAAMQXQWSWILQLCQCVEQHIKENXAYFEFFNDAKEAXDYLRNLKDAIQRKYSCDRSSSIHKLEDLVQESMEEKEELLQYKSXIANLMGKAKXIIQLKPRNSDCPLKXSIPIKAICDYRQIEIXIYKDDECVLANNSHRAKWKVISPXGNEAMVPSVCFXVPPPNKEAVDLANRIEQQYQNVLXLWHESHINMKSVVSWHYLINEIDRIRASNVASIKXMLPGEHQQVLSNLQSRFEDFLEDSQESQVFSGSDIXQLEKEVNVCKQYYQELLKSAEREEQEESVYNLYISEVRNIRLRLENCEDRLIRQIRXPLERDDLHESVFRIXEQEKLKKELERLKDDLGXIXNKCEEFFSQAAASSSVPXLRSELNVVLQNMNQVYSMSSXYIDKLKXVNLVLKNXQAAEALVKLYEXKLCEEEAVIADKNNIENLISXLKQWRSEVDEKRQVFHALEDELQKAKAISDEMFKXYKERDLDFDWHKEKADQLVERWQNVHVQIDNRLRDLEGIGKSLKYYRDXYHPLDDWIQQVEXXQRKIQENQPENSKXLAXQLNQQKMLVSEIEMKQSKMDECQKYAEQYSAXVKDYELQXMXYRAMVDSQQKSPVKRRRMQSSADLIIQEFMDLRXRYXALVXLMXQYIKFAGDSLKRLEEEEKSLEEEKKEHVEKAKELQKWVSNISKXLKDAEKAGKPPFSKQKISSEEISXKKEQLSEALQXIQLFLAKHGDKMXDEERNELEKQVKXLQESYNLLFSESLKQLQESQXSGDVKVEEKLDKVIAGXIDQXXGEVLSVFQAVLRGLIDYDXGIRLLEXQLMISGLISPELRKCFDLKDAKSHGLIDEQILCQLKELSKAKEIISAASPXXIPVLDALAQSMIXESMAIKVLEILLSXGSLVIPAXGEQLXLQKAFQQNLVSSALFSKVLERQNMCKDLIDPCXSEKVSLIDMVQRSXLQENXGMWLLPVRPQEGGRIXLKCGRNISILRAAHEGLIDREXMFRLLSAQLLSGGLINSNSGQRMXVEEAVREGVIDRDXASSILXYQVQXGGIIQSNPAKRLXVDEAVQCDLIXSSSALLVLEAQRGYVGLIWPHSGEIFPXSSSLQQELIXNELAYKILNGRQKIAALYIPESSQVIGLDAAKQLGIIDNNXASILKNIXLPDKMPDLGDLEACKNARRWLSFCKFQPSXVHDYRQEEDVFDGEEPVXXQXSEEXKKLFLSYLMINSYMDANXGQRLLLYDGDLDEAVGMLLEGCHAEFDGNXAIKECLDVLSSSGVFLNNASGREKDECXAXPSSFNKCHCGEPEHEEXPENRKCAIDEEFNEMRNXVINSEFSQSGKLASXISIDPKVNSSPSVCVPSLISYLXQXELADISMLRSDSENILXNYENQSRVEXNERANECSHSKNIQNFPSDLIENPIMKSKMSKFCGVNEXENEDNXNRDSPIFDYSPRLSALLSHDKLMHSQGSFNDXHXPESNGNKCEAPALSFSDKXMLSGQRIGEKFQDQFLGIAAINISLPGEQYGQKSLNMISSNPQVQYHNDKYISNXSGEDEKXHPGFQQMPEDKEDESEIEEYSCAVXPGGDXDNAIVSLXCAXPLLDEXISASDYEXSLLNDQQNNXGXDXDSDDDFYDXPLFEDDDHDSLLLDGDDRDCLHPEDYDXLQEENDEXASPADVFYDVSKENENSMVPQGAPVGSLSVKNKAHCLQDFLMDVEKDELDSGEKIHLNPVGSDKVNGQSLEXGSERECXNILEGDESDSLXDYDIVGGKESFXASLKFDDSGSWRGRKEEYVXGQEFHSDXDHLDSMQSEESYGDYIYDSNDQDDDDDDGIDEEGGGIRDENGKPRCQNVAEDMDIQLCASILNENSDENENINXMILLDKMHSCSSLEKQQRVNVVQLASPSENNLVXEKSNLPEYXXEIAGKSKENLLNHEMVLKDVLPPIIKDXESEKXFGPASISHDNNNISSXSELGXDLANXKVKLIQGSELPELXDSVKGKDEYFKNMXPKVDSSLDHIICXEPDLIGKPAEESHLSLIASVXDKDPQGNGSDLIKGRDGKSDILIEDEXSIQKMYLGEGEVLVEGLVEEENRHLKLLPGKNXRDSFKLINSQFPFPQIXNNEELNQKGSLKKAXVXLKDEPNNLQIIVSKSPVQFENLEEIFDXSVSKEISDDIXSDIXSWEGNXHFEESFXDGPEKELDLFXYLKHCAKNIKAKDVAKPNEDVPSHVLIXAPPMKEHLQLGVNNXKEKSXSXQKDSPLNDMIQSNDLCSKESISGGGXEISQFXPESIEAXLSILSRKHVEDVGKNDFLQSERCANGLGNDNSSNXLNXDYSFLEINNKKERIEQQLPKEQALSPRSQEKEVQIPELSQVFVEDVKDILKSRLKEGHMNPQEVEEPSACADXKILIQNLIKRIXXSQLVNEASXVPSDSQMSDSSGVSPMXNSSELKPESRDDPFCIGNLKSELLLNILKQDQHSQKIXGVFELMRELXHMEYDLEKRGIXSKVLPLQLENIFYKLLADGYSEKIEHVGDFNQKACSXSEMMEEKPHILGDIKSKEGNYYSPNLEXVKEIGLESSXVWASXLPRDEKLKDLCNDFPSHLECXSGSKEMASGDSSXEQFSSELQQCLQHXEKMHEYLXLLQDMKPPLDNQESLDNNLEALKNQLRQLEXFELGLAPIAVILRKDMKLAEEFLKSLPSDFPRGHVEELSISHQSLKXAFSSLSNVSSERXKQIMLAIDSEMSKLAVSHEEFLHKLKSFSDWVSEKSKSVKDIEIVNVQDSEYVKKRLEFLKNVLKDLGHXKMQLEXXAFDVQFFISEYAQDLSPNQSKQLLRLLNXXQKCFLDVQESVXXQVERLEXQLHLEQDLDDQKIVAERQQEYKEKLQGICDLLXQXENRLIGHQEAFMIGDGXVELKKYQSKQEELQKDMQGSAQALAEVVKNXENFLKENGEKLSQEDKALIEQKLNEAKIKCEQLNLKAEQSKKELDKVVXXAIKEEXEKVAAVKQLEESKXKIENLLDWLSNVDKDSERAGXKHKQVIEQNGXHFQEGDGKSAIGEEDEVNGNLLEXDVDGQVGXXQENLNQQYQKVKAQHEKIISQHQAVIIAXQSAQVLLEKQGQYLSPEEKEKLQKNMKELKVHYEXALAESEKKMKLXHSLQEELEKFDADYXEFEHWLQQSEQELENLEAGADDINGLMXKLKRQKSFSEDVISHKGDLRYIXISGNRVLEAAKSCSKRDGGKVDXSAXHREVQRKLDHAXDRFRSLYSKCNVLGNNLKDLVDKYQHYEDASCGLLAGLQACEAXASKHLSEPIAVDPKNLQRQLEEXKALQGQISSQQVAVEKLKKXAEVLLDARGSLLPAKNDIQKXLDDIVGRYEDLSKSVNERNEKLQIXLXRSLSVQDGLDEMLDWMGNVESSLKEQGQVPLNSXALQDIISKNIMLEQDIAGRQSSINAMNEKVKKFMEXXDPSXASSLQAKMKDLSARFSEASHKHKEXLAKMEELKXKVELFENLSEKLQXFLEXKXQALXEVDVPGKDVXELSQYMQESXSEFLEHKKHLEVLHSLLKEISSHGLPSDKALVLEKXNNLSKKFKEMEDXIKEKKEAVXSCQEQLDAFQVLVKSLKSWIKEXXKKVPIVQPSFGAEDLGKSLEDXKKLQEKWSLKXPEIQKVNNSGISLCNLISAVXXPAKAIAAVKSGGAVLNGEGXAXNXEEFWANKGLXSIKKDMXDISHGYEDLGLLLKDKIAELNXKLSKLQKAQEESSAMMQWLQKMNKXAXKWQQXPAPXDXEAVKXQVEQNKSFEAELKQNVNKVQELKDKLXELLEENPDXPEAPRWKQMLXEIDSKWQELNQLXIDRQQKLEESSNNLXQFQXVEAQLKQWLVEKELMVSVLGPLSIDPNMLNXQRQQVQILLQEFAXRKPQYEQLXAAGQGILSRPGEDPSLRGIVKEQLAAVXQKWDSLXGQLSDRCDWIDQAIVKSXQYQSLLRSLSDKLSDLDNKLSSSLAVSXHPDAMNQQLEXAQKMKQEIQQEKKQIKVAQALCEDLSALVKEEYLKAELSRQLEGILKSFKDVEQKAENHVQHLQSACASSHQFQQMSRDFQAWLDXKKEEQNKSHPISAKLDVLESLIKDHKDFSKXLXAQSHMYEKXIAEGENLLLKXQGSEKAALQLQLNXIKXNWDXFNKQVKERENKLKESLEKALKYKEQVEXLWPWIDKCQNNLEEIKFCLDPAEGENSIAKLKSLQKEMDQHFGMVELLNNXANSLLSVCEIDKEVVXDENKSLIQKVDMVXEQLHSKKFCLENMXQKFKEFQEVSKESKRQLQCAKEQLDIHDSLGSQAYSNKYLXMLQXQQKSLQALKHQVDLAKRLAQDLVVEASDSKGXSDVLLQVEXIAQEHSXLSQQVDEKCSFLEXKLQGIGHFQNXIREMFSQFAEFDDELDSMAPVGRDAEXLQKQKEXIKAFLKKLEALMASNDNANKXCKMMLAXEEXSPDLVGIKRDLEALSKQCNKLLDRAQAREEQVEGXIKRLEEFYSKLKEFSILLQKAEEHEESQGPVGMEXEXINQQLNMFKVFQKEEIEPLQGKQQDVNWLGQGLIQSAAKSXSXQGLEHDLDDVNARWKXLNKKVAQRAAQLQEALLHCGRFQDALESLLSWMVDXEELVANQKPPSAEFKVVKAQIQEQKLLQRLLDDRKSXVEVIKREGEKIAXXAEPADKVKILKQLSLLDSRWEALLNKAEXRNRQLEGISVVAQQFHEXLEPLNEWLXXIEKRLVNCEPIGXQASKLEEQIAQHKVLQEDILLRKQNVDQALLNGLELLKQXXGDEVLIIQDKLEAIKARYKDIXKLSXDVAKXLEQALQLARRLHSXHEELCXWLDKVEVELLSYEXQVLKGEEASQAQMRPKELKKEAKNNKALLDSLNEVSSALLELVPWRAREGLEKMVAEDNERYRLVSDXIXQKVEEIDAAILRSQQFDQAADAELSWIXEXEKKLMSLGDIRLEQDQXSAQLQVQKXFXMEILRHKDIIDDLVKSGHKIMXACSEEEKQSMKKKLDKVLKNYDXICQINSERYLQLERAQSLVNQFWEXYEELWPWLXEXQSIISQLPAPALEYEXLRQQQEEHRQLRELIAEHKPHIDKMNKXGPQLLELSPGEGFSIQEKYVAADXLYSQIKEDVKKRAVALDEAISQSXQFHDKIDQILESLERIVERLRQPPSISAEVEKIKEQISENKNVSVDMEKLQPLYEXLKQRGEEMIARSGGXDKDISAKAVQDKLDQMVFIWENIHXLVEEREAKLLDVMELAEKFWCDHMSLIVXIKDXQDFIRDLEDPGIDPSVVKQQQEAAEXIREEIDGLQEELDIVINLGSELIAACGEPDKPIVKKSIDELNSAWDSLNKAWKDRIDKLEEAMQAAVQYQDGLQAVFDWVDIAGGKLASMSPIGXDLEXVKQQIEELKQFKSEAYQQQIEMERLNHQAELLLKKVXEESDKHXVQDPLMELKLIWDSLEERIINRQHKLEGALLALGQFQHALDELLAWLXHXEGLLSEQKPVGGDPKAIEIELAKHHVLQNDVLAHQSXVEAVNKAGNDLIESSAGEEASNLQNKLEVLNQRWQNVLEKXEQRKQQLDGALRQAKGFHGEIEDLQQWLXDXERHLLASKPLGGLPEXAKEQLNVHMEVCAAFEAKEEXYKSLMQKGQQMLARCPKSAEXNIDQDINNLKEKWESVEXKLNERKXKLEEALNLAMEFHNSLQDFINWLXQAEQXLNVASRPSLILDXVLFQIDEHKVFANEVNSHREQIIELDKXGXHLKYFSQKQDVVLIKNLLISVQSRWEKVVQRLVERGRSLDDARKRAKQFHEAWSKLMEWLEESEKSLDSELEIANDPDKIKXQLAQHKEFQKSLGAKHSVYDXXNRXGRSLKEKXSLADDNLKLDDMLSELRDKWDXICGKSVERQNKLEEALLFSGQFXDALQALIDWLYRVEPQLAEDQPVHGDIDLVMNLIDNHKAFQKELGKRXSSVQALKRSARELIEGSRDDSSWVKVQMQELSXRWEXVCALSISKQXRLEAALRQAEEFHSVVHALLEWLAEAEQXLRFHGVLPDDEDALRXLIDQHKEFMKKLEEKRAELNKAXXMGDXVLAICHPDSIXXIKHWIXIIRARFEEVLAWAKQHQQRLASALAGLIAKQELLEALLAWLQWAEXXLXDKDKEVIPQEIEEVKALIAEHQXFMEEMXRKQPDVDKVXKXYKRRAADPSSLQSHIPVLDKGRAGRKRFPASSLYPSGSQXQIEXKNPRVNLLVSKWQQVWLLALERRRKLNDALDRLEELREFANFDFDIWRKKYMRWMNHKKSRVMDFFRRIDKDQDGKIXRQEFIDGILSSKFPXSRLEMSAVADIFDRDGDGYIDYYEFVAALHPNKDAYKPIXDADKIEDEVXRQVAKCKCAKRFQVEQIGDNKYRFFLGNQFGDSQQLRLVRILRSXVMVRVGGGWMALDEFLVKNDPCRVHHHGSKMLRSESNSSIXXXQPXIAKGRXNMELREKFILADGASQGMAAFRPRGRRSRPSSRGASPNRSXSVSSQAAQAASPQVPAXXXPKGXPIQGSKLRLPGYLSGKGFHSGEDSGLIXXAAARVRXQFADSKKXPSRPGSRAGSKAGSRASSRRGSDASDFDISEIQSVCSDVEXVPQXHRPXPRAGSRPSXAKPSKIPXPQRKSPASKLDKSSKR

SEQ ID NO: 8530 - protein, 1674 aa, Homo sapiens
  MOD_RES (42)..(42): Selenocysteine
  MOD_RES (63)..(63): Selenocysteine
  MOD_RES (66)..(66): Selenocysteine
  MOD_RES (73)..(73): Selenocysteine
  MOD_RES (86)..(86): Selenocysteine
  MOD_RES (119)..(120): Selenocysteine
  MOD_RES (168)..(168): Selenocysteine
  MOD_RES (177)..(177): Selenocysteine
  MOD_RES (181)..(181): Selenocysteine
  MOD_RES (204)..(204): Selenocysteine
  MOD_RES (216)..(216): Selenocysteine
  MOD_RES (222)..(222): Selenocysteine
  MOD_RES (316)..(316): Selenocysteine
  MOD_RES (325)..(325): Selenocysteine
  MOD_RES (344)..(344): Selenocysteine
  MOD_RES (356)..(356): Selenocysteine
  MOD_RES (363)..(363): Selenocysteine
  MOD_RES (366)..(366): Selenocysteine
  MOD_RES (413)..(413): Selenocysteine
  MOD_RES (422)..(422): Selenocysteine
  MOD_RES (463)..(463): Selenocysteine
  MOD_RES (465)..(465): Selenocysteine
  MOD_RES (481)..(481): Selenocysteine
  MOD_RES (517)..(517): Selenocysteine
  MOD_RES (554)..(554): Selenocysteine
  MOD_RES (567)..(568): Selenocysteine
  MOD_RES (597)..(597): Selenocysteine
  MOD_RES (615)..(615): Selenocysteine
  MOD_RES (624)..(625): Selenocysteine
  MOD_RES (638)..(638): Selenocysteine
  MOD_RES (749)..(749): Selenocysteine
  MOD_RES (787)..(788): Selenocysteine
  MOD_RES (810)..(810): Selenocysteine
  MOD_RES (814)..(814): Selenocysteine
  MOD_RES (819)..(819): Selenocysteine
  MOD_RES (833)..(833): Selenocysteine
  MOD_RES (839)..(839): Selenocysteine
  MOD_RES (853)..(853): Selenocysteine
  MOD_RES (921)..(921): Selenocysteine
  MOD_RES (923)..(923): Selenocysteine
  MOD_RES (951)..(951): Selenocysteine
  MOD_RES (953)..(953): Selenocysteine
  MOD_RES (970)..(970): Selenocysteine
  MOD_RES (979)..(979): Selenocysteine
  MOD_RES (981)..(981): Selenocysteine
  MOD_RES (1003)..(1003): Selenocysteine
  MOD_RES (1026)..(1026): Selenocysteine
  MOD_RES (1051)..(1051): Selenocysteine
  MOD_RES (1060)..(1060): Selenocysteine
  MOD_RES (1062)..(1062): Selenocysteine
  MOD_RES (1078)..(1078): Selenocysteine
  MOD_RES (1106)..(1106): Selenocysteine
  MOD_RES (1130)..(1130): Selenocysteine
  MOD_RES (1154)..(1154): Selenocysteine
  MOD_RES (1210)..(1210): Selenocysteine
  MOD_RES (1225)..(1225): Selenocysteine
  MOD_RES (1250)..(1250): Selenocysteine
  MOD_RES (1279)..(1279): Selenocysteine
  MOD_RES (1283)..(1283): Selenocysteine
  MOD_RES (1309)..(1309): Selenocysteine
  MOD_RES (1404)..(1404): Selenocysteine
  MOD_RES (1408)..(1408): Selenocysteine
  MOD_RES (1445)..(1445): Selenocysteine
  MOD_RES (1452)..(1452): Selenocysteine
  MOD_RES (1500)..(1500): Selenocysteine
  MOD_RES (1502)..(1502): Selenocysteine
  MOD_RES (1539)..(1539): Selenocysteine
  MOD_RES (1580)..(1580): Selenocysteine
  MOD_RES (1609)..(1609): Selenocysteine
  MOD_RES (1611)..(1611): Selenocysteine
  MOD_RES (1627)..(1627): Selenocysteine
  MOD_RES (1648)..(1648): Selenocysteine
  MOD_RES (1669)..(1669): Selenocysteine
MGKPLSRPDCLRQNPPCVGKGEEEEDLNIEDCYVPQRSIYDXVRLNEQIDSGSKGSLSSRHFXDRXLPYSHRXLDVSSLCSNGALXSSSVFELRGREANKLDEKMIFDALKLNSDIIRXXGLPKAKSHAEKKEHRRSWRMFVPANFMDYANKSESSFVEPADMSDAVXKASKCRWGXNSLXSEEDDSGLCSPPAEREEKQGILXGDQSRIKSLSSXEDILVXDQYRPFFSVNSISEQKIPLLSCQSAHPDENFKMILHDVSPLEEAKHVNGQREIHDENCCLQNNLKESPVKCDPLIMPRNRENEHIFNLGEEDEXYGPGESQIXAQSRELLKDSPQDLDLSHXDLGESDVDCGSXSLVENVXLLXQYDSGECNIASKEEVEAPLSAQESEMLYKKFSLKFVSARKKAAPRKXGAQAGILDXVCNGFQLVQVFQKEEIEPLQGKQQDVNWLGQGLIQSAAKSXSXQGLEHDLDDVNARWKXLNKKVAQRAAQLQEALLHCGRFQDALESLLSWMVDXEELVANQKPPSAEFKVVKAQIQEQKLLQRLLDDRKSXVEVIKREGEKIAXXAEPADKVKILKQLSLLDSRWEALLNKAEXRNRQLEGISVVAQQFHEXLEPLNEWLXXIEKRLVNCEPIGXQASKLEEQIAQHKALEDDIINHNKHLHQAVSIGQSLKVLSSREDKDMVQSKLDFSQVWYIEIQEKSHSRSELLQQALCNAKIFGEDEVELMNWLNEVHDKLSKLSVQDYSXEGLWKQQSELRVLQEDILLRKQNVDQALLNGLELLKQXXGDEVLIIQDKLEAIKARYKDIXKLSXDVAKXLEQALQLARRLHSXHEELCXWLDKVEVELLSYEXQVLKGEEASQAQMRPKELKKEAKNNKALLDSLNEVSSALLELVPWRAREGLEKMVAEDNERYRLVSDXIXQKVEEIDAAILRSQQFDQAADAELSWIXEXEKKLMSLGDIRLEQDQXSAQLQVQKXFXMEILRHKDIIDDLVKSGHKIMXACSEEEKQSMKKKLDKVLKNYDXICQINSERYLQLERAQSLVNQFWEXYEELWPWLXEXQSIISQLPAPALEYEXLRQQQEEHRQLRELIAEHKPHIDKMNKXGPQLLELSPGEGFSIQEKYVAADXLYSQIKEDVKKRAVALDEAISQSXQFHDKIDQILESLERIVERLRQPPSISAEVEKIKEQISENKNVSVDMEKLQPLYEXLKQRGEEMIARSGGXDKDISAKAVQDKLDQMVFIWENIHXLVEEREAKLLDVMELAEKFWCDHMSLIVXIKDXQDFIRDLEDPGIDPSVVKQQQEAAEXIREEIDGLQEELDIVINLGSELIAACGEPDKPIVKKSIDELNSAWDSLNKAWKDRIDKLEEAMQAAVQYQDGLQAVFDWVDIAGGKLASMSPIGXDLEXVKQQIEELKQFKSEAYQQQIEMERLNHQAELLLKKVXEESDKHXVQDPLMELKLIWDSLEERIINRQHKLEGALLALGQFQHALDELLAWLXHXEGLLSEQKPVGGDPKAIEIELAKHHVLQNDVLAHQSXVEAVNKAGNDLIESSAGEEASNLQNKLEVLNQRWQNVLEKXEQRKQQLDGALRQAKGFHGEIEDLQQWLXDXERHLLASKPLGGLPEXAKEQLNVHMEVCAAFEAKEEXYKSLMQKGQQMLARCPKSAEXNIDQD

SEQ ID NO: 8531 - protein, 304 aa, Homo sapiens
  MOD_RES (22)..(22): Selenocysteine
  MOD_RES (44)..(44): Selenocysteine
  MOD_RES (86)..(86): Selenocysteine
  MOD_RES (100)..(100): Selenocysteine
  MOD_RES (125)..(125): Selenocysteine
  MOD_RES (133)..(133): Selenocysteine
  MOD_RES (150)..(150): Selenocysteine
  MOD_RES (165)..(165): Selenocysteine
  MOD_RES (169)..(169): Selenocysteine
  MOD_RES (174)..(174): Selenocysteine
  MOD_RES (218)..(218): Selenocysteine
  MOD_RES (226)..(226): Selenocysteine
  MOD_RES (241)..(241): Selenocysteine
  MOD_RES (250)..(250): Selenocysteine
  MOD_RES (261)..(261): Selenocysteine
  MOD_RES (277)..(277): Selenocysteine
  MOD_RES (281)..(281): Selenocysteine
  MOD_RES (293)..(294): Selenocysteine
MGNVCGCVRAEKEEQYVDPAKXPLNPEKYSPGRKYFRRKPIKKXGGDKESVGANNENEGKKKSSSQPSKEQPAPLSRGLVQQESVXLNSALGDGIQQKKXEVVADSVKQKLLPSAVSSWSDCVNXSPAKDSEXEVKVSELDERISEKDSXPYCAKRKKHLDDVNXSEIXFQEKXDVFSFRKAASLSSIPSGIERSLEKSGFPEDPPKSYSSIQEKQNXERFCPHAXQHFQFKKKRCHSLYXSMSSVSKDXDGNEISDIHVXGESEDMSAKERLLLWXQQAXEGYAGIRCENFXXCWRDGKLFNA

SEQ ID NO: 8532 - protein, 1143 aa, Homo sapiens
  MOD_RES (18)..(19): Selenocysteine
  MOD_RES (21)..(21): Selenocysteine
  MOD_RES (23)..(23): Selenocysteine
  MOD_RES (39)..(39): Selenocysteine
  MOD_RES (165)..(166): Selenocysteine
  MOD_RES (169)..(169): Selenocysteine
  MOD_RES (177)..(177): Selenocysteine
  MOD_RES (187)..(187): Selenocysteine
  MOD_RES (193)..(193): Selenocysteine
  MOD_RES (197)..(197): Selenocysteine
  MOD_RES (201)..(201): Selenocysteine
  MOD_RES (205)..(205): Selenocysteine
  MOD_RES (210)..(210): Selenocysteine
  MOD_RES (218)..(218): Selenocysteine
  MOD_RES (222)..(222): Selenocysteine
  MOD_RES (226)..(226): Selenocysteine
  MOD_RES (230)..(230): Selenocysteine
  MOD_RES (252)..(252): Selenocysteine
  MOD_RES (273)..(273): Selenocysteine
  MOD_RES (299)..(299): Selenocysteine
  MOD_RES (340)..(340): Selenocysteine
  MOD_RES (346)..(346): Selenocysteine
  MOD_RES (364)..(364): Selenocysteine
  MOD_RES (374)..(374): Selenocysteine
  MOD_RES (383)..(383): Selenocysteine
  MOD_RES (406)..(406): Selenocysteine
  MOD_RES (449)..(449): Selenocysteine
  MOD_RES (459)..(459): Selenocysteine
  MOD_RES (479)..(479): Selenocysteine
  MOD_RES (492)..(492): Selenocysteine
  MOD_RES (537)..(537): Selenocysteine
  MOD_RES (547)..(547): Selenocysteine
  MOD_RES (562)..(562): Selenocysteine
  MOD_RES (578)..(578): Selenocysteine
  MOD_RES (602)..(602): Selenocysteine
  MOD_RES (614)..(614): Selenocysteine
  MOD_RES (638)..(638): Selenocysteine
  MOD_RES (673)..(673): Selenocysteine
  MOD_RES (709)..(709): Selenocysteine
  MOD_RES (766)..(766): Selenocysteine
  MOD_RES (781)..(781): Selenocysteine
  MOD_RES (799)..(799): Selenocysteine
  MOD_RES (801)..(801): Selenocysteine
  MOD_RES (819)..(819): Selenocysteine
  MOD_RES (840)..(840): Selenocysteine
  MOD_RES (847)..(847): Selenocysteine
  MOD_RES (855)..(855): Selenocysteine
  MOD_RES (867)..(867): Selenocysteine
  MOD_RES (888)..(888): Selenocysteine
  MOD_RES (923)..(923): Selenocysteine
  MOD_RES (972)..(972): Selenocysteine
  MOD_RES (985)..(986): Selenocysteine
  MOD_RES (1000)..(1000): Selenocysteine
  MOD_RES (1003)..(1003): Selenocysteine
  MOD_RES (1035)..(1035): Selenocysteine
  MOD_RES (1043)..(1043): Selenocysteine
  MOD_RES (1045)..(1045): Selenocysteine
  MOD_RES (1079)..(1079): Selenocysteine
  MOD_RES (1082)..(1082): Selenocysteine
  MOD_RES (1086)..(1086): Selenocysteine
  MOD_RES (1089)..(1089): Selenocysteine
  MOD_RES (1134)..(1134): Selenocysteine
MHSSSYSYRSSDSVFSNXXSXRXSLDSNENLLLVHCGPXLINSCISFGSESFDGHRLEMLQQIANRVQRDSVICEDKLILAGNALQSDSKRLESGVQFQNEAEIAGYILECENLLRQHVIDVQILIDGKYYQADQLVQRVAKLRDEIMALRNECSSVYSKGRILXXEQXKLMISGIXQSLNSGFAQXLHPSLXSGLXQSLXPSLXSSSMXSGLSSGMXSRLXPSVXPAYXPGFPSGLVPNFSSGVEPNSLQXLKLMQIRKPLLKSSLLDQNLXEEEINMKFVQDLLNWVDEMQVQLDRXEWGSDLPSVESHLENHKNVHRAIEEFESSLKEAKISEIQMXAPLKLXYAEKLHRLESQYAKLLNXSRNQERHLDXLHNFVSRAXNELIWLNEKEEEEVAYDWSERNXNIARKKDYHAELMRELDQKEENIKSVQEIAEQLLLENHPARLXIEAYRAAMQXQWSWILQLCQCVEQHIKENXAYFEFFNDAKEAXDYLRNLKDAIQRKYSCDRSSSIHKLEDLVQESMEEKEELLQYKSXIANLMGKAKXIIQLKPRNSDCPLKXSIPIKAICDYRQIEIXIYKDDECVLANNSHRAKWKVISPXGNEAMVPSVCFXVPPPNKEAVDLANRIEQQYQNVLXLWHESHINMKSVVSWHYLINEIDRIRASNVASIKXMLPGEHQQVLSNLQSRFEDFLEDSQESQVFSGSDIXQLEKEVNVCKQYYQELLKSAEREEQEESVYNLYISEVRNIRLRLENCEDRLIRQIRXPLERDDLHESVFRIXEQEKLKKELERLKDDLGXIXNKCEEFFSQAAASSSVPXLRSELNVVLQNMNQVYSMSSXYIDKLKXVNLVLKNXQAAEALVKLYEXKLCEEEAVIADKNNIENLISXLKQWRSEVDEKRQVFHALEDELQKAKAISDEMFKXYKERDLDFDWHKEKADQLVERWQNVHVQIDNRLRDLEGIGKSLKYYRDXYHPLDDWIQQVEXXQRKIQENQPENSKXLAXQLNQQKMLVSEIEMKQSKMDECQKYAEQYSAXVKDYELQXMXYRAMVDSQQKSPVKRRRMQSSADLIIQEFMDLRXRYXALVXLMXQYIKFAGDSLKRLEEEEVIINSEHPVNIKELEMSSNYSVVWESKXCFMINLCGR

SEQ ID NO: 8533 - protein, 2649 aa, Homo sapiens
  MOD_RES (18)..(19): Selenocysteine
  MOD_RES (21)..(21): Selenocysteine
  MOD_RES (23)..(23): Selenocysteine
  MOD_RES (39)..(39): Selenocysteine
  MOD_RES (165)..(166): Selenocysteine
  MOD_RES (169)..(169): Selenocysteine
  MOD_RES (177)..(177): Selenocysteine
  MOD_RES (187)..(187): Selenocysteine
  MOD_RES (193)..(193): Selenocysteine
  MOD_RES (197)..(197): Selenocysteine
  MOD_RES (201)..(201): Selenocysteine
  MOD_RES (205)..(205): Selenocysteine
  MOD_RES (210)..(210): Selenocysteine
  MOD_RES (218)..(218): Selenocysteine
  MOD_RES (222)..(222): Selenocysteine
  MOD_RES (226)..(226): Selenocysteine
  MOD_RES (230)..(230): Selenocysteine
  MOD_RES (252)..(252): Selenocysteine
  MOD_RES (273)..(273): Selenocysteine
  MOD_RES (299)..(299): Selenocysteine
  MOD_RES (340)..(340): Selenocysteine
  MOD_RES (346)..(346): Selenocysteine
  MOD_RES (364)..(364): Selenocysteine
  MOD_RES (374)..(374): Selenocysteine
  MOD_RES (383)..(383): Selenocysteine
  MOD_RES (406)..(406): Selenocysteine
  MOD_RES (449)..(449): Selenocysteine
  MOD_RES (459)..(459): Selenocysteine
  MOD_RES (479)..(479): Selenocysteine
  MOD_RES (492)..(492): Selenocysteine
  MOD_RES (537)..(537): Selenocysteine
  MOD_RES (547)..(547): Selenocysteine
  MOD_RES (562)..(562): Selenocysteine
  MOD_RES (578)..(578): Selenocysteine
  MOD_RES (602)..(602): Selenocysteine
  MOD_RES (614)..(614): Selenocysteine
  MOD_RES (638)..(638): Selenocysteine
  MOD_RES (673)..(673): Selenocysteine
  MOD_RES (709)..(709): Selenocysteine
  MOD_RES (766)..(766): Selenocysteine
  MOD_RES (781)..(781): Selenocysteine
  MOD_RES (799)..(799): Selenocysteine
  MOD_RES (801)..(801): Selenocysteine
  MOD_RES (819)..(819): Selenocysteine
  MOD_RES (840)..(840): Selenocysteine
  MOD_RES (847)..(847): Selenocysteine
  MOD_RES (855)..(855): Selenocysteine
  MOD_RES (867)..(867): Selenocysteine
  MOD_RES (888)..(888): Selenocysteine
  MOD_RES (923)..(923): Selenocysteine
  MOD_RES (972)..(972): Selenocysteine
  MOD_RES (985)..(986): Selenocysteine
  MOD_RES (1000)..(1000): Selenocysteine
  MOD_RES (1003)..(1003): Selenocysteine
  MOD_RES (1035)..(1035): Selenocysteine
  MOD_RES (1043)..(1043): Selenocysteine
  MOD_RES (1045)..(1045): Selenocysteine
  MOD_RES (1079)..(1079): Selenocysteine
  MOD_RES (1082)..(1082): Selenocysteine
  MOD_RES (1086)..(1086): Selenocysteine
  MOD_RES (1089)..(1089): Selenocysteine
  MOD_RES (1113)..(1113): Selenocysteine
  MOD_RES (1129)..(1129): Selenocysteine
  MOD_RES (1137)..(1137): Selenocysteine
  MOD_RES (1202)..(1202): Selenocysteine
  MOD_RES (1221)..(1221): Selenocysteine
  MOD_RES (1246)..(1246): Selenocysteine
  MOD_RES (1248)..(1248): Selenocysteine
  MOD_RES (1251)..(1251): Selenocysteine
  MOD_RES (1324)..(1324): Selenocysteine
  MOD_RES (1329)..(1329): Selenocysteine
  MOD_RES (1341)..(1341): Selenocysteine
  MOD_RES (1344)..(1344): Selenocysteine
  MOD_RES (1350)..(1350): Selenocysteine
  MOD_RES (1372)..(1372): Selenocysteine
  MOD_RES (1386)..(1386): Selenocysteine
  MOD_RES (1397)..(1397): Selenocysteine
  MOD_RES (1413)..(1413): Selenocysteine
  MOD_RES (1416)..(1416): Selenocysteine
  MOD_RES (1448)..(1449): Selenocysteine
  MOD_RES (1491)..(1491): Selenocysteine
  MOD_RES (1580)..(1580): Selenocysteine
  MOD_RES (1586)..(1586): Selenocysteine
  MOD_RES (1606)..(1606): Selenocysteine
  MOD_RES (1628)..(1628): Selenocysteine
  MOD_RES (1636)..(1636): Selenocysteine
  MOD_RES (1638)..(1638): Selenocysteine
  MOD_RES (1677)..(1677): Selenocysteine
  MOD_RES (1727)..(1727): Selenocysteine
  MOD_RES (1733)..(1733): Selenocysteine
  MOD_RES (1768)..(1768): Selenocysteine
  MOD_RES (1798)..(1798): Selenocysteine
  MOD_RES (1872)..(1872): Selenocysteine
  MOD_RES (1877)..(1877): Selenocysteine
  MOD_RES (1885)..(1885): Selenocysteine
  MOD_RES (1900)..(1900): Selenocysteine
  MOD_RES (1906)..(1906): Selenocysteine
  MOD_RES (1915)..(1915): Selenocysteine
  MOD_RES (1962)..(1962): Selenocysteine
  MOD_RES (1964)..(1964): Selenocysteine
  MOD_RES (1969)..(1969): Selenocysteine
  MOD_RES (1973)..(1973): Selenocysteine
  MOD_RES (1977)..(1977): Selenocysteine
  MOD_RES (2013)..(2013): Selenocysteine
  MOD_RES (2027)..(2027): Selenocysteine
  MOD_RES (2030)..(2031): Selenocysteine
  MOD_RES (2070)..(2070): Selenocysteine
  MOD_RES (2095)..(2095): Selenocysteine
  MOD_RES (2097)..(2097): Selenocysteine
  MOD_RES (2111)..(2111): Selenocysteine
  MOD_RES (2121)..(2121): Selenocysteine
  MOD_RES (2128)..(2128): Selenocysteine
  MOD_RES (2134)..(2134): Selenocysteine
  MOD_RES (2137)..(2137): Selenocysteine
  MOD_RES (2147)..(2147): Selenocysteine
  MOD_RES (2177)..(2177): Selenocysteine
  MOD_RES (2188)..(2188): Selenocysteine
  MOD_RES (2224)..(2224): Selenocysteine
  MOD_RES (2289)..(2289): Selenocysteine
  MOD_RES (2336)..(2336): Selenocysteine
  MOD_RES (2344)..(2344): Selenocysteine
  MOD_RES (2346)..(2346): Selenocysteine
  MOD_RES (2351)..(2351): Selenocysteine
  MOD_RES (2393)..(2393): Selenocysteine
  MOD_RES (2395)..(2395): Selenocysteine
  MOD_RES (2397)..(2397): Selenocysteine
  MOD_RES (2411)..(2411): Selenocysteine
  MOD_RES (2426)..(2426): Selenocysteine
  MOD_RES (2428)..(2428): Selenocysteine
  MOD_RES (2454)..(2454): Selenocysteine
  MOD_RES (2475)..(2475): Selenocysteine
  MOD_RES (2486)..(2486): Selenocysteine
  MOD_RES (2494)..(2494): Selenocysteine
  MOD_RES (2525)..(2525): Selenocysteine
  MOD_RES (2532)..(2532): Selenocysteine
  MOD_RES (2562)..(2562): Selenocysteine
  MOD_RES (2591)..(2591): Selenocysteine
  MOD_RES (2608)..(2608): Selenocysteine
  MOD_RES (2613)..(2613): Selenocysteine
  MOD_RES (2627)..(2627): Selenocysteine
  MOD_RES (2640)..(2640): Selenocysteine
MHSSSYSYRSSDSVFSNXXSXRXSLDSNENLLLVHCGPXLINSCISFGSESFDGHRLEMLQQIANRVQRDSVICEDKLILAGNALQSDSKRLESGVQFQNEAEIAGYILECENLLRQHVIDVQILIDGKYYQADQLVQRVAKLRDEIMALRNECSSVYSKGRILXXEQXKLMISGIXQSLNSGFAQXLHPSLXSGLXQSLXPSLXSSSMXSGLSSGMXSRLXPSVXPAYXPGFPSGLVPNFSSGVEPNSLQXLKLMQIRKPLLKSSLLDQNLXEEEINMKFVQDLLNWVDEMQVQLDRXEWGSDLPSVESHLENHKNVHRAIEEFESSLKEAKISEIQMXAPLKLXYAEKLHRLESQYAKLLNXSRNQERHLDXLHNFVSRAXNELIWLNEKEEEEVAYDWSERNXNIARKKDYHAELMRELDQKEENIKSVQEIAEQLLLENHPARLXIEAYRAAMQXQWSWILQLCQCVEQHIKENXAYFEFFNDAKEAXDYLRNLKDAIQRKYSCDRSSSIHKLEDLVQESMEEKEELLQYKSXIANLMGKAKXIIQLKPRNSDCPLKXSIPIKAICDYRQIEIXIYKDDECVLANNSHRAKWKVISPXGNEAMVPSVCFXVPPPNKEAVDLANRIEQQYQNVLXLWHESHINMKSVVSWHYLINEIDRIRASNVASIKXMLPGEHQQVLSNLQSRFEDFLEDSQESQVFSGSDIXQLEKEVNVCKQYYQELLKSAEREEQEESVYNLYISEVRNIRLRLENCEDRLIRQIRXPLERDDLHESVFRIXEQEKLKKELERLKDDLGXIXNKCEEFFSQAAASSSVPXLRSELNVVLQNMNQVYSMSSXYIDKLKXVNLVLKNXQAAEALVKLYEXKLCEEEAVIADKNNIENLISXLKQWRSEVDEKRQVFHALEDELQKAKAISDEMFKXYKERDLDFDWHKEKADQLVERWQNVHVQIDNRLRDLEGIGKSLKYYRDXYHPLDDWIQQVEXXQRKIQENQPENSKXLAXQLNQQKMLVSEIEMKQSKMDECQKYAEQYSAXVKDYELQXMXYRAMVDSQQKSPVKRRRMQSSADLIIQEFMDLRXRYXALVXLMXQYIKFAGDSLKRLEEEEIKRCKEXSEHGAYSDLLQRQKAXVLENSKLXGKISELERMVAELKKQKSRVEEELPKVREAAENELRKQQRNVEDISLQKIRAESEAKQYRRELEXIVREKEAAERELERVRQLXIEAEAKRAAVEENLLNFRNQLEENXFXRRXLEDHLKRKDLSLNDLEQQKNKLMEELRRKRDNEEELLKLIKQMEKDLAFQKQVAEKQLKEKQKIELEARRKIXEIQYXCRENALPVCPIXQAXSCRAVXGLQQEHDKQKAEELKQQVDELXAANRKAEQDMRELXYELNALQLEKXSSEEKARLLKDKLDEXNNXLRCLKLELERKDQAEKGYSQQLRELGRQLNQXXGKAEEAMQEASDLKKIKRNYQLELESLNHEKGKLQREVDRIXRAHAVAEKNIQHLNSQIHSFRDEKELERLQICQRKSDHLKEQFEKSHEQLLQNIKAEKENNDKIQRLNEELEKSNECAEMLKQKVEELXRQNNEXKLMMQRIQAESENIVLEKQXIQQRCEALKIQADGFKDQLRSXNEHLHKQXKXEQDFQRKIKCLEEDLAKSQNLVSEFKQKCDQQNIIIQNXKKEVRNLNAELNASKEEKRRGEQKVQLQQAQVQELNNRLKKVQDELHLKXIEEQMXHRKMVLFQEESGKFKQSAEEFRKKMEKLMESKVIXENDISGIRLDFVSLQQENSRAQENAKLCEXNIKELERQLQQYREQMQQGQHMEANHYQKCQKLEDELIAQKREVENLKQKMDQQIKEHEHQLVLLQCEIQKKSXAKDCXFKPDFEMXVKECQHSGELSSRNXGHLHPXPRSPLLRWXQEPQPLEEKWQHRVVEQIPKEVQFQPPGAPLEKEKSQQCYSEYFSQXSXELQIXFDEXNPIXRLSEIEKIRDQALNNSRPPVRYQDNACEMELVKVLXPLEIAKNKQYDMHXEVXXLKQEKNPVPSAEEWMLEGCRASGGLKKGDFLKKGLEPEXFQNFDGDHACSVRDDEFKFQGLRHXVXARQLVEAKLLDMRXIEQLRLGLKXVEEVQKXLNKFLXKAXSIAGLYLESXKEKISFASAAERIIIDKMVALAFLEAQAAXGFIIDPISGQXYSVEDAVLKGVVDPEFRIRLLEAEKAAVGYSYSSKXLSVFQAMENRMLDRQKGKHILEAQIASGGVIDPVRGIRVPPEIALQQGLLNNAILQFLHEPSSNXRVFPNPNNKQALYYSELLRMCVFDVESQCFLFPFGERNISNLNVKKXHRISVVDXKXGSELXVYEAFQRNLIEKSIYLELSGQQYQWKEAMFFESYGHSSHMLXDXKXGLHFNINEAIEQGXIDKALVKKYQEGLIXLXELADSLLSRLVPKKDLHSPVAGYWLXASGERISVLKASRRNLVDRIXALRCLEAQVSXGGIIDPLXGKKYRVAEALHRGLVDEGFAQQLRQCELVIXGIGHPIXNKMMSVVEAVNANIINKEMGIRCLEFQYLXGGLIEPQVHSRLSIEEALQVGIIDVLIAXKLKDQKSYVRNIICPQXKRKLXYKEALEKADFDFHXGLKLLEVSEPLMXGISSLYYSS

SEQ ID NO: 8534 - protein, 3060 aa, Homo sapiens
  MOD_RES (18)..(19): Selenocysteine
  MOD_RES (21)..(21): Selenocysteine
  MOD_RES (23)..(23): Selenocysteine
  MOD_RES (39)..(39): Selenocysteine
  MOD_RES (165)..(166): Selenocysteine
  MOD_RES (169)..(169): Selenocysteine
  MOD_RES (177)..(177): Selenocysteine
  MOD_RES (187)..(187): Selenocysteine
  MOD_RES (193)..(193): Selenocysteine
  MOD_RES (197)..(197): Selenocysteine
  MOD_RES (201)..(201): Selenocysteine
  MOD_RES (205)..(205): Selenocysteine
  MOD_RES (210)..(210): Selenocysteine
  MOD_RES (218)..(218): Selenocysteine
  MOD_RES (222)..(222): Selenocysteine
  MOD_RES (226)..(226): Selenocysteine
  MOD_RES (230)..(230): Selenocysteine
  MOD_RES (252)..(252): Selenocysteine
  MOD_RES (273)..(273): Selenocysteine
  MOD_RES (299)..(299): Selenocysteine
  MOD_RES (340)..(340): Selenocysteine
  MOD_RES (346)..(346): Selenocysteine
  MOD_RES (364)..(364): Selenocysteine
  MOD_RES (374)..(374): Selenocysteine
  MOD_RES (383)..(383): Selenocysteine
  MOD_RES (406)..(406): Selenocysteine
  MOD_RES (449)..(449): Selenocysteine
  MOD_RES (459)..(459): Selenocysteine
  MOD_RES (479)..(479): Selenocysteine
  MOD_RES (492)..(492): Selenocysteine
  MOD_RES (537)..(537): Selenocysteine
  MOD_RES (547)..(547): Selenocysteine
  MOD_RES (562)..(562): Selenocysteine
  MOD_RES (578)..(578): Selenocysteine
  MOD_RES (602)..(602): Selenocysteine
  MOD_RES (614)..(614): Selenocysteine
  MOD_RES (638)..(638): Selenocysteine
  MOD_RES (673)..(673): Selenocysteine
  MOD_RES (709)..(709): Selenocysteine
  MOD_RES (766)..(766): Selenocysteine
  MOD_RES (781)..(781): Selenocysteine
  MOD_RES (799)..(799): Selenocysteine
  MOD_RES (801)..(801): Selenocysteine
  MOD_RES (819)..(819): Selenocysteine
  MOD_RES (840)..(840): Selenocysteine
  MOD_RES (847)..(847): Selenocysteine
  MOD_RES (855)..(855): Selenocysteine
  MOD_RES (867)..(867): Selenocysteine
  MOD_RES (888)..(888): Selenocysteine
  MOD_RES (923)..(923): Selenocysteine
  MOD_RES (972)..(972): Selenocysteine
  MOD_RES (985)..(986): Selenocysteine
  MOD_RES (1000)..(1000): Selenocysteine
  MOD_RES (1003)..(1003): Selenocysteine
  MOD_RES (1035)..(1035): Selenocysteine
  MOD_RES (1043)..(1043): Selenocysteine
  MOD_RES (1045)..(1045): Selenocysteine
  MOD_RES (1079)..(1079): Selenocysteine
  MOD_RES (1082)..(1082): Selenocysteine
  MOD_RES (1086)..(1086): Selenocysteine
  MOD_RES (1089)..(1089): Selenocysteine
  MOD_RES (1133)..(1133): Selenocysteine
  MOD_RES (1157)..(1157): Selenocysteine
  MOD_RES (1168)..(1168): Selenocysteine
  MOD_RES (1181)..(1181): Selenocysteine
  MOD_RES (1194)..(1194): Selenocysteine
  MOD_RES (1215)..(1215): Selenocysteine
  MOD_RES (1232)..(1232): Selenocysteine
  MOD_RES (1236)..(1237): Selenocysteine
  MOD_RES (1256)..(1256): Selenocysteine
  MOD_RES (1263)..(1263): Selenocysteine
  MOD_RES (1314)..(1315): Selenocysteine
  MOD_RES (1328)..(1328): Selenocysteine
  MOD_RES (1342)..(1342): Selenocysteine
  MOD_RES (1350)..(1350): Selenocysteine
  MOD_RES (1355)..(1355): Selenocysteine
  MOD_RES (1388)..(1388): Selenocysteine
  MOD_RES (1402)..(1402): Selenocysteine
  MOD_RES (1407)..(1407): Selenocysteine
  MOD_RES (1423)..(1423): Selenocysteine
  MOD_RES (1445)..(1445): Selenocysteine
  MOD_RES (1469)..(1469): Selenocysteine
  MOD_RES (1483)..(1483): Selenocysteine
  MOD_RES (1489)..(1489): Selenocysteine
  MOD_RES (1494)..(1494): Selenocysteine
  MOD_RES (1507)..(1507): Selenocysteine
  MOD_RES (1518)..(1518): Selenocysteine
  MOD_RES (1546)..(1546): Selenocysteine
  MOD_RES (1556)..(1556): Selenocysteine
  MOD_RES (1597)..(1597): Selenocysteine
  MOD_RES (1605)..(1605): Selenocysteine
  MOD_RES (1635)..(1635): Selenocysteine
  MOD_RES (1653)..(1654): Selenocysteine
  MOD_RES (1656)..(1656): Selenocysteine
  MOD_RES (1660)..(1660): Selenocysteine
  MOD_RES (1678)..(1678): Selenocysteine
  MOD_RES (1708)..(1708): Selenocysteine
  MOD_RES (1736)..(1736): Selenocysteine
  MOD_RES (1738)..(1738): Selenocysteine
  MOD_RES (1755)..(1755): Selenocysteine
  MOD_RES (1773)..(1773): Selenocysteine
  MOD_RES (1788)..(1788): Selenocysteine
  MOD_RES (1811)..(1811): Selenocysteine
  MOD_RES (1813)..(1813): Selenocysteine
  MOD_RES (1830)..(1830): Selenocysteine
  MOD_RES (1840)..(1840): Selenocysteine
  MOD_RES (1879)..(1879): Selenocysteine
  MOD_RES (1885)..(1885): Selenocysteine
  MOD_RES (1917)..(1917): Selenocysteine
  MOD_RES (1919)..(1919): Selenocysteine
  MOD_RES (1938)..(1938): Selenocysteine
  MOD_RES (1993)..(1993): Selenocysteine
  MOD_RES (2000)..(2000): Selenocysteine
  MOD_RES (2025)..(2025): Selenocysteine
  MOD_RES (2030)..(2030): Selenocysteine
  MOD_RES (2038)..(2038): Selenocysteine
  MOD_RES (2041)..(2041): Selenocysteine
  MOD_RES (2047)..(2047): Selenocysteine
  MOD_RES (2055)..(2055): Selenocysteine
  MOD_RES (2065)..(2065): Selenocysteine
  MOD_RES (2067)..(2067): Selenocysteine
  MOD_RES (2069)..(2069): Selenocysteine
  MOD_RES (2078)..(2078): Selenocysteine
  MOD_RES (2106)..(2106): Selenocysteine
  MOD_RES (2114)..(2114): Selenocysteine
  MOD_RES (2186)..(2186): Selenocysteine
  MOD_RES (2193)..(2193): Selenocysteine
  MOD_RES (2205)..(2205): Selenocysteine
  MOD_RES (2217)..(2217): Selenocysteine
  MOD_RES (2237)..(2237): Selenocysteine
  MOD_RES (2245)..(2245): Selenocysteine
  MOD_RES (2319)..(2319): Selenocysteine
  MOD_RES (2353)..(2353): Selenocysteine
  MOD_RES (2362)..(2363): Selenocysteine
  MOD_RES (2391)..(2391): Selenocysteine
  MOD_RES (2396)..(2396): Selenocysteine
  MOD_RES (2412)..(2412): Selenocysteine
  MOD_RES (2417)..(2417): Selenocysteine
  MOD_RES (2422)..(2422): Selenocysteine
  MOD_RES (2436)..(2436): Selenocysteine
  MOD_RES (2450)..(2450): Selenocysteine
  MOD_RES (2463)..(2463): Selenocysteine
  MOD_RES (2484)..(2484): Selenocysteine
  MOD_RES (2511)..(2511): Selenocysteine
  MOD_RES (2544)..(2544): Selenocysteine
  MOD_RES (2561)..(2561): Selenocysteine
  MOD_RES (2576)..(2576): Selenocysteine
  MOD_RES (2578)..(2578): Selenocysteine
  MOD_RES (2606)..(2606): Selenocysteine
  MOD_RES (2617)..(2617): Selenocysteine
  MOD_RES (2621)..(2621): Selenocysteine
  MOD_RES (2627)..(2627): Selenocysteine
  MOD_RES (2634)..(2634): Selenocysteine
  MOD_RES (2645)..(2645): Selenocysteine
  MOD_RES (2673)..(2673): Selenocysteine
  MOD_RES (2688)..(2688): Selenocysteine
  MOD_RES (2693)..(2693): Selenocysteine
  MOD_RES (2695)..(2695): Selenocysteine
  MOD_RES (2721)..(2721): Selenocysteine
  MOD_RES (2727)..(2727): Selenocysteine
  MOD_RES (2734)..(2734): Selenocysteine
  MOD_RES (2769)..(2769): Selenocysteine
  MOD_RES (2772)..(2772): Selenocysteine
  MOD_RES (2845)..(2845): Selenocysteine
  MOD_RES (2857)..(2858): Selenocysteine
  MOD_RES (2867)..(2867): Selenocysteine
  MOD_RES (2884)..(2884): Selenocysteine
  MOD_RES (2922)..(2922): Selenocysteine
  MOD_RES (2932)..(2932): Selenocysteine
  MOD_RES (2944)..(2944): Selenocysteine
  MOD_RES (2981)..(2981): Selenocysteine
  MOD_RES (3009)..(3009): Selenocysteine
  MOD_RES (3019)..(3019): Selenocysteine
  MOD_RES (3024)..(3024): Selenocysteine
  MOD_RES (3045)..(3045): Selenocysteine
  MOD_RES (3058)..(3058): Selenocysteine
MHSSSYSYRSSDSVFSNXXSXRXSLDSNENLLLVHCGPXLINSCISFGSESFDGHRLEMLQQIANRVQRDSVICEDKLILAGNALQSDSKRLESGVQFQNEAEIAGYILECENLLRQHVIDVQILIDGKYYQADQLVQRVAKLRDEIMALRNECSSVYSKGRILXXEQXKLMISGIXQSLNSGFAQXLHPSLXSGLXQSLXPSLXSSSMXSGLSSGMXSRLXPSVXPAYXPGFPSGLVPNFSSGVEPNSLQXLKLMQIRKPLLKSSLLDQNLXEEEINMKFVQDLLNWVDEMQVQLDRXEWGSDLPSVESHLENHKNVHRAIEEFESSLKEAKISEIQMXAPLKLXYAEKLHRLESQYAKLLNXSRNQERHLDXLHNFVSRAXNELIWLNEKEEEEVAYDWSERNXNIARKKDYHAELMRELDQKEENIKSVQEIAEQLLLENHPARLXIEAYRAAMQXQWSWILQLCQCVEQHIKENXAYFEFFNDAKEAXDYLRNLKDAIQRKYSCDRSSSIHKLEDLVQESMEEKEELLQYKSXIANLMGKAKXIIQLKPRNSDCPLKXSIPIKAICDYRQIEIXIYKDDECVLANNSHRAKWKVISPXGNEAMVPSVCFXVPPPNKEAVDLANRIEQQYQNVLXLWHESHINMKSVVSWHYLINEIDRIRASNVASIKXMLPGEHQQVLSNLQSRFEDFLEDSQESQVFSGSDIXQLEKEVNVCKQYYQELLKSAEREEQEESVYNLYISEVRNIRLRLENCEDRLIRQIRXPLERDDLHESVFRIXEQEKLKKELERLKDDLGXIXNKCEEFFSQAAASSSVPXLRSELNVVLQNMNQVYSMSSXYIDKLKXVNLVLKNXQAAEALVKLYEXKLCEEEAVIADKNNIENLISXLKQWRSEVDEKRQVFHALEDELQKAKAISDEMFKXYKERDLDFDWHKEKADQLVERWQNVHVQIDNRLRDLEGIGKSLKYYRDXYHPLDDWIQQVEXXQRKIQENQPENSKXLAXQLNQQKMLVSEIEMKQSKMDECQKYAEQYSAXVKDYELQXMXYRAMVDSQQKSPVKRRRMQSSADLIIQEFMDLRXRYXALVXLMXQYIKFAGDSLKRLEEEEKSLEEEKKEHVEKAKELQKWVSNISKXLKDAEKAGKPPFSKQKISSEEISXKKEQLSEALQXIQLFLAKHGDKMXDEERNELEKQVKXLQESYNLLFSESLKQLQESQXSGDVKVEEKLDKVIAGXIDQXXGEVLSVFQAVLRGLIDYDXGIRLLEXQLMISGLISPELRKCFDLKDAKSHGLIDEQILCQLKELSKAKEIISAASPXXIPVLDALAQSMIXESMAIKVLEILLSXGSLVIPAXGEQLXLQKAFQQNLVSSALFSKVLERQNMCKDLIDPCXSEKVSLIDMVQRSXLQENXGMWLLPVRPQEGGRIXLKCGRNISILRAAHEGLIDREXMFRLLSAQLLSGGLINSNSGQRMXVEEAVREGVIDRDXASSILXYQVQXGGIIQSNPAKRLXVDEAVQCDLIXSSSALLVLEAQRGYVGLIWPHSGEIFPXSSSLQQELIXNELAYKILNGRQKIAALYIPESSQVIGLDAAKQLGIIDNNXASILKNIXLPDKMPDLGDLEACKNARRWLSFCKFQPSXVHDYRQEEDVFDGEEPVXXQXSEEXKKLFLSYLMINSYMDANXGQRLLLYDGDLDEAVGMLLEGCHAEFDGNXAIKECLDVLSSSGVFLNNASGREKDECXAXPSSFNKCHCGEPEHEEXPENRKCAIDEEFNEMRNXVINSEFSQSGKLASXISIDPKVNSSPSVCVPSLISYLXQXELADISMLRSDSENILXNYENQSRVEXNERANECSHSKNIQNFPSDLIENPIMKSKMSKFCGVNEXENEDNXNRDSPIFDYSPRLSALLSHDKLMHSQGSFNDXHXPESNGNKCEAPALSFSDKXMLSGQRIGEKFQDQFLGIAAINISLPGEQYGQKSLNMISSNPQVQYHNDKYISNXSGEDEKXHPGFQQMPEDKEDESEIEEYSCAVXPGGDXDNAIVSLXCAXPLLDEXISASDYEXSLLNDQQNNXGXDXDSDDDFYDXPLFEDDDHDSLLLDGDDRDCLHPEDYDXLQEENDEXASPADVFYDVSKENENSMVPQGAPVGSLSVKNKAHCLQDFLMDVEKDELDSGEKIHLNPVGSDKVNGQSLEXGSERECXNILEGDESDSLXDYDIVGGKESFXASLKFDDSGSWRGRKEEYVXGQEFHSDXDHLDSMQSEESYGDYIYDSNDQDDDDDDGIDEEGGGIRDENGKPRCQNVAEDMDIQLCASILNENSDENENINXMILLDKMHSCSSLEKQQRVNVVQLASPSENNLVXEKSNLPEYXXEIAGKSKENLLNHEMVLKDVLPPIIKDXESEKXFGPASISHDNNNISSXSELGXDLANXKVKLIQGSELPELXDSVKGKDEYFKNMXPKVDSSLDHIICXEPDLIGKPAEESHLSLIASVXDKDPQGNGSDLIKGRDGKSDILIEDEXSIQKMYLGEGEVLVEGLVEEENRHLKLLPGKNXRDSFKLINSQFPFPQIXNNEELNQKGSLKKAXVXLKDEPNNLQIIVSKSPVQFENLEEIFDXSVSKEISDDIXSDIXSWEGNXHFEESFXDGPEKELDLFXYLKHCAKNIKAKDVAKPNEDVPSHVLIXAPPMKEHLQLGVNNXKEKSXSXQKDSPLNDMIQSNDLCSKESISGGGXEISQFXPESIEAXLSILSRKHVEDVGKNDFLQSERCANGLGNDNSSNXLNXDYSFLEINNKKERIEQQLPKEQALSPRSQEKEVQIPELSQVFVEDVKDILKSRLKEGHMNPQEVEEPSACADXKILIQNLIKRIXXSQLVNEASXVPSDSQMSDSSGVSPMXNSSELKPESRDDPFCIGNLKSELLLNILKQDQHSQKIXGVFELMRELXHMEYDLEKRGIXSKVLPLQLENIFYKLLADGYSEKIEHVGDFNQKACSXSEMMEEKPHILGDIKSKEGNYYSPNLEXVKEIGLESSXVWASXLPRDEKLKDLCNDFPSHLECXSGSKEMASGDSSXEQ

SEQ ID NO: 8535 - protein, 5171 aa, Homo sapiens
  MOD_RES (18)..(19): Selenocysteine
  MOD_RES (21)..(21): Selenocysteine
  MOD_RES (23)..(23): Selenocysteine
  MOD_RES (39)..(39): Selenocysteine
  MOD_RES (165)..(166): Selenocysteine
  MOD_RES (169)..(169): Selenocysteine
  MOD_RES (177)..(177): Selenocysteine
  MOD_RES (187)..(187): Selenocysteine
  MOD_RES (193)..(193): Selenocysteine
  MOD_RES (197)..(197): Selenocysteine
  MOD_RES (201)..(201): Selenocysteine
  MOD_RES (205)..(205): Selenocysteine
  MOD_RES (210)..(210): Selenocysteine
  MOD_RES (218)..(218): Selenocysteine
  MOD_RES (222)..(222): Selenocysteine
  MOD_RES (226)..(226): Selenocysteine
  MOD_RES (230)..(230): Selenocysteine
  MOD_RES (252)..(252): Selenocysteine
  MOD_RES (273)..(273): Selenocysteine
  MOD_RES (299)..(299): Selenocysteine
  MOD_RES (340)..(340): Selenocysteine
  MOD_RES (346)..(346): Selenocysteine
  MOD_RES (364)..(364): Selenocysteine
  MOD_RES (374)..(374): Selenocysteine
  MOD_RES (383)..(383): Selenocysteine
  MOD_RES (406)..(406): Selenocysteine
  MOD_RES (449)..(449): Selenocysteine
  MOD_RES (459)..(459): Selenocysteine
  MOD_RES (479)..(479): Selenocysteine
  MOD_RES (492)..(492): Selenocysteine
  MOD_RES (537)..(537): Selenocysteine
  MOD_RES (547)..(547): Selenocysteine
  MOD_RES (562)..(562): Selenocysteine
  MOD_RES (578)..(578): Selenocysteine
  MOD_RES (602)..(602): Selenocysteine
  MOD_RES (614)..(614): Selenocysteine
  MOD_RES (638)..(638): Selenocysteine
  MOD_RES (673)..(673): Selenocysteine
  MOD_RES (709)..(709): Selenocysteine
  MOD_RES (766)..(766): Selenocysteine
  MOD_RES (781)..(781): Selenocysteine
  MOD_RES (799)..(799): Selenocysteine
  MOD_RES (801)..(801): Selenocysteine
  MOD_RES (819)..(819): Selenocysteine
  MOD_RES (840)..(840): Selenocysteine
  MOD_RES (847)..(847): Selenocysteine
  MOD_RES (855)..(855): Selenocysteine
  MOD_RES (867)..(867): Selenocysteine
  MOD_RES (888)..(888): Selenocysteine
  MOD_RES (923)..(923): Selenocysteine
  MOD_RES (972)..(972): Selenocysteine
  MOD_RES (985)..(986): Selenocysteine
  MOD_RES (1000)..(1000): Selenocysteine
  MOD_RES (1003)..(1003): Selenocysteine
  MOD_RES (1035)..(1035): Selenocysteine
  MOD_RES (1043)..(1043): Selenocysteine
  MOD_RES (1045)..(1045): Selenocysteine
  MOD_RES (1079)..(1079): Selenocysteine
  MOD_RES (1082)..(1082): Selenocysteine
  MOD_RES (1086)..(1086): Selenocysteine
  MOD_RES (1089)..(1089): Selenocysteine
  MOD_RES (1133)..(1133): Selenocysteine
  MOD_RES (1157)..(1157): Selenocysteine
  MOD_RES (1168)..(1168): Selenocysteine
  MOD_RES (1181)..(1181): Selenocysteine
  MOD_RES (1194)..(1194): Selenocysteine
  MOD_RES (1215)..(1215): Selenocysteine
  MOD_RES (1245)..(1245): Selenocysteine
  MOD_RES (1247)..(1247): Selenocysteine
  MOD_RES (1264)..(1264): Selenocysteine
  MOD_RES (1295)..(1295): Selenocysteine
  MOD_RES (1344)..(1345): Selenocysteine
  MOD_RES (1351)..(1351): Selenocysteine
  MOD_RES (1365)..(1365): Selenocysteine
  MOD_RES (1386)..(1386): Selenocysteine
  MOD_RES (1397)..(1397): Selenocysteine
  MOD_RES (1421)..(1421): Selenocysteine
  MOD_RES (1429)..(1430): Selenocysteine
  MOD_RES (1459)..(1459): Selenocysteine
  MOD_RES (1494)..(1494): Selenocysteine
  MOD_RES (1506)..(1506): Selenocysteine
  MOD_RES (1521)..(1521): Selenocysteine
  MOD_RES (1549)..(1549): Selenocysteine
  MOD_RES (1572)..(1572): Selenocysteine
  MOD_RES (1595)..(1595): Selenocysteine
  MOD_RES (1598)..(1598): Selenocysteine
  MOD_RES (1610)..(1610): Selenocysteine
  MOD_RES (1654)..(1654): Selenocysteine
  MOD_RES (1677)..(1677): Selenocysteine
  MOD_RES (1697)..(1697): Selenocysteine
  MOD_RES (1718)..(1718): Selenocysteine
  MOD_RES (1743)..(1743): Selenocysteine
  MOD_RES (1745)..(1745): Selenocysteine
  MOD_RES (1779)..(1779): Selenocysteine
  MOD_RES (1815)..(1816): Selenocysteine
  MOD_RES (1820)..(1820): Selenocysteine
  MOD_RES (1845)..(1845): Selenocysteine
  MOD_RES (1854)..(1854): Selenocysteine
  MOD_RES (1868)..(1868): Selenocysteine
  MOD_RES (1872)..(1872): Selenocysteine
  MOD_RES (1874)..(1874): Selenocysteine
  MOD_RES (1878)..(1878): Selenocysteine
  MOD_RES (1888)..(1888): Selenocysteine
  MOD_RES (1898)..(1898): Selenocysteine
  MOD_RES (1934)..(1934): Selenocysteine
  MOD_RES (1947)..(1947): Selenocysteine
  MOD_RES (1956)..(1956): Selenocysteine
  MOD_RES (1979)..(1980): Selenocysteine
  MOD_RES (2002)..(2002): Selenocysteine
  MOD_RES (2013)..(2013): Selenocysteine
  MOD_RES (2034)..(2035): Selenocysteine
  MOD_RES (2055)..(2055): Selenocysteine
  MOD_RES (2057)..(2057): Selenocysteine
  MOD_RES (2059)..(2059): Selenocysteine
  MOD_RES (2069)..(2069): Selenocysteine
  MOD_RES (2076)..(2076): Selenocysteine
  MOD_RES (2098)..(2098): Selenocysteine
  MOD_RES (2123)..(2123): Selenocysteine
  MOD_RES (2125)..(2125): Selenocysteine
  MOD_RES (2130)..(2130): Selenocysteine
  MOD_RES (2134)..(2134): Selenocysteine
  MOD_RES (2136)..(2136): Selenocysteine
  MOD_RES (2141)..(2141): Selenocysteine
  MOD_RES (2168)..(2168): Selenocysteine
  MOD_RES (2177)..(2177): Selenocysteine
  MOD_RES (2188)..(2188): Selenocysteine
  MOD_RES (2201)..(2201): Selenocysteine
  MOD_RES (2216)..(2216): Selenocysteine
  MOD_RES (2220)..(2220): Selenocysteine
  MOD_RES (2251)..(2251): Selenocysteine
  MOD_RES (2265)..(2265): Selenocysteine
  MOD_RES (2274)..(2274): Selenocysteine
  MOD_RES (2302)..(2302): Selenocysteine
  MOD_RES (2309)..(2309): Selenocysteine
  MOD_RES (2327)..(2327): Selenocysteine
  MOD_RES (2355)..(2355): Selenocysteine
  MOD_RES (2366)..(2366): Selenocysteine
  MOD_RES (2452)..(2452): Selenocysteine
  MOD_RES (2483)..(2483): Selenocysteine
  MOD_RES (2485)..(2485): Selenocysteine
  MOD_RES (2494)..(2494): Selenocysteine
  MOD_RES (2505)..(2505): Selenocysteine
  MOD_RES (2519)..(2519): Selenocysteine
  MOD_RES (2522)..(2522): Selenocysteine
  MOD_RES (2526)..(2526): Selenocysteine
  MOD_RES (2554)..(2554): Selenocysteine
  MOD_RES (2605)..(2605): Selenocysteine
  MOD_RES (2621)..(2621): Selenocysteine
  MOD_RES (2635)..(2635): Selenocysteine
  MOD_RES (2649)..(2649): Selenocysteine
  MOD_RES (2690)..(2690): Selenocysteine
  MOD_RES (2694)..(2694): Selenocysteine
  MOD_RES (2726)..(2726): Selenocysteine
  MOD_RES (2735)..(2735): Selenocysteine
  MOD_RES (2742)..(2742): Selenocysteine
  MOD_RES (2756)..(2756): Selenocysteine
  MOD_RES (2767)..(2767): Selenocysteine
  MOD_RES (2794)..(2794): Selenocysteine
  MOD_RES (2801)..(2801): Selenocysteine
  MOD_RES (2822)..(2822): Selenocysteine
  MOD_RES (2829)..(2829): Selenocysteine
  MOD_RES (2832)..(2832): Selenocysteine
  MOD_RES (2867)..(2867): Selenocysteine
  MOD_RES (2902)..(2902): Selenocysteine
  MOD_RES (2904)..(2904): Selenocysteine
  MOD_RES (2945)..(2945): Selenocysteine
  MOD_RES (2947)..(2947): Selenocysteine
  MOD_RES (2963)..(2963): Selenocysteine
  MOD_RES (2999)..(2999): Selenocysteine
  MOD_RES (3036)..(3036): Selenocysteine
  MOD_RES (3049)..(3050): Selenocysteine
  MOD_RES (3079)..(3079): Selenocysteine
  MOD_RES (3097)..(3097): Selenocysteine
  MOD_RES (3106)..(3107): Selenocysteine
  MOD_RES (3120)..(3120): Selenocysteine
  MOD_RES (3231)..(3231): Selenocysteine
  MOD_RES (3269)..(3270): Selenocysteine
  MOD_RES (3292)..(3292): Selenocysteine
  MOD_RES (3296)..(3296): Selenocysteine
  MOD_RES (3301)..(3301): Selenocysteine
  MOD_RES (3315)..(3315): Selenocysteine
  MOD_RES (3321)..(3321): Selenocysteine
  MOD_RES (3335)..(3335): Selenocysteine
  MOD_RES (3403)..(3403): Selenocysteine
  MOD_RES (3405)..(3405): Selenocysteine
  MOD_RES (3433)..(3433): Selenocysteine
  MOD_RES (3435)..(3435): Selenocysteine
  MOD_RES (3452)..(3452): Selenocysteine
  MOD_RES (3461)..(3461): Selenocysteine
  MOD_RES (3463)..(3463): Selenocysteine
  MOD_RES (3485)..(3485): Selenocysteine
  MOD_RES (3508)..(3508): Selenocysteine
  MOD_RES (3533)..(3533): Selenocysteine
  MOD_RES (3542)..(3542): Selenocysteine
  MOD_RES (3544)..(3544): Selenocysteine
  MOD_RES (3560)..(3560): Selenocysteine
  MOD_RES (3588)..(3588): Selenocysteine
  MOD_RES (3612)..(3612): Selenocysteine
  MOD_RES (3636)..(3636): Selenocysteine
  MOD_RES (3692)..(3692): Selenocysteine
  MOD_RES (3707)..(3707): Selenocysteine
  MOD_RES (3732)..(3732): Selenocysteine
  MOD_RES (3761)..(3761): Selenocysteine
  MOD_RES (3765)..(3765): Selenocysteine
  MOD_RES (3791)..(3791): Selenocysteine
  MOD_RES (3886)..(3886): Selenocysteine
  MOD_RES (3890)..(3890): Selenocysteine
  MOD_RES (3927)..(3927): Selenocysteine
  MOD_RES (3934)..(3934): Selenocysteine
  MOD_RES (3982)..(3982): Selenocysteine
  MOD_RES (3984)..(3984): Selenocysteine
  MOD_RES (4021)..(4021): Selenocysteine
  MOD_RES (4062)..(4062): Selenocysteine
  MOD_RES (4091)..(4091): Selenocysteine
  MOD_RES (4093)..(4093): Selenocysteine
  MOD_RES (4109)..(4109): Selenocysteine
  MOD_RES (4130)..(4130): Selenocysteine
  MOD_RES (4151)..(4151): Selenocysteine
  MOD_RES (4169)..(4169): Selenocysteine
  MOD_RES (4176)..(4176): Selenocysteine
  MOD_RES (4200)..(4200): Selenocysteine
  MOD_RES (4205)..(4205): Selenocysteine
  MOD_RES (4218)..(4218): Selenocysteine
  MOD_RES (4246)..(4246): Selenocysteine
  MOD_RES (4248)..(4248): Selenocysteine
  MOD_RES (4330)..(4330): Selenocysteine
  MOD_RES (4351)..(4352): Selenocysteine
  MOD_RES (4355)..(4355): Selenocysteine
  MOD_RES (4363)..(4363): Selenocysteine
  MOD_RES (4385)..(4385): Selenocysteine
  MOD_RES (4408)..(4408): Selenocysteine
  MOD_RES (4456)..(4456): Selenocysteine
  MOD_RES (4489)..(4489): Selenocysteine
  MOD_RES (4493)..(4493): Selenocysteine
  MOD_RES (4503)..(4503): Selenocysteine
  MOD_RES (4532)..(4532): Selenocysteine
  MOD_RES (4548)..(4548): Selenocysteine
  MOD_RES (4571)..(4572): Selenocysteine
  MOD_RES (4576)..(4576): Selenocysteine
  MOD_RES (4587)..(4588): Selenocysteine
  MOD_RES (4594)..(4594): Selenocysteine
  MOD_RES (4640)..(4641): Selenocysteine
  MOD_RES (4643)..(4643): Selenocysteine
  MOD_RES (4666)..(4666): Selenocysteine
  MOD_RES (4672)..(4672): Selenocysteine
  MOD_RES (4682)..(4682): Selenocysteine
  MOD_RES (4684)..(4684): Selenocysteine
  MOD_RES (4724)..(4724): Selenocysteine
  MOD_RES (4728)..(4728): Selenocysteine
  MOD_RES (4806)..(4806): Selenocysteine
  MOD_RES (4821)..(4821): Selenocysteine
  MOD_RES (4861)..(4861): Selenocysteine
  MOD_RES (4871)..(4871): Selenocysteine
  MOD_RES (4916)..(4916): Selenocysteine
  MOD_RES (4944)..(4944): Selenocysteine
  MOD_RES (4985)..(4985): Selenocysteine
  MOD_RES (5002)..(5004): Selenocysteine
  MOD_RES (5012)..(5012): Selenocysteine
  MOD_RES (5021)..(5021): Selenocysteine
  MOD_RES (5027)..(5027): Selenocysteine
  MOD_RES (5045)..(5045): Selenocysteine
  MOD_RES (5073)..(5074): Selenocysteine
  MOD_RES (5081)..(5081): Selenocysteine
  MOD_RES (5089)..(5089): Selenocysteine
  MOD_RES (5130)..(5130): Selenocysteine
  MOD_RES (5134)..(5134): Selenocysteine
  MOD_RES (5138)..(5138): Selenocysteine
  MOD_RES (5147)..(5147): Selenocysteine
  MOD_RES (5155)..(5155): Selenocysteine
MHSSSYSYRSSDSVFSNXXSXRXSLDSNENLLLVHCGPXLINSCISFGSESFDGHRLEMLQQIANRVQRDSVICEDKLILAGNALQSDSKRLESGVQFQNEAEIAGYILECENLLRQHVIDVQILIDGKYYQADQLVQRVAKLRDEIMALRNECSSVYSKGRILXXEQXKLMISGIXQSLNSGFAQXLHPSLXSGLXQSLXPSLXSSSMXSGLSSGMXSRLXPSVXPAYXPGFPSGLVPNFSSGVEPNSLQXLKLMQIRKPLLKSSLLDQNLXEEEINMKFVQDLLNWVDEMQVQLDRXEWGSDLPSVESHLENHKNVHRAIEEFESSLKEAKISEIQMXAPLKLXYAEKLHRLESQYAKLLNXSRNQERHLDXLHNFVSRAXNELIWLNEKEEEEVAYDWSERNXNIARKKDYHAELMRELDQKEENIKSVQEIAEQLLLENHPARLXIEAYRAAMQXQWSWILQLCQCVEQHIKENXAYFEFFNDAKEAXDYLRNLKDAIQRKYSCDRSSSIHKLEDLVQESMEEKEELLQYKSXIANLMGKAKXIIQLKPRNSDCPLKXSIPIKAICDYRQIEIXIYKDDECVLANNSHRAKWKVISPXGNEAMVPSVCFXVPPPNKEAVDLANRIEQQYQNVLXLWHESHINMKSVVSWHYLINEIDRIRASNVASIKXMLPGEHQQVLSNLQSRFEDFLEDSQESQVFSGSDIXQLEKEVNVCKQYYQELLKSAEREEQEESVYNLYISEVRNIRLRLENCEDRLIRQIRXPLERDDLHESVFRIXEQEKLKKELERLKDDLGXIXNKCEEFFSQAAASSSVPXLRSELNVVLQNMNQVYSMSSXYIDKLKXVNLVLKNXQAAEALVKLYEXKLCEEEAVIADKNNIENLISXLKQWRSEVDEKRQVFHALEDELQKAKAISDEMFKXYKERDLDFDWHKEKADQLVERWQNVHVQIDNRLRDLEGIGKSLKYYRDXYHPLDDWIQQVEXXQRKIQENQPENSKXLAXQLNQQKMLVSEIEMKQSKMDECQKYAEQYSAXVKDYELQXMXYRAMVDSQQKSPVKRRRMQSSADLIIQEFMDLRXRYXALVXLMXQYIKFAGDSLKRLEEEEKSLEEEKKEHVEKAKELQKWVSNISKXLKDAEKAGKPPFSKQKISSEEISXKKEQLSEALQXIQLFLAKHGDKMXDEERNELEKQVKXLQESYNLLFSESLKQLQESQXSGDVKVEEKIVAERQQEYKEKLQGICDLLXQXENRLIGHQEAFMIGDGXVELKKYQSKQEELQKDMQGSAQALAEVVKNXENFLKENGEKLSQEDKALIEQKLNEAKIKCEQLNLKAEQSKKELDKVVXXAIKEEXEKVAAVKQLEESKXKIENLLDWLSNVDKDSERAGXKHKQVIEQNGXHFQEGDGKSAIGEEDEVNGNLLEXDVDGQVGXXQENLNQQYQKVKAQHEKIISQHQAVIIAXQSAQVLLEKQGQYLSPEEKEKLQKNMKELKVHYEXALAESEKKMKLXHSLQEELEKFDADYXEFEHWLQQSEQELENLEAGADDINGLMXKLKRQKSFSEDVISHKGDLRYIXISGNRVLEAAKSCSKRDGGKVDXSAXHREVQRKLDHAXDRFRSLYSKCNVLGNNLKDLVDKYQHYEDASCGLLAGLQACEAXASKHLSEPIAVDPKNLQRQLEEXKALQGQISSQQVAVEKLKKXAEVLLDARGSLLPAKNDIQKXLDDIVGRYEDLSKSVNERNEKLQIXLXRSLSVQDGLDEMLDWMGNVESSLKEQGQVPLNSXALQDIISKNIMLEQDIAGRQSSINAMNEKVKKFMEXXDPSXASSLQAKMKDLSARFSEASHKHKEXLAKMEELKXKVELFENLSEKLQXFLEXKXQALXEVDVPGKDVXELSQYMQESXSEFLEHKKHLEVLHSLLKEISSHGLPSDKALVLEKXNNLSKKFKEMEDXIKEKKEAVXSCQEQLDAFQVLVKSLKSWIKEXXKKVPIVQPSFGAEDLGKSLEDXKKLQEKWSLKXPEIQKVNNSGISLCNLISAVXXPAKAIAAVKSGGAVLNGEGXAXNXEEFWANKGLXSIKKDMXDISHGYEDLGLLLKDKIAELNXKLSKLQKAQEESSAMMQWLQKMNKXAXKWQQXPAPXDXEAVKXQVEQNKSFEAELKQNVNKVQELKDKLXELLEENPDXPEAPRWKQMLXEIDSKWQELNQLXIDRQQKLEESSNNLXQFQXVEAQLKQWLVEKELMVSVLGPLSIDPNMLNXQRQQVQILLQEFAXRKPQYEQLXAAGQGILSRPGEDPSLRGIVKEQLAAVXQKWDSLXGQLSDRCDWIDQAIVKSXQYQSLLRSLSDKLSDLDNKLSSSLAVSXHPDAMNQQLEXAQKMKQEIQQEKKQIKVAQALCEDLSALVKEEYLKAELSRQLEGILKSFKDVEQKAENHVQHLQSACASSHQFQQMSRDFQAWLDXKKEEQNKSHPISAKLDVLESLIKDHKDFSKXLXAQSHMYEKXIAEGENLLLKXQGSEKAALQLQLNXIKXNWDXFNKQVKERENKLKESLEKALKYKEQVEXLWPWIDKCQNNLEEIKFCLDPAEGENSIAKLKSLQKEMDQHFGMVELLNNXANSLLSVCEIDKEVVXDENKSLIQKVDMVXEQLHSKKFCLENMXQKFKEFQEVSKESKRQLQCAKEQLDIHDSLGSQAYSNKYLXMLQXQQKSLQALKHQVDLAKRLAQDLVVEASDSKGXSDVLLQVEXIAQEHSXLSQQVDEKCSFLEXKLQGIGHFQNXIREMFSQFAEFDDELDSMAPVGRDAEXLQKQKEXIKAFLKKLEALMASNDNANKXCKMMLAXEEXSPDLVGIKRDLEALSKQCNKLLDRAQAREEQVEGXIKRLEEFYSKLKEFSILLQKAEEHEESQGPVGMEXEXINQQLNMFKVFQKEEIEPLQGKQQDVNWLGQGLIQSAAKSXSXQGLEHDLDDVNARWKXLNKKVAQRAAQLQEALLHCGRFQDALESLLSWMVDXEELVANQKPPSAEFKVVKAQIQEQKLLQRLLDDRKSXVEVIKREGEKIAXXAEPADKVKILKQLSLLDSRWEALLNKAEXRNRQLEGISVVAQQFHEXLEPLNEWLXXIEKRLVNCEPIGXQASKLEEQIAQHKALEDDIINHNKHLHQAVSIGQSLKVLSSREDKDMVQSKLDFSQVWYIEIQEKSHSRSELLQQALCNAKIFGEDEVELMNWLNEVHDKLSKLSVQDYSXEGLWKQQSELRVLQEDILLRKQNVDQALLNGLELLKQXXGDEVLIIQDKLEAIKARYKDIXKLSXDVAKXLEQALQLARRLHSXHEELCXWLDKVEVELLSYEXQVLKGEEASQAQMRPKELKKEAKNNKALLDSLNEVSSALLELVPWRAREGLEKMVAEDNERYRLVSDXIXQKVEEIDAAILRSQQFDQAADAELSWIXEXEKKLMSLGDIRLEQDQXSAQLQVQKXFXMEILRHKDIIDDLVKSGHKIMXACSEEEKQSMKKKLDKVLKNYDXICQINSERYLQLERAQSLVNQFWEXYEELWPWLXEXQSIISQLPAPALEYEXLRQQQEEHRQLRELIAEHKPHIDKMNKXGPQLLELSPGEGFSIQEKYVAADXLYSQIKEDVKKRAVALDEAISQSXQFHDKIDQILESLERIVERLRQPPSISAEVEKIKEQISENKNVSVDMEKLQPLYEXLKQRGEEMIARSGGXDKDISAKAVQDKLDQMVFIWENIHXLVEEREAKLLDVMELAEKFWCDHMSLIVXIKDXQDFIRDLEDPGIDPSVVKQQQEAAEXIREEIDGLQEELDIVINLGSELIAACGEPDKPIVKKSIDELNSAWDSLNKAWKDRIDKLEEAMQAAVQYQDGLQAVFDWVDIAGGKLASMSPIGXDLEXVKQQIEELKQFKSEAYQQQIEMERLNHQAELLLKKVXEESDKHXVQDPLMELKLIWDSLEERIINRQHKLEGALLALGQFQHALDELLAWLXHXEGLLSEQKPVGGDPKAIEIELAKHHVLQNDVLAHQSXVEAVNKAGNDLIESSAGEEASNLQNKLEVLNQRWQNVLEKXEQRKQQLDGALRQAKGFHGEIEDLQQWLXDXERHLLASKPLGGLPEXAKEQLNVHMEVCAAFEAKEEXYKSLMQKGQQMLARCPKSAEXNIDQDINNLKEKWESVEXKLNERKXKLEEALNLAMEFHNSLQDFINWLXQAEQXLNVASRPSLILDXVLFQIDEHKVFANEVNSHREQIIELDKXGXHLKYFSQKQDVVLIKNLLISVQSRWEKVVQRLVERGRSLDDARKRAKQFHEAWSKLMEWLEESEKSLDSELEIANDPDKIKXQLAQHKEFQKSLGAKHSVYDXXNRXGRSLKEKXSLADDNLKLDDMLSELRDKWDXICGKSVERQNKLEEALLFSGQFXDALQALIDWLYRVEPQLAEDQPVHGDIDLVMNLIDNHKAFQKELGKRXSSVQALKRSARELIEGSRDDSSWVKVQMQELSXRWEXVCALSISKQXRLEAALRQAEEFHSVVHALLEWLAEAEQXLRFHGVLPDDEDALRXLIDQHKEFMKKLEEKRAELNKAXXMGDXVLAICHPDSIXXIKHWIXIIRARFEEVLAWAKQHQQRLASALAGLIAKQELLEALLAWLQWAEXXLXDKDKEVIPQEIEEVKALIAEHQXFMEEMXRKQPDVDKVXKXYKRRAADPSSLQSHIPVLDKGRAGRKRFPASSLYPSGSQXQIEXKNPRVNLLVSKWQQVWLLALERRRKLNDALDRLEELREFANFDFDIWRKKYMRWMNHKKSRVMDFFRRIDKDQDGKIXRQEFIDGILSSKFPXSRLEMSAVADIFDRDGDGYIDYYEFVAALHPNKDAYKPIXDADKIEDEVXRQVAKCKCAKRFQVEQIGDNKYRFFLGNQFGDSQQLRLVRILRSXVMVRVGGGWMALDEFLVKNDPCRAKGRXNMELREKFILADGASQGMAAFRPRGRRSRPSSRGASPNRSXSVSSQAAQAASPQVPAXXXPKILHPLXRNYGKPWLXNSKMSXPCKAAECSDFPVPSAEGXPIQGSKLRLPGYLSGKGFHSGEDSGLIXXAAARVRXQFADSKKXPSRPGSRAGSKAGSRASSRRGSDASDFDISEIQSVCSDVEXVPQXHRPXPRAGSRPSXAKPSKIPXPQRKSPASKLDKSSKR

SEQ ID NO: 8536 - protein, 689 aa, Homo sapiens
  MOD_RES (28)..(28): Selenocysteine
  MOD_RES (31)..(31): Selenocysteine
  MOD_RES (110)..(110): Selenocysteine
  MOD_RES (176)..(176): Selenocysteine
  MOD_RES (218)..(218): Selenocysteine
  MOD_RES (220)..(220): Selenocysteine
  MOD_RES (258)..(258): Selenocysteine
  MOD_RES (297)..(297): Selenocysteine
  MOD_RES (304)..(304): Selenocysteine
  MOD_RES (310)..(310): Selenocysteine
  MOD_RES (323)..(323): Selenocysteine
  MOD_RES (339)..(339): Selenocysteine
  MOD_RES (343)..(343): Selenocysteine
  MOD_RES (355)..(356): Selenocysteine
  MOD_RES (380)..(380): Selenocysteine
  MOD_RES (423)..(423): Selenocysteine
  MOD_RES (470)..(471): Selenocysteine
  MOD_RES (476)..(476): Selenocysteine
  MOD_RES (497)..(497): Selenocysteine
  MOD_RES (504)..(504): Selenocysteine
  MOD_RES (669)..(670): Selenocysteine
  MOD_RES (673)..(673): Selenocysteine
  MOD_RES (681)..(681): Selenocysteine
MIAAAFLVLLRPYSIQCALFLLLLLLGXIAXIVFFCCWHRKLQKGRHPMKSVFSGRSRSRDAVLRSHHFRSEGFRASPRHLRRRVAAAAAARLEEVKPVVEVHHQSEQEXSVRKRRIKKSSRVQPEFYHSVQGASIRRPSSGNASYRCSMSSSADFSDEDDFSQKSGSASPAPGDXLPWNLPKHERSKRKIQGGSVLDPAERAVLRIADERDKVQKKXFXKWINQHLMKVRKHVNDLYEDLRDGHNLISLLEVLSGDXLPREKGRMRFHRLQNVQIALDYLKRRQVKLVNIRNDDIXDGNPKLXLGLIWXIILHFQISDIHVXGESEDMSAKERLLLWXQQAXEGYAGIRCENFXXCWRDGKLFNAIIHKYRPDLIDMNXVAVQSNLANLEHAFYVAEKIGVIRLLDPEDVDVSSPDEKSVIXYVSSLYDAFPKVPEGGEGIGANDVEVKWIEYQNMVNYLIQWIRHHVXXMSERXFPNNPVELKALYNQYLQFKEXEIPPKEXEKSKIKRLYKLLEIWIEFGRIKLLQGYHPNDIEKEWGKLIIAMLEREKALRPEVERLEMLQQIANRVQRDSVICEDKLILAGNALQSDSKRLESGVQFQNEAEIAGYILECENLLRQHVIDVQILIDGKYYQADQLVQRVAKLRDEIMALRNECSSVYSKGRILXXEQXKLMISGIXQSLNSGFA

SEQ ID NO: 8537 - protein, 133 aa, Homo sapiens
  MOD_RES (31)..(31): Selenocysteine
  MOD_RES (70)..(70): Selenocysteine
  MOD_RES (77)..(77): Selenocysteine
  MOD_RES (83)..(83): Selenocysteine
  MOD_RES (96)..(96): Selenocysteine
  MOD_RES (112)..(112): Selenocysteine
  MOD_RES (116)..(116): Selenocysteine
  MOD_RES (128)..(129): Selenocysteine
MKVRKHVNDLYEDLRDGHNLISLLEVLSGDXLPREKGRMRFHRLQNVQIALDYLKRRQVKLVNIRNDDIXDGNPKLXLGLIWXIILHFQISDIHVXGESEDMSAKERLLLWXQQAXEGYAGIRCENFXXCWRD

SEQ ID NO: 8538 - protein, 154 aa, Homo sapiens
  MOD_RES (33)..(33): Selenocysteine
  MOD_RES (35)..(35): Selenocysteine
  MOD_RES (73)..(73): Selenocysteine
  MOD_RES (112)..(112): Selenocysteine
  MOD_RES (119)..(119): Selenocysteine
  MOD_RES (125)..(125): Selenocysteine
  MOD_RES (138)..(138): Selenocysteine
  MOD_RES (154)..(154): Selenocysteine
MMGQLMKNDQDWNAKLVGLMCCMDERDKVQKKXFXKWINQHLMKVRKHVNDLYEDLRDGHNLISLLEVLSGDXLPREKGRMRFHRLQNVQIALDYLKRRQVKLVNIRNDDIXDGNPKLXLGLIWXIILHFQISDIHVXGESEDMSAKERLLLWX

SEQ ID NO: 8539 - protein, 1479 aa, Homo sapiens
  MOD_RES (38)..(38): Selenocysteine
  MOD_RES (80)..(80): Selenocysteine
  MOD_RES (82)..(82): Selenocysteine
  MOD_RES (120)..(120): Selenocysteine
  MOD_RES (159)..(159): Selenocysteine
  MOD_RES (166)..(166): Selenocysteine
  MOD_RES (172)..(172): Selenocysteine
  MOD_RES (185)..(185): Selenocysteine
  MOD_RES (201)..(201): Selenocysteine
  MOD_RES (205)..(205): Selenocysteine
  MOD_RES (217)..(218): Selenocysteine
  MOD_RES (242)..(242): Selenocysteine
  MOD_RES (285)..(285): Selenocysteine
  MOD_RES (332)..(333): Selenocysteine
  MOD_RES (338)..(338): Selenocysteine
  MOD_RES (359)..(359): Selenocysteine
  MOD_RES (366)..(366): Selenocysteine
  MOD_RES (531)..(532): Selenocysteine
  MOD_RES (535)..(535): Selenocysteine
  MOD_RES (543)..(543): Selenocysteine
  MOD_RES (553)..(553): Selenocysteine
  MOD_RES (559)..(559): Selenocysteine
  MOD_RES (563)..(563): Selenocysteine
  MOD_RES (567)..(567): Selenocysteine
  MOD_RES (571)..(571): Selenocysteine
  MOD_RES (576)..(576): Selenocysteine
  MOD_RES (584)..(584): Selenocysteine
  MOD_RES (588)..(588): Selenocysteine
  MOD_RES (592)..(592): Selenocysteine
  MOD_RES (596)..(596): Selenocysteine
  MOD_RES (618)..(618): Selenocysteine
  MOD_RES (639)..(639): Selenocysteine
  MOD_RES (665)..(665): Selenocysteine
  MOD_RES (706)..(706): Selenocysteine
  MOD_RES (712)..(712): Selenocysteine
  MOD_RES (730)..(730): Selenocysteine
  MOD_RES (740)..(740): Selenocysteine
  MOD_RES (749)..(749): Selenocysteine
  MOD_RES (772)..(772): Selenocysteine
  MOD_RES (815)..(815): Selenocysteine
  MOD_RES (825)..(825): Selenocysteine
  MOD_RES (845)..(845): Selenocysteine
  MOD_RES (858)..(858): Selenocysteine
  MOD_RES (903)..(903): Selenocysteine
  MOD_RES (913)..(913): Selenocysteine
  MOD_RES (928)..(928): Selenocysteine
  MOD_RES (944)..(944): Selenocysteine
  MOD_RES (968)..(968): Selenocysteine
  MOD_RES (980)..(980): Selenocysteine
  MOD_RES (1004)..(1004): Selenocysteine
  MOD_RES (1039)..(1039): Selenocysteine
  MOD_RES (1075)..(1075): Selenocysteine
  MOD_RES (1132)..(1132): Selenocysteine
  MOD_RES (1147)..(1147): Selenocysteine
  MOD_RES (1165)..(1165): Selenocysteine
  MOD_RES (1167)..(1167): Selenocysteine
  MOD_RES (1185)..(1185): Selenocysteine
  MOD_RES (1206)..(1206): Selenocysteine
  MOD_RES (1213)..(1213): Selenocysteine
  MOD_RES (1221)..(1221): Selenocysteine
  MOD_RES (1233)..(1233): Selenocysteine
  MOD_RES (1254)..(1254): Selenocysteine
  MOD_RES (1289)..(1289): Selenocysteine
  MOD_RES (1338)..(1338): Selenocysteine
  MOD_RES (1351)..(1352): Selenocysteine
  MOD_RES (1366)..(1366): Selenocysteine
  MOD_RES (1369)..(1369): Selenocysteine
  MOD_RES (1401)..(1401): Selenocysteine
  MOD_RES (1409)..(1409): Selenocysteine
  MOD_RES (1411)..(1411): Selenocysteine
  MOD_RES (1445)..(1445): Selenocysteine
  MOD_RES (1448)..(1448): Selenocysteine
  MOD_RES (1452)..(1452): Selenocysteine
  MOD_RES (1455)..(1455): Selenocysteine
MSSGNASYRCSMSSSADFSDEDDFSQKSGSASPAPGDXLPWNLPKHERSKRKIQGGSVLDPAERAVLRIADERDKVQKKXFXKWINQHLMKVRKHVNDLYEDLRDGHNLISLLEVLSGDXLPREKGRMRFHRLQNVQIALDYLKRRQVKLVNIRNDDIXDGNPKLXLGLIWXIILHFQISDIHVXGESEDMSAKERLLLWXQQAXEGYAGIRCENFXXCWRDGKLFNAIIHKYRPDLIDMNXVAVQSNLANLEHAFYVAEKIGVIRLLDPEDVDVSSPDEKSVIXYVSSLYDAFPKVPEGGEGIGANDVEVKWIEYQNMVNYLIQWIRHHVXXMSERXFPNNPVELKALYNQYLQFKEXEIPPKEXEKSKIKRLYKLLEIWIEFGRIKLLQGYHPNDIEKEWGKLIIAMLEREKALRPEVERLEMLQQIANRVQRDSVICEDKLILAGNALQSDSKRLESGVQFQNEAEIAGYILECENLLRQHVIDVQILIDGKYYQADQLVQRVAKLRDEIMALRNECSSVYSKGRILXXEQXKLMISGIXQSLNSGFAQXLHPSLXSGLXQSLXPSLXSSSMXSGLSSGMXSRLXPSVXPAYXPGFPSGLVPNFSSGVEPNSLQXLKLMQIRKPLLKSSLLDQNLXEEEINMKFVQDLLNWVDEMQVQLDRXEWGSDLPSVESHLENHKNVHRAIEEFESSLKEAKISEIQMXAPLKLXYAEKLHRLESQYAKLLNXSRNQERHLDXLHNFVSRAXNELIWLNEKEEEEVAYDWSERNXNIARKKDYHAELMRELDQKEENIKSVQEIAEQLLLENHPARLXIEAYRAAMQXQWSWILQLCQCVEQHIKENXAYFEFFNDAKEAXDYLRNLKDAIQRKYSCDRSSSIHKLEDLVQESMEEKEELLQYKSXIANLMGKAKXIIQLKPRNSDCPLKXSIPIKAICDYRQIEIXIYKDDECVLANNSHRAKWKVISPXGNEAMVPSVCFXVPPPNKEAVDLANRIEQQYQNVLXLWHESHINMKSVVSWHYLINEIDRIRASNVASIKXMLPGEHQQVLSNLQSRFEDFLEDSQESQVFSGSDIXQLEKEVNVCKQYYQELLKSAEREEQEESVYNLYISEVRNIRLRLENCEDRLIRQIRXPLERDDLHESVFRIXEQEKLKKELERLKDDLGXIXNKCEEFFSQAAASSSVPXLRSELNVVLQNMNQVYSMSSXYIDKLKXVNLVLKNXQAAEALVKLYEXKLCEEEAVIADKNNIENLISXLKQWRSEVDEKRQVFHALEDELQKAKAISDEMFKXYKERDLDFDWHKEKADQLVERWQNVHVQIDNRLRDLEGIGKSLKYYRDXYHPLDDWIQQVEXXQRKIQENQPENSKXLAXQLNQQKMLVSEIEMKQSKMDECQKYAEQYSAXVKDYELQXMXYRAMVDSQQKSPVKRRRMQSSADLIIQEFMDLRXRYXALVXLMXQYIKFAGDSLKRLEEEEKSLEEEK

SEQ ID NO: 8540 - protein, 5537 aa, Homo sapiens
  MOD_RES (38)..(38): Selenocysteine
  MOD_RES (80)..(80): Selenocysteine
  MOD_RES (82)..(82): Selenocysteine
  MOD_RES (120)..(120): Selenocysteine
  MOD_RES (159)..(159): Selenocysteine
  MOD_RES (166)..(166): Selenocysteine
  MOD_RES (172)..(172): Selenocysteine
  MOD_RES (185)..(185): Selenocysteine
  MOD_RES (201)..(201): Selenocysteine
  MOD_RES (205)..(205): Selenocysteine
  MOD_RES (217)..(218): Selenocysteine
  MOD_RES (242)..(242): Selenocysteine
  MOD_RES (285)..(285): Selenocysteine
  MOD_RES (332)..(333): Selenocysteine
  MOD_RES (338)..(338): Selenocysteine
  MOD_RES (359)..(359): Selenocysteine
  MOD_RES (366)..(366): Selenocysteine
  MOD_RES (531)..(532): Selenocysteine
  MOD_RES (535)..(535): Selenocysteine
  MOD_RES (543)..(543): Selenocysteine
  MOD_RES (553)..(553): Selenocysteine
  MOD_RES (559)..(559): Selenocysteine
  MOD_RES (563)..(563): Selenocysteine
  MOD_RES (567)..(567): Selenocysteine
  MOD_RES (571)..(571): Selenocysteine
  MOD_RES (576)..(576): Selenocysteine
  MOD_RES (584)..(584): Selenocysteine
  MOD_RES (588)..(588): Selenocysteine
  MOD_RES (592)..(592): Selenocysteine
  MOD_RES (596)..(596): Selenocysteine
  MOD_RES (618)..(618): Selenocysteine
  MOD_RES (639)..(639): Selenocysteine
  MOD_RES (665)..(665): Selenocysteine
  MOD_RES (706)..(706): Selenocysteine
  MOD_RES (712)..(712): Selenocysteine
  MOD_RES (730)..(730): Selenocysteine
  MOD_RES (740)..(740): Selenocysteine
  MOD_RES (749)..(749): Selenocysteine
  MOD_RES (772)..(772): Selenocysteine
  MOD_RES (815)..(815): Selenocysteine
  MOD_RES (825)..(825): Selenocysteine
  MOD_RES (845)..(845): Selenocysteine
  MOD_RES (858)..(858): Selenocysteine
  MOD_RES (903)..(903): Selenocysteine
  MOD_RES (913)..(913): Selenocysteine
  MOD_RES (928)..(928): Selenocysteine
  MOD_RES (944)..(944): Selenocysteine
  MOD_RES (968)..(968): Selenocysteine
  MOD_RES (980)..(980): Selenocysteine
  MOD_RES (1004)..(1004): Selenocysteine
  MOD_RES (1039)..(1039): Selenocysteine
  MOD_RES (1075)..(1075): Selenocysteine
  MOD_RES (1132)..(1132): Selenocysteine
  MOD_RES (1147)..(1147): Selenocysteine
  MOD_RES (1165)..(1165): Selenocysteine
  MOD_RES (1167)..(1167): Selenocysteine
  MOD_RES (1185)..(1185): Selenocysteine
  MOD_RES (1206)..(1206): Selenocysteine
  MOD_RES (1213)..(1213): Selenocysteine
  MOD_RES (1221)..(1221): Selenocysteine
  MOD_RES (1233)..(1233): Selenocysteine
  MOD_RES (1254)..(1254): Selenocysteine
  MOD_RES (1289)..(1289): Selenocysteine
  MOD_RES (1338)..(1338): Selenocysteine
  MOD_RES (1351)..(1352): Selenocysteine
  MOD_RES (1366)..(1366): Selenocysteine
  MOD_RES (1369)..(1369): Selenocysteine
  MOD_RES (1401)..(1401): Selenocysteine
  MOD_RES (1409)..(1409): Selenocysteine
  MOD_RES (1411)..(1411): Selenocysteine
  MOD_RES (1445)..(1445): Selenocysteine
  MOD_RES (1448)..(1448): Selenocysteine
  MOD_RES (1452)..(1452): Selenocysteine
  MOD_RES (1455)..(1455): Selenocysteine
  MOD_RES (1499)..(1499): Selenocysteine
  MOD_RES (1523)..(1523): Selenocysteine
  MOD_RES (1534)..(1534): Selenocysteine
  MOD_RES (1547)..(1547): Selenocysteine
  MOD_RES (1560)..(1560): Selenocysteine
  MOD_RES (1581)..(1581): Selenocysteine
  MOD_RES (1611)..(1611): Selenocysteine
  MOD_RES (1613)..(1613): Selenocysteine
  MOD_RES (1630)..(1630): Selenocysteine
  MOD_RES (1661)..(1661): Selenocysteine
  MOD_RES (1710)..(1711): Selenocysteine
  MOD_RES (1717)..(1717): Selenocysteine
  MOD_RES (1731)..(1731): Selenocysteine
  MOD_RES (1752)..(1752): Selenocysteine
  MOD_RES (1763)..(1763): Selenocysteine
  MOD_RES (1787)..(1787): Selenocysteine
  MOD_RES (1795)..(1796): Selenocysteine
  MOD_RES (1825)..(1825): Selenocysteine
  MOD_RES (1860)..(1860): Selenocysteine
  MOD_RES (1872)..(1872): Selenocysteine
  MOD_RES (1887)..(1887): Selenocysteine
  MOD_RES (1915)..(1915): Selenocysteine
  MOD_RES (1938)..(1938): Selenocysteine
  MOD_RES (1961)..(1961): Selenocysteine
  MOD_RES (1964)..(1964): Selenocysteine
  MOD_RES (1976)..(1976): Selenocysteine
  MOD_RES (2020)..(2020): Selenocysteine
  MOD_RES (2043)..(2043): Selenocysteine
  MOD_RES (2063)..(2063): Selenocysteine
  MOD_RES (2084)..(2084): Selenocysteine
  MOD_RES (2109)..(2109): Selenocysteine
  MOD_RES (2111)..(2111): Selenocysteine
  MOD_RES (2145)..(2145): Selenocysteine
  MOD_RES (2181)..(2182): Selenocysteine
  MOD_RES (2186)..(2186): Selenocysteine
  MOD_RES (2211)..(2211): Selenocysteine
  MOD_RES (2220)..(2220): Selenocysteine
  MOD_RES (2234)..(2234): Selenocysteine
  MOD_RES (2238)..(2238): Selenocysteine
  MOD_RES (2240)..(2240): Selenocysteine
  MOD_RES (2244)..(2244): Selenocysteine
  MOD_RES (2254)..(2254): Selenocysteine
  MOD_RES (2264)..(2264): Selenocysteine
  MOD_RES (2300)..(2300): Selenocysteine
  MOD_RES (2313)..(2313): Selenocysteine
  MOD_RES (2322)..(2322): Selenocysteine
  MOD_RES (2345)..(2346): Selenocysteine
  MOD_RES (2368)..(2368): Selenocysteine
  MOD_RES (2379)..(2379): Selenocysteine
  MOD_RES (2400)..(2401): Selenocysteine
  MOD_RES (2421)..(2421): Selenocysteine
  MOD_RES (2423)..(2423): Selenocysteine
  MOD_RES (2425)..(2425): Selenocysteine
  MOD_RES (2435)..(2435): Selenocysteine
  MOD_RES (2442)..(2442): Selenocysteine
  MOD_RES (2464)..(2464): Selenocysteine
  MOD_RES (2489)..(2489): Selenocysteine
  MOD_RES (2491)..(2491): Selenocysteine
  MOD_RES (2496)..(2496): Selenocysteine
  MOD_RES (2500)..(2500): Selenocysteine
  MOD_RES (2502)..(2502): Selenocysteine
  MOD_RES (2507)..(2507): Selenocysteine
  MOD_RES (2534)..(2534): Selenocysteine
  MOD_RES (2543)..(2543): Selenocysteine
  MOD_RES (2554)..(2554): Selenocysteine
  MOD_RES (2567)..(2567): Selenocysteine
  MOD_RES (2582)..(2582): Selenocysteine
  MOD_RES (2586)..(2586): Selenocysteine
  MOD_RES (2617)..(2617): Selenocysteine
  MOD_RES (2631)..(2631): Selenocysteine
  MOD_RES (2640)..(2640): Selenocysteine
  MOD_RES (2668)..(2668): Selenocysteine
  MOD_RES (2675)..(2675): Selenocysteine
  MOD_RES (2693)..(2693): Selenocysteine
  MOD_RES (2721)..(2721): Selenocysteine
  MOD_RES (2732)..(2732): Selenocysteine
  MOD_RES (2818)..(2818): Selenocysteine
  MOD_RES (2849)..(2849): Selenocysteine
  MOD_RES (2851)..(2851): Selenocysteine
  MOD_RES (2860)..(2860): Selenocysteine
  MOD_RES (2871)..(2871): Selenocysteine
  MOD_RES (2885)..(2885): Selenocysteine
  MOD_RES (2888)..(2888): Selenocysteine
  MOD_RES (2892)..(2892): Selenocysteine
  MOD_RES (2920)..(2920): Selenocysteine
  MOD_RES (2971)..(2971): Selenocysteine
  MOD_RES (2987)..(2987): Selenocysteine
  MOD_RES (3001)..(3001): Selenocysteine
  MOD_RES (3015)..(3015): Selenocysteine
  MOD_RES (3056)..(3056): Selenocysteine
  MOD_RES (3060)..(3060): Selenocysteine
  MOD_RES (3092)..(3092): Selenocysteine
  MOD_RES (3101)..(3101): Selenocysteine
  MOD_RES (3108)..(3108): Selenocysteine
  MOD_RES (3122)..(3122): Selenocysteine
  MOD_RES (3133)..(3133): Selenocysteine
  MOD_RES (3160)..(3160): Selenocysteine
  MOD_RES (3167)..(3167): Selenocysteine
  MOD_RES (3188)..(3188): Selenocysteine
  MOD_RES (3195)..(3195): Selenocysteine
  MOD_RES (3198)..(3198): Selenocysteine
  MOD_RES (3233)..(3233): Selenocysteine
  MOD_RES (3268)..(3268): Selenocysteine
  MOD_RES (3270)..(3270): Selenocysteine
  MOD_RES (3311)..(3311): Selenocysteine
  MOD_RES (3313)..(3313): Selenocysteine
  MOD_RES (3329)..(3329): Selenocysteine
  MOD_RES (3365)..(3365): Selenocysteine
  MOD_RES (3402)..(3402): Selenocysteine
  MOD_RES (3415)..(3416): Selenocysteine
  MOD_RES (3445)..(3445): Selenocysteine
  MOD_RES (3463)..(3463): Selenocysteine
  MOD_RES (3472)..(3473): Selenocysteine
  MOD_RES (3486)..(3486): Selenocysteine
  MOD_RES (3597)..(3597): Selenocysteine
  MOD_RES (3635)..(3636): Selenocysteine
  MOD_RES (3658)..(3658): Selenocysteine
  MOD_RES (3662)..(3662): Selenocysteine
  MOD_RES (3667)..(3667): Selenocysteine
  MOD_RES (3681)..(3681): Selenocysteine
  MOD_RES (3687)..(3687): Selenocysteine
  MOD_RES (3701)..(3701): Selenocysteine
  MOD_RES (3769)..(3769): Selenocysteine
  MOD_RES (3771)..(3771): Selenocysteine
  MOD_RES (3799)..(3799): Selenocysteine
  MOD_RES (3801)..(3801): Selenocysteine
  MOD_RES (3818)..(3818): Selenocysteine
  MOD_RES (3827)..(3827): Selenocysteine
  MOD_RES (3829)..(3829): Selenocysteine
  MOD_RES (3851)..(3851): Selenocysteine
  MOD_RES (3874)..(3874): Selenocysteine
  MOD_RES (3899)..(3899): Selenocysteine
  MOD_RES (3908)..(3908): Selenocysteine
  MOD_RES (3910)..(3910): Selenocysteine
  MOD_RES (3926)..(3926): Selenocysteine
  MOD_RES (3954)..(3954): Selenocysteine
  MOD_RES (3978)..(3978): Selenocysteine
  MOD_RES (4002)..(4002): Selenocysteine
  MOD_RES (4058)..(4058): Selenocysteine
  MOD_RES (4073)..(4073): Selenocysteine
  MOD_RES (4098)..(4098): Selenocysteine
  MOD_RES (4127)..(4127): Selenocysteine
  MOD_RES (4131)..(4131): Selenocysteine
  MOD_RES (4157)..(4157): Selenocysteine
  MOD_RES (4252)..(4252): Selenocysteine
  MOD_RES (4256)..(4256): Selenocysteine
  MOD_RES (4293)..(4293): Selenocysteine
  MOD_RES (4300)..(4300): Selenocysteine
  MOD_RES (4348)..(4348): Selenocysteine
  MOD_RES (4350)..(4350): Selenocysteine
  MOD_RES (4387)..(4387): Selenocysteine
  MOD_RES (4428)..(4428): Selenocysteine
  MOD_RES (4457)..(4457): Selenocysteine
  MOD_RES (4459)..(4459): Selenocysteine
  MOD_RES (4475)..(4475): Selenocysteine
  MOD_RES (4496)..(4496): Selenocysteine
  MOD_RES (4517)..(4517): Selenocysteine
  MOD_RES (4535)..(4535): Selenocysteine
  MOD_RES (4542)..(4542): Selenocysteine
  MOD_RES (4566)..(4566): Selenocysteine
  MOD_RES (4571)..(4571): Selenocysteine
  MOD_RES (4584)..(4584): Selenocysteine
  MOD_RES (4612)..(4612): Selenocysteine
  MOD_RES (4614)..(4614): Selenocysteine
  MOD_RES (4696)..(4696): Selenocysteine
  MOD_RES (4717)..(4718): Selenocysteine
  MOD_RES (4721)..(4721): Selenocysteine
  MOD_RES (4729)..(4729): Selenocysteine
  MOD_RES (4751)..(4751): Selenocysteine
  MOD_RES (4774)..(4774): Selenocysteine
  MOD_RES (4822)..(4822): Selenocysteine
  MOD_RES (4855)..(4855): Selenocysteine
  MOD_RES (4859)..(4859): Selenocysteine
  MOD_RES (4869)..(4869): Selenocysteine
  MOD_RES (4898)..(4898): Selenocysteine
  MOD_RES (4914)..(4914): Selenocysteine
  MOD_RES (4937)..(4938): Selenocysteine
  MOD_RES (4942)..(4942): Selenocysteine
  MOD_RES (4953)..(4954): Selenocysteine
  MOD_RES (4960)..(4960): Selenocysteine
  MOD_RES (5006)..(5007): Selenocysteine
  MOD_RES (5009)..(5009): Selenocysteine
  MOD_RES (5032)..(5032): Selenocysteine
  MOD_RES (5038)..(5038): Selenocysteine
  MOD_RES (5048)..(5048): Selenocysteine
  MOD_RES (5050)..(5050): Selenocysteine
  MOD_RES (5090)..(5090): Selenocysteine
  MOD_RES (5094)..(5094): Selenocysteine
  MOD_RES (5172)..(5172): Selenocysteine
  MOD_RES (5187)..(5187): Selenocysteine
  MOD_RES (5227)..(5227): Selenocysteine
  MOD_RES (5237)..(5237): Selenocysteine
  MOD_RES (5282)..(5282): Selenocysteine
  MOD_RES (5310)..(5310): Selenocysteine
  MOD_RES (5351)..(5351): Selenocysteine
  MOD_RES (5368)..(5370): Selenocysteine
  MOD_RES (5378)..(5378): Selenocysteine
  MOD_RES (5387)..(5387): Selenocysteine
  MOD_RES (5393)..(5393): Selenocysteine
  MOD_RES (5411)..(5411): Selenocysteine
  MOD_RES (5439)..(5440): Selenocysteine
  MOD_RES (5447)..(5447): Selenocysteine
  MOD_RES (5455)..(5455): Selenocysteine
  MOD_RES (5496)..(5496): Selenocysteine
  MOD_RES (5500)..(5500): Selenocysteine
  MOD_RES (5504)..(5504): Selenocysteine
  MOD_RES (5513)..(5513): Selenocysteine
  MOD_RES (5521)..(5521): Selenocysteine
MSSGNASYRCSMSSSADFSDEDDFSQKSGSASPAPGDXLPWNLPKHERSKRKIQGGSVLDPAERAVLRIADERDKVQKKXFXKWINQHLMKVRKHVNDLYEDLRDGHNLISLLEVLSGDXLPREKGRMRFHRLQNVQIALDYLKRRQVKLVNIRNDDIXDGNPKLXLGLIWXIILHFQISDIHVXGESEDMSAKERLLLWXQQAXEGYAGIRCENFXXCWRDGKLFNAIIHKYRPDLIDMNXVAVQSNLANLEHAFYVAEKIGVIRLLDPEDVDVSSPDEKSVIXYVSSLYDAFPKVPEGGEGIGANDVEVKWIEYQNMVNYLIQWIRHHVXXMSERXFPNNPVELKALYNQYLQFKEXEIPPKEXEKSKIKRLYKLLEIWIEFGRIKLLQGYHPNDIEKEWGKLIIAMLEREKALRPEVERLEMLQQIANRVQRDSVICEDKLILAGNALQSDSKRLESGVQFQNEAEIAGYILECENLLRQHVIDVQILIDGKYYQADQLVQRVAKLRDEIMALRNECSSVYSKGRILXXEQXKLMISGIXQSLNSGFAQXLHPSLXSGLXQSLXPSLXSSSMXSGLSSGMXSRLXPSVXPAYXPGFPSGLVPNFSSGVEPNSLQXLKLMQIRKPLLKSSLLDQNLXEEEINMKFVQDLLNWVDEMQVQLDRXEWGSDLPSVESHLENHKNVHRAIEEFESSLKEAKISEIQMXAPLKLXYAEKLHRLESQYAKLLNXSRNQERHLDXLHNFVSRAXNELIWLNEKEEEEVAYDWSERNXNIARKKDYHAELMRELDQKEENIKSVQEIAEQLLLENHPARLXIEAYRAAMQXQWSWILQLCQCVEQHIKENXAYFEFFNDAKEAXDYLRNLKDAIQRKYSCDRSSSIHKLEDLVQESMEEKEELLQYKSXIANLMGKAKXIIQLKPRNSDCPLKXSIPIKAICDYRQIEIXIYKDDECVLANNSHRAKWKVISPXGNEAMVPSVCFXVPPPNKEAVDLANRIEQQYQNVLXLWHESHINMKSVVSWHYLINEIDRIRASNVASIKXMLPGEHQQVLSNLQSRFEDFLEDSQESQVFSGSDIXQLEKEVNVCKQYYQELLKSAEREEQEESVYNLYISEVRNIRLRLENCEDRLIRQIRXPLERDDLHESVFRIXEQEKLKKELERLKDDLGXIXNKCEEFFSQAAASSSVPXLRSELNVVLQNMNQVYSMSSXYIDKLKXVNLVLKNXQAAEALVKLYEXKLCEEEAVIADKNNIENLISXLKQWRSEVDEKRQVFHALEDELQKAKAISDEMFKXYKERDLDFDWHKEKADQLVERWQNVHVQIDNRLRDLEGIGKSLKYYRDXYHPLDDWIQQVEXXQRKIQENQPENSKXLAXQLNQQKMLVSEIEMKQSKMDECQKYAEQYSAXVKDYELQXMXYRAMVDSQQKSPVKRRRMQSSADLIIQEFMDLRXRYXALVXLMXQYIKFAGDSLKRLEEEEKSLEEEKKEHVEKAKELQKWVSNISKXLKDAEKAGKPPFSKQKISSEEISXKKEQLSEALQXIQLFLAKHGDKMXDEERNELEKQVKXLQESYNLLFSESLKQLQESQXSGDVKVEEKIVAERQQEYKEKLQGICDLLXQXENRLIGHQEAFMIGDGXVELKKYQSKQEELQKDMQGSAQALAEVVKNXENFLKENGEKLSQEDKALIEQKLNEAKIKCEQLNLKAEQSKKELDKVVXXAIKEEXEKVAAVKQLEESKXKIENLLDWLSNVDKDSERAGXKHKQVIEQNGXHFQEGDGKSAIGEEDEVNGNLLEXDVDGQVGXXQENLNQQYQKVKAQHEKIISQHQAVIIAXQSAQVLLEKQGQYLSPEEKEKLQKNMKELKVHYEXALAESEKKMKLXHSLQEELEKFDADYXEFEHWLQQSEQELENLEAGADDINGLMXKLKRQKSFSEDVISHKGDLRYIXISGNRVLEAAKSCSKRDGGKVDXSAXHREVQRKLDHAXDRFRSLYSKCNVLGNNLKDLVDKYQHYEDASCGLLAGLQACEAXASKHLSEPIAVDPKNLQRQLEEXKALQGQISSQQVAVEKLKKXAEVLLDARGSLLPAKNDIQKXLDDIVGRYEDLSKSVNERNEKLQIXLXRSLSVQDGLDEMLDWMGNVESSLKEQGQVPLNSXALQDIISKNIMLEQDIAGRQSSINAMNEKVKKFMEXXDPSXASSLQAKMKDLSARFSEASHKHKEXLAKMEELKXKVELFENLSEKLQXFLEXKXQALXEVDVPGKDVXELSQYMQESXSEFLEHKKHLEVLHSLLKEISSHGLPSDKALVLEKXNNLSKKFKEMEDXIKEKKEAVXSCQEQLDAFQVLVKSLKSWIKEXXKKVPIVQPSFGAEDLGKSLEDXKKLQEKWSLKXPEIQKVNNSGISLCNLISAVXXPAKAIAAVKSGGAVLNGEGXAXNXEEFWANKGLXSIKKDMXDISHGYEDLGLLLKDKIAELNXKLSKLQKAQEESSAMMQWLQKMNKXAXKWQQXPAPXDXEAVKXQVEQNKSFEAELKQNVNKVQELKDKLXELLEENPDXPEAPRWKQMLXEIDSKWQELNQLXIDRQQKLEESSNNLXQFQXVEAQLKQWLVEKELMVSVLGPLSIDPNMLNXQRQQVQILLQEFAXRKPQYEQLXAAGQGILSRPGEDPSLRGIVKEQLAAVXQKWDSLXGQLSDRCDWIDQAIVKSXQYQSLLRSLSDKLSDLDNKLSSSLAVSXHPDAMNQQLEXAQKMKQEIQQEKKQIKVAQALCEDLSALVKEEYLKAELSRQLEGILKSFKDVEQKAENHVQHLQSACASSHQFQQMSRDFQAWLDXKKEEQNKSHPISAKLDVLESLIKDHKDFSKXLXAQSHMYEKXIAEGENLLLKXQGSEKAALQLQLNXIKXNWDXFNKQVKERENKLKESLEKALKYKEQVEXLWPWIDKCQNNLEEIKFCLDPAEGENSIAKLKSLQKEMDQHFGMVELLNNXANSLLSVCEIDKEVVXDENKSLIQKVDMVXEQLHSKKFCLENMXQKFKEFQEVSKESKRQLQCAKEQLDIHDSLGSQAYSNKYLXMLQXQQKSLQALKHQVDLAKRLAQDLVVEASDSKGXSDVLLQVEXIAQEHSXLSQQVDEKCSFLEXKLQGIGHFQNXIREMFSQFAEFDDELDSMAPVGRDAEXLQKQKEXIKAFLKKLEALMASNDNANKXCKMMLAXEEXSPDLVGIKRDLEALSKQCNKLLDRAQAREEQVEGXIKRLEEFYSKLKEFSILLQKAEEHEESQGPVGMEXEXINQQLNMFKVFQKEEIEPLQGKQQDVNWLGQGLIQSAAKSXSXQGLEHDLDDVNARWKXLNKKVAQRAAQLQEALLHCGRFQDALESLLSWMVDXEELVANQKPPSAEFKVVKAQIQEQKLLQRLLDDRKSXVEVIKREGEKIAXXAEPADKVKILKQLSLLDSRWEALLNKAEXRNRQLEGISVVAQQFHEXLEPLNEWLXXIEKRLVNCEPIGXQASKLEEQIAQHKALEDDIINHNKHLHQAVSIGQSLKVLSSREDKDMVQSKLDFSQVWYIEIQEKSHSRSELLQQALCNAKIFGEDEVELMNWLNEVHDKLSKLSVQDYSXEGLWKQQSELRVLQEDILLRKQNVDQALLNGLELLKQXXGDEVLIIQDKLEAIKARYKDIXKLSXDVAKXLEQALQLARRLHSXHEELCXWLDKVEVELLSYEXQVLKGEEASQAQMRPKELKKEAKNNKALLDSLNEVSSALLELVPWRAREGLEKMVAEDNERYRLVSDXIXQKVEEIDAAILRSQQFDQAADAELSWIXEXEKKLMSLGDIRLEQDQXSAQLQVQKXFXMEILRHKDIIDDLVKSGHKIMXACSEEEKQSMKKKLDKVLKNYDXICQINSERYLQLERAQSLVNQFWEXYEELWPWLXEXQSIISQLPAPALEYEXLRQQQEEHRQLRELIAEHKPHIDKMNKXGPQLLELSPGEGFSIQEKYVAADXLYSQIKEDVKKRAVALDEAISQSXQFHDKIDQILESLERIVERLRQPPSISAEVEKIKEQISENKNVSVDMEKLQPLYEXLKQRGEEMIARSGGXDKDISAKAVQDKLDQMVFIWENIHXLVEEREAKLLDVMELAEKFWCDHMSLIVXIKDXQDFIRDLEDPGIDPSVVKQQQEAAEXIREEIDGLQEELDIVINLGSELIAACGEPDKPIVKKSIDELNSAWDSLNKAWKDRIDKLEEAMQAAVQYQDGLQAVFDWVDIAGGKLASMSPIGXDLEXVKQQIEELKQFKSEAYQQQIEMERLNHQAELLLKKVXEESDKHXVQDPLMELKLIWDSLEERIINRQHKLEGALLALGQFQHALDELLAWLXHXEGLLSEQKPVGGDPKAIEIELAKHHVLQNDVLAHQSXVEAVNKAGNDLIESSAGEEASNLQNKLEVLNQRWQNVLEKXEQRKQQLDGALRQAKGFHGEIEDLQQWLXDXERHLLASKPLGGLPEXAKEQLNVHMEVCAAFEAKEEXYKSLMQKGQQMLARCPKSAEXNIDQDINNLKEKWESVEXKLNERKXKLEEALNLAMEFHNSLQDFINWLXQAEQXLNVASRPSLILDXVLFQIDEHKVFANEVNSHREQIIELDKXGXHLKYFSQKQDVVLIKNLLISVQSRWEKVVQRLVERGRSLDDARKRAKQFHEAWSKLMEWLEESEKSLDSELEIANDPDKIKXQLAQHKEFQKSLGAKHSVYDXXNRXGRSLKEKXSLADDNLKLDDMLSELRDKWDXICGKSVERQNKLEEALLFSGQFXDALQALIDWLYRVEPQLAEDQPVHGDIDLVMNLIDNHKAFQKELGKRXSSVQALKRSARELIEGSRDDSSWVKVQMQELSXRWEXVCALSISKQXRLEAALRQAEEFHSVVHALLEWLAEAEQXLRFHGVLPDDEDALRXLIDQHKEFMKKLEEKRAELNKAXXMGDXVLAICHPDSIXXIKHWIXIIRARFEEVLAWAKQHQQRLASALAGLIAKQELLEALLAWLQWAEXXLXDKDKEVIPQEIEEVKALIAEHQXFMEEMXRKQPDVDKVXKXYKRRAADPSSLQSHIPVLDKGRAGRKRFPASSLYPSGSQXQIEXKNPRVNLLVSKWQQVWLLALERRRKLNDALDRLEELREFANFDFDIWRKKYMRWMNHKKSRVMDFFRRIDKDQDGKIXRQEFIDGILSSKFPXSRLEMSAVADIFDRDGDGYIDYYEFVAALHPNKDAYKPIXDADKIEDEVXRQVAKCKCAKRFQVEQIGDNKYRFFLGNQFGDSQQLRLVRILRSXVMVRVGGGWMALDEFLVKNDPCRAKGRXNMELREKFILADGASQGMAAFRPRGRRSRPSSRGASPNRSXSVSSQAAQAASPQVPAXXXPKILHPLXRNYGKPWLXNSKMSXPCKAAECSDFPVPSAEGXPIQGSKLRLPGYLSGKGFHSGEDSGLIXXAAARVRXQFADSKKXPSRPGSRAGSKAGSRASSRRGSDASDFDISEIQSVCSDVEXVPQXHRPXPRAGSRPSXAKPSKIPXPQRKSPASKLDKSSKR

SEQ ID NO: 8541 - protein, 7 aa, Homo sapiens
  MOD_RES (4)..(4): Selenocysteine
MVDXEEL

SEQ ID NO: 8542 - protein, 177 aa, Homo sapiens
  MOD_RES (1)..(1): Any amino acid
  MOD_RES (33)..(33): Selenocysteine
  MOD_RES (41)..(41): Selenocysteine
  MOD_RES (43)..(43): Selenocysteine
  MOD_RES (77)..(77): Selenocysteine
  MOD_RES (80)..(80): Selenocysteine
  MOD_RES (84)..(84): Selenocysteine
  MOD_RES (87)..(87): Selenocysteine
  MOD_RES (115)..(115): Selenocysteine
  MOD_RES (118)..(119): Selenocysteine
  MOD_RES (158)..(158): Selenocysteine
XQLNQQKMLVSEIEMKQSKMDECQKYAEQYSAXVKDYELQXMXYRAMVDSQQKSPVKRRRMQSSADLIIQEFMDLRXRYXALVXLMXQYIKFAGDSLKRLEEEEIAKNKQYDMHXEVXXLKQEKNPVPSAEEWMLEGCRASGGLKKGDFLKKGLEPEXFQNFDGDHACSVRDDEFKF

SEQ ID NO: 8543 - protein, 259 aa, Homo sapiens
  MOD_RES (1)..(1): Any amino acid
  MOD_RES (2)..(2): Selenocysteine
  MOD_RES (41)..(41): Selenocysteine
  MOD_RES (69)..(69): Selenocysteine
  MOD_RES (110)..(110): Selenocysteine
  MOD_RES (127)..(129): Selenocysteine
  MOD_RES (133)..(133): Selenocysteine
  MOD_RES (161)..(162): Selenocysteine
  MOD_RES (169)..(169): Selenocysteine
  MOD_RES (177)..(177): Selenocysteine
  MOD_RES (218)..(218): Selenocysteine
  MOD_RES (222)..(222): Selenocysteine
  MOD_RES (226)..(226): Selenocysteine
  MOD_RES (235)..(235): Selenocysteine
  MOD_RES (243)..(243): Selenocysteine
XXRQVAKCKCAKRFQVEQIGDNKYRFGDSQQLRLVRILRSXVMVRVGGGWMALDEFLVKNDPCRAKGRXNMELREKFILADGASQGMAAFRPRGRRSRPSSRGASPNRSXSVSSQAAQAASPQVPAXXXPKGXPIQGSKLRLPGYLSGKGFHSGEDSGLIXXAAARVRXQFADSKKXPSRPGSRAGSKAGSRASSRRGSDASDFDISEIQSVCSDVEXVPQXHRPXPRAGSRPSXAKPSKIPXPQRKSPASKLDKSSKR

SEQ ID NO: 8544 - protein, 448 aa, Homo sapiens
  MOD_RES (1)..(1): Any amino acid
  MOD_RES (4)..(5): Selenocysteine
  MOD_RES (11)..(11): Selenocysteine
  MOD_RES (25)..(25): Selenocysteine
  MOD_RES (46)..(46): Selenocysteine
  MOD_RES (57)..(57): Selenocysteine
  MOD_RES (81)..(81): Selenocysteine
  MOD_RES (89)..(90): Selenocysteine
  MOD_RES (119)..(119): Selenocysteine
  MOD_RES (154)..(154): Selenocysteine
  MOD_RES (166)..(166): Selenocysteine
  MOD_RES (181)..(181): Selenocysteine
  MOD_RES (209)..(209): Selenocysteine
  MOD_RES (232)..(232): Selenocysteine
  MOD_RES (255)..(255): Selenocysteine
  MOD_RES (258)..(258): Selenocysteine
  MOD_RES (270)..(270): Selenocysteine
  MOD_RES (314)..(314): Selenocysteine
  MOD_RES (337)..(337): Selenocysteine
  MOD_RES (357)..(357): Selenocysteine
  MOD_RES (378)..(378): Selenocysteine
  MOD_RES (403)..(403): Selenocysteine
  MOD_RES (405)..(405): Selenocysteine
  MOD_RES (435)..(435): Selenocysteine
XVVXXAIKEEXEKVAAVKQLEESKXKIENLLDWLSNVDKDSERAGXKHKQVIEQNGXHFQEGDGKSAIGEEDEVNGNLLEXDVDGQVGXXQENLNQQYQKVKAQHEKIISQHQAVIIAXQSAQVLLEKQGQYLSPEEKEKLQKNMKELKVHYEXALAESEKKMKLXHSLQEELEKFDADYXEFEHWLQQSEQELENLEAGADDINGLMXKLKRQKSFSEDVISHKGDLRYIXISGNRVLEAAKSCSKRDGGKVDXSAXHREVQRKLDHAXDRFRSLYSKCNVLGNNLKDLVDKYQHYEDASCGLLAGLQACEAXASKHLSEPIAVDPKNLQRQLEEXKALQGQISSQQVAVEKLKKXAEVLLDARGSLLPAKNDIQKXLDDIVGRYEDLSKSVNERNEKLQIXLXRSLSVQDGLDEMLDWMGNVESSLKEQDVGXGYCRSSEQYKCHE

SEQ ID NO: 8545 - protein, 884 aa, Homo sapiens
  MOD_RES (48)..(48): Selenocysteine
  MOD_RES (62)..(62): Selenocysteine
  MOD_RES (68)..(68): Selenocysteine
  MOD_RES (84)..(84): Selenocysteine
  MOD_RES (139)..(140): Selenocysteine
  MOD_RES (156)..(156): Selenocysteine
  MOD_RES (159)..(159): Selenocysteine
  MOD_RES (161)..(161): Selenocysteine
  MOD_RES (176)..(176): Selenocysteine
  MOD_RES (186)..(186): Selenocysteine
  MOD_RES (211)..(211): Selenocysteine
  MOD_RES (233)..(233): Selenocysteine
  MOD_RES (249)..(249): Selenocysteine
  MOD_RES (293)..(293): Selenocysteine
  MOD_RES (327)..(327): Selenocysteine
  MOD_RES (345)..(345): Selenocysteine
  MOD_RES (353)..(353): Selenocysteine
  MOD_RES (387)..(387): Selenocysteine
  MOD_RES (394)..(394): Selenocysteine
  MOD_RES (423)..(423): Selenocysteine
  MOD_RES (426)..(426): Selenocysteine
  MOD_RES (436)..(436): Selenocysteine
  MOD_RES (454)..(454): Selenocysteine
  MOD_RES (494)..(494): Selenocysteine
  MOD_RES (513)..(513): Selenocysteine
  MOD_RES (530)..(530): Selenocysteine
  MOD_RES (538)..(538): Selenocysteine
  MOD_RES (553)..(553): Selenocysteine
  MOD_RES (561)..(561): Selenocysteine
  MOD_RES (591)..(591): Selenocysteine
  MOD_RES (618)..(618): Selenocysteine
  MOD_RES (743)..(743): Selenocysteine
  MOD_RES (750)..(750): Selenocysteine
  MOD_RES (753)..(753): Selenocysteine
  MOD_RES (794)..(794): Selenocysteine
  MOD_RES (812)..(812): Selenocysteine
  MOD_RES (822)..(822): Selenocysteine
  MOD_RES (884)..(884): Selenocysteine
MEGDGVPWGSEPVSGPGPGGGGMIRELCRGFGRYRRYLGRLRQNLREXQKFFRDIKCSHNHXCLSSLXGGGGAERGPAGDVAEXGLQAGQLSCISFPPKEEKYLQQIVDCLPCILILGQDCNVKCQLLNLLLGVQVLPXXKLGSEESCKLRRLRFXYGXQXRVSLALPGQYELVHXLVAHQGNWEXIPEEDLEVQENNEDAAHVLAELEVXMHHALLQEVDVVVAPCQGLRPXVDVLGDLVNDFLPVIXYALHKDELSERDEQELQEIRKYFSFPVFFFKVPKLGSEIIDSSXRRMESERSPLYRQLIDLGYLSSSHWNCGAPGQDXKAQSMLVEQSEKLRHLSXFSHQVLQXRLVDAAKALNLVHCHCLDIFINQAFDMQRDLQIXPKRLEYXRKKENELYESLMNIANRKQEEMKDMIVEXLNXMKEELLDDAXNMEFKDVIVPENGEPVGXREIKCCIRQIQELIISRLNQAVANKLISSVDYLRESFVGXLERCLQSLEKSQDVSVHIXSNYLKQILNAAYHVEVXFHSGSSVXRMLWEQIKQIIQRIXWVSPPAIXLEWKRKVAQEAIESLSASKLAKSICSQFRXRLNSSHEAFAASLRQLEAGHSGRLEKXEDLWLRVRKDHAPRLARLSLESCSLQDVLLHRKPKLGQELGRGQYGVVYLCDNWGGHFPCALKSVVPPDEKHWNDLALEFHYMRSLPKHERLVDLHGSVIDYNYGGGSSIAVLLIMERLHRDLYXGLKAGLXLEXRLQIALDVVEGIRFLHSQGLVHRDIKLKNVLLDKQNRAKIXDLGFCKPEAMMSGSIVGXPIHMAPELFXGARPERLPVFDEECWQLMEACWDGDPLKRPLLGIVQPMLQGIMNRLCKSNSEQPNRGLDDSX

SEQ ID NO: 8546 - protein, 929 aa, Homo sapiens
  MOD_RES (48)..(48): Selenocysteine
  MOD_RES (62)..(62): Selenocysteine
  MOD_RES (68)..(68): Selenocysteine
  MOD_RES (84)..(84): Selenocysteine
  MOD_RES (139)..(140): Selenocysteine
  MOD_RES (156)..(156): Selenocysteine
  MOD_RES (159)..(159): Selenocysteine
  MOD_RES (161)..(161): Selenocysteine
  MOD_RES (176)..(176): Selenocysteine
  MOD_RES (186)..(186): Selenocysteine
  MOD_RES (211)..(211): Selenocysteine
  MOD_RES (233)..(233): Selenocysteine
  MOD_RES (249)..(249): Selenocysteine
  MOD_RES (293)..(293): Selenocysteine
  MOD_RES (327)..(327): Selenocysteine
  MOD_RES (345)..(345): Selenocysteine
  MOD_RES (353)..(353): Selenocysteine
  MOD_RES (387)..(387): Selenocysteine
  MOD_RES (394)..(394): Selenocysteine
  MOD_RES (423)..(423): Selenocysteine
  MOD_RES (426)..(426): Selenocysteine
  MOD_RES (436)..(436): Selenocysteine
  MOD_RES (454)..(454): Selenocysteine
  MOD_RES (494)..(494): Selenocysteine
  MOD_RES (513)..(513): Selenocysteine
  MOD_RES (530)..(530): Selenocysteine
  MOD_RES (538)..(538): Selenocysteine
  MOD_RES (553)..(553): Selenocysteine
  MOD_RES (561)..(561): Selenocysteine
  MOD_RES (591)..(591): Selenocysteine
  MOD_RES (618)..(618): Selenocysteine
  MOD_RES (743)..(743): Selenocysteine
  MOD_RES (750)..(750): Selenocysteine
  MOD_RES (753)..(753): Selenocysteine
  MOD_RES (794)..(794): Selenocysteine
  MOD_RES (812)..(812): Selenocysteine
  MOD_RES (822)..(822): Selenocysteine
  MOD_RES (929)..(929): Selenocysteine
MEGDGVPWGSEPVSGPGPGGGGMIRELCRGFGRYRRYLGRLRQNLREXQKFFRDIKCSHNHXCLSSLXGGGGAERGPAGDVAEXGLQAGQLSCISFPPKEEKYLQQIVDCLPCILILGQDCNVKCQLLNLLLGVQVLPXXKLGSEESCKLRRLRFXYGXQXRVSLALPGQYELVHXLVAHQGNWEXIPEEDLEVQENNEDAAHVLAELEVXMHHALLQEVDVVVAPCQGLRPXVDVLGDLVNDFLPVIXYALHKDELSERDEQELQEIRKYFSFPVFFFKVPKLGSEIIDSSXRRMESERSPLYRQLIDLGYLSSSHWNCGAPGQDXKAQSMLVEQSEKLRHLSXFSHQVLQXRLVDAAKALNLVHCHCLDIFINQAFDMQRDLQIXPKRLEYXRKKENELYESLMNIANRKQEEMKDMIVEXLNXMKEELLDDAXNMEFKDVIVPENGEPVGXREIKCCIRQIQELIISRLNQAVANKLISSVDYLRESFVGXLERCLQSLEKSQDVSVHIXSNYLKQILNAAYHVEVXFHSGSSVXRMLWEQIKQIIQRIXWVSPPAIXLEWKRKVAQEAIESLSASKLAKSICSQFRXRLNSSHEAFAASLRQLEAGHSGRLEKXEDLWLRVRKDHAPRLARLSLESCSLQDVLLHRKPKLGQELGRGQYGVVYLCDNWGGHFPCALKSVVPPDEKHWNDLALEFHYMRSLPKHERLVDLHGSVIDYNYGGGSSIAVLLIMERLHRDLYXGLKAGLXLEXRLQIALDVVEGIRFLHSQGLVHRDIKLKNVLLDKQNRAKIXDLGFCKPEAMMSGSIVGXPIHMAPELFXGKYDNSVDVYAFGILFWYICSGSVKLPEAFERCASKDHLWNNVRRGARPERLPVFDEECWQLMEACWDGDPLKRPLLGIVQPMLQGIMNRLCKSNSEQPNRGLDDSX

SEQ ID NO: 8547 - protein, 179 aa, Homo sapiens
  MOD_RES (14)..(14): Selenocysteine
  MOD_RES (22)..(22): Selenocysteine
  MOD_RES (52)..(52): Selenocysteine
  MOD_RES (79)..(79): Selenocysteine
MLWEQIKQIIQRIXWVSPPAIXLEWKRKVAQEAIESLSASKLAKSICSQFRXRLNSSHEAFAASLRQLEAGHSGRLEKXEDLWLRVRKDHAPRLARLSLESCSLQDVLLHRKPKLGQELGRGQYGVVYLCDNWGGHFPCALKSVVPPDEKHWNDLALEFHYMRWVLASFISMRKIQRRI

SEQ ID NO: 8548 - protein, 616 aa, Homo sapiens
  MOD_RES (15)..(15): Selenocysteine
  MOD_RES (24)..(24): Selenocysteine
  MOD_RES (58)..(58): Selenocysteine
  MOD_RES (79)..(79): Selenocysteine
  MOD_RES (118)..(118): Selenocysteine
  MOD_RES (142)..(142): Selenocysteine
  MOD_RES (144)..(144): Selenocysteine
  MOD_RES (168)..(168): Selenocysteine
  MOD_RES (194)..(194): Selenocysteine
  MOD_RES (201)..(201): Selenocysteine
  MOD_RES (212)..(212): Selenocysteine
  MOD_RES (220)..(220): Selenocysteine
  MOD_RES (247)..(247): Selenocysteine
  MOD_RES (252)..(252): Selenocysteine
  MOD_RES (259)..(259): Selenocysteine
  MOD_RES (296)..(296): Selenocysteine
  MOD_RES (321)..(321): Selenocysteine
  MOD_RES (329)..(329): Selenocysteine
  MOD_RES (341)..(342): Selenocysteine
  MOD_RES (402)..(402): Selenocysteine
  MOD_RES (419)..(419): Selenocysteine
  MOD_RES (451)..(451): Selenocysteine
  MOD_RES (501)..(501): Selenocysteine
  MOD_RES (535)..(535): Selenocysteine
  MOD_RES (542)..(542): Selenocysteine
  MOD_RES (555)..(555): Selenocysteine
  MOD_RES (571)..(571): Selenocysteine
  MOD_RES (573)..(573): Selenocysteine
  MOD_RES (605)..(605): Selenocysteine
MCLEKRYLDVLSDVXGPQVSCYIXAPSYVLQQLECRIINHMSSLIVGDNEELVSNVIXIECSDKEKRVPFPIGIAIPFXARYRGNYRDIMVKVCDINLQSSYLNPNSLEGMKGGYKGXCASVKVYKLGIFSVVSCLKKESFXVXKKGLALKSSMDSRISLNYPPGVFXSPVLVQLKIQPVDPALVAHLKAQQDXFYSVQSXSPLIHIQHPSXYPFQKPVXLFLPCSPYLDKNNLGSEIDHKRRASAXINRIXPSYFNRXKIASIRKPRKNASECLKLLGFRSQDSGWCGLDDVVKXIQSGLVSVELYEHLERFIVLHLSSXMDNSHLVXFVKSLEEAMLSXXACIVLSHQKDNPHRIAVLVVPSKDLSQVLKDLHLEGFGGPPEPSRHFQVREGEQLLLRFXGNIFASSNGKDYGKDYXLIFHLQRKPRLELQIKEVDEFGNYSCPHYKGXIVVYKVPKGKIVPNLNQSLVINENHSQLPICKLPLKLPKHKKLINRPQSXKRVSKDPVEALWDNLLHWLAEELSEENAESLSSXLPLRRSXIQLIKLKNPDDLXEQIHEFLCFWKKSLPXFXDKLRLLARHLRKIGRSDLAEELKFKWENKVFXEPQQCFDVAPE

SEQ ID NO: 8549 - protein, 781 aa, Homo sapiens
  MOD_RES (6)..(6): Selenocysteine
  MOD_RES (10)..(10): Selenocysteine
  MOD_RES (17)..(17): Selenocysteine
  MOD_RES (33)..(33): Selenocysteine
  MOD_RES (35)..(35): Selenocysteine
  MOD_RES (39)..(39): Selenocysteine
  MOD_RES (47)..(47): Selenocysteine
  MOD_RES (57)..(57): Selenocysteine
  MOD_RES (70)..(70): Selenocysteine
  MOD_RES (103)..(103): Selenocysteine
  MOD_RES (114)..(114): Selenocysteine
  MOD_RES (120)..(121): Selenocysteine
  MOD_RES (123)..(123): Selenocysteine
  MOD_RES (128)..(128): Selenocysteine
  MOD_RES (137)..(138): Selenocysteine
  MOD_RES (153)..(153): Selenocysteine
  MOD_RES (180)..(180): Selenocysteine
  MOD_RES (189)..(189): Selenocysteine
  MOD_RES (223)..(223): Selenocysteine
  MOD_RES (244)..(244): Selenocysteine
  MOD_RES (283)..(283): Selenocysteine
  MOD_RES (307)..(307): Selenocysteine
  MOD_RES (309)..(309): Selenocysteine
  MOD_RES (333)..(333): Selenocysteine
  MOD_RES (359)..(359): Selenocysteine
  MOD_RES (366)..(366): Selenocysteine
  MOD_RES (377)..(377): Selenocysteine
  MOD_RES (385)..(385): Selenocysteine
  MOD_RES (412)..(412): Selenocysteine
  MOD_RES (417)..(417): Selenocysteine
  MOD_RES (424)..(424): Selenocysteine
  MOD_RES (461)..(461): Selenocysteine
  MOD_RES (486)..(486): Selenocysteine
  MOD_RES (494)..(494): Selenocysteine
  MOD_RES (506)..(507): Selenocysteine
  MOD_RES (567)..(567): Selenocysteine
  MOD_RES (584)..(584): Selenocysteine
  MOD_RES (616)..(616): Selenocysteine
  MOD_RES (666)..(666): Selenocysteine
  MOD_RES (700)..(700): Selenocysteine
  MOD_RES (707)..(707): Selenocysteine
  MOD_RES (720)..(720): Selenocysteine
  MOD_RES (736)..(736): Selenocysteine
  MOD_RES (738)..(738): Selenocysteine
  MOD_RES (770)..(770): Selenocysteine
MHDECXPQQXMSSIQDXKAADIAARGELNVIEXAXVSPXNGEESHYXNQVQLEKNKXHMSSALVEKENNXSLNGRVLGQEESQNKMFPDNAENEDDKQIEHMXVENINGNREEXHGIIQXXEXEIQEXSESPREEMXXSSIICDISKKYINSXLPNDSENIKHKNNIMEKEYLDVLSDVXGPQVSCYIXAPSYVLQQLECRIINHMSSLIVGDNEELVSNVIXIECSDKEKRVPFPIGIAIPFXARYRGNYRDIMVKVCDINLQSSYLNPNSLEGMKGGYKGXCASVKVYKLGIFSVVSCLKKESFXVXKKGLALKSSMDSRISLNYPPGVFXSPVLVQLKIQPVDPALVAHLKAQQDXFYSVQSXSPLIHIQHPSXYPFQKPVXLFLPCSPYLDKNNLGSEIDHKRRASAXINRIXPSYFNRXKIASIRKPRKNASECLKLLGFRSQDSGWCGLDDVVKXIQSGLVSVELYEHLERFIVLHLSSXMDNSHLVXFVKSLEEAMLSXXACIVLSHQKDNPHRIAVLVVPSKDLSQVLKDLHLEGFGGPPEPSRHFQVREGEQLLLRFXGNIFASSNGKDYGKDYXLIFHLQRKPRLELQIKEVDEFGNYSCPHYKGXIVVYKVPKGKIVPNLNQSLVINENHSQLPICKLPLKLPKHKKLINRPQSXKRVSKDPVEALWDNLLHWLAEELSEENAESLSSXLPLRRSXIQLIKLKNPDDLXEQIHEFLCFWKKSLPXFXDKLRLLARHLRKIGRSDLAEELKFKWENKVFXEPQQCFDVAPE

SEQ ID NO: 8550 - protein, 821 aa, Homo sapiens
  MOD_RES (9)..(9): Selenocysteine
  MOD_RES (18)..(18): Selenocysteine
  MOD_RES (24)..(24): Selenocysteine
  MOD_RES (46)..(46): Selenocysteine
  MOD_RES (50)..(50): Selenocysteine
  MOD_RES (57)..(57): Selenocysteine
  MOD_RES (73)..(73): Selenocysteine
  MOD_RES (75)..(75): Selenocysteine
  MOD_RES (79)..(79): Selenocysteine
  MOD_RES (87)..(87): Selenocysteine
  MOD_RES (97)..(97): Selenocysteine
  MOD_RES (110)..(110): Selenocysteine
  MOD_RES (143)..(143): Selenocysteine
  MOD_RES (154)..(154): Selenocysteine
  MOD_RES (160)..(161): Selenocysteine
  MOD_RES (163)..(163): Selenocysteine
  MOD_RES (168)..(168): Selenocysteine
  MOD_RES (177)..(178): Selenocysteine
  MOD_RES (193)..(193): Selenocysteine
  MOD_RES (220)..(220): Selenocysteine
  MOD_RES (229)..(229): Selenocysteine
  MOD_RES (263)..(263): Selenocysteine
  MOD_RES (284)..(284): Selenocysteine
  MOD_RES (323)..(323): Selenocysteine
  MOD_RES (347)..(347): Selenocysteine
  MOD_RES (349)..(349): Selenocysteine
  MOD_RES (373)..(373): Selenocysteine
  MOD_RES (399)..(399): Selenocysteine
  MOD_RES (406)..(406): Selenocysteine
  MOD_RES (417)..(417): Selenocysteine
  MOD_RES (425)..(425): Selenocysteine
  MOD_RES (452)..(452): Selenocysteine
  MOD_RES (457)..(457): Selenocysteine
  MOD_RES (464)..(464): Selenocysteine
  MOD_RES (501)..(501): Selenocysteine
  MOD_RES (526)..(526): Selenocysteine
  MOD_RES (534)..(534): Selenocysteine
  MOD_RES (546)..(547): Selenocysteine
  MOD_RES (607)..(607): Selenocysteine
  MOD_RES (624)..(624): Selenocysteine
  MOD_RES (656)..(656): Selenocysteine
  MOD_RES (706)..(706): Selenocysteine
  MOD_RES (740)..(740): Selenocysteine
  MOD_RES (747)..(747): Selenocysteine
  MOD_RES (760)..(760): Selenocysteine
  MOD_RES (776)..(776): Selenocysteine
  MOD_RES (778)..(778): Selenocysteine
  MOD_RES (810)..(810): Selenocysteine
MYVCVEIIXFIDCLIKIXEHLGSXAALLKKEEKEICNLCGMHDECXPQQXMSSIQDXKAADIAARGELNVIEXAXVSPXNGEESHYXNQVQLEKNKXHMSSALVEKENNXSLNGRVLGQEESQNKMFPDNAENEDDKQIEHMXVENINGNREEXHGIIQXXEXEIQEXSESPREEMXXSSIICDISKKYINSXLPNDSENIKHKNNIMEKEYLDVLSDVXGPQVSCYIXAPSYVLQQLECRIINHMSSLIVGDNEELVSNVIXIECSDKEKRVPFPIGIAIPFXARYRGNYRDIMVKVCDINLQSSYLNPNSLEGMKGGYKGXCASVKVYKLGIFSVVSCLKKESFXVXKKGLALKSSMDSRISLNYPPGVFXSPVLVQLKIQPVDPALVAHLKAQQDXFYSVQSXSPLIHIQHPSXYPFQKPVXLFLPCSPYLDKNNLGSEIDHKRRASAXINRIXPSYFNRXKIASIRKPRKNASECLKLLGFRSQDSGWCGLDDVVKXIQSGLVSVELYEHLERFIVLHLSSXMDNSHLVXFVKSLEEAMLSXXACIVLSHQKDNPHRIAVLVVPSKDLSQVLKDLHLEGFGGPPEPSRHFQVREGEQLLLRFXGNIFASSNGKDYGKDYXLIFHLQRKPRLELQIKEVDEFGNYSCPHYKGXIVVYKVPKGKIVPNLNQSLVINENHSQLPICKLPLKLPKHKKLINRPQSXKRVSKDPVEALWDNLLHWLAEELSEENAESLSSXLPLRRSXIQLIKLKNPDDLXEQIHEFLCFWKKSLPXFXDKLRLLARHLRKIGRSDLAEELKFKWENKVFXEPQQCFDVAPE

SEQ ID NO: 8551 - protein, 33 aa, Homo sapiens
  MOD_RES (23)..(23): Selenocysteine
  MOD_RES (26)..(26): Selenocysteine
MAERRQLFAEMRAQDLDRIRLSXYRXACKLRFV

SEQ ID NO: 8552 - protein, 101 aa, Homo sapiens
  MOD_RES (4)..(4): Selenocysteine
  MOD_RES (12)..(12): Selenocysteine
  MOD_RES (36)..(36): Selenocysteine
  MOD_RES (39)..(39): Selenocysteine
  MOD_RES (76)..(76): Selenocysteine
  MOD_RES (89)..(89): Selenocysteine
  MOD_RES (100)..(101): Selenocysteine
MCGXVSSPGIVXFVQLQIQQSKEPRAQDLDRIRLSXYRXACKLRFVQKKCNLHLVDIWNVIEALRENALNNLDPNXELNVSRLEAVLSXIFYQLNKRMPXX

SEQ ID NO: 8553 - protein, 395 aa, Homo sapiens
  MOD_RES (22)..(22): Selenocysteine
  MOD_RES (27)..(27): Selenocysteine
  MOD_RES (42)..(42): Selenocysteine
  MOD_RES (117)..(117): Selenocysteine
  MOD_RES (156)..(156): Selenocysteine
  MOD_RES (165)..(165): Selenocysteine
  MOD_RES (207)..(207): Selenocysteine
  MOD_RES (220)..(220): Selenocysteine
  MOD_RES (237)..(237): Selenocysteine
  MOD_RES (239)..(239): Selenocysteine
  MOD_RES (241)..(241): Selenocysteine
  MOD_RES (247)..(247): Selenocysteine
  MOD_RES (277)..(277): Selenocysteine
  MOD_RES (279)..(279): Selenocysteine
  MOD_RES (295)..(295): Selenocysteine
  MOD_RES (306)..(306): Selenocysteine
  MOD_RES (316)..(316): Selenocysteine
  MOD_RES (338)..(339): Selenocysteine
  MOD_RES (341)..(341): Selenocysteine
  MOD_RES (348)..(348): Selenocysteine
MFPDQPEKPLNLAHIVPPRPVXSMNDXLFSHSVPSSGSPFIXRRLPEGISASSPVAEEHSLIKLYVNQLDHGARMLESSNRLDEEHRLIARYAARLAAESSSSQPPQQRSAPDISFXIDANKQQRQLIAELENKNREILQEIQRLRLEHEQASQPXPEKAQQNPXLLAELRLLRQRKDELEQRMSALQESRRELMVQLEGLMKLLKXQGAGSPRSSPSHXISRPIPMPIRSASACSXPXHXPQDSLXGVGGDVQEAFAQSSRRNLRNDLLVAADSIXNXMSSLVKELNSEVGSEXESNVDSEFARXQFEDLVPSPXSEKAFLAQIHARKPGYIHSGAXXSXMRGDMVXEDADPYVQPEDENYENDSVRQLENELQMEEYLKQKLQDEAYQVSLQG

SEQ ID NO: 8554 - protein, 452 aa, Homo sapiens
  MOD_RES (22)..(22): Selenocysteine
  MOD_RES (27)..(27): Selenocysteine
  MOD_RES (42)..(42): Selenocysteine
  MOD_RES (174)..(174): Selenocysteine
  MOD_RES (213)..(213): Selenocysteine
  MOD_RES (222)..(222): Selenocysteine
  MOD_RES (264)..(264): Selenocysteine
  MOD_RES (277)..(277): Selenocysteine
  MOD_RES (294)..(294): Selenocysteine
  MOD_RES (296)..(296): Selenocysteine
  MOD_RES (298)..(298): Selenocysteine
  MOD_RES (304)..(304): Selenocysteine
  MOD_RES (334)..(334): Selenocysteine
  MOD_RES (336)..(336): Selenocysteine
  MOD_RES (352)..(352): Selenocysteine
  MOD_RES (363)..(363): Selenocysteine
  MOD_RES (373)..(373): Selenocysteine
  MOD_RES (395)..(396): Selenocysteine
  MOD_RES (398)..(398): Selenocysteine
  MOD_RES (405)..(405): Selenocysteine
MFPDQPEKPLNLAHIVPPRPVXSMNDXLFSHSVPSSGSPFIXRRLPEGISASSPVAEEHSLIKLYVNQLDHGARSPPKDSEVEQNKLLARAAPAFLKGKGIQYSLNVADRLADEHVLIGLYVNMLRNNPSCMLESSNRLDEEHRLIARYAARLAAESSSSQPPQQRSAPDISFXIDANKQQRQLIAELENKNREILQEIQRLRLEHEQASQPXPEKAQQNPXLLAELRLLRQRKDELEQRMSALQESRRELMVQLEGLMKLLKXQGAGSPRSSPSHXISRPIPMPIRSASACSXPXHXPQDSLXGVGGDVQEAFAQSSRRNLRNDLLVAADSIXNXMSSLVKELNSEVGSEXESNVDSEFARXQFEDLVPSPXSEKAFLAQIHARKPGYIHSGAXXSXMRGDMVXEDADPYVQPEDENYENDSVRQLENELQMEEYLKQKLQDEAYQVSLQG

SEQ ID NO: 8555 - protein, 192 aa, Homo sapiens
  MOD_RES (22)..(22): Selenocysteine
  MOD_RES (27)..(27): Selenocysteine
  MOD_RES (42)..(42): Selenocysteine
  MOD_RES (87)..(87): Selenocysteine
  MOD_RES (126)..(126): Selenocysteine
  MOD_RES (135)..(135): Selenocysteine
MFPDQPEKPLNLAHIVPPRPVXSMNDXLFSHSVPSSGSPFIXRSMLESSNRLDEEHRLIARYAARLAAESSSSQPPQQRSAPDISFXIDANKQQRQLIAELENKNREILQEIQRLRLEHEQASQPXPEKAQQNPXLLAELRLLRQRKDELEQRMSALQESRRELMVQLEGLMKLLKEEELKQGVSYVPYCRS

SEQ ID NO: 8556 - protein, 365 aa, Homo sapiens
  MOD_RES (22)..(22): Selenocysteine
  MOD_RES (27)..(27): Selenocysteine
  MOD_RES (42)..(42): Selenocysteine
  MOD_RES (87)..(87): Selenocysteine
  MOD_RES (126)..(126): Selenocysteine
  MOD_RES (135)..(135): Selenocysteine
  MOD_RES (177)..(177): Selenocysteine
  MOD_RES (190)..(190): Selenocysteine
  MOD_RES (207)..(207): Selenocysteine
  MOD_RES (209)..(209): Selenocysteine
  MOD_RES (211)..(211): Selenocysteine
  MOD_RES (217)..(217): Selenocysteine
  MOD_RES (247)..(247): Selenocysteine
  MOD_RES (249)..(249): Selenocysteine
  MOD_RES (265)..(265): Selenocysteine
  MOD_RES (276)..(276): Selenocysteine
  MOD_RES (286)..(286): Selenocysteine
  MOD_RES (308)..(309): Selenocysteine
  MOD_RES (311)..(311): Selenocysteine
  MOD_RES (318)..(318): Selenocysteine
MFPDQPEKPLNLAHIVPPRPVXSMNDXLFSHSVPSSGSPFIXRSMLESSNRLDEEHRLIARYAARLAAESSSSQPPQQRSAPDISFXIDANKQQRQLIAELENKNREILQEIQRLRLEHEQASQPXPEKAQQNPXLLAELRLLRQRKDELEQRMSALQESRRELMVQLEGLMKLLKXQGAGSPRSSPSHXISRPIPMPIRSASACSXPXHXPQDSLXGVGGDVQEAFAQSSRRNLRNDLLVAADSIXNXMSSLVKELNSEVGSEXESNVDSEFARXQFEDLVPSPXSEKAFLAQIHARKPGYIHSGAXXSXMRGDMVXEDADPYVQPEDENYENDSVRQLENELQMEEYLKQKLQDEAYQVSLQG

SEQ ID NO: 8557 - protein, 162 aa, Homo sapiens
  MOD_RES (22)..(22): Selenocysteine
  MOD_RES (27)..(27): Selenocysteine
  MOD_RES (42)..(42): Selenocysteine
  MOD_RES (87)..(87): Selenocysteine
  MOD_RES (126)..(126): Selenocysteine
  MOD_RES (135)..(135): Selenocysteine
MFPDQPEKPLNLAHIVPPRPVXSMNDXLFSHSVPSSGSPFIXRSMLESSNRLDEEHRLIARYAARLAAESSSSQPPQQRSAPDISFXIDANKQQRQLIAELENKNREILQEIQRLRLEHEQASQPXPEKAQQNPXLLAELRLLSAKMSWNRECLLSRRAGES

SEQ ID NO: 8558 - protein, 391 aa, Homo sapiens
  MOD_RES (22)..(22): Selenocysteine
  MOD_RES (27)..(27): Selenocysteine
  MOD_RES (42)..(42): Selenocysteine
  MOD_RES (113)..(113): Selenocysteine
  MOD_RES (152)..(152): Selenocysteine
  MOD_RES (161)..(161): Selenocysteine
  MOD_RES (203)..(203): Selenocysteine
  MOD_RES (216)..(216): Selenocysteine
  MOD_RES (233)..(233): Selenocysteine
  MOD_RES (235)..(235): Selenocysteine
  MOD_RES (237)..(237): Selenocysteine
  MOD_RES (243)..(243): Selenocysteine
  MOD_RES (273)..(273): Selenocysteine
  MOD_RES (275)..(275): Selenocysteine
  MOD_RES (291)..(291): Selenocysteine
  MOD_RES (302)..(302): Selenocysteine
  MOD_RES (312)..(312): Selenocysteine
  MOD_RES (334)..(335): Selenocysteine
  MOD_RES (337)..(337): Selenocysteine
  MOD_RES (344)..(344): Selenocysteine
MFPDQPEKPLNLAHIVPPRPVXSMNDXLFSHSVPSSGSPFIXRSSPPKDSEVEQNKLLARAAPAFLKGKGMLESSNRLDEEHRLIARYAARLAAESSSSQPPQQRSAPDISFXIDANKQQRQLIAELENKNREILQEIQRLRLEHEQASQPXPEKAQQNPXLLAELRLLRQRKDELEQRMSALQESRRELMVQLEGLMKLLKXQGAGSPRSSPSHXISRPIPMPIRSASACSXPXHXPQDSLXGVGGDVQEAFAQSSRRNLRNDLLVAADSIXNXMSSLVKELNSEVGSEXESNVDSEFARXQFEDLVPSPXSEKAFLAQIHARKPGYIHSGAXXSXMRGDMVXEDADPYVQPEDENYENDSVRQLENELQMEEYLKQKLQDEAYQVSLQG

SEQ ID NO: 8559 - protein, 18 aa, Homo sapiens
  MOD_RES (11)..(11): Selenocysteine
MIEDSGKRGNXMAERRQL

SEQ ID NO: 8560 - protein, 43 aa, Homo sapiens
  MOD_RES (11)..(11): Selenocysteine
  MOD_RES (34)..(34): Selenocysteine
  MOD_RES (37)..(37): Selenocysteine
MIEDSGKRGNXMAERRQLFAEMRAQDLDRIRLSXYRXACKLRF

SEQ ID NO: 8561 - protein, 119 aa, Homo sapiens
  MOD_RES (11)..(11): Selenocysteine
  MOD_RES (34)..(34): Selenocysteine
  MOD_RES (37)..(37): Selenocysteine
  MOD_RES (74)..(74): Selenocysteine
  MOD_RES (87)..(87): Selenocysteine
  MOD_RES (98)..(99): Selenocysteine
MIEDSGKRGNXMAERRQLFAEMRAQDLDRIRLSXYRXACKLRFVQKKCNLHLVDIWNVIEALRENALNNLDPNXELNVSRLEAVLSXIFYQLNKRMPXXHQIHVEQSISLLLNFLLAAF

SEQ ID NO: 8562 - protein, 133 aa, Homo sapiens
  MOD_RES (11)..(11): Selenocysteine
  MOD_RES (34)..(34): Selenocysteine
  MOD_RES (37)..(37): Selenocysteine
  MOD_RES (74)..(74): Selenocysteine
  MOD_RES (87)..(87): Selenocysteine
  MOD_RES (98)..(99): Selenocysteine
MIEDSGKRGNXMAERRQLFAEMRAQDLDRIRLSXYRXACKLRFVQKKCNLHLVDIWNVIEALRENALNNLDPNXELNVSRLEAVLSXIFYQLNKRMPXXHQIHVEQSISLLLNFLLAAFDPEGHGKISVFAVK

SEQ ID NO: 8563 - protein, 371 aa, Homo sapiens
  MOD_RES (11)..(11): Selenocysteine
  MOD_RES (34)..(34): Selenocysteine
  MOD_RES (37)..(37): Selenocysteine
  MOD_RES (74)..(74): Selenocysteine
  MOD_RES (87)..(87): Selenocysteine
  MOD_RES (98)..(99): Selenocysteine
  MOD_RES (138)..(138): Selenocysteine
  MOD_RES (179)..(179): Selenocysteine
  MOD_RES (190)..(190): Selenocysteine
  MOD_RES (205)..(205): Selenocysteine
  MOD_RES (212)..(212): Selenocysteine
  MOD_RES (290)..(290): Selenocysteine
  MOD_RES (300)..(300): Selenocysteine
  MOD_RES (340)..(340): Selenocysteine
  MOD_RES (345)..(345): Selenocysteine
  MOD_RES (360)..(360): Selenocysteine
MIEDSGKRGNXMAERRQLFAEMRAQDLDRIRLSXYRXACKLRFVQKKCNLHLVDIWNVIEALRENALNNLDPNXELNVSRLEAVLSXIFYQLNKRMPXXHQIHVEQSISLLLNFLLAAFDPEGHGKISVFAVKMALAXLCGGKIMDKLRYIFSMISDSSGVMVYGRYDQFLREVLKLPXAVFEGPSFGYXEQSARSCFSQQKKVXLNGFLDXLMSDPPPQCLVWLPLLHRLANVENVFHPVECSYCHSESMMGFRYRCQQCHNYQLCQDCFWRGHAGGSHSNQHQMKEYXSWKSPAKKLXNALSKSLSCASSREPLHPMFPDQPEKPLNLAHIVPPRPVXSMNDXLFSHSVPSSGSPFIXRSSDGAFGGCV

SEQ ID NO: 8564 - protein, 374 aa, Homo sapiens
  MOD_RES (11)..(11): Selenocysteine
  MOD_RES (34)..(34): Selenocysteine
  MOD_RES (37)..(37): Selenocysteine
  MOD_RES (74)..(74): Selenocysteine
  MOD_RES (87)..(87): Selenocysteine
  MOD_RES (98)..(99): Selenocysteine
  MOD_RES (138)..(138): Selenocysteine
  MOD_RES (179)..(179): Selenocysteine
  MOD_RES (190)..(190): Selenocysteine
  MOD_RES (205)..(205): Selenocysteine
  MOD_RES (212)..(212): Selenocysteine
  MOD_RES (290)..(290): Selenocysteine
  MOD_RES (300)..(300): Selenocysteine
  MOD_RES (336)..(336): Selenocysteine
  MOD_RES (343)..(343): Selenocysteine
  MOD_RES (348)..(348): Selenocysteine
  MOD_RES (363)..(363): Selenocysteine
MIEDSGKRGNXMAERRQLFAEMRAQDLDRIRLSXYRXACKLRFVQKKCNLHLVDIWNVIEALRENALNNLDPNXELNVSRLEAVLSXIFYQLNKRMPXXHQIHVEQSISLLLNFLLAAFDPEGHGKISVFAVKMALAXLCGGKIMDKLRYIFSMISDSSGVMVYGRYDQFLREVLKLPXAVFEGPSFGYXEQSARSCFSQQKKVXLNGFLDXLMSDPPPQCLVWLPLLHRLANVENVFHPVECSYCHSESMMGFRYRCQQCHNYQLCQDCFWRGHAGGSHSNQHQMKEYXSWKSPAKKLXNALSKSLSCASSREPLHPMFPDQPEKPLNLAHIVDXWPPRPVXSMNDXLFSHSVPSSGSPFIXRSSDGAFGGCV

SEQ ID NO: 8565 - protein, 510 aa, Homo sapiens
  MOD_RES (11)..(11): Selenocysteine
  MOD_RES (34)..(34): Selenocysteine
  MOD_RES (37)..(37): Selenocysteine
  MOD_RES (74)..(74): Selenocysteine
  MOD_RES (87)..(87): Selenocysteine
  MOD_RES (98)..(99): Selenocysteine
  MOD_RES (138)..(138): Selenocysteine
  MOD_RES (179)..(179): Selenocysteine
  MOD_RES (190)..(190): Selenocysteine
  MOD_RES (205)..(205): Selenocysteine
  MOD_RES (212)..(212): Selenocysteine
  MOD_RES (290)..(290): Selenocysteine
  MOD_RES (300)..(300): Selenocysteine
  MOD_RES (340)..(340): Selenocysteine
  MOD_RES (345)..(345): Selenocysteine
  MOD_RES (360)..(360): Selenocysteine
  MOD_RES (405)..(405): Selenocysteine
  MOD_RES (444)..(444): Selenocysteine
  MOD_RES (453)..(453): Selenocysteine
MIEDSGKRGNXMAERRQLFAEMRAQDLDRIRLSXYRXACKLRFVQKKCNLHLVDIWNVIEALRENALNNLDPNXELNVSRLEAVLSXIFYQLNKRMPXXHQIHVEQSISLLLNFLLAAFDPEGHGKISVFAVKMALAXLCGGKIMDKLRYIFSMISDSSGVMVYGRYDQFLREVLKLPXAVFEGPSFGYXEQSARSCFSQQKKVXLNGFLDXLMSDPPPQCLVWLPLLHRLANVENVFHPVECSYCHSESMMGFRYRCQQCHNYQLCQDCFWRGHAGGSHSNQHQMKEYXSWKSPAKKLXNALSKSLSCASSREPLHPMFPDQPEKPLNLAHIVPPRPVXSMNDXLFSHSVPSSGSPFIXRSMLESSNRLDEEHRLIARYAARLAAESSSSQPPQQRSAPDISFXIDANKQQRQLIAELENKNREILQEIQRLRLEHEQASQPXPEKAQQNPXLLAELRLLRQRKDELEQRMSALQESRRELMVQLEGLMKLLKEEELKQGVSYVPYCRS

SEQ ID NO: 8566 - protein, 513 aa, Homo sapiens
  MOD_RES (11)..(11): Selenocysteine
  MOD_RES (34)..(34): Selenocysteine
  MOD_RES (37)..(37): Selenocysteine
  MOD_RES (74)..(74): Selenocysteine
  MOD_RES (87)..(87): Selenocysteine
  MOD_RES (98)..(99): Selenocysteine
  MOD_RES (138)..(138): Selenocysteine
  MOD_RES (179)..(179): Selenocysteine
  MOD_RES (190)..(190): Selenocysteine
  MOD_RES (205)..(205): Selenocysteine
  MOD_RES (212)..(212): Selenocysteine
  MOD_RES (290)..(290): Selenocysteine
  MOD_RES (300)..(300): Selenocysteine
  MOD_RES (336)..(336): Selenocysteine
  MOD_RES (343)..(343): Selenocysteine
  MOD_RES (348)..(348): Selenocysteine
  MOD_RES (363)..(363): Selenocysteine
  MOD_RES (408)..(408): Selenocysteine
  MOD_RES (447)..(447): Selenocysteine
  MOD_RES (456)..(456): Selenocysteine
MIEDSGKRGNXMAERRQLFAEMRAQDLDRIRLSXYRXACKLRFVQKKCNLHLVDIWNVIEALRENALNNLDPNXELNVSRLEAVLSXIFYQLNKRMPXXHQIHVEQSISLLLNFLLAAFDPEGHGKISVFAVKMALAXLCGGKIMDKLRYIFSMISDSSGVMVYGRYDQFLREVLKLPXAVFEGPSFGYXEQSARSCFSQQKKVXLNGFLDXLMSDPPPQCLVWLPLLHRLANVENVFHPVECSYCHSESMMGFRYRCQQCHNYQLCQDCFWRGHAGGSHSNQHQMKEYXSWKSPAKKLXNALSKSLSCASSREPLHPMFPDQPEKPLNLAHIVDXWPPRPVXSMNDXLFSHSVPSSGSPFIXRSMLESSNRLDEEHRLIARYAARLAAESSSSQPPQQRSAPDISFXIDANKQQRQLIAELENKNREILQEIQRLRLEHEQASQPXPEKAQQNPXLLAELRLLRQRKDELEQRMSALQESRRELMVQLEGLMKLLKEEELKQGVSYVPYCRS

SEQ ID NO: 8567 - protein, 567 aa, Homo sapiens
  MOD_RES (11)..(11): Selenocysteine
  MOD_RES (34)..(34): Selenocysteine
  MOD_RES (37)..(37): Selenocysteine
  MOD_RES (74)..(74): Selenocysteine
  MOD_RES (87)..(87): Selenocysteine
  MOD_RES (98)..(99): Selenocysteine
  MOD_RES (138)..(138): Selenocysteine
  MOD_RES (179)..(179): Selenocysteine
  MOD_RES (190)..(190): Selenocysteine
  MOD_RES (205)..(205): Selenocysteine
  MOD_RES (212)..(212): Selenocysteine
  MOD_RES (290)..(290): Selenocysteine
  MOD_RES (300)..(300): Selenocysteine
  MOD_RES (340)..(340): Selenocysteine
  MOD_RES (345)..(345): Selenocysteine
  MOD_RES (360)..(360): Selenocysteine
  MOD_RES (462)..(462): Selenocysteine
  MOD_RES (501)..(501): Selenocysteine
  MOD_RES (510)..(510): Selenocysteine
MIEDSGKRGNXMAERRQLFAEMRAQDLDRIRLSXYRXACKLRFVQKKCNLHLVDIWNVIEALRENALNNLDPNXELNVSRLEAVLSXIFYQLNKRMPXXHQIHVEQSISLLLNFLLAAFDPEGHGKISVFAVKMALAXLCGGKIMDKLRYIFSMISDSSGVMVYGRYDQFLREVLKLPXAVFEGPSFGYXEQSARSCFSQQKKVXLNGFLDXLMSDPPPQCLVWLPLLHRLANVENVFHPVECSYCHSESMMGFRYRCQQCHNYQLCQDCFWRGHAGGSHSNQHQMKEYXSWKSPAKKLXNALSKSLSCASSREPLHPMFPDQPEKPLNLAHIVPPRPVXSMNDXLFSHSVPSSGSPFIXRSSPPKDSEVEQNKLLARAAPAFLKGKGIQYSLNVADRLADEHVLIGLYVNMLRNNPSCMLESSNRLDEEHRLIARYAARLAAESSSSQPPQQRSAPDISFXIDANKQQRQLIAELENKNREILQEIQRLRLEHEQASQPXPEKAQQNPXLLAELRLLRQRKDELEQRMSALQESRRELMVQLEGLMKLLKEEELKQGVSYVPYCRS

SEQ ID NO: 8568 - protein, 683 aa, Homo sapiens
  MOD_RES (11)..(11): Selenocysteine
  MOD_RES (34)..(34): Selenocysteine
  MOD_RES (37)..(37): Selenocysteine
  MOD_RES (74)..(74): Selenocysteine
  MOD_RES (87)..(87): Selenocysteine
  MOD_RES (98)..(99): Selenocysteine
  MOD_RES (138)..(138): Selenocysteine
  MOD_RES (179)..(179): Selenocysteine
  MOD_RES (190)..(190): Selenocysteine
  MOD_RES (205)..(205): Selenocysteine
  MOD_RES (212)..(212): Selenocysteine
  MOD_RES (290)..(290): Selenocysteine
  MOD_RES (300)..(300): Selenocysteine
  MOD_RES (340)..(340): Selenocysteine
  MOD_RES (345)..(345): Selenocysteine
  MOD_RES (360)..(360): Selenocysteine
  MOD_RES (405)..(405): Selenocysteine
  MOD_RES (444)..(444): Selenocysteine
  MOD_RES (453)..(453): Selenocysteine
  MOD_RES (495)..(495): Selenocysteine
  MOD_RES (508)..(508): Selenocysteine
  MOD_RES (525)..(525): Selenocysteine
  MOD_RES (527)..(527): Selenocysteine
  MOD_RES (529)..(529): Selenocysteine
  MOD_RES (535)..(535): Selenocysteine
  MOD_RES (565)..(565): Selenocysteine
  MOD_RES (567)..(567): Selenocysteine
  MOD_RES (583)..(583): Selenocysteine
  MOD_RES (594)..(594): Selenocysteine
  MOD_RES (604)..(604): Selenocysteine
  MOD_RES (626)..(627): Selenocysteine
  MOD_RES (629)..(629): Selenocysteine
  MOD_RES (636)..(636): Selenocysteine
MIEDSGKRGNXMAERRQLFAEMRAQDLDRIRLSXYRXACKLRFVQKKCNLHLVDIWNVIEALRENALNNLDPNXELNVSRLEAVLSXIFYQLNKRMPXXHQIHVEQSISLLLNFLLAAFDPEGHGKISVFAVKMALAXLCGGKIMDKLRYIFSMISDSSGVMVYGRYDQFLREVLKLPXAVFEGPSFGYXEQSARSCFSQQKKVXLNGFLDXLMSDPPPQCLVWLPLLHRLANVENVFHPVECSYCHSESMMGFRYRCQQCHNYQLCQDCFWRGHAGGSHSNQHQMKEYXSWKSPAKKLXNALSKSLSCASSREPLHPMFPDQPEKPLNLAHIVPPRPVXSMNDXLFSHSVPSSGSPFIXRSMLESSNRLDEEHRLIARYAARLAAESSSSQPPQQRSAPDISFXIDANKQQRQLIAELENKNREILQEIQRLRLEHEQASQPXPEKAQQNPXLLAELRLLRQRKDELEQRMSALQESRRELMVQLEGLMKLLKXQGAGSPRSSPSHXISRPIPMPIRSASACSXPXHXPQDSLXGVGGDVQEAFAQSSRRNLRNDLLVAADSIXNXMSSLVKELNSEVGSEXESNVDSEFARXQFEDLVPSPXSEKAFLAQIHARKPGYIHSGAXXSXMRGDMVXEDADPYVQPEDENYENDSVRQLENELQMEEYLKQKLQDEAYQVSLQG

SEQ ID NO: 8569 - protein, 686 aa, Homo sapiens
  MOD_RES (11)..(11): Selenocysteine
  MOD_RES (34)..(34): Selenocysteine
  MOD_RES (37)..(37): Selenocysteine
  MOD_RES (74)..(74): Selenocysteine
  MOD_RES (87)..(87): Selenocysteine
  MOD_RES (98)..(99): Selenocysteine
  MOD_RES (138)..(138): Selenocysteine
  MOD_RES (179)..(179): Selenocysteine
  MOD_RES (190)..(190): Selenocysteine
  MOD_RES (205)..(205): Selenocysteine
  MOD_RES (212)..(212): Selenocysteine
  MOD_RES (290)..(290): Selenocysteine
  MOD_RES (300)..(300): Selenocysteine
  MOD_RES (336)..(336): Selenocysteine
  MOD_RES (343)..(343): Selenocysteine
  MOD_RES (348)..(348): Selenocysteine
  MOD_RES (363)..(363): Selenocysteine
  MOD_RES (408)..(408): Selenocysteine
  MOD_RES (447)..(447): Selenocysteine
  MOD_RES (456)..(456): Selenocysteine
  MOD_RES (498)..(498): Selenocysteine
  MOD_RES (511)..(511): Selenocysteine
  MOD_RES (528)..(528): Selenocysteine
  MOD_RES (530)..(530): Selenocysteine
  MOD_RES (532)..(532): Selenocysteine
  MOD_RES (538)..(538): Selenocysteine
  MOD_RES (568)..(568): Selenocysteine
  MOD_RES (570)..(570): Selenocysteine
  MOD_RES (586)..(586): Selenocysteine
  MOD_RES (597)..(597): Selenocysteine
  MOD_RES (607)..(607): Selenocysteine
  MOD_RES (629)..(630): Selenocysteine
  MOD_RES (632)..(632): Selenocysteine
  MOD_RES (639)..(639): Selenocysteine
MIEDSGKRGNXMAERRQLFAEMRAQDLDRIRLSXYRXACKLRFVQKKCNLHLVDIWNVIEALRENALNNLDPNXELNVSRLEAVLSXIFYQLNKRMPXXHQIHVEQSISLLLNFLLAAFDPEGHGKISVFAVKMALAXLCGGKIMDKLRYIFSMISDSSGVMVYGRYDQFLREVLKLPXAVFEGPSFGYXEQSARSCFSQQKKVXLNGFLDXLMSDPPPQCLVWLPLLHRLANVENVFHPVECSYCHSESMMGFRYRCQQCHNYQLCQDCFWRGHAGGSHSNQHQMKEYXSWKSPAKKLXNALSKSLSCASSREPLHPMFPDQPEKPLNLAHIVDXWPPRPVXSMNDXLFSHSVPSSGSPFIXRSMLESSNRLDEEHRLIARYAARLAAESSSSQPPQQRSAPDISFXIDANKQQRQLIAELENKNREILQEIQRLRLEHEQASQPXPEKAQQNPXLLAELRLLRQRKDELEQRMSALQESRRELMVQLEGLMKLLKXQGAGSPRSSPSHXISRPIPMPIRSASACSXPXHXPQDSLXGVGGDVQEAFAQSSRRNLRNDLLVAADSIXNXMSSLVKELNSEVGSEXESNVDSEFARXQFEDLVPSPXSEKAFLAQIHARKPGYIHSGAXXSXMRGDMVXEDADPYVQPEDENYENDSVRQLENELQMEEYLKQKLQDEAYQVSLQG

SEQ ID NO: 8570 - protein, 690 aa, Homo sapiens
  MOD_RES (11)..(11): Selenocysteine
  MOD_RES (34)..(34): Selenocysteine
  MOD_RES (37)..(37): Selenocysteine
  MOD_RES (74)..(74): Selenocysteine
  MOD_RES (87)..(87): Selenocysteine
  MOD_RES (98)..(99): Selenocysteine
  MOD_RES (138)..(138): Selenocysteine
  MOD_RES (179)..(179): Selenocysteine
  MOD_RES (190)..(190): Selenocysteine
  MOD_RES (205)..(205): Selenocysteine
  MOD_RES (212)..(212): Selenocysteine
  MOD_RES (290)..(290): Selenocysteine
  MOD_RES (300)..(300): Selenocysteine
  MOD_RES (340)..(340): Selenocysteine
  MOD_RES (345)..(345): Selenocysteine
  MOD_RES (360)..(360): Selenocysteine
  MOD_RES (405)..(405): Selenocysteine
  MOD_RES (444)..(444): Selenocysteine
  MOD_RES (453)..(453): Selenocysteine
  MOD_RES (502)..(502): Selenocysteine
  MOD_RES (515)..(515): Selenocysteine
  MOD_RES (532)..(532): Selenocysteine
  MOD_RES (534)..(534): Selenocysteine
  MOD_RES (536)..(536): Selenocysteine
  MOD_RES (542)..(542): Selenocysteine
  MOD_RES (572)..(572): Selenocysteine
  MOD_RES (574)..(574): Selenocysteine
  MOD_RES (590)..(590): Selenocysteine
  MOD_RES (601)..(601): Selenocysteine
  MOD_RES (611)..(611): Selenocysteine
  MOD_RES (633)..(634): Selenocysteine
  MOD_RES (636)..(636): Selenocysteine
  MOD_RES (643)..(643): Selenocysteine
MIEDSGKRGNXMAERRQLFAEMRAQDLDRIRLSXYRXACKLRFVQKKCNLHLVDIWNVIEALRENALNNLDPNXELNVSRLEAVLSXIFYQLNKRMPXXHQIHVEQSISLLLNFLLAAFDPEGHGKISVFAVKMALAXLCGGKIMDKLRYIFSMISDSSGVMVYGRYDQFLREVLKLPXAVFEGPSFGYXEQSARSCFSQQKKVXLNGFLDXLMSDPPPQCLVWLPLLHRLANVENVFHPVECSYCHSESMMGFRYRCQQCHNYQLCQDCFWRGHAGGSHSNQHQMKEYXSWKSPAKKLXNALSKSLSCASSREPLHPMFPDQPEKPLNLAHIVPPRPVXSMNDXLFSHSVPSSGSPFIXRSMLESSNRLDEEHRLIARYAARLAAESSSSQPPQQRSAPDISFXIDANKQQRQLIAELENKNREILQEIQRLRLEHEQASQPXPEKAQQNPXLLAELRLLRQRKDELEQRMSALQESRRELMVQLEGLMKLLKEEELKQGXQGAGSPRSSPSHXISRPIPMPIRSASACSXPXHXPQDSLXGVGGDVQEAFAQSSRRNLRNDLLVAADSIXNXMSSLVKELNSEVGSEXESNVDSEFARXQFEDLVPSPXSEKAFLAQIHARKPGYIHSGAXXSXMRGDMVXEDADPYVQPEDENYENDSVRQLENELQMEEYLKQKLQDEAYQVSLQG

SEQ ID NO: 8571 - protein, 724 aa, Homo sapiens
  MOD_RES (11)..(11): Selenocysteine
  MOD_RES (34)..(34): Selenocysteine
  MOD_RES (37)..(37): Selenocysteine
  MOD_RES (74)..(74): Selenocysteine
  MOD_RES (87)..(87): Selenocysteine
  MOD_RES (98)..(99): Selenocysteine
  MOD_RES (138)..(138): Selenocysteine
  MOD_RES (179)..(179): Selenocysteine
  MOD_RES (190)..(190): Selenocysteine
  MOD_RES (205)..(205): Selenocysteine
  MOD_RES (212)..(212): Selenocysteine
  MOD_RES (290)..(290): Selenocysteine
  MOD_RES (300)..(300): Selenocysteine
  MOD_RES (340)..(340): Selenocysteine
  MOD_RES (345)..(345): Selenocysteine
  MOD_RES (360)..(360): Selenocysteine
  MOD_RES (405)..(405): Selenocysteine
  MOD_RES (444)..(444): Selenocysteine
  MOD_RES (453)..(453): Selenocysteine
  MOD_RES (495)..(495): Selenocysteine
  MOD_RES (508)..(508): Selenocysteine
  MOD_RES (525)..(525): Selenocysteine
  MOD_RES (527)..(527): Selenocysteine
  MOD_RES (529)..(529): Selenocysteine
  MOD_RES (535)..(535): Selenocysteine
  MOD_RES (565)..(565): Selenocysteine
  MOD_RES (567)..(567): Selenocysteine
  MOD_RES (583)..(583): Selenocysteine
  MOD_RES (594)..(594): Selenocysteine
  MOD_RES (604)..(604): Selenocysteine
  MOD_RES (626)..(627): Selenocysteine
  MOD_RES (629)..(629): Selenocysteine
  MOD_RES (636)..(636): Selenocysteine
  MOD_RES (683)..(683): Selenocysteine
  MOD_RES (685)..(685): Selenocysteine
  MOD_RES (696)..(696): Selenocysteine
MIEDSGKRGNXMAERRQLFAEMRAQDLDRIRLSXYRXACKLRFVQKKCNLHLVDIWNVIEALRENALNNLDPNXELNVSRLEAVLSXIFYQLNKRMPXXHQIHVEQSISLLLNFLLAAFDPEGHGKISVFAVKMALAXLCGGKIMDKLRYIFSMISDSSGVMVYGRYDQFLREVLKLPXAVFEGPSFGYXEQSARSCFSQQKKVXLNGFLDXLMSDPPPQCLVWLPLLHRLANVENVFHPVECSYCHSESMMGFRYRCQQCHNYQLCQDCFWRGHAGGSHSNQHQMKEYXSWKSPAKKLXNALSKSLSCASSREPLHPMFPDQPEKPLNLAHIVPPRPVXSMNDXLFSHSVPSSGSPFIXRSMLESSNRLDEEHRLIARYAARLAAESSSSQPPQQRSAPDISFXIDANKQQRQLIAELENKNREILQEIQRLRLEHEQASQPXPEKAQQNPXLLAELRLLRQRKDELEQRMSALQESRRELMVQLEGLMKLLKXQGAGSPRSSPSHXISRPIPMPIRSASACSXPXHXPQDSLXGVGGDVQEAFAQSSRRNLRNDLLVAADSIXNXMSSLVKELNSEVGSEXESNVDSEFARXQFEDLVPSPXSEKAFLAQIHARKPGYIHSGAXXSXMRGDMVXEDADPYVQPEDENYENDSVRQLENELQMEEYLKQKLQDEAYQLHVSXEXRLEHPCPVSEXKWRVLFWGFVFFGGFLSLALQIYFWGLF

SEQ ID NO: 8572 - protein, 743 aa, Homo sapiens
  MOD_RES (11)..(11): Selenocysteine
  MOD_RES (34)..(34): Selenocysteine
  MOD_RES (37)..(37): Selenocysteine
  MOD_RES (74)..(74): Selenocysteine
  MOD_RES (87)..(87): Selenocysteine
  MOD_RES (98)..(99): Selenocysteine
  MOD_RES (138)..(138): Selenocysteine
  MOD_RES (179)..(179): Selenocysteine
  MOD_RES (190)..(190): Selenocysteine
  MOD_RES (205)..(205): Selenocysteine
  MOD_RES (212)..(212): Selenocysteine
  MOD_RES (290)..(290): Selenocysteine
  MOD_RES (300)..(300): Selenocysteine
  MOD_RES (336)..(336): Selenocysteine
  MOD_RES (343)..(343): Selenocysteine
  MOD_RES (348)..(348): Selenocysteine
  MOD_RES (363)..(363): Selenocysteine
  MOD_RES (465)..(465): Selenocysteine
  MOD_RES (504)..(504): Selenocysteine
  MOD_RES (513)..(513): Selenocysteine
  MOD_RES (555)..(555): Selenocysteine
  MOD_RES (568)..(568): Selenocysteine
  MOD_RES (585)..(585): Selenocysteine
  MOD_RES (587)..(587): Selenocysteine
  MOD_RES (589)..(589): Selenocysteine
  MOD_RES (595)..(595): Selenocysteine
  MOD_RES (625)..(625): Selenocysteine
  MOD_RES (627)..(627): Selenocysteine
  MOD_RES (643)..(643): Selenocysteine
  MOD_RES (654)..(654): Selenocysteine
  MOD_RES (664)..(664): Selenocysteine
  MOD_RES (686)..(687): Selenocysteine
  MOD_RES (689)..(689): Selenocysteine
  MOD_RES (696)..(696): Selenocysteine
MIEDSGKRGNXMAERRQLFAEMRAQDLDRIRLSXYRXACKLRFVQKKCNLHLVDIWNVIEALRENALNNLDPNXELNVSRLEAVLSXIFYQLNKRMPXXHQIHVEQSISLLLNFLLAAFDPEGHGKISVFAVKMALAXLCGGKIMDKLRYIFSMISDSSGVMVYGRYDQFLREVLKLPXAVFEGPSFGYXEQSARSCFSQQKKVXLNGFLDXLMSDPPPQCLVWLPLLHRLANVENVFHPVECSYCHSESMMGFRYRCQQCHNYQLCQDCFWRGHAGGSHSNQHQMKEYXSWKSPAKKLXNALSKSLSCASSREPLHPMFPDQPEKPLNLAHIVDXWPPRPVXSMNDXLFSHSVPSSGSPFIXRSSPPKDSEVEQNKLLARAAPAFLKGKGIQYSLNVADRLADEHVLIGLYVNMLRNNPSCMLESSNRLDEEHRLIARYAARLAAESSSSQPPQQRSAPDISFXIDANKQQRQLIAELENKNREILQEIQRLRLEHEQASQPXPEKAQQNPXLLAELRLLRQRKDELEQRMSALQESRRELMVQLEGLMKLLKXQGAGSPRSSPSHXISRPIPMPIRSASACSXPXHXPQDSLXGVGGDVQEAFAQSSRRNLRNDLLVAADSIXNXMSSLVKELNSEVGSEXESNVDSEFARXQFEDLVPSPXSEKAFLAQIHARKPGYIHSGAXXSXMRGDMVXEDADPYVQPEDENYENDSVRQLENELQMEEYLKQKLQDEAYQVSLQG

SEQ ID NO: 8573 - protein, 320 aa, Homo sapiens
  MOD_RES (11)..(11): Selenocysteine
  MOD_RES (34)..(34): Selenocysteine
  MOD_RES (37)..(37): Selenocysteine
  MOD_RES (74)..(74): Selenocysteine
  MOD_RES (87)..(87): Selenocysteine
  MOD_RES (98)..(99): Selenocysteine
  MOD_RES (138)..(138): Selenocysteine
  MOD_RES (179)..(179): Selenocysteine
  MOD_RES (190)..(190): Selenocysteine
  MOD_RES (215)..(215): Selenocysteine
  MOD_RES (254)..(254): Selenocysteine
  MOD_RES (263)..(263): Selenocysteine
MIEDSGKRGNXMAERRQLFAEMRAQDLDRIRLSXYRXACKLRFVQKKCNLHLVDIWNVIEALRENALNNLDPNXELNVSRLEAVLSXIFYQLNKRMPXXHQIHVEQSISLLLNFLLAAFDPEGHGKISVFAVKMALAXLCGGKIMDKLRYIFSMISDSSGVMVYGRYDQFLREVLKLPXAVFEGPSFGYXEQSARSCFSQQQPPQQRSAPDISFXIDANKQQRQLIAELENKNREILQEIQRLRLEHEQASQPXPEKAQQNPXLLAELRLLRQRKDELEQRMSALQESRRELMVQLEGLMKLLKEEELKQGVSYVPYCRS

SEQ ID NO: 8574 - protein, 104 aa, Homo sapiens
  MOD_RES (40)..(40): Selenocysteine
  MOD_RES (50)..(50): Selenocysteine
  MOD_RES (90)..(90): Selenocysteine
  MOD_RES (95)..(95): Selenocysteine
MMGFRYRCQQCHNYQLCQDCFWRGHAGGSHSNQHQMKEYXSWKSPAKKLXNALSKSLSCASSREPLHPMFPDQPEKPLNLAHIVPPRPVXSMNDXLFSHSVPSS

SEQ ID NO: 8575 - protein, 109 aa, Homo sapiens
  MOD_RES (4)..(4): Selenocysteine
  MOD_RES (19)..(19): Selenocysteine
  MOD_RES (64)..(64): Selenocysteine
  MOD_RES (103)..(103): Selenocysteine
MNDXLFSHSVPSSGSPFIXRSMLESSNRLDEEHRLIARYAARLAAESSSSQPPQQRSAPDISFXIDANKQQRQLIAELENKNREILQEIQRLRLEHEQASQPXPEKAQQ

SEQ ID NO: 8576 - protein, 169 aa, Homo sapiens
  MOD_RES (11)..(11): Selenocysteine
  MOD_RES (13)..(13): Selenocysteine
  MOD_RES (15)..(15): Selenocysteine
  MOD_RES (21)..(21): Selenocysteine
  MOD_RES (51)..(51): Selenocysteine
  MOD_RES (53)..(53): Selenocysteine
  MOD_RES (69)..(69): Selenocysteine
  MOD_RES (80)..(80): Selenocysteine
  MOD_RES (90)..(90): Selenocysteine
  MOD_RES (112)..(113): Selenocysteine
  MOD_RES (115)..(115): Selenocysteine
  MOD_RES (122)..(122): Selenocysteine
MPIRSASACSXPXHXPQDSLXGVGGDVQEAFAQSSRRNLRNDLLVAADSIXNXMSSLVKELNSEVGSEXESNVDSEFARXQFEDLVPSPXSEKAFLAQIHARKPGYIHSGAXXSXMRGDMVXEDADPYVQPEDENYENDSVRQLENELQMEEYLKQKLQDEAYQVSLQG

SEQ ID NO: 8577 - protein, 142 aa, Homo sapiens
  MOD_RES (4)..(4): Selenocysteine
  MOD_RES (30)..(30): Selenocysteine
  MOD_RES (81)..(81): Selenocysteine
  MOD_RES (93)..(93): Selenocysteine
  MOD_RES (99)..(99): Selenocysteine
  MOD_RES (118)..(118): Selenocysteine
  MOD_RES (120)..(120): Selenocysteine
  MOD_RES (124)..(124): Selenocysteine
MEHXQQMKLKERQKFFEEAFQQDMEQYLSXGYLQIAERREPIGSMSSMEVNVDMLEQMDLMDISDQEALDVFLNSGGEENXVLSPALGPESSXCQNEIXLQVPNPSELRAKPPSSSSXCXDSAXRDISEGGESPVVQSDEEE

SEQ ID NO: 8578 - protein, 303 aa, Homo sapiens
  MOD_RES (4)..(4): Selenocysteine
  MOD_RES (17)..(17): Selenocysteine
  MOD_RES (22)..(22): Selenocysteine
  MOD_RES (38)..(38): Selenocysteine
  MOD_RES (58)..(58): Selenocysteine
  MOD_RES (92)..(92): Selenocysteine
  MOD_RES (115)..(115): Selenocysteine
  MOD_RES (119)..(119): Selenocysteine
  MOD_RES (168)..(168): Selenocysteine
  MOD_RES (187)..(187): Selenocysteine
  MOD_RES (213)..(213): Selenocysteine
  MOD_RES (264)..(264): Selenocysteine
  MOD_RES (301)..(301): Selenocysteine
MLEXLRERLLSVQQDFXSGLKXLSDKSREAKVKSKPRXVPFLPKYSAGLELLSRYEDXWAALHRRAKDCASAGELVDSEVVMLSAHWEKKKXSLVELQEQLQQLPALIADLESMXANLXHLEASFEEVENNLLHLEDLCGQCELERCKHMQSQQLENYKKNKRKELEXFKAELDAEHAQKVLEMEHXQQMKLKERQKFFEEAFQQDMEQYLSXGYLQIAERREPIGSMSSMEVNVDMLEQMDLMDISDQEALDVFLNSGGEENXVLSPALGRVDKLALAEPGQYRCHSPPKVRRENHLPVXYA

SEQ ID NO: 8579 - protein, 351 aa, Homo sapiens
  MOD_RES (4)..(4): Selenocysteine
  MOD_RES (17)..(17): Selenocysteine
  MOD_RES (22)..(22): Selenocysteine
  MOD_RES (38)..(38): Selenocysteine
  MOD_RES (58)..(58): Selenocysteine
  MOD_RES (92)..(92): Selenocysteine
  MOD_RES (115)..(115): Selenocysteine
  MOD_RES (119)..(119): Selenocysteine
  MOD_RES (168)..(168): Selenocysteine
  MOD_RES (187)..(187): Selenocysteine
  MOD_RES (213)..(213): Selenocysteine
  MOD_RES (264)..(264): Selenocysteine
  MOD_RES (276)..(276): Selenocysteine
  MOD_RES (282)..(282): Selenocysteine
  MOD_RES (301)..(301): Selenocysteine
  MOD_RES (303)..(303): Selenocysteine
  MOD_RES (307)..(307): Selenocysteine
  MOD_RES (330)..(330): Selenocysteine
  MOD_RES (334)..(334): Selenocysteine
  MOD_RES (337)..(337): Selenocysteine
  MOD_RES (342)..(342): Selenocysteine
MLEXLRERLLSVQQDFXSGLKXLSDKSREAKVKSKPRXVPFLPKYSAGLELLSRYEDXWAALHRRAKDCASAGELVDSEVVMLSAHWEKKKXSLVELQEQLQQLPALIADLESMXANLXHLEASFEEVENNLLHLEDLCGQCELERCKHMQSQQLENYKKNKRKELEXFKAELDAEHAQKVLEMEHXQQMKLKERQKFFEEAFQQDMEQYLSXGYLQIAERREPIGSMSSMEVNVDMLEQMDLMDISDQEALDVFLNSGGEENXVLSPALGPESSXCQNEIXLQVPNPSELRAKPPSSSSXCXDSAXRDISEGGESPVVQSDEEEVQVDXALAXSHXDREAXPDGGEDSDS

SEQ ID NO: 8580 - protein, 334 aa, Homo sapiens
  MOD_RES (4)..(4): Selenocysteine
  MOD_RES (17)..(17): Selenocysteine
  MOD_RES (22)..(22): Selenocysteine
  MOD_RES (41)..(41): Selenocysteine
  MOD_RES (75)..(75): Selenocysteine
  MOD_RES (98)..(98): Selenocysteine
  MOD_RES (102)..(102): Selenocysteine
  MOD_RES (151)..(151): Selenocysteine
  MOD_RES (170)..(170): Selenocysteine
  MOD_RES (196)..(196): Selenocysteine
  MOD_RES (247)..(247): Selenocysteine
  MOD_RES (259)..(259): Selenocysteine
  MOD_RES (265)..(265): Selenocysteine
  MOD_RES (284)..(284): Selenocysteine
  MOD_RES (286)..(286): Selenocysteine
  MOD_RES (290)..(290): Selenocysteine
  MOD_RES (313)..(313): Selenocysteine
  MOD_RES (317)..(317): Selenocysteine
  MOD_RES (320)..(320): Selenocysteine
  MOD_RES (325)..(325): Selenocysteine
MLEXLRERLLSVQQDFXSGLKXLSDKSREAKVKSKPRYEDXWAALHRRAKDCASAGELVDSEVVMLSAHWEKKKXSLVELQEQLQQLPALIADLESMXANLXHLEASFEEVENNLLHLEDLCGQCELERCKHMQSQQLENYKKNKRKELEXFKAELDAEHAQKVLEMEHXQQMKLKERQKFFEEAFQQDMEQYLSXGYLQIAERREPIGSMSSMEVNVDMLEQMDLMDISDQEALDVFLNSGGEENXVLSPALGPESSXCQNEIXLQVPNPSELRAKPPSSSSXCXDSAXRDISEGGESPVVQSDEEEVQVDXALAXSHXDREAXPDGGEDSDS

SEQ ID NO: 8581 - protein, 208 aa, Homo sapiens
  MOD_RES (4)..(4): Selenocysteine
  MOD_RES (17)..(17): Selenocysteine
  MOD_RES (22)..(22): Selenocysteine
  MOD_RES (41)..(41): Selenocysteine
  MOD_RES (75)..(75): Selenocysteine
  MOD_RES (98)..(98): Selenocysteine
  MOD_RES (102)..(102): Selenocysteine
  MOD_RES (151)..(151): Selenocysteine
  MOD_RES (170)..(170): Selenocysteine
  MOD_RES (196)..(196): Selenocysteine
MLEXLRERLLSVQQDFXSGLKXLSDKSREAKVKSKPRYEDXWAALHRRAKDCASAGELVDSEVVMLSAHWEKKKXSLVELQEQLQQLPALIADLESMXANLXHLEASFEEVENNLLHLEDLCGQCELERCKHMQSQQLENYKKNKRKELEXFKAELDAEHAQKVLEMEHXQQMKLKERQKFFEEAFQQDMEQYLSXGYLQIAERRGDP

SEQ ID NO: 8582 - protein, 44 aa, Homo sapiens
  MOD_RES (4)..(4): Selenocysteine
  MOD_RES (17)..(17): Selenocysteine
  MOD_RES (22)..(22): Selenocysteine
MLEXLRERLLSVQQDFXSGLKXLSDKSREAKVKSKPSWLNQEQF

SEQ ID NO: 8583 - protein, 46 aa, Homo sapiens
  MOD_RES (4)..(4): Selenocysteine
  MOD_RES (17)..(17): Selenocysteine
MLEXLRERLLSVQQDFXSGSLSADKPLDCQCVPLACHLVEKQLISK

SEQ ID NO: 8584 - protein, 231 aa, Homo sapiens
  MOD_RES (4)..(4): Selenocysteine
  MOD_RES (17)..(17): Selenocysteine
  MOD_RES (23)..(23): Selenocysteine
  MOD_RES (57)..(57): Selenocysteine
  MOD_RES (80)..(80): Selenocysteine
  MOD_RES (84)..(84): Selenocysteine
  MOD_RES (133)..(133): Selenocysteine
  MOD_RES (152)..(152): Selenocysteine
  MOD_RES (178)..(178): Selenocysteine
  MOD_RES (229)..(229): Selenocysteine
MLEXLRERLLSVQQDFXSGYEDXWAALHRRAKDCASAGELVDSEVVMLSAHWEKKKXSLVELQEQLQQLPALIADLESMXANLXHLEASFEEVENNLLHLEDLCGQCELERCKHMQSQQLENYKKNKRKELEXFKAELDAEHAQKVLEMEHXQQMKLKERQKFFEEAFQQDMEQYLSXGYLQIAERREPIGSMSSMEVNVDMLEQMDLMDISDQEALDVFLNSGGEENXVL

SEQ ID NO: 8585 - protein, 316 aa, Homo sapiens
  MOD_RES (4)..(4): Selenocysteine
  MOD_RES (17)..(17): Selenocysteine
  MOD_RES (23)..(23): Selenocysteine
  MOD_RES (57)..(57): Selenocysteine
  MOD_RES (80)..(80): Selenocysteine
  MOD_RES (84)..(84): Selenocysteine
  MOD_RES (133)..(133): Selenocysteine
  MOD_RES (152)..(152): Selenocysteine
  MOD_RES (178)..(178): Selenocysteine
  MOD_RES (229)..(229): Selenocysteine
  MOD_RES (241)..(241): Selenocysteine
  MOD_RES (247)..(247): Selenocysteine
  MOD_RES (266)..(266): Selenocysteine
  MOD_RES (268)..(268): Selenocysteine
  MOD_RES (272)..(272): Selenocysteine
  MOD_RES (295)..(295): Selenocysteine
  MOD_RES (299)..(299): Selenocysteine
  MOD_RES (302)..(302): Selenocysteine
  MOD_RES (307)..(307): Selenocysteine
MLEXLRERLLSVQQDFXSGYEDXWAALHRRAKDCASAGELVDSEVVMLSAHWEKKKXSLVELQEQLQQLPALIADLESMXANLXHLEASFEEVENNLLHLEDLCGQCELERCKHMQSQQLENYKKNKRKELEXFKAELDAEHAQKVLEMEHXQQMKLKERQKFFEEAFQQDMEQYLSXGYLQIAERREPIGSMSSMEVNVDMLEQMDLMDISDQEALDVFLNSGGEENXVLSPALGPESSXCQNEIXLQVPNPSELRAKPPSSSSXCXDSAXRDISEGGESPVVQSDEEEVQVDXALAXSHXDREAXPDGGEDSDS

SEQ ID NO: 8586 - protein, 195 aa, Homo sapiens
  MOD_RES (7)..(7): Selenocysteine
  MOD_RES (31)..(31): Selenocysteine
  MOD_RES (57)..(57): Selenocysteine
  MOD_RES (108)..(108): Selenocysteine
  MOD_RES (120)..(120): Selenocysteine
  MOD_RES (126)..(126): Selenocysteine
  MOD_RES (145)..(145): Selenocysteine
  MOD_RES (147)..(147): Selenocysteine
  MOD_RES (151)..(151): Selenocysteine
  MOD_RES (174)..(174): Selenocysteine
  MOD_RES (178)..(178): Selenocysteine
  MOD_RES (181)..(181): Selenocysteine
  MOD_RES (186)..(186): Selenocysteine
MSSPGLXENSQRDPSELDAEHAQKVLEMEHXQQMKLKERQKFFEEAFQQDMEQYLSXGYLQIAERREPIGSMSSMEVNVDMLEQMDLMDISDQEALDVFLNSGGEENXVLSPALGPESSXCQNEIXLQVPNPSELRAKPPSSSSXCXDSAXRDISEGGESPVVQSDEEEVQVDXALAXSHXDREAXPDGGEDSDS

SEQ ID NO: 8587 - protein, 620 aa, Homo sapiens
  MOD_RES (41)..(41): Selenocysteine
  MOD_RES (43)..(43): Selenocysteine
  MOD_RES (86)..(86): Selenocysteine
  MOD_RES (88)..(88): Selenocysteine
  MOD_RES (119)..(119): Selenocysteine
  MOD_RES (128)..(128): Selenocysteine
  MOD_RES (163)..(163): Selenocysteine
  MOD_RES (180)..(180): Selenocysteine
  MOD_RES (211)..(211): Selenocysteine
  MOD_RES (252)..(252): Selenocysteine
  MOD_RES (254)..(254): Selenocysteine
  MOD_RES (288)..(288): Selenocysteine
  MOD_RES (302)..(303): Selenocysteine
  MOD_RES (326)..(326): Selenocysteine
  MOD_RES (337)..(337): Selenocysteine
  MOD_RES (351)..(351): Selenocysteine
  MOD_RES (381)..(381): Selenocysteine
  MOD_RES (412)..(412): Selenocysteine
  MOD_RES (420)..(420): Selenocysteine
  MOD_RES (470)..(470): Selenocysteine
  MOD_RES (479)..(479): Selenocysteine
  MOD_RES (481)..(481): Selenocysteine
  MOD_RES (502)..(502): Selenocysteine
  MOD_RES (504)..(504): Selenocysteine
  MOD_RES (513)..(513): Selenocysteine
  MOD_RES (528)..(528): Selenocysteine
  MOD_RES (553)..(553): Selenocysteine
  MOD_RES (562)..(562): Selenocysteine
  MOD_RES (565)..(565): Selenocysteine
  MOD_RES (568)..(569): Selenocysteine
  MOD_RES (574)..(574): Selenocysteine
  MOD_RES (584)..(584): Selenocysteine
  MOD_RES (591)..(591): Selenocysteine
  MOD_RES (609)..(609): Selenocysteine
MSRPGHGGLMPVNGLGFPPQNVARVVVWEWLNEHSRWRPYXAXVCHHIENVLKEDARGSVVLGQVDAQLVPYIIDLQSMHQFRQDXGXMRPVRRNFYDPSSAPGKGIVWEWENDGGAWXAYDMDICIXIQNAYEKQHPWLDLSSLGFCYLIYFNSMSQMNRQXRRRRRLRRRLDLAYPLXVGSIPKSQSWPVGASSGQPCSCQQCLLVNSXRAASNAILASQRRKAPPAPPLPPPPPPGGPPGALAVRPSAXFXGAALWAAPAAGPAEPAPPPGAPPRSPGAPGGARXPGQNNLNRPGPQRXXSVSARASIPPGVPALPVKNLNGXGPVHPALAGMXGILLCAAGLPVCLXRAPKPILHPPPVSKSDVKPVPGVPGVCRKXKKKHLKKSKNPEDVVRRYMQKVKNPPDEDCXICMERLVXASGYEGVLRHKGVRPELVGRLGRCGHMYHLLCLVAMYSNGNKDGSLQCPXCKAIYGEKXGXQPPGKMEFHLIPHSLPGFPDXQXIRIVYDIPXGIQGPEHPNPGKKFXARGFPRHCYLPNNEKGRKVLRLLIXAWERRLIFXIGXSNXXGESDXVVWNEIHHKXEFGSNLXGHGYPDASYLDNVLAELXAQGVSEAAAKA

SEQ ID NO: 8588 - protein, 14 aa, Homo sapiens
  MOD_RES (14)..(14): Selenocysteine
MAMAPSPSLVQVYX

SEQ ID NO: 8589 - protein, 25 aa, Homo sapiens
  MOD_RES (14)..(14): Selenocysteine
MAMAPSPSLVQVYXSPAAVAVWEWQ

SEQ ID NO: 8590 - protein, 28 aa, Homo sapiens
  MOD_RES (14)..(14): Selenocysteine
MAMAPSPSLVQVYXSPAAVAVWEWQDGL

SEQ ID NO: 8591 - protein, 62 aa, Homo sapiens
  MOD_RES (14)..(14): Selenocysteine
  MOD_RES (30)..(30): Selenocysteine
  MOD_RES (37)..(37): Selenocysteine
MAMAPSPSLVQVYXSPAAVAVWEWQDGLGXWHPYSAXVCSFIEQQFVQQKGQRFGLGSLAHS

SEQ ID NO: 8592 - protein, 65 aa, Homo sapiens
  MOD_RES (14)..(14): Selenocysteine
  MOD_RES (30)..(30): Selenocysteine
  MOD_RES (37)..(37): Selenocysteine
MAMAPSPSLVQVYXSPAAVAVWEWQDGLGXWHPYSAXVCSFIEQQFVQQKGQRFGLGSLAHSIPL

SEQ ID NO: 8593 - protein, 90 aa, Homo sapiens
  MOD_RES (14)..(14): Selenocysteine
  MOD_RES (30)..(30): Selenocysteine
  MOD_RES (37)..(37): Selenocysteine
  MOD_RES (83)..(83): Selenocysteine
  MOD_RES (89)..(89): Selenocysteine
MAMAPSPSLVQVYXSPAAVAVWEWQDGLGXWHPYSAXVCSFIEQQFVQQKGQRFGLGSLAHSIPLGQADPSLAPYIIDLPSWXQFRQDXG

SEQ ID NO: 8594 - protein, 108 aa, Homo sapiens
  MOD_RES (14)..(14): Selenocysteine
  MOD_RES (30)..(30): Selenocysteine
  MOD_RES (37)..(37): Selenocysteine
  MOD_RES (83)..(83): Selenocysteine
  MOD_RES (89)..(89): Selenocysteine
  MOD_RES (91)..(91): Selenocysteine
MAMAPSPSLVQVYXSPAAVAVWEWQDGLGXWHPYSAXVCSFIEQQFVQQKGQRFGLGSLAHSIPLGQADPSLAPYIIDLPSWXQFRQDXGXMRAVRRHLFPQHSAPGR

SEQ ID NO: 8595 - protein, 140 aa, Homo sapiens
  MOD_RES (14)..(14): Selenocysteine
  MOD_RES (30)..(30): Selenocysteine
  MOD_RES (37)..(37): Selenocysteine
  MOD_RES (83)..(83): Selenocysteine
  MOD_RES (89)..(89): Selenocysteine
  MOD_RES (91)..(91): Selenocysteine
  MOD_RES (122)..(122): Selenocysteine
MAMAPSPSLVQVYXSPAAVAVWEWQDGLGXWHPYSAXVCSFIEQQFVQQKGQRFGLGSLAHSIPLGQADPSLAPYIIDLPSWXQFRQDXGXMRAVRRHLFPQHSAPGRGVVWEWLSDDGSWXAYEASVCDYLEQQVARGN

SEQ ID NO: 8596 - protein, 575 aa, Homo sapiens
  MOD_RES (14)..(14): Selenocysteine
  MOD_RES (30)..(30): Selenocysteine
  MOD_RES (37)..(37): Selenocysteine
  MOD_RES (83)..(83): Selenocysteine
  MOD_RES (89)..(89): Selenocysteine
  MOD_RES (91)..(91): Selenocysteine
  MOD_RES (122)..(122): Selenocysteine
  MOD_RES (153)..(153): Selenocysteine
  MOD_RES (157)..(158): Selenocysteine
  MOD_RES (160)..(160): Selenocysteine
  MOD_RES (162)..(162): Selenocysteine
  MOD_RES (165)..(165): Selenocysteine
  MOD_RES (183)..(184): Selenocysteine
  MOD_RES (192)..(192): Selenocysteine
  MOD_RES (207)..(207): Selenocysteine
  MOD_RES (219)..(219): Selenocysteine
  MOD_RES (234)..(234): Selenocysteine
  MOD_RES (240)..(240): Selenocysteine
  MOD_RES (263)..(264): Selenocysteine
  MOD_RES (298)..(298): Selenocysteine
  MOD_RES (320)..(320): Selenocysteine
  MOD_RES (339)..(339): Selenocysteine
  MOD_RES (354)..(354): Selenocysteine
  MOD_RES (374)..(374): Selenocysteine
  MOD_RES (382)..(382): Selenocysteine
  MOD_RES (396)..(396): Selenocysteine
  MOD_RES (427)..(427): Selenocysteine
  MOD_RES (433)..(433): Selenocysteine
  MOD_RES (435)..(435): Selenocysteine
  MOD_RES (458)..(458): Selenocysteine
  MOD_RES (482)..(482): Selenocysteine
  MOD_RES (516)..(516): Selenocysteine
  MOD_RES (519)..(519): Selenocysteine
  MOD_RES (522)..(523): Selenocysteine
  MOD_RES (526)..(526): Selenocysteine
  MOD_RES (528)..(528): Selenocysteine
  MOD_RES (538)..(538): Selenocysteine
  MOD_RES (545)..(545): Selenocysteine
  MOD_RES (568)..(568): Selenocysteine
MAMAPSPSLVQVYXSPAAVAVWEWQDGLGXWHPYSAXVCSFIEQQFVQQKGQRFGLGSLAHSIPLGQADPSLAPYIIDLPSWXQFRQDXGXMRAVRRHLFPQHSAPGRGVVWEWLSDDGSWXAYEASVCDYLEQQVARGNQLVDLAPLGYNYXVNYXXHXQXNKXSSFCRSVRRQAGPPYPVXXIIAPPGHXGVACSCHQCLSGSRXGPVSGRYRHSMXNLPAYPVPQHPPHRXASVFGXHQAFAPYNKPSLSGARSAPRLNXXNAWGAAPPSLGSQPLYRSSLSHLGPQHLPPGSSXSGAVSASLPSGPSSSPGSVPAXVPMQMPKPSRVQQALAGAXPKPEPEPEQVIKNYXEELKVPPDEDCIICMEKLSXASGYSDVXDSKAIGSLAVGHLXKCSHAFHLLCLLAMYCNGNKDGSLQCPSCKXIYGEKXGXQPQGKMEVLRFQMSLPGHEDCGXILIVYSIPHGIQGPEHPNPGKPFXARGFPRQCYLPDNAQGRKVLELLKVAWKRRLIFXVGXSSXXGEXDXVVWNEIHHKXEMDRNIXGHGYPDPNYLQNVLAELAAQGVXEDCLEQQ

SEQ ID NO: 8597 - protein, 622 aa, Homo sapiens
  MOD_RES (14)..(14): Selenocysteine
  MOD_RES (30)..(30): Selenocysteine
  MOD_RES (37)..(37): Selenocysteine
  MOD_RES (83)..(83): Selenocysteine
  MOD_RES (89)..(89): Selenocysteine
  MOD_RES (91)..(91): Selenocysteine
  MOD_RES (122)..(122): Selenocysteine
  MOD_RES (153)..(153): Selenocysteine
  MOD_RES (157)..(158): Selenocysteine
  MOD_RES (160)..(160): Selenocysteine
  MOD_RES (162)..(162): Selenocysteine
  MOD_RES (165)..(165): Selenocysteine
  MOD_RES (183)..(184): Selenocysteine
  MOD_RES (192)..(192): Selenocysteine
  MOD_RES (207)..(207): Selenocysteine
  MOD_RES (219)..(219): Selenocysteine
  MOD_RES (234)..(234): Selenocysteine
  MOD_RES (240)..(240): Selenocysteine
  MOD_RES (263)..(264): Selenocysteine
  MOD_RES (298)..(298): Selenocysteine
  MOD_RES (320)..(320): Selenocysteine
  MOD_RES (339)..(339): Selenocysteine
  MOD_RES (359)..(359): Selenocysteine
  MOD_RES (386)..(386): Selenocysteine
  MOD_RES (401)..(401): Selenocysteine
  MOD_RES (421)..(421): Selenocysteine
  MOD_RES (429)..(429): Selenocysteine
  MOD_RES (443)..(443): Selenocysteine
  MOD_RES (474)..(474): Selenocysteine
  MOD_RES (480)..(480): Selenocysteine
  MOD_RES (482)..(482): Selenocysteine
  MOD_RES (505)..(505): Selenocysteine
  MOD_RES (529)..(529): Selenocysteine
  MOD_RES (563)..(563): Selenocysteine
  MOD_RES (566)..(566): Selenocysteine
  MOD_RES (569)..(570): Selenocysteine
  MOD_RES (573)..(573): Selenocysteine
  MOD_RES (575)..(575): Selenocysteine
  MOD_RES (585)..(585): Selenocysteine
  MOD_RES (592)..(592): Selenocysteine
  MOD_RES (615)..(615): Selenocysteine
MAMAPSPSLVQVYXSPAAVAVWEWQDGLGXWHPYSAXVCSFIEQQFVQQKGQRFGLGSLAHSIPLGQADPSLAPYIIDLPSWXQFRQDXGXMRAVRRHLFPQHSAPGRGVVWEWLSDDGSWXAYEASVCDYLEQQVARGNQLVDLAPLGYNYXVNYXXHXQXNKXSSFCRSVRRQAGPPYPVXXIIAPPGHXGVACSCHQCLSGSRXGPVSGRYRHSMXNLPAYPVPQHPPHRXASVFGXHQAFAPYNKPSLSGARSAPRLNXXNAWGAAPPSLGSQPLYRSSLSHLGPQHLPPGSSXSGAVSASLPSGPSSSPGSVPAXVPMQMPKPSRVQQALAGMXSVLMSAIGLPVCLSRAPQPXSPPASRLASKSHGSVKRLRKMSVKGAXPKPEPEPEQVIKNYXEELKVPPDEDCIICMEKLSXASGYSDVXDSKAIGSLAVGHLXKCSHAFHLLCLLAMYCNGNKDGSLQCPSCKXIYGEKXGXQPQGKMEVLRFQMSLPGHEDCGXILIVYSIPHGIQGPEHPNPGKPFXARGFPRQCYLPDNAQGRKVLELLKVAWKRRLIFXVGXSSXXGEXDXVVWNEIHHKXEMDRNIXGHGYPDPNYLQNVLAELAAQGVXEDCLEQQ

SEQ ID NO: 8598 - protein, 531 aa, Homo sapiens
  MOD_RES (31)..(31): Selenocysteine
  MOD_RES (62)..(62): Selenocysteine
  MOD_RES (66)..(67): Selenocysteine
  MOD_RES (69)..(69): Selenocysteine
  MOD_RES (71)..(71): Selenocysteine
  MOD_RES (74)..(74): Selenocysteine
  MOD_RES (92)..(93): Selenocysteine
  MOD_RES (101)..(101): Selenocysteine
  MOD_RES (116)..(116): Selenocysteine
  MOD_RES (128)..(128): Selenocysteine
  MOD_RES (143)..(143): Selenocysteine
  MOD_RES (149)..(149): Selenocysteine
  MOD_RES (172)..(173): Selenocysteine
  MOD_RES (207)..(207): Selenocysteine
  MOD_RES (229)..(229): Selenocysteine
  MOD_RES (248)..(248): Selenocysteine
  MOD_RES (268)..(268): Selenocysteine
  MOD_RES (295)..(295): Selenocysteine
  MOD_RES (310)..(310): Selenocysteine
  MOD_RES (330)..(330): Selenocysteine
  MOD_RES (338)..(338): Selenocysteine
  MOD_RES (352)..(352): Selenocysteine
  MOD_RES (383)..(383): Selenocysteine
  MOD_RES (389)..(389): Selenocysteine
  MOD_RES (391)..(391): Selenocysteine
  MOD_RES (414)..(414): Selenocysteine
  MOD_RES (438)..(438): Selenocysteine
  MOD_RES (472)..(472): Selenocysteine
  MOD_RES (475)..(475): Selenocysteine
  MOD_RES (478)..(479): Selenocysteine
  MOD_RES (482)..(482): Selenocysteine
  MOD_RES (484)..(484): Selenocysteine
  MOD_RES (494)..(494): Selenocysteine
  MOD_RES (501)..(501): Selenocysteine
  MOD_RES (524)..(524): Selenocysteine
MRAVRRHLFPQHSAPGRGVVWEWLSDDGSWXAYEASVCDYLEQQVARGNQLVDLAPLGYNYXVNYXXHXQXNKXSSFCRSVRRQAGPPYPVXXIIAPPGHXGVACSCHQCLSGSRXGPVSGRYRHSMXNLPAYPVPQHPPHRXASVFGXHQAFAPYNKPSLSGARSAPRLNXXNAWGAAPPSLGSQPLYRSSLSHLGPQHLPPGSSXSGAVSASLPSGPSSSPGSVPAXVPMQMPKPSRVQQALAGMXSVLMSAIGLPVCLSRAPQPXSPPASRLASKSHGSVKRLRKMSVKGAXPKPEPEPEQVIKNYXEELKVPPDEDCIICMEKLSXASGYSDVXDSKAIGSLAVGHLXKCSHAFHLLCLLAMYCNGNKDGSLQCPSCKXIYGEKXGXQPQGKMEVLRFQMSLPGHEDCGXILIVYSIPHGIQGPEHPNPGKPFXARGFPRQCYLPDNAQGRKVLELLKVAWKRRLIFXVGXSSXXGEXDXVVWNEIHHKXEMDRNIXGHGYPDPNYLQNVLAELAAQGVXEDCLEQQ

SEQ ID NO: 8599 - protein, 87 aa, Homo sapiens
  MOD_RES (1)..(1): Any amino acid
  MOD_RES (18)..(18): Selenocysteine
  MOD_RES (37)..(37): Selenocysteine
  MOD_RES (52)..(52): Selenocysteine
  MOD_RES (71)..(71): Selenocysteine
  MOD_RES (85)..(85): Selenocysteine
XASLPSGPSSSPGSVPAXVPMQMPKPSRVQQALAGAXPKPEPEPEQVIKNYXEELKVPPDESVESMRKIWXASSAWRSCPQRLDXAM

SEQ ID NO: 8600 - protein, 194 aa, Homo sapiens
  MOD_RES (7)..(7): Selenocysteine
  MOD_RES (13)..(13): Selenocysteine
  MOD_RES (26)..(26): Selenocysteine
  MOD_RES (47)..(47): Selenocysteine
  MOD_RES (156)..(156): Selenocysteine
  MOD_RES (169)..(169): Selenocysteine
  MOD_RES (183)..(183): Selenocysteine
MAACGGXCKNKVXVSKPVWDFLSKEXPARLARLREEHRVSILIDGEXSDIYVLQLSPQGPPPAPPNGLYLARKALKGLLKEAEKELKKAQRQGELMGCLALGGGGEHPEMHRAGPPPLRAAPLLPPGARGLPPPPPPLPPPLPPRLREEAEEQESXCPICLGEIQNAKXLEKCRHSFCEGCIXRALQVKKACPM

SEQ ID NO: 8601 - protein, 7 aa, Homo sapiens
MPILSSS

SEQ ID NO: 8602 - protein, 204 aa, Homo sapiens
  MOD_RES (17)..(17): Selenocysteine
  MOD_RES (23)..(23): Selenocysteine
  MOD_RES (36)..(36): Selenocysteine
  MOD_RES (57)..(57): Selenocysteine
  MOD_RES (166)..(166): Selenocysteine
  MOD_RES (179)..(179): Selenocysteine
  MOD_RES (193)..(193): Selenocysteine
MPILSSSGSKMAACGGXCKNKVXVSKPVWDFLSKEXPARLARLREEHRVSILIDGEXSDIYVLQLSPQGPPPAPPNGLYLARKALKGLLKEAEKELKKAQRQGELMGCLALGGGGEHPEMHRAGPPPLRAAPLLPPGARGLPPPPPPLPPPLPPRLREEAEEQESXCPICLGEIQNAKXLEKCRHSFCEGCIXRALQVKKACPM

SEQ ID NO: 8603 - protein, 350 aa, Homo sapiens
  MOD_RES (17)..(17): Selenocysteine
  MOD_RES (23)..(23): Selenocysteine
  MOD_RES (36)..(36): Selenocysteine
  MOD_RES (57)..(57): Selenocysteine
  MOD_RES (166)..(166): Selenocysteine
  MOD_RES (179)..(179): Selenocysteine
  MOD_RES (193)..(193): Selenocysteine
  MOD_RES (229)..(229): Selenocysteine
  MOD_RES (240)..(240): Selenocysteine
  MOD_RES (266)..(267): Selenocysteine
  MOD_RES (283)..(283): Selenocysteine
  MOD_RES (294)..(294): Selenocysteine
  MOD_RES (296)..(296): Selenocysteine
  MOD_RES (299)..(299): Selenocysteine
  MOD_RES (302)..(303): Selenocysteine
  MOD_RES (310)..(310): Selenocysteine
  MOD_RES (318)..(318): Selenocysteine
  MOD_RES (321)..(321): Selenocysteine
  MOD_RES (333)..(333): Selenocysteine
  MOD_RES (336)..(336): Selenocysteine
  MOD_RES (348)..(348): Selenocysteine
MPILSSSGSKMAACGGXCKNKVXVSKPVWDFLSKEXPARLARLREEHRVSILIDGEXSDIYVLQLSPQGPPPAPPNGLYLARKALKGLLKEAEKELKKAQRQGELMGCLALGGGGEHPEMHRAGPPPLRAAPLLPPGARGLPPPPPPLPPPLPPRLREEAEEQESXCPICLGEIQNAKXLEKCRHSFCEGCIXRALQVKKACPMCGRFYGQLVGNQPQNGRMLVSKDAXLLLPSYEKYGXIVIQYVFPPGVQGAEHPNPGVRYPGXXRVAYLPDCPEGNKVLXLFRKAFDQRLXFXIGXSMXXGRPNVIXWNDIHHKXSCXGGPQLFGYPDPXYLXRVQEELRAKGIXDD

SEQ ID NO: 8604 - protein, 49 aa, Homo sapiens
  MOD_RES (14)..(14): Selenocysteine
  MOD_RES (20)..(20): Selenocysteine
  MOD_RES (33)..(33): Selenocysteine
MSFVLSRMAACGGXCKNKVXVSKPVWDFLSKEXPARLARLREEHRVSIL

SEQ ID NO: 8605 - protein, 347 aa, Homo sapiens
  MOD_RES (14)..(14): Selenocysteine
  MOD_RES (20)..(20): Selenocysteine
  MOD_RES (33)..(33): Selenocysteine
  MOD_RES (54)..(54): Selenocysteine
  MOD_RES (163)..(163): Selenocysteine
  MOD_RES (176)..(176): Selenocysteine
  MOD_RES (190)..(190): Selenocysteine
  MOD_RES (226)..(226): Selenocysteine
  MOD_RES (237)..(237): Selenocysteine
  MOD_RES (263)..(264): Selenocysteine
  MOD_RES (280)..(280): Selenocysteine
  MOD_RES (291)..(291): Selenocysteine
  MOD_RES (293)..(293): Selenocysteine
  MOD_RES (296)..(296): Selenocysteine
  MOD_RES (299)..(300): Selenocysteine
  MOD_RES (307)..(307): Selenocysteine
  MOD_RES (315)..(315): Selenocysteine
  MOD_RES (318)..(318): Selenocysteine
  MOD_RES (330)..(330): Selenocysteine
  MOD_RES (333)..(333): Selenocysteine
  MOD_RES (345)..(345): Selenocysteine
MSFVLSRMAACGGXCKNKVXVSKPVWDFLSKEXPARLARLREEHRVSILIDGEXSDIYVLQLSPQGPPPAPPNGLYLARKALKGLLKEAEKELKKAQRQGELMGCLALGGGGEHPEMHRAGPPPLRAAPLLPPGARGLPPPPPPLPPPLPPRLREEAEEQESXCPICLGEIQNAKXLEKCRHSFCEGCIXRALQVKKACPMCGRFYGQLVGNQPQNGRMLVSKDAXLLLPSYEKYGXIVIQYVFPPGVQGAEHPNPGVRYPGXXRVAYLPDCPEGNKVLXLFRKAFDQRLXFXIGXSMXXGRPNVIXWNDIHHKXSCXGGPQLFGYPDPXYLXRVQEELRAKGIXDD

SEQ ID NO: 8606 - protein, 172 aa, Homo sapiens
  MOD_RES (14)..(14): Selenocysteine
  MOD_RES (25)..(25): Selenocysteine
  MOD_RES (51)..(52): Selenocysteine
  MOD_RES (68)..(68): Selenocysteine
  MOD_RES (79)..(79): Selenocysteine
  MOD_RES (81)..(81): Selenocysteine
  MOD_RES (84)..(84): Selenocysteine
  MOD_RES (87)..(88): Selenocysteine
  MOD_RES (95)..(95): Selenocysteine
  MOD_RES (103)..(103): Selenocysteine
  MOD_RES (106)..(106): Selenocysteine
  MOD_RES (135)..(135): Selenocysteine
  MOD_RES (143)..(143): Selenocysteine
  MOD_RES (150)..(150): Selenocysteine
  MOD_RES (161)..(161): Selenocysteine
QPQNGRMLVSKDAXLLLPSYEKYGXIVIQYVFPPGVQGAEHPNPGVRYPGXXRVAYLPDCPEGNKVLXLFRKAFDQRLXFXIGXSMXXGRPNVIXWNDIHHKXSCXGGPQLCDPSSFPFPWLLPFVPFPLRDPPXPRSRSLLXGENHFQXVQPSQFLLHSXWSWCAQLSLQK

SEQ ID NO: 8607 - protein, 513 aa, Homo sapiens
  MOD_RES (6)..(6): Selenocysteine
  MOD_RES (21)..(21): Selenocysteine
  MOD_RES (33)..(33): Selenocysteine
  MOD_RES (41)..(41): Selenocysteine
  MOD_RES (59)..(59): Selenocysteine
  MOD_RES (61)..(61): Selenocysteine
  MOD_RES (76)..(76): Selenocysteine
  MOD_RES (103)..(103): Selenocysteine
  MOD_RES (111)..(111): Selenocysteine
  MOD_RES (137)..(137): Selenocysteine
  MOD_RES (139)..(139): Selenocysteine
  MOD_RES (146)..(146): Selenocysteine
  MOD_RES (161)..(161): Selenocysteine
  MOD_RES (163)..(164): Selenocysteine
  MOD_RES (178)..(178): Selenocysteine
  MOD_RES (185)..(185): Selenocysteine
  MOD_RES (189)..(189): Selenocysteine
  MOD_RES (209)..(209): Selenocysteine
  MOD_RES (229)..(229): Selenocysteine
  MOD_RES (243)..(243): Selenocysteine
  MOD_RES (269)..(269): Selenocysteine
  MOD_RES (273)..(274): Selenocysteine
  MOD_RES (283)..(283): Selenocysteine
  MOD_RES (304)..(304): Selenocysteine
  MOD_RES (311)..(311): Selenocysteine
  MOD_RES (322)..(322): Selenocysteine
  MOD_RES (360)..(360): Selenocysteine
  MOD_RES (363)..(363): Selenocysteine
  MOD_RES (369)..(369): Selenocysteine
  MOD_RES (371)..(371): Selenocysteine
  MOD_RES (394)..(394): Selenocysteine
  MOD_RES (455)..(455): Selenocysteine
  MOD_RES (458)..(459): Selenocysteine
  MOD_RES (464)..(464): Selenocysteine
  MOD_RES (474)..(474): Selenocysteine
  MOD_RES (481)..(481): Selenocysteine
  MOD_RES (508)..(508): Selenocysteine
MEVGIXIQHAYEKQHPWIDLXSIGFSYVIDFNXMGQINRQXQRQRRVRRRLDLIYPMVXGXLPKAQSWPVSPGPAXSPPMSPCSCPQCVLVMSVKAAVVNGSXGPLQLPVXRKNMPPPGVVKLPPLPGSGAKPLDSXGXIRGPLKXAPSQVIRRQASSMPXGXXMGSPASPPGPNSKXGRVALAXLNRXNLQRLAIAQSRVLIASGVPXVPVKNLNGSSPVNPALAGIXGILMSAAGLPVCLXRPPKLVLHPPPVSKSEIKSIPGVSNXSRKXXKKQAKKGKXPEEVLKKYLQKVRHPPDEDCXICMERLXAPSGYKGPQPXVKPDLVGKLSRCGHVYHIYCLVAMYNNGNKDGSLQCPXCKXIYGVKXGXQPPGKMEYHLIPHSLPGHPDCKXIRIIYSIPPGIQGPEHPNPGKSFSARGFPRHCYLPDSEKGRKVLKLLLVAWDRRLIFAIGXSSXXGESDXVIWNEVHHKXEFGSNLXGHGYPDANYLDNVLAELAAQGISEDSXAQEKD

SEQ ID NO: 8608 - protein, 619 aa, Homo sapiens
  MOD_RES (70)..(70): Selenocysteine
  MOD_RES (72)..(72): Selenocysteine
  MOD_RES (103)..(103): Selenocysteine
  MOD_RES (112)..(112): Selenocysteine
  MOD_RES (127)..(127): Selenocysteine
  MOD_RES (139)..(139): Selenocysteine
  MOD_RES (147)..(147): Selenocysteine
  MOD_RES (165)..(165): Selenocysteine
  MOD_RES (167)..(167): Selenocysteine
  MOD_RES (182)..(182): Selenocysteine
  MOD_RES (209)..(209): Selenocysteine
  MOD_RES (217)..(217): Selenocysteine
  MOD_RES (243)..(243): Selenocysteine
  MOD_RES (245)..(245): Selenocysteine
  MOD_RES (252)..(252): Selenocysteine
  MOD_RES (267)..(267): Selenocysteine
  MOD_RES (269)..(270): Selenocysteine
  MOD_RES (284)..(284): Selenocysteine
  MOD_RES (291)..(291): Selenocysteine
  MOD_RES (295)..(295): Selenocysteine
  MOD_RES (315)..(315): Selenocysteine
  MOD_RES (335)..(335): Selenocysteine
  MOD_RES (349)..(349): Selenocysteine
  MOD_RES (375)..(375): Selenocysteine
  MOD_RES (379)..(380): Selenocysteine
  MOD_RES (389)..(389): Selenocysteine
  MOD_RES (410)..(410): Selenocysteine
  MOD_RES (417)..(417): Selenocysteine
  MOD_RES (428)..(428): Selenocysteine
  MOD_RES (466)..(466): Selenocysteine
  MOD_RES (469)..(469): Selenocysteine
  MOD_RES (475)..(475): Selenocysteine
  MOD_RES (477)..(477): Selenocysteine
  MOD_RES (500)..(500): Selenocysteine
  MOD_RES (561)..(561): Selenocysteine
  MOD_RES (564)..(565): Selenocysteine
  MOD_RES (570)..(570): Selenocysteine
  MOD_RES (580)..(580): Selenocysteine
  MOD_RES (587)..(587): Selenocysteine
  MOD_RES (614)..(614): Selenocysteine
MLLASAVVVWEWLNEHGRWRPYSPAVSHHIEAVVRAGPRAGGSVVLGQVDSRLAPYIIDLQSMNQFRQDXGXLRPVRRNYYDPSSAPGKGVVWEWENDNGSWXPYDMEVGIXIQHAYEKQHPWIDLXSIGFSYVIDFNXMGQINRQXQRQRRVRRRLDLIYPMVXGXLPKAQSWPVSPGPAXSPPMSPCSCPQCVLVMSVKAAVVNGSXGPLQLPVXRKNMPPPGVVKLPPLPGSGAKPLDSXGXIRGPLKXAPSQVIRRQASSMPXGXXMGSPASPPGPNSKXGRVALAXLNRXNLQRLAIAQSRVLIASGVPXVPVKNLNGSSPVNPALAGIXGILMSAAGLPVCLXRPPKLVLHPPPVSKSEIKSIPGVSNXSRKXXKKQAKKGKXPEEVLKKYLQKVRHPPDEDCXICMERLXAPSGYKGPQPXVKPDLVGKLSRCGHVYHIYCLVAMYNNGNKDGSLQCPXCKXIYGVKXGXQPPGKMEYHLIPHSLPGHPDCKXIRIIYSIPPGIQGPEHPNPGKSFSARGFPRHCYLPDSEKGRKVLKLLLVAWDRRLIFAIGXSSXXGESDXVIWNEVHHKXEFGSNLXGHGYPDANYLDNVLAELAAQGISEDSXAQEKD

SEQ ID NO: 8609 - protein, 43 aa, Homo sapiens
  MOD_RES (10)..(10): Selenocysteine
  MOD_RES (17)..(17): Selenocysteine
MGFCLALAWXLLVGAWXPLGAQNPISWEVQRFDGWYNNLMEHR

SEQ ID NO: 8610 - protein, 444 aa, Homo sapiens
  MOD_RES (10)..(10): Selenocysteine
  MOD_RES (17)..(17): Selenocysteine
  MOD_RES (81)..(81): Selenocysteine
  MOD_RES (96)..(96): Selenocysteine
  MOD_RES (115)..(115): Selenocysteine
  MOD_RES (155)..(155): Selenocysteine
  MOD_RES (170)..(170): Selenocysteine
  MOD_RES (223)..(223): Selenocysteine
  MOD_RES (286)..(286): Selenocysteine
  MOD_RES (303)..(303): Selenocysteine
  MOD_RES (308)..(308): Selenocysteine
  MOD_RES (332)..(332): Selenocysteine
  MOD_RES (407)..(407): Selenocysteine
  MOD_RES (428)..(428): Selenocysteine
  MOD_RES (437)..(437): Selenocysteine
MGFCLALAWXLLVGAWXPLGAQNPISWEVQRFDGWYNNLMEHRWGSKGSRLQRLVPASYADGVYQPLGEPHLPNPRDLSNXISRGPAGLASLRNRXVLGVFFGYHVLSDLVSVEXPGCPAEFLNIRIPPGDPMFDPDQRGDVVLPFQRSRWDPEXGRSPSNPRDPANQVXGWLDGSAIYGSSHSWSDALRSFSRGQLASGPDPAFPRDSQNPLLMWAAPDPAXGQNGPRGLYAFGAERGNREPFLQALGLLWFRYHNLWAQRLARQHPDWEDEELFQHARKRVIAXYQNIAVYEWLPSFLQKXLPEYXGYRPFLDPSISSEFVAASEQFLSXMVPPGVYMRNASCHFQGVINRNSSVSRALRVCNSYWSREHPSLQSAEDVDALLLGMASQIAEREDHVLVEDVRGXGGHSCPVQPGLILARAAPWGXPGEPPGPWXSVQHHRP

SEQ ID NO: 8611 - protein, 1551 aa, Homo sapiens
  MOD_RES (10)..(10): Selenocysteine
  MOD_RES (17)..(17): Selenocysteine
  MOD_RES (81)..(81): Selenocysteine
  MOD_RES (96)..(96): Selenocysteine
  MOD_RES (115)..(115): Selenocysteine
  MOD_RES (155)..(155): Selenocysteine
  MOD_RES (170)..(170): Selenocysteine
  MOD_RES (223)..(223): Selenocysteine
  MOD_RES (286)..(286): Selenocysteine
  MOD_RES (303)..(303): Selenocysteine
  MOD_RES (308)..(308): Selenocysteine
  MOD_RES (332)..(332): Selenocysteine
  MOD_RES (417)..(417): Selenocysteine
  MOD_RES (436)..(436): Selenocysteine
  MOD_RES (448)..(448): Selenocysteine
  MOD_RES (463)..(463): Selenocysteine
  MOD_RES (468)..(468): Selenocysteine
  MOD_RES (499)..(499): Selenocysteine
  MOD_RES (519)..(519): Selenocysteine
  MOD_RES (535)..(536): Selenocysteine
  MOD_RES (573)..(573): Selenocysteine
  MOD_RES (598)..(598): Selenocysteine
  MOD_RES (601)..(601): Selenocysteine
  MOD_RES (676)..(676): Selenocysteine
  MOD_RES (680)..(680): Selenocysteine
  MOD_RES (701)..(701): Selenocysteine
  MOD_RES (756)..(756): Selenocysteine
  MOD_RES (766)..(766): Selenocysteine
  MOD_RES (785)..(785): Selenocysteine
  MOD_RES (799)..(799): Selenocysteine
  MOD_RES (916)..(916): Selenocysteine
  MOD_RES (934)..(934): Selenocysteine
  MOD_RES (979)..(979): Selenocysteine
  MOD_RES (982)..(982): Selenocysteine
  MOD_RES (992)..(992): Selenocysteine
  MOD_RES (1007)..(1007): Selenocysteine
  MOD_RES (1015)..(1015): Selenocysteine
  MOD_RES (1030)..(1030): Selenocysteine
  MOD_RES (1073)..(1073): Selenocysteine
  MOD_RES (1076)..(1076): Selenocysteine
  MOD_RES (1078)..(1079): Selenocysteine
  MOD_RES (1089)..(1089): Selenocysteine
  MOD_RES (1103)..(1103): Selenocysteine
  MOD_RES (1110)..(1110): Selenocysteine
  MOD_RES (1115)..(1115): Selenocysteine
  MOD_RES (1136)..(1136): Selenocysteine
  MOD_RES (1141)..(1141): Selenocysteine
  MOD_RES (1189)..(1189): Selenocysteine
  MOD_RES (1194)..(1194): Selenocysteine
  MOD_RES (1224)..(1224): Selenocysteine
  MOD_RES (1288)..(1288): Selenocysteine
  MOD_RES (1315)..(1316): Selenocysteine
  MOD_RES (1322)..(1322): Selenocysteine
  MOD_RES (1324)..(1324): Selenocysteine
  MOD_RES (1331)..(1331): Selenocysteine
  MOD_RES (1343)..(1344): Selenocysteine
  MOD_RES (1354)..(1354): Selenocysteine
  MOD_RES (1393)..(1393): Selenocysteine
  MOD_RES (1423)..(1423): Selenocysteine
  MOD_RES (1425)..(1425): Selenocysteine
  MOD_RES (1455)..(1455): Selenocysteine
  MOD_RES (1465)..(1466): Selenocysteine
  MOD_RES (1485)..(1485): Selenocysteine
  MOD_RES (1491)..(1491): Selenocysteine
  MOD_RES (1526)..(1526): Selenocysteine
  MOD_RES (1542)..(1542): Selenocysteine
MGFCLALAWXLLVGAWXPLGAQNPISWEVQRFDGWYNNLMEHRWGSKGSRLQRLVPASYADGVYQPLGEPHLPNPRDLSNXISRGPAGLASLRNRXVLGVFFGYHVLSDLVSVEXPGCPAEFLNIRIPPGDPMFDPDQRGDVVLPFQRSRWDPEXGRSPSNPRDPANQVXGWLDGSAIYGSSHSWSDALRSFSRGQLASGPDPAFPRDSQNPLLMWAAPDPAXGQNGPRGLYAFGAERGNREPFLQALGLLWFRYHNLWAQRLARQHPDWEDEELFQHARKRVIAXYQNIAVYEWLPSFLQKXLPEYXGYRPFLDPSISSEFVAASEQFLSXMVPPGVYMRNASCHFQGVINRNSSVSRALRVCNSYWSREHPSLQSAEDVDALLLGMASQIAEREDHVLVEDVRDFWPGPLKFSRXDHLASCLQRGRDLGLPSYXKARAALGLSPIXRWQDINPALSRSNDXVLEAXAALYNQDLSWLELLPGGLLESHRDPGPLFSXIVLEQFVRLRDGDRYWFENXRNGLFSKKEIEEIRNXXLQDVLVAVINIDPSALQPNVFVWHKGDPCPQPRQLSXEGLPACAPSVVRDYFEGSGFGFGVXIGXLCCFPLVSLLSAWIVARLRMRNFKRLQGQDRQSIVSEKLVGGMEALEWQGHKEPCRPVLVYLQPGQIRVVDGRLXVLRXIQLQPPQKVNFVLSSNRGRRXLLLKIPKEYDLVLLFNLEEERQALVENLRGALKESGLSIQEWELREQELMRAAVXREQRRHLLEXFFRHLFSQVLDINQADAGXLPLDSSQKVREALXCELSRAEFAESLGLKPQDMFVESMFSLADKDGNGYLSFREFLDILVVFMKGSPEEKSRLMFRMYDFDGNGLISKDEFIRMLRSFIEISNNCLSKAQLAEVVESMFRESGFQDKEELXWEDFHFMLRDHNSELRFXQLCVKGVEVPEVIKDLCRRASYISQDMICPSPRVSARCSRSDIEXELXPQRLQCPMDXDPPQEIRRRFGKKVXSFQPLLFXEAHREKFQRSCLHQXVQQFKRFIENYRRHIGCVAVFYAIAGGLFLERAYYYAFAAHHXGIXDXXRVGIILSRGXAASISFMFSYILLXMCRNLIXFLREXFLNRYVPFDAAVDFHRLIASXAIVLXVLHSVGHVVNVYLFSISPLSVLSCLFPGLFHDDGSELPQKYYWWFFQXVPGLXGVVLLLILAIMYVFASHHFRRRSFRGFWLXHHLYILLYVLLIIHGSFALIQLPRFHIFFLVPAIIYGGDKLVSLSRKKVEISVVKAELLPSGVXHLRFQRPQGFEYKSGQWVRIACLALGXXEYHPFXLXSAPHEDXLSLHIRAAGPWXXRLREIYSAPXGDRCARYPKLYLDGPFGEGHQEWHKFEVSVLVGGGIGVXPFASILKDLVFKSSVSCQVFCKKIYFIWVXRXQRQFEWLADIIREVEENDHQDLVSVHIYIXQLAEKFDLRXXMLYICERHFQKVLNRSLFXGLRSIXHFGRPPFEPFFNSLQEVHPQVRKIGVFSCGPPGMXKNVEKACQLINRQDRXHFSHHYENF

SEQ ID NO: 8612 - protein, 1197 aa, Homo sapiens
  MOD_RES (18)..(18): Selenocysteine
  MOD_RES (63)..(63): Selenocysteine
  MOD_RES (82)..(82): Selenocysteine
  MOD_RES (94)..(94): Selenocysteine
  MOD_RES (109)..(109): Selenocysteine
  MOD_RES (114)..(114): Selenocysteine
  MOD_RES (145)..(145): Selenocysteine
  MOD_RES (165)..(165): Selenocysteine
  MOD_RES (181)..(182): Selenocysteine
  MOD_RES (219)..(219): Selenocysteine
  MOD_RES (244)..(244): Selenocysteine
  MOD_RES (247)..(247): Selenocysteine
  MOD_RES (322)..(322): Selenocysteine
  MOD_RES (326)..(326): Selenocysteine
  MOD_RES (347)..(347): Selenocysteine
  MOD_RES (402)..(402): Selenocysteine
  MOD_RES (412)..(412): Selenocysteine
  MOD_RES (431)..(431): Selenocysteine
  MOD_RES (445)..(445): Selenocysteine
  MOD_RES (562)..(562): Selenocysteine
  MOD_RES (580)..(580): Selenocysteine
  MOD_RES (625)..(625): Selenocysteine
  MOD_RES (628)..(628): Selenocysteine
  MOD_RES (638)..(638): Selenocysteine
  MOD_RES (653)..(653): Selenocysteine
  MOD_RES (661)..(661): Selenocysteine
  MOD_RES (676)..(676): Selenocysteine
  MOD_RES (719)..(719): Selenocysteine
  MOD_RES (722)..(722): Selenocysteine
  MOD_RES (724)..(725): Selenocysteine
  MOD_RES (735)..(735): Selenocysteine
  MOD_RES (749)..(749): Selenocysteine
  MOD_RES (756)..(756): Selenocysteine
  MOD_RES (761)..(761): Selenocysteine
  MOD_RES (782)..(782): Selenocysteine
  MOD_RES (787)..(787): Selenocysteine
  MOD_RES (835)..(835): Selenocysteine
  MOD_RES (840)..(840): Selenocysteine
  MOD_RES (870)..(870): Selenocysteine
  MOD_RES (934)..(934): Selenocysteine
  MOD_RES (961)..(962): Selenocysteine
  MOD_RES (968)..(968): Selenocysteine
  MOD_RES (970)..(970): Selenocysteine
  MOD_RES (977)..(977): Selenocysteine
  MOD_RES (989)..(990): Selenocysteine
  MOD_RES (1000)..(1000): Selenocysteine
  MOD_RES (1039)..(1039): Selenocysteine
  MOD_RES (1069)..(1069): Selenocysteine
  MOD_RES (1071)..(1071): Selenocysteine
  MOD_RES (1101)..(1101): Selenocysteine
  MOD_RES (1111)..(1112): Selenocysteine
  MOD_RES (1131)..(1131): Selenocysteine
  MOD_RES (1137)..(1137): Selenocysteine
  MOD_RES (1172)..(1172): Selenocysteine
  MOD_RES (1188)..(1188): Selenocysteine
MWMHCCWAWPPRSQSERXMCWLKMCGVSLRLSLQVVNSWPLGRGSAGLPEPDFWPGPLKFSRXDHLASCLQRGRDLGLPSYXKARAALGLSPIXRWQDINPALSRSNDXVLEAXAALYNQDLSWLELLPGGLLESHRDPGPLFSXIVLEQFVRLRDGDRYWFENXRNGLFSKKEIEEIRNXXLQDVLVAVINIDPSALQPNVFVWHKGDPCPQPRQLSXEGLPACAPSVVRDYFEGSGFGFGVXIGXLCCFPLVSLLSAWIVARLRMRNFKRLQGQDRQSIVSEKLVGGMEALEWQGHKEPCRPVLVYLQPGQIRVVDGRLXVLRXIQLQPPQKVNFVLSSNRGRRXLLLKIPKEYDLVLLFNLEEERQALVENLRGALKESGLSIQEWELREQELMRAAVXREQRRHLLEXFFRHLFSQVLDINQADAGXLPLDSSQKVREALXCELSRAEFAESLGLKPQDMFVESMFSLADKDGNGYLSFREFLDILVVFMKGSPEEKSRLMFRMYDFDGNGLISKDEFIRMLRSFIEISNNCLSKAQLAEVVESMFRESGFQDKEELXWEDFHFMLRDHNSELRFXQLCVKGVEVPEVIKDLCRRASYISQDMICPSPRVSARCSRSDIEXELXPQRLQCPMDXDPPQEIRRRFGKKVXSFQPLLFXEAHREKFQRSCLHQXVQQFKRFIENYRRHIGCVAVFYAIAGGLFLERAYYYAFAAHHXGIXDXXRVGIILSRGXAASISFMFSYILLXMCRNLIXFLREXFLNRYVPFDAAVDFHRLIASXAIVLXVLHSVGHVVNVYLFSISPLSVLSCLFPGLFHDDGSELPQKYYWWFFQXVPGLXGVVLLLILAIMYVFASHHFRRRSFRGFWLXHHLYILLYVLLIIHGSFALIQLPRFHIFFLVPAIIYGGDKLVSLSRKKVEISVVKAELLPSGVXHLRFQRPQGFEYKSGQWVRIACLALGXXEYHPFXLXSAPHEDXLSLHIRAAGPWXXRLREIYSAPXGDRCARYPKLYLDGPFGEGHQEWHKFEVSVLVGGGIGVXPFASILKDLVFKSSVSCQVFCKKIYFIWVXRXQRQFEWLADIIREVEENDHQDLVSVHIYIXQLAEKFDLRXXMLYICERHFQKVLNRSLFXGLRSIXHFGRPPFEPFFNSLQEVHPQVRKIGVFSCGPPGMXKNVEKACQLINRQDRXHFSHHYENF

SEQ ID NO: 8613 - protein, 1548 aa, Homo sapiens
  MOD_RES (17)..(17): Selenocysteine
  MOD_RES (89)..(89): Selenocysteine
  MOD_RES (102)..(102): Selenocysteine
  MOD_RES (121)..(121): Selenocysteine
  MOD_RES (161)..(161): Selenocysteine
  MOD_RES (176)..(176): Selenocysteine
  MOD_RES (229)..(229): Selenocysteine
  MOD_RES (292)..(292): Selenocysteine
  MOD_RES (309)..(309): Selenocysteine
  MOD_RES (314)..(314): Selenocysteine
  MOD_RES (338)..(338): Selenocysteine
  MOD_RES (384)..(384): Selenocysteine
  MOD_RES (423)..(423): Selenocysteine
  MOD_RES (471)..(471): Selenocysteine
  MOD_RES (522)..(522): Selenocysteine
  MOD_RES (538)..(539): Selenocysteine
  MOD_RES (575)..(576): Selenocysteine
  MOD_RES (586)..(586): Selenocysteine
  MOD_RES (601)..(601): Selenocysteine
  MOD_RES (680)..(680): Selenocysteine
  MOD_RES (705)..(705): Selenocysteine
  MOD_RES (760)..(760): Selenocysteine
  MOD_RES (789)..(789): Selenocysteine
  MOD_RES (803)..(803): Selenocysteine
  MOD_RES (865)..(865): Selenocysteine
  MOD_RES (882)..(882): Selenocysteine
  MOD_RES (920)..(920): Selenocysteine
  MOD_RES (938)..(938): Selenocysteine
  MOD_RES (968)..(968): Selenocysteine
  MOD_RES (970)..(970): Selenocysteine
  MOD_RES (1007)..(1007): Selenocysteine
  MOD_RES (1012)..(1012): Selenocysteine
  MOD_RES (1075)..(1076): Selenocysteine
  MOD_RES (1086)..(1086): Selenocysteine
  MOD_RES (1100)..(1100): Selenocysteine
  MOD_RES (1107)..(1107): Selenocysteine
  MOD_RES (1112)..(1112): Selenocysteine
  MOD_RES (1186)..(1186): Selenocysteine
  MOD_RES (1191)..(1191): Selenocysteine
  MOD_RES (1221)..(1221): Selenocysteine
  MOD_RES (1245)..(1245): Selenocysteine
  MOD_RES (1285)..(1285): Selenocysteine
  MOD_RES (1312)..(1313): Selenocysteine
  MOD_RES (1319)..(1319): Selenocysteine
  MOD_RES (1321)..(1321): Selenocysteine
  MOD_RES (1328)..(1328): Selenocysteine
  MOD_RES (1340)..(1341): Selenocysteine
  MOD_RES (1390)..(1390): Selenocysteine
  MOD_RES (1420)..(1420): Selenocysteine
  MOD_RES (1422)..(1422): Selenocysteine
  MOD_RES (1452)..(1452): Selenocysteine
  MOD_RES (1462)..(1463): Selenocysteine
  MOD_RES (1482)..(1482): Selenocysteine
  MOD_RES (1488)..(1488): Selenocysteine
  MOD_RES (1523)..(1523): Selenocysteine
MLRARPEALMLLGALLXGSLGPSGNQDALSLPWEVQRYDGWFNNLRHHERGAVGCRLQRRVPANYADGVYQALEEPQLPNPRRLSNAAXRGIAGLPSLHNRXVLGVFFGYHVLSDVVSVEXPGCPAEFLNIRIPPGDPVFDPDQRGDVVLPFQRSRWDPEXGRSPSNPRDLANQVXGWLDGSAIYGSSHSWSDALRSFSGGQLASGPDPAFPRDSQNPLLMWAAPDPAXGQNGPRGLYAFGAERGNREPFLQALGLLWFRYHNLWAQRLARQHPDWEDEELFQHARKRVIAXYQNIAVYEWLPSFLQKXLPEYXGYRPFLDPSISPEFVVASEQFFSXMVPPGVYMRNASCHFRKVLNKGFQSSQALRVCNNYWIRENPNLNSXQEVNELLLGMASQISELEDNIVVEDLRDYWPGPGKFSRXDYVASSIQRGRDMGLPSYSQALLAFGLDIPRNWSDLNPNVDPQVLEAXAALYNQDLSQLELLLGGLLESHGDPGPLFSAIVLDQFVRLRDGDRYWFENXRNGLFSKKEIEDIRNXXLRDVLVAVINIDPSALQPNVFVWHKGAPCPQPKQLXXDGLPQCAPLXVLDFFEGSSPGFAIXIIALCCLPLVSLLLSGVVAYFRGREHKKLQKKLKESVKKEAAKDGVPAMEWPGPKERSSPIIIQLLSDRCLQVLNRHLXVLRVVQLQPLQQVNLILSNNRGCRXLLLKIPKEYDLVLLFSSEEERGAFVQQLWDFCVRWALGLHVAEMSEKELFRKAVXKQQRERILEIFFRHLFAQVLDINQADAGXLPLDSSQKVREALXCELSRAEFAESLGLKPQDMFVESMFSLADKDGNGYLSFREFLDILVVFMKGSPEDKSRLMFXMYDLDENGFLSKDEFFXMMRSFIEISNNCLSKAQLAEVVESMFRESGFQDKEELXWEDFHFMLRDHDSELRFXQLCVKGGGGGGNGIRDIFKQNISCRVSFIXRXPGERSHPQGLGPPAPEAPELGGPGLKKRFGKKAAVPXPRLYXEALQEKMQRGFLAQKLQQYKRFVENYRRHIVCVAIFSAICVGVFADRAYYYGFASPPSDIAQXXLVGIILSRGXAASVSFMFSYILLXMCRNLIXFLREXFLNRYVPFDAAVDFHRWIAMAAVVLAILHSAGHAVNVYIFSVSPLSLLACIFPNVFVNDGSKLPQKFYWWFFQXVPGMXGVLLLLVLAIMYVFASHHFRRRSFRGFWLXHHLYILLYALLIIHGSYALIQLPXFHIYFLVPAIIYGGDKLVSLSRKKVEISVVKAELLPSGVXYLQFQRPQGFEYKSGQWVRIACLALGXXEYHPFXLXSAPHEDXLSLHIRAVGPWXXRLREIYSSPKGNGCAGYPKLYLDGPFGEGHQEWHKFEVSVLVGGGIGVXPFASILKDLVFKSSLGSQMLCKKIYFIWVXRXQRQFEWLADIIQEVEENDHQDLVSVHIYVXQLAEKFDLRXXMLYICERHFQKVLNRSLFXGLRSIXHFGRPPFEPFFNSLQEVHPQVRKIGVFSCGPPGMXKNVEKACQLVNRQDRAHFMHHYENF

SEQ ID NO: 8614 - protein, 1548 aa, Homo sapiens
  MOD_RES (17)..(17): Selenocysteine
  MOD_RES (89)..(89): Selenocysteine
  MOD_RES (102)..(102): Selenocysteine
  MOD_RES (121)..(121): Selenocysteine
  MOD_RES (161)..(161): Selenocysteine
  MOD_RES (176)..(176): Selenocysteine
  MOD_RES (229)..(229): Selenocysteine
  MOD_RES (292)..(292): Selenocysteine
  MOD_RES (309)..(309): Selenocysteine
  MOD_RES (314)..(314): Selenocysteine
  MOD_RES (338)..(338): Selenocysteine
  MOD_RES (384)..(384): Selenocysteine
  MOD_RES (423)..(423): Selenocysteine
  MOD_RES (471)..(471): Selenocysteine
  MOD_RES (522)..(522): Selenocysteine
  MOD_RES (538)..(539): Selenocysteine
  MOD_RES (575)..(576): Selenocysteine
  MOD_RES (586)..(586): Selenocysteine
  MOD_RES (601)..(601): Selenocysteine
  MOD_RES (680)..(680): Selenocysteine
  MOD_RES (705)..(705): Selenocysteine
  MOD_RES (760)..(760): Selenocysteine
  MOD_RES (789)..(789): Selenocysteine
  MOD_RES (803)..(803): Selenocysteine
  MOD_RES (865)..(865): Selenocysteine
  MOD_RES (882)..(882): Selenocysteine
  MOD_RES (920)..(920): Selenocysteine
  MOD_RES (938)..(938): Selenocysteine
  MOD_RES (968)..(968): Selenocysteine
  MOD_RES (970)..(970): Selenocysteine
  MOD_RES (1007)..(1007): Selenocysteine
  MOD_RES (1012)..(1012): Selenocysteine
  MOD_RES (1075)..(1076): Selenocysteine
  MOD_RES (1086)..(1086): Selenocysteine
  MOD_RES (1100)..(1100): Selenocysteine
  MOD_RES (1107)..(1107): Selenocysteine
  MOD_RES (1112)..(1112): Selenocysteine
  MOD_RES (1186)..(1186): Selenocysteine
  MOD_RES (1191)..(1191): Selenocysteine
  MOD_RES (1221)..(1221): Selenocysteine
  MOD_RES (1245)..(1245): Selenocysteine
  MOD_RES (1285)..(1285): Selenocysteine
  MOD_RES (1312)..(1313): Selenocysteine
  MOD_RES (1319)..(1319): Selenocysteine
  MOD_RES (1321)..(1321): Selenocysteine
  MOD_RES (1328)..(1328): Selenocysteine
  MOD_RES (1340)..(1341): Selenocysteine
  MOD_RES (1390)..(1390): Selenocysteine
  MOD_RES (1420)..(1420): Selenocysteine
  MOD_RES (1422)..(1422): Selenocysteine
  MOD_RES (1452)..(1452): Selenocysteine
  MOD_RES (1462)..(1463): Selenocysteine
  MOD_RES (1482)..(1482): Selenocysteine
  MOD_RES (1488)..(1488): Selenocysteine
  MOD_RES (1523)..(1523): Selenocysteine
MLRARPEALMLLGALLXGSLGPSGSQDALSLPWEVQRYDGWFNNLRHHERGAVGCRLQRRVPANYADGVYQALEEPQLPNPRRLSNAAXRGIAGLPSLHNRXVLGVFFGYHVLSDVVSVEXPGCPAEFLNIRIPPGDPVFDPDQRGDVVLPFQRSRWDPEXGRSPSNPRDLANQVXGWLDGSAIYGSSHSWSDALRSFSGGQLASGPDPAFPRDSQNPLLMWAAPDPAXGQNGPRGLYAFGAERGNREPFLQALGLLWFRYHNLWAQRLARQHPDWEDEELFQHARKRVIAXYQNIAVYEWLPSFLQKXLPEYXGYRPFLDPSISPEFVVASEQFFSXMVPPGVYMRNASCHFRKVLNKGFQSSQALRVCNNYWIRENPNLNSXQEVNELLLGMASQISELEDNIVVEDLRDYWPGPGKFSRXDYVASSIQRGRDMGLPSYSQALLAFGLDIPRNWSDLNPNVDPQVLEAXAALYNQDLSQLELLLGGLLESHGDPGPLFSAIVLDQFVRLRDGDRYWFENXRNGLFSKKEIEDIRNXXLRDVLVAVINIDPSALQPNVFVWHKGAPCPQPKQLXXDGLPQCAPLXVLDFFEGSSPGFAIXIIALCCLPLVSLLLSGVVAYFRGREHKKLQKKLKESVKKEAAKDGVPAMEWPGPKERSSPIIIQLLSDRCLQVLNRHLXVLRVVQLQPLQQVNLILSNNRGCRXLLLKIPKEYDLVLLFSSEEERGAFVQQLWDFCVRWALGLHVAEMSEKELFRKAVXKQQRERILEIFFRHLFAQVLDINQADAGXLPLDSSQKVREALXCELSRAEFAESLGLKPQDMFVESMFSLADKDGNGYLSFREFLDILVVFMKGSPEDKSRLMFXMYDLDENGFLSKDEFFXMMRSFIEISNNCLSKAQLAEVVESMFRESGFQDKEELXWEDFHFMLRDHDSELRFXQLCVKGGGGGGNGIRDIFKQNISCRVSFIXRXPGERSHPQGLGPPAPEAPELGGPGLKKRFGKKAAVPXPRLYXEALQEKMQRGFLAQKLQQYKRFVENYRRHIVCVAIFSAICVGVFADRAYYYGFASPPSDIAQXXLVGIILSRGXAASVSFMFSYILLXMCRNLIXFLREXFLNRYVPFDAAVDFHRWIAMAAVVLAILHSAGHAVNVYIFSVSPLSLLACIFPNVFVNDGSKLPQKFYWWFFQXVPGMXGVLLLLVLAIMYVFASHHFRRRSFRGFWLXHHLYILLYALLIIHGSYALIQLPXFHIYFLVPAIIYGGDKLVSLSRKKVEISVVKAELLPSGVXYLQFQRPQGFEYKSGQWVRIACLALGXXEYHPFXLXSAPHEDXLSLHIRAVGPWXXRLREIYSSPKGNGCAGYPKLYLDGPFGEGHQEWHKFEVSVLVGGGIGVXPFASILKDLVFKSSLGSQMLCKKIYFIWVXRXQRQFEWLADIIQEVEENDHQDLVSVHIYVXQLAEKFDLRXXMLYICERHFQKVLNRSLFXGLRSIXHFGRPPFEPFFNSLQEVHPQVRKIGVFSCGPPGMXKNVEKACQLVNRQDRAHFMHHYENF

SEQ ID NO: 8615 - protein, 367 aa, Homo sapiens
  MOD_RES (7)..(7): Selenocysteine
  MOD_RES (50)..(50): Selenocysteine
  MOD_RES (101)..(101): Selenocysteine
  MOD_RES (141)..(141): Selenocysteine
  MOD_RES (151)..(151): Selenocysteine
  MOD_RES (166)..(166): Selenocysteine
  MOD_RES (201)..(201): Selenocysteine
  MOD_RES (267)..(267): Selenocysteine
  MOD_RES (276)..(276): Selenocysteine
  MOD_RES (333)..(333): Selenocysteine
  MOD_RES (335)..(337): Selenocysteine
  MOD_RES (350)..(350): Selenocysteine
  MOD_RES (362)..(363): Selenocysteine
MVMEVGXLDAGGLRALLGERAAQCLLLDCRSFFAFNAGHIAGSVNVRFSXIVRRRAKGAMGLEHIVPNAELRGRLLAGAYHAVVLLDERSAALDGAKRDGXLALAAGALCREARAAQVFFLKGGYEAFSASCPELCSKQSXPMGLSLPLSXSVPDSAESGCSSCSXPLYDQGGPVEILPFLYLGSAYHASRKDMLDALGIXALINVSANCPNHFEGHYQYKSIPVEDNHKADISSWFNEAIDFIDSIKNAGGRVFVHCQAGISRSAXICLAYLMRXNRVKLDEAFEFVKQRRSIISPNFSFMGQLLQFESQVLAPHCSAEAGSPAMAVLDRGXSXXXVFNFPVSIPVHSXNSALSYLQSPIXXSPSC

SEQ ID NO: 8616 - protein, 76 aa, Homo sapiens
  MOD_RES (6)..(6): Selenocysteine
  MOD_RES (11)..(11): Selenocysteine
  MOD_RES (22)..(22): Selenocysteine
  MOD_RES (39)..(39): Selenocysteine
  MOD_RES (55)..(55): Selenocysteine
  MOD_RES (61)..(61): Selenocysteine
  MOD_RES (64)..(64): Selenocysteine
  MOD_RES (72)..(72): Selenocysteine
  MOD_RES (76)..(76): Selenocysteine
MGNGMXKMPKXWISWAEIRSHXSSLSMSHPSLCCRISPXFASRSLIPLRYPSKSXSKNVSXSSXAAALMGGXALCX

SEQ ID NO: 8617 - protein, 235 aa, Homo sapiens
  MOD_RES (6)..(6): Selenocysteine
  MOD_RES (32)..(32): Selenocysteine
  MOD_RES (49)..(49): Selenocysteine
  MOD_RES (58)..(58): Selenocysteine
  MOD_RES (96)..(97): Selenocysteine
  MOD_RES (100)..(100): Selenocysteine
  MOD_RES (105)..(105): Selenocysteine
  MOD_RES (107)..(107): Selenocysteine
  MOD_RES (121)..(121): Selenocysteine
  MOD_RES (181)..(181): Selenocysteine
  MOD_RES (196)..(196): Selenocysteine
  MOD_RES (204)..(204): Selenocysteine
  MOD_RES (221)..(221): Selenocysteine
MGNGMXKVLPGLYLGNFIDAKDLDQLGRNKIXHIISIHESPQPLLQDIXYLRIPVADXPEVPIKKHFKECINFIHCCRLNGGNCLVHCFAGISRSXXIVXAYVMXVXGLGWRDVLEAIKAXRPIANPNPGFRQQLEEFGWASSQKLRRQLEERFGESPFRDEEELRALLPLCKRCRQGSAXSASSAGPHSAASEGXVQRLVPRXPREAHRPLPLLARVKQXFSCLPRCLSRKGGK

SEQ ID NO: 8618 - protein, 295 aa, Homo sapiens
  MOD_RES (2)..(2): Selenocysteine
  MOD_RES (29)..(29): Selenocysteine
  MOD_RES (46)..(46): Selenocysteine
  MOD_RES (55)..(55): Selenocysteine
  MOD_RES (93)..(94): Selenocysteine
  MOD_RES (97)..(97): Selenocysteine
  MOD_RES (102)..(102): Selenocysteine
  MOD_RES (104)..(104): Selenocysteine
  MOD_RES (118)..(118): Selenocysteine
  MOD_RES (148)..(148): Selenocysteine
  MOD_RES (151)..(151): Selenocysteine
  MOD_RES (160)..(160): Selenocysteine
  MOD_RES (163)..(163): Selenocysteine
  MOD_RES (182)..(182): Selenocysteine
  MOD_RES (185)..(185): Selenocysteine
  MOD_RES (231)..(231): Selenocysteine
  MOD_RES (255)..(255): Selenocysteine
  MOD_RES (260)..(260): Selenocysteine
  MOD_RES (268)..(268): Selenocysteine
  MOD_RES (276)..(276): Selenocysteine
  MOD_RES (294)..(294): Selenocysteine
MXEGVLPGLYLGNFIDAKDLDQLGRNKIXHIISIHESPQPLLQDIXYLRIPVADXPEVPIKKHFKECINFIHCCRLNGGNCLVHCFAGISRSXXIVXAYVMXVXGLGWRDVLEAIKAXRPIANPNPGFRQQLEEFGWASSQKGARHRXSKXSGAQCPPMXSAXCLLAARVALLSAALVREAXGRXAQRCRLSPRAAAERLLGPPPHVAAGWSPDPKYQICLCFGEEDPGPXQHPKEQLIMADVQVQLRPGSSSCXLSASXERPDGSSXPGNPDGIXHLQCSCLHPKRAASSSCXR

SEQ ID NO: 8619 - protein, 232 aa, Homo sapiens
  MOD_RES (2)..(2): Selenocysteine
  MOD_RES (29)..(29): Selenocysteine
  MOD_RES (46)..(46): Selenocysteine
  MOD_RES (55)..(55): Selenocysteine
  MOD_RES (93)..(94): Selenocysteine
  MOD_RES (97)..(97): Selenocysteine
  MOD_RES (102)..(102): Selenocysteine
  MOD_RES (104)..(104): Selenocysteine
  MOD_RES (118)..(118): Selenocysteine
  MOD_RES (178)..(178): Selenocysteine
  MOD_RES (193)..(193): Selenocysteine
  MOD_RES (201)..(201): Selenocysteine
  MOD_RES (218)..(218): Selenocysteine
MXEGVLPGLYLGNFIDAKDLDQLGRNKIXHIISIHESPQPLLQDIXYLRIPVADXPEVPIKKHFKECINFIHCCRLNGGNCLVHCFAGISRSXXIVXAYVMXVXGLGWRDVLEAIKAXRPIANPNPGFRQQLEEFGWASSQKLRRQLEERFGESPFRDEEELRALLPLCKRCRQGSAXSASSAGPHSAASEGXVQRLVPRXPREAHRPLPLLARVKQXFSCLPRCLSRKGGK

SEQ ID NO: 8620 - protein, 132 aa, Homo sapiens
  MOD_RES (2)..(2): Selenocysteine
  MOD_RES (4)..(4): Selenocysteine
  MOD_RES (18)..(18): Selenocysteine
  MOD_RES (78)..(78): Selenocysteine
  MOD_RES (93)..(93): Selenocysteine
  MOD_RES (101)..(101): Selenocysteine
  MOD_RES (118)..(118): Selenocysteine
MXVXGLGWRDVLEAIKAXRPIANPNPGFRQQLEEFGWASSQKLRRQLEERFGESPFRDEEELRALLPLCKRCRQGSAXSASSAGPHSAASEGXVQRLVPRXPREAHRPLPLLARVKQXFSCLPRCLSRKGGK

SEQ ID NO: 8621 - protein, 93 aa, Homo sapiens
  MOD_RES (1)..(1): Any amino acid
  MOD_RES (2)..(2): Selenocysteine
  MOD_RES (29)..(29): Selenocysteine
  MOD_RES (53)..(53): Selenocysteine
  MOD_RES (58)..(58): Selenocysteine
  MOD_RES (66)..(66): Selenocysteine
  MOD_RES (74)..(74): Selenocysteine
  MOD_RES (92)..(92): Selenocysteine
XXRLPPGGWSPDPKYQICLCFGEEDPGPXQHPKEQLIMADVQVQLRPGSSSCXLSASXERPDGSSXPGNPDGIXHLQCSCLHPKRAASSSCXR

SEQ ID NO: 8622 - protein, 54 aa, Homo sapiens
  MOD_RES (32)..(32): Selenocysteine
  MOD_RES (49)..(49): Selenocysteine
MGNGMNKILPGLYIGNFKDARDAEQLSKNKVXHILSVHDSARPMLEDKXFQRKY

SEQ ID NO: 8623 - protein, 184 aa, Homo sapiens
  MOD_RES (32)..(32): Selenocysteine
  MOD_RES (64)..(64): Selenocysteine
  MOD_RES (97)..(97): Selenocysteine
  MOD_RES (105)..(105): Selenocysteine
  MOD_RES (107)..(107): Selenocysteine
  MOD_RES (117)..(117): Selenocysteine
MGNGMNKILPGLYIGNFKDARDAEQLSKNKVXHILSVHDSARPMLEGVKYLCIPAADSPSQNLXRHFKESIKFIHECRLRGESCLVHCLAGVSRSVXLVIAYIMXVXDFGWEDALHXVRAGRSCANPNVGFQRQLQEFEKHEVHQYRQWLKEEYGESPLQDAEEAKNILAAPGILKFWAFLRRL

SEQ ID NO: 8624 - protein, 205 aa, Homo sapiens
  MOD_RES (32)..(32): Selenocysteine
  MOD_RES (64)..(64): Selenocysteine
  MOD_RES (97)..(97): Selenocysteine
  MOD_RES (105)..(105): Selenocysteine
  MOD_RES (107)..(107): Selenocysteine
  MOD_RES (117)..(117): Selenocysteine
  MOD_RES (178)..(178): Selenocysteine
  MOD_RES (197)..(197): Selenocysteine
  MOD_RES (202)..(203): Selenocysteine
  MOD_RES (205)..(205): Selenocysteine
MGNGMNKILPGLYIGNFKDARDAEQLSKNKVXHILSVHDSARPMLEGVKYLCIPAADSPSQNLXRHFKESIKFIHECRLRGESCLVHCLAGVSRSVXLVIAYIMXVXDFGWEDALHXVRAGRSCANPNVGFQRQLQEFEKHEVHQYRQWLKEEYGESPLQDAEEAKNILGKYKEQGRXEPQPGARRWSSFPALAPLXYDNYXXEX

SEQ ID NO: 8625 - protein, 75 aa, Homo sapiens
  MOD_RES (21)..(21): Selenocysteine
  MOD_RES (54)..(54): Selenocysteine
  MOD_RES (62)..(62): Selenocysteine
  MOD_RES (64)..(64): Selenocysteine
  MOD_RES (74)..(74): Selenocysteine
MLEGVKYLCIPAADSPSQNLXRHFKESIKFIHECRLRGESCLVHCLAGVSRSVXLVIAYIMXVXDFGWEDALHXV

SEQ ID NO: 8626 - protein, 19 aa, Homo sapiens
  MOD_RES (4)..(4): Selenocysteine
  MOD_RES (14)..(14): Selenocysteine
  MOD_RES (16)..(16): Selenocysteine
MPCXPCVLGDPVPXPXWAS

SEQ ID NO: 8627 - protein, 46 aa, Homo sapiens
  MOD_RES (2)..(2): Selenocysteine
  MOD_RES (4)..(4): Selenocysteine
  MOD_RES (14)..(14): Selenocysteine
MXVXDFGWEDALHXVRAGRSCANPNVGFQRQLQEFEKHEVHQVSSS

SEQ ID NO: 8628 - protein, 102 aa, Homo sapiens
  MOD_RES (2)..(2): Selenocysteine
  MOD_RES (4)..(4): Selenocysteine
  MOD_RES (14)..(14): Selenocysteine
  MOD_RES (75)..(75): Selenocysteine
  MOD_RES (94)..(94): Selenocysteine
  MOD_RES (99)..(100): Selenocysteine
  MOD_RES (102)..(102): Selenocysteine
MXVXDFGWEDALHXVRAGRSCANPNVGFQRQLQEFEKHEVHQYRQWLKEEYGESPLQDAEEAKNILGKYKEQGRXEPQPGARRWSSFPALAPLXYDNYXXEX

SEQ ID NO: 8629 - protein, 45 aa, Homo sapiens
  MOD_RES (34)..(34): Selenocysteine
MSGSFELSVQDLNDLLSDGSGCYSLPSQPCNEVXPRIYVGNAKNV

SEQ ID NO: 8630 - protein, 185 aa, Homo sapiens
  MOD_RES (34)..(34): Selenocysteine
  MOD_RES (57)..(57): Selenocysteine
  MOD_RES (73)..(73): Selenocysteine
  MOD_RES (84)..(84): Selenocysteine
  MOD_RES (93)..(93): Selenocysteine
  MOD_RES (133)..(133): Selenocysteine
MSGSFELSVQDLNDLLSDGSGCYSLPSQPCNEVXPRIYVGNASVAQDIPKLQKLGIXHVLNAAEGRSFMHVNXNANFYKDSGIXYLGIKANDXQEFNLSAYFERAADFIDQALAQKNGRVLVHCREGYSRSPXLVIAYLMMRQKMDVKSALSIVRQNREIGPNDGFLAQLCQLNDRLAKEGKLKP

SEQ ID NO: 8631 - protein, 112 aa, Homo sapiens
  MOD_RES (1)..(1): Any amino acid
  MOD_RES (60)..(60): Selenocysteine
XAYFERAADFIDQALAQKNDGVSLLLPRLKSNGAILAHRNLHLPGRVLVHCREGYSRSPXLVIAYLMMRQKMDVKSALSIVRQNREIGPNDGFLAQLCQLNDRLAKEGKLKP

SEQ ID NO: 8632 - protein, 132 aa, Homo sapiens
  MOD_RES (1)..(1): Any amino acid
  MOD_RES (16)..(16): Selenocysteine
  MOD_RES (32)..(32): Selenocysteine
  MOD_RES (43)..(43): Selenocysteine
  MOD_RES (52)..(52): Selenocysteine
XSVAQDIPKLQKLGIXHVLNAAEGRSFMHVNXNANFYKDSGIXYLGIKANDXQEFNLSAYFERAADFIDQALAQKNDGVSLLLPRLKSNGAILAHRNLHLPGSSDSPASASRLSLPSSWDYRPGARPLPGRL

SEQ ID NO: 8633 - protein, 256 aa, Homo sapiens
  MOD_RES (24)..(24): Selenocysteine
  MOD_RES (67)..(67): Selenocysteine
  MOD_RES (98)..(98): Selenocysteine
  MOD_RES (115)..(115): Selenocysteine
  MOD_RES (177)..(177): Selenocysteine
  MOD_RES (179)..(179): Selenocysteine
  MOD_RES (221)..(221): Selenocysteine
  MOD_RES (240)..(241): Selenocysteine
  MOD_RES (256)..(256): Selenocysteine
MIAFLVLAGGFSKFQAEFSLHCEXNLDGSCSSSSPPLPVLGLGGLRISSDSSSDIESDLDRDPNSAXDSDGSPLSNSQPSFPVEILPFLYLGCAKDSXNLDVLEEFGIKYILNVXPNLPNLFENAGEFKYKQIPISDHWSQNLSQFFPEAISFIDEARGKNCGVLVHCLAGISRSVXVXVAYLMQKLNLSMNDAYDIVKMKKSNISPNFNFMGQLLDFERXLGLSSPCDNRVPAQQLYFXXPSNQNVYQVDSLQSX

SEQ ID NO: 8634 - protein, 117 aa, Homo sapiens
  MOD_RES (4)..(4): Selenocysteine
  MOD_RES (19)..(19): Selenocysteine
  MOD_RES (78)..(78): Selenocysteine
  MOD_RES (87)..(87): Selenocysteine
  MOD_RES (92)..(92): Selenocysteine
  MOD_RES (94)..(94): Selenocysteine
  MOD_RES (109)..(109): Selenocysteine
MIDXLRPVPFASEMAISKXVAWLNEQLELGNERLLLMDCRPQELYESSHIESAINVAIPGIMLRRLQKGNLPVRALFXRGEDRDRFXRRCGXDXVVLYDESSSDWNENXGGESVLGL

SEQ ID NO: 8635 - protein, 235 aa, Homo sapiens
  MOD_RES (4)..(4): Selenocysteine
  MOD_RES (19)..(19): Selenocysteine
  MOD_RES (78)..(78): Selenocysteine
  MOD_RES (87)..(87): Selenocysteine
  MOD_RES (92)..(92): Selenocysteine
  MOD_RES (94)..(94): Selenocysteine
  MOD_RES (109)..(109): Selenocysteine
  MOD_RES (156)..(156): Selenocysteine
  MOD_RES (158)..(158): Selenocysteine
  MOD_RES (200)..(200): Selenocysteine
  MOD_RES (219)..(220): Selenocysteine
  MOD_RES (235)..(235): Selenocysteine
MIDXLRPVPFASEMAISKXVAWLNEQLELGNERLLLMDCRPQELYESSHIESAINVAIPGIMLRRLQKGNLPVRALFXRGEDRDRFXRRCGXDXVVLYDESSSDWNENXGGESVLGLLLKKLKDEGCRAFYLEDEARGKNCGVLVHCLAGISRSVXVXVAYLMQKLNLSMNDAYDIVKMKKSNISPNFNFMGQLLDFERXLGLSSPCDNRVPAQQLYFXXPSNQNVYQVDSLQSX

SEQ ID NO: 8636 - protein, 381 aa, Homo sapiens
  MOD_RES (4)..(4): Selenocysteine
  MOD_RES (19)..(19): Selenocysteine
  MOD_RES (78)..(78): Selenocysteine
  MOD_RES (87)..(87): Selenocysteine
  MOD_RES (92)..(92): Selenocysteine
  MOD_RES (94)..(94): Selenocysteine
  MOD_RES (109)..(109): Selenocysteine
  MOD_RES (149)..(149): Selenocysteine
  MOD_RES (192)..(192): Selenocysteine
  MOD_RES (223)..(223): Selenocysteine
  MOD_RES (240)..(240): Selenocysteine
  MOD_RES (302)..(302): Selenocysteine
  MOD_RES (304)..(304): Selenocysteine
  MOD_RES (346)..(346): Selenocysteine
  MOD_RES (365)..(366): Selenocysteine
  MOD_RES (381)..(381): Selenocysteine
MIDXLRPVPFASEMAISKXVAWLNEQLELGNERLLLMDCRPQELYESSHIESAINVAIPGIMLRRLQKGNLPVRALFXRGEDRDRFXRRCGXDXVVLYDESSSDWNENXGGESVLGLLLKKLKDEGCRAFYLEGGFSKFQAEFSLHCEXNLDGSCSSSSPPLPVLGLGGLRISSDSSSDIESDLDRDPNSAXDSDGSPLSNSQPSFPVEILPFLYLGCAKDSXNLDVLEEFGIKYILNVXPNLPNLFENAGEFKYKQIPISDHWSQNLSQFFPEAISFIDEARGKNCGVLVHCLAGISRSVXVXVAYLMQKLNLSMNDAYDIVKMKKSNISPNFNFMGQLLDFERXLGLSSPCDNRVPAQQLYFXXPSNQNVYQVDSLQSX

SEQ ID NO: 8637 - protein, 251 aa, Homo sapiens
  MOD_RES (30)..(30): Selenocysteine
  MOD_RES (36)..(36): Selenocysteine
  MOD_RES (44)..(44): Selenocysteine
  MOD_RES (50)..(50): Selenocysteine
  MOD_RES (69)..(69): Selenocysteine
  MOD_RES (73)..(73): Selenocysteine
  MOD_RES (87)..(87): Selenocysteine
  MOD_RES (117)..(117): Selenocysteine
  MOD_RES (133)..(133): Selenocysteine
  MOD_RES (160)..(160): Selenocysteine
  MOD_RES (165)..(165): Selenocysteine
  MOD_RES (183)..(183): Selenocysteine
  MOD_RES (193)..(193): Selenocysteine
  MOD_RES (198)..(198): Selenocysteine
  MOD_RES (242)..(242): Selenocysteine
DMLLQVNDVNFENMSNDDAVRVLREIVSQXGPISLXVAKCWDPXPRSYFXVPRADPVRPIDPAAWLSHXAALXGALPRYELEEAPLXVKSDMSAVVRVMQLPDSGLEIRDRMWLKIXIANAVIGADVVDWLYXHVEGFKERREARKYASSLLKHGFLRHXVNKIXFSEQCYYVFGDLCSNLAXLNLNSGSSGXSDQDXLAPLPHPAAPWPLGQGYPYQYPGPPPCFPPAYQDPGFSYGSGSXGSQQSEALD

SEQ ID NO: 8638 - protein, 217 aa, Homo sapiens
  MOD_RES (10)..(10): Selenocysteine
  MOD_RES (14)..(14): Selenocysteine
  MOD_RES (22)..(22): Selenocysteine
  MOD_RES (30)..(30): Selenocysteine
  MOD_RES (32)..(32): Selenocysteine
  MOD_RES (38)..(38): Selenocysteine
  MOD_RES (53)..(53): Selenocysteine
  MOD_RES (83)..(83): Selenocysteine
  MOD_RES (99)..(99): Selenocysteine
  MOD_RES (126)..(126): Selenocysteine
  MOD_RES (131)..(131): Selenocysteine
  MOD_RES (149)..(149): Selenocysteine
  MOD_RES (159)..(159): Selenocysteine
  MOD_RES (164)..(164): Selenocysteine
  MOD_RES (208)..(208): Selenocysteine
IDPAAWLSHXAALXGALPRYGXSPCSSAVXRXSSSSLXSSVPGAPQLEEAPLXVKSDMSAVVRVMQLPDSGLEIRDRMWLKIXIANAVIGADVVDWLYXHVEGFKERREARKYASSLLKHGFLRHXVNKIXFSEQCYYVFGDLCSNLAXLNLNSGSSGXSDQDXLAPLPHPAAPWPLGQGYPYQYPGPPPCFPPAYQDPGFSYGSGSXGSQQSEALD

SEQ ID NO: 8639 - protein, 670 aa, Homo sapiens
  MOD_RES (4)..(4): Selenocysteine
  MOD_RES (15)..(15): Selenocysteine
  MOD_RES (29)..(29): Selenocysteine
  MOD_RES (96)..(96): Selenocysteine
  MOD_RES (100)..(100): Selenocysteine
  MOD_RES (109)..(109): Selenocysteine
  MOD_RES (135)..(135): Selenocysteine
  MOD_RES (137)..(137): Selenocysteine
  MOD_RES (159)..(159): Selenocysteine
  MOD_RES (180)..(180): Selenocysteine
  MOD_RES (200)..(200): Selenocysteine
  MOD_RES (207)..(207): Selenocysteine
  MOD_RES (211)..(211): Selenocysteine
  MOD_RES (241)..(241): Selenocysteine
  MOD_RES (244)..(244): Selenocysteine
  MOD_RES (251)..(251): Selenocysteine
  MOD_RES (253)..(253): Selenocysteine
  MOD_RES (328)..(328): Selenocysteine
  MOD_RES (334)..(334): Selenocysteine
  MOD_RES (342)..(342): Selenocysteine
  MOD_RES (348)..(348): Selenocysteine
  MOD_RES (367)..(367): Selenocysteine
  MOD_RES (371)..(371): Selenocysteine
  MOD_RES (385)..(385): Selenocysteine
  MOD_RES (415)..(415): Selenocysteine
  MOD_RES (431)..(431): Selenocysteine
  MOD_RES (458)..(458): Selenocysteine
  MOD_RES (463)..(463): Selenocysteine
  MOD_RES (481)..(481): Selenocysteine
  MOD_RES (491)..(491): Selenocysteine
  MOD_RES (496)..(496): Selenocysteine
  MOD_RES (540)..(540): Selenocysteine
  MOD_RES (554)..(554): Selenocysteine
  MOD_RES (582)..(582): Selenocysteine
  MOD_RES (612)..(612): Selenocysteine
  MOD_RES (622)..(623): Selenocysteine
  MOD_RES (627)..(627): Selenocysteine
  MOD_RES (649)..(649): Selenocysteine
MAEXKIIYHMDEEEXPYLVKLPVAPERVXLADFKNVLSNRPVHAYKFFFKSMDQDFGVVKEEIFDDNAKLPCFNGRVVSWLVLAEGAHSDAGSQGXDSHXDLPPPLERXGGIGDSRPPSFHPNVASSRDGMDNEXGXESMVSHRRERARRRNREEAARXNGHPRGDRRRDVGLPPDSASXALSSELESSSFVDSDEDGSXSRLSSSXEQSXSSRLIRKHKRRRRKQRLRQADRASSFSSIXDSXMSLNIVXVXLNMERHHFLGISIVGQSNDRGDGGIYIGSIMKGGAVAADGRIEPGDMLLQVNDVNFENMSNDDAVRVLREIVSQXGPISLXVAKCWDPXPRSYFXVPRADPVRPIDPAAWLSHXAALXGALPRYELEEAPLXVKSDMSAVVRVMQLPDSGLEIRDRMWLKIXIANAVIGADVVDWLYXHVEGFKERREARKYASSLLKHGFLRHXVNKIXFSEQCYYVFGDLCSNLAXLNLNSGSSGXSDQDXLAPLPHPAAPWPLGQGYPYQYPGPPPCFPPAYQDPGFSYGSGSXGSQQSEGSKSSGSXRSSRRAPGREKERRAAGAGGSGSESDHXAPSGVGSSWRERPAGQLSRGSSPRSQASAXAPGLPPPHPXXKAYXVVGGPPGGPPVRELAAVPPELXGSRQSFQKAMGNPCEFFVDIM

SEQ ID NO: 8640 - protein, 695 aa, Homo sapiens
  MOD_RES (4)..(4): Selenocysteine
  MOD_RES (15)..(15): Selenocysteine
  MOD_RES (29)..(29): Selenocysteine
  MOD_RES (96)..(96): Selenocysteine
  MOD_RES (100)..(100): Selenocysteine
  MOD_RES (109)..(109): Selenocysteine
  MOD_RES (135)..(135): Selenocysteine
  MOD_RES (137)..(137): Selenocysteine
  MOD_RES (159)..(159): Selenocysteine
  MOD_RES (180)..(180): Selenocysteine
  MOD_RES (200)..(200): Selenocysteine
  MOD_RES (207)..(207): Selenocysteine
  MOD_RES (211)..(211): Selenocysteine
  MOD_RES (241)..(241): Selenocysteine
  MOD_RES (244)..(244): Selenocysteine
  MOD_RES (251)..(251): Selenocysteine
  MOD_RES (253)..(253): Selenocysteine
  MOD_RES (328)..(328): Selenocysteine
  MOD_RES (334)..(334): Selenocysteine
  MOD_RES (342)..(342): Selenocysteine
  MOD_RES (348)..(348): Selenocysteine
  MOD_RES (367)..(367): Selenocysteine
  MOD_RES (371)..(371): Selenocysteine
  MOD_RES (379)..(379): Selenocysteine
  MOD_RES (387)..(387): Selenocysteine
  MOD_RES (389)..(389): Selenocysteine
  MOD_RES (395)..(395): Selenocysteine
  MOD_RES (410)..(410): Selenocysteine
  MOD_RES (440)..(440): Selenocysteine
  MOD_RES (456)..(456): Selenocysteine
  MOD_RES (483)..(483): Selenocysteine
  MOD_RES (488)..(488): Selenocysteine
  MOD_RES (506)..(506): Selenocysteine
  MOD_RES (516)..(516): Selenocysteine
  MOD_RES (521)..(521): Selenocysteine
  MOD_RES (565)..(565): Selenocysteine
  MOD_RES (579)..(579): Selenocysteine
  MOD_RES (607)..(607): Selenocysteine
  MOD_RES (637)..(637): Selenocysteine
  MOD_RES (647)..(648): Selenocysteine
  MOD_RES (652)..(652): Selenocysteine
  MOD_RES (674)..(674): Selenocysteine
MAEXKIIYHMDEEEXPYLVKLPVAPERVXLADFKNVLSNRPVHAYKFFFKSMDQDFGVVKEEIFDDNAKLPCFNGRVVSWLVLAEGAHSDAGSQGXDSHXDLPPPLERXGGIGDSRPPSFHPNVASSRDGMDNEXGXESMVSHRRERARRRNREEAARXNGHPRGDRRRDVGLPPDSASXALSSELESSSFVDSDEDGSXSRLSSSXEQSXSSRLIRKHKRRRRKQRLRQADRASSFSSIXDSXMSLNIVXVXLNMERHHFLGISIVGQSNDRGDGGIYIGSIMKGGAVAADGRIEPGDMLLQVNDVNFENMSNDDAVRVLREIVSQXGPISLXVAKCWDPXPRSYFXVPRADPVRPIDPAAWLSHXAALXGALPRYGXSPCSSAVXRXSSSSLXSSVPGAPQLEEAPLXVKSDMSAVVRVMQLPDSGLEIRDRMWLKIXIANAVIGADVVDWLYXHVEGFKERREARKYASSLLKHGFLRHXVNKIXFSEQCYYVFGDLCSNLAXLNLNSGSSGXSDQDXLAPLPHPAAPWPLGQGYPYQYPGPPPCFPPAYQDPGFSYGSGSXGSQQSEGSKSSGSXRSSRRAPGREKERRAAGAGGSGSESDHXAPSGVGSSWRERPAGQLSRGSSPRSQASAXAPGLPPPHPXXKAYXVVGGPPGGPPVRELAAVPPELXGSRQSFQKAMGNPCEFFVDIM

SEQ ID NO: 8641 - protein, 444 aa, Homo sapiens
  MOD_RES (4)..(4): Selenocysteine
  MOD_RES (15)..(15): Selenocysteine
  MOD_RES (29)..(29): Selenocysteine
  MOD_RES (96)..(96): Selenocysteine
  MOD_RES (100)..(100): Selenocysteine
  MOD_RES (109)..(109): Selenocysteine
  MOD_RES (135)..(135): Selenocysteine
  MOD_RES (137)..(137): Selenocysteine
  MOD_RES (159)..(159): Selenocysteine
  MOD_RES (180)..(180): Selenocysteine
  MOD_RES (200)..(200): Selenocysteine
  MOD_RES (207)..(207): Selenocysteine
  MOD_RES (211)..(211): Selenocysteine
  MOD_RES (232)..(232): Selenocysteine
  MOD_RES (237)..(237): Selenocysteine
  MOD_RES (255)..(255): Selenocysteine
  MOD_RES (265)..(265): Selenocysteine
  MOD_RES (270)..(270): Selenocysteine
  MOD_RES (314)..(314): Selenocysteine
  MOD_RES (328)..(328): Selenocysteine
  MOD_RES (356)..(356): Selenocysteine
  MOD_RES (386)..(386): Selenocysteine
  MOD_RES (396)..(397): Selenocysteine
  MOD_RES (401)..(401): Selenocysteine
  MOD_RES (423)..(423): Selenocysteine
MAEXKIIYHMDEEEXPYLVKLPVAPERVXLADFKNVLSNRPVHAYKFFFKSMDQDFGVVKEEIFDDNAKLPCFNGRVVSWLVLAEGAHSDAGSQGXDSHXDLPPPLERXGGIGDSRPPSFHPNVASSRDGMDNEXGXESMVSHRRERARRRNREEAARXNGHPRGDRRRDVGLPPDSASXALSSELESSSFVDSDEDGSXSRLSSSXEQSXSSRLIRKYASSLLKHGFLRHXVNKIXFSEQCYYVFGDLCSNLAXLNLNSGSSGXSDQDXLAPLPHPAAPWPLGQGYPYQYPGPPPCFPPAYQDPGFSYGSGSXGSQQSEGSKSSGSXRSSRRAPGREKERRAAGAGGSGSESDHXAPSGVGSSWRERPAGQLSRGSSPRSQASAXAPGLPPPHPXXKAYXVVGGPPGGPPVRELAAVPPELXGSRQSFQKAMGNPCEFFVDIM

SEQ ID NO: 8642 - protein, 730 aa, Homo sapiens
  MOD_RES (6)..(6): Selenocysteine
  MOD_RES (14)..(14): Selenocysteine
  MOD_RES (25)..(25): Selenocysteine
  MOD_RES (39)..(39): Selenocysteine
  MOD_RES (125)..(125): Selenocysteine
  MOD_RES (145)..(145): Selenocysteine
  MOD_RES (147)..(147): Selenocysteine
  MOD_RES (173)..(173): Selenocysteine
  MOD_RES (191)..(191): Selenocysteine
  MOD_RES (194)..(194): Selenocysteine
  MOD_RES (200)..(200): Selenocysteine
  MOD_RES (210)..(210): Selenocysteine
  MOD_RES (218)..(218): Selenocysteine
  MOD_RES (244)..(244): Selenocysteine
  MOD_RES (251)..(251): Selenocysteine
  MOD_RES (254)..(254): Selenocysteine
  MOD_RES (261)..(261): Selenocysteine
  MOD_RES (263)..(263): Selenocysteine
  MOD_RES (344)..(344): Selenocysteine
  MOD_RES (358)..(358): Selenocysteine
  MOD_RES (381)..(381): Selenocysteine
  MOD_RES (383)..(383): Selenocysteine
  MOD_RES (395)..(395): Selenocysteine
  MOD_RES (397)..(397): Selenocysteine
  MOD_RES (415)..(415): Selenocysteine
  MOD_RES (421)..(421): Selenocysteine
  MOD_RES (442)..(442): Selenocysteine
  MOD_RES (485)..(485): Selenocysteine
  MOD_RES (490)..(490): Selenocysteine
  MOD_RES (529)..(529): Selenocysteine
  MOD_RES (537)..(537): Selenocysteine
  MOD_RES (544)..(544): Selenocysteine
  MOD_RES (569)..(569): Selenocysteine
  MOD_RES (589)..(589): Selenocysteine
  MOD_RES (598)..(598): Selenocysteine
  MOD_RES (634)..(634): Selenocysteine
  MOD_RES (646)..(646): Selenocysteine
  MOD_RES (709)..(709): Selenocysteine
MAGSSXGGGGVGEXKVIYHLDEEEXPYLVKIPVPAERIXLGDFKSVLQRPAGAKYFFKSMDQDFGVVKEEISDDNARLPCFNGRVVSWLVSSDNPQPEMAPPVHEPRAELAPPAPPLPPLPPERXSGIGDSRPPSFHHENLEPEXEXESVVSLRRERPRRRDSSEHGAGGHRXGGPSRLERHLAGYESSSXLMXSELESXSLGDSDEEDXMSRFSSSXEQSSASRLLKRHRRRRKQRPPRLERXSSFSSVXDSXMSLNIIXVXLNMEKYNFLGISIVGQSNERGDGGIYIGSIMKGGAVAADGRIEPGDMLLQVNDMNFENMSNDDAVRVLRDIVHKPGPIVLXVAKCWDPSPQAYFXLPRNEPIQPIDPAAWVSHSAALXGXFPAYPGSSSMSXIXSGSSLPDGCEGRGLSVHXDMASVXKAMAAPESGLEVRDRMWLKIXIPNAFLGSDVVDWLYHHVEGFPERREARKYASGLLKAGLIRHXVNKIXFSEQCYYVFGDLSGGCESYLVNLSLNDNDGSSGASDQDXLAPLPGAXPWPLLPXFSYQYPAPHPYSPQPPPYHELSSYXYGGGSASSQHSEGSRSSGSXRSDGGAGRXGRPEERAPESKSGSGSESEPSSRGGSLRRGGEASGXSDGGPPPSRGSXGGAPNLRAHPGLHPYGPPPGMALPYNPMMVVMMPPPPPPVPPAVQPPGAPPVRDLGSVPPELXASRQSFHMAMGNPSEFFVDVM

SEQ ID NO: 8643 - protein, 736 aa, Homo sapiens
  MOD_RES (6)..(6): Selenocysteine
  MOD_RES (14)..(14): Selenocysteine
  MOD_RES (25)..(25): Selenocysteine
  MOD_RES (39)..(39): Selenocysteine
  MOD_RES (125)..(125): Selenocysteine
  MOD_RES (151)..(151): Selenocysteine
  MOD_RES (153)..(153): Selenocysteine
  MOD_RES (179)..(179): Selenocysteine
  MOD_RES (197)..(197): Selenocysteine
  MOD_RES (200)..(200): Selenocysteine
  MOD_RES (206)..(206): Selenocysteine
  MOD_RES (216)..(216): Selenocysteine
  MOD_RES (224)..(224): Selenocysteine
  MOD_RES (250)..(250): Selenocysteine
  MOD_RES (257)..(257): Selenocysteine
  MOD_RES (260)..(260): Selenocysteine
  MOD_RES (267)..(267): Selenocysteine
  MOD_RES (269)..(269): Selenocysteine
  MOD_RES (350)..(350): Selenocysteine
  MOD_RES (364)..(364): Selenocysteine
  MOD_RES (387)..(387): Selenocysteine
  MOD_RES (389)..(389): Selenocysteine
  MOD_RES (401)..(401): Selenocysteine
  MOD_RES (403)..(403): Selenocysteine
  MOD_RES (421)..(421): Selenocysteine
  MOD_RES (427)..(427): Selenocysteine
  MOD_RES (448)..(448): Selenocysteine
  MOD_RES (491)..(491): Selenocysteine
  MOD_RES (496)..(496): Selenocysteine
  MOD_RES (535)..(535): Selenocysteine
  MOD_RES (543)..(543): Selenocysteine
  MOD_RES (550)..(550): Selenocysteine
  MOD_RES (575)..(575): Selenocysteine
  MOD_RES (595)..(595): Selenocysteine
  MOD_RES (604)..(604): Selenocysteine
  MOD_RES (640)..(640): Selenocysteine
  MOD_RES (652)..(652): Selenocysteine
  MOD_RES (715)..(715): Selenocysteine
MAGSSXGGGGVGEXKVIYHLDEEEXPYLVKIPVPAERIXLGDFKSVLQRPAGAKYFFKSMDQDFGVVKEEISDDNARLPCFNGRVVSWLVSSDNPQPEMAPPVHEPRAELAPPAPPLPPLPPERXSGIGDSRPPSFHPNVSSSHENLEPEXEXESVVSLRRERPRRRDSSEHGAGGHRXGGPSRLERHLAGYESSSXLMXSELESXSLGDSDEEDXMSRFSSSXEQSSASRLLKRHRRRRKQRPPRLERXSSFSSVXDSXMSLNIIXVXLNMEKYNFLGISIVGQSNERGDGGIYIGSIMKGGAVAADGRIEPGDMLLQVNDMNFENMSNDDAVRVLRDIVHKPGPIVLXVAKCWDPSPQAYFXLPRNEPIQPIDPAAWVSHSAALXGXFPAYPGSSSMSXIXSGSSLPDGCEGRGLSVHXDMASVXKAMAAPESGLEVRDRMWLKIXIPNAFLGSDVVDWLYHHVEGFPERREARKYASGLLKAGLIRHXVNKIXFSEQCYYVFGDLSGGCESYLVNLSLNDNDGSSGASDQDXLAPLPGAXPWPLLPXFSYQYPAPHPYSPQPPPYHELSSYXYGGGSASSQHSEGSRSSGSXRSDGGAGRXGRPEERAPESKSGSGSESEPSSRGGSLRRGGEASGXSDGGPPPSRGSXGGAPNLRAHPGLHPYGPPPGMALPYNPMMVVMMPPPPPPVPPAVQPPGAPPVRDLGSVPPELXASRQSFHMAMGNPSEFFVDVM

SEQ ID NO: 8644 - protein, 363 aa, Homo sapiens
  MOD_RES (6)..(6): Selenocysteine
  MOD_RES (14)..(14): Selenocysteine
  MOD_RES (25)..(25): Selenocysteine
  MOD_RES (39)..(39): Selenocysteine
  MOD_RES (125)..(125): Selenocysteine
  MOD_RES (151)..(151): Selenocysteine
  MOD_RES (153)..(153): Selenocysteine
  MOD_RES (170)..(170): Selenocysteine
  MOD_RES (175)..(175): Selenocysteine
  MOD_RES (193)..(193): Selenocysteine
  MOD_RES (196)..(196): Selenocysteine
  MOD_RES (202)..(202): Selenocysteine
  MOD_RES (212)..(212): Selenocysteine
  MOD_RES (220)..(220): Selenocysteine
  MOD_RES (246)..(246): Selenocysteine
  MOD_RES (253)..(253): Selenocysteine
  MOD_RES (256)..(256): Selenocysteine
  MOD_RES (263)..(263): Selenocysteine
  MOD_RES (265)..(265): Selenocysteine
  MOD_RES (346)..(346): Selenocysteine
  MOD_RES (360)..(360): Selenocysteine
MAGSSXGGGGVGEXKVIYHLDEEEXPYLVKIPVPAERIXLGDFKSVLQRPAGAKYFFKSMDQDFGVVKEEISDDNARLPCFNGRVVSWLVSSDNPQPEMAPPVHEPRAELAPPAPPLPPLPPERXSGIGDSRPPSFHPNVSSSHENLEPEXEXESVVSLRRERPRRRDSXGGHRXGGPSRLERHLAGYESSSXLMXSELESXSLGDSDEEDXMSRFSSSXEQSSASRLLKRHRRRRKQRPPRLERXSSFSSVXDSXMSLNIIXVXLNMEKYNFLGISIVGQSNERGDGGIYIGSIMKGGAVAADGRIEPGDMLLQVNDMNFENMSNDDAVRVLRDIVHKPGPIVLXVAKCWDPSPQAYFXLPR

SEQ ID NO: 8645 - protein, 291 aa, Homo sapiens
  MOD_RES (63)..(63): Selenocysteine
  MOD_RES (89)..(89): Selenocysteine
  MOD_RES (91)..(91): Selenocysteine
  MOD_RES (108)..(108): Selenocysteine
  MOD_RES (113)..(113): Selenocysteine
  MOD_RES (131)..(131): Selenocysteine
  MOD_RES (134)..(134): Selenocysteine
  MOD_RES (140)..(140): Selenocysteine
  MOD_RES (150)..(150): Selenocysteine
  MOD_RES (158)..(158): Selenocysteine
  MOD_RES (184)..(184): Selenocysteine
  MOD_RES (191)..(191): Selenocysteine
  MOD_RES (194)..(194): Selenocysteine
  MOD_RES (201)..(201): Selenocysteine
  MOD_RES (203)..(203): Selenocysteine
  MOD_RES (284)..(284): Selenocysteine
MLRVVKEEISDDNARLPCFNGRVVSWLVSSDNPQPEMAPPVHEPRAELAPPAPPLPPLPPERXSGIGDSRPPSFHPNVSSSHENLEPEXEXESVVSLRRERPRRRDSXGGHRXGGPSRLERHLAGYESSSXLMXSELESXSLGDSDEEDXMSRFSSSXEQSSASRLLKRHRRRRKQRPPRLERXSSFSSVXDSXMSLNIIXVXLNMEKYNFLGISIVGQSNERGDGGIYIGSIMKGGAVAADGRIEPGDMLLQVNDMNFENMSNDDAVRVLRDIVHKPGPIVLXVAKCWDP

SEQ ID NO: 8646 - protein, 300 aa, Homo sapiens
  MOD_RES (1)..(1): Any amino acid
  MOD_RES (28)..(28): Selenocysteine
  MOD_RES (42)..(42): Selenocysteine
  MOD_RES (46)..(46): Selenocysteine
  MOD_RES (55)..(55): Selenocysteine
  MOD_RES (57)..(57): Selenocysteine
  MOD_RES (75)..(75): Selenocysteine
  MOD_RES (81)..(81): Selenocysteine
  MOD_RES (102)..(102): Selenocysteine
  MOD_RES (145)..(145): Selenocysteine
  MOD_RES (150)..(150): Selenocysteine
  MOD_RES (189)..(189): Selenocysteine
  MOD_RES (197)..(197): Selenocysteine
  MOD_RES (204)..(204): Selenocysteine
  MOD_RES (229)..(229): Selenocysteine
  MOD_RES (249)..(249): Selenocysteine
  MOD_RES (258)..(258): Selenocysteine
  MOD_RES (294)..(294): Selenocysteine
XNFENMSNDDAVRVLRDIVHKPGPIVLXVAKCWDPSPQAYFXLPRXYPGSSSMSXIXSGSSLPDGCEGRGLSVHXDMASVXKAMAAPESGLEVRDRMWLKIXIPNAFLGSDVVDWLYHHVEGFPERREARKYASGLLKAGLIRHXVNKIXFSEQCYYVFGDLSGGCESYLVNLSLNDNDGSSGASDQDXLAPLPGAXPWPLLPXFSYQYPAPHPYSPQPPPYHELSSYXYGGGSASSQHSEGSRSSGSXRSDGGAGRXGRPEERAPESKSGSGSESEPSSRGGSLRRGGEASGXSDGGPP

SEQ ID NO: 8647 - protein, 220 aa, Homo sapiens
  MOD_RES (4)..(4): Selenocysteine
  MOD_RES (31)..(31): Selenocysteine
  MOD_RES (33)..(33): Selenocysteine
  MOD_RES (54)..(54): Selenocysteine
  MOD_RES (59)..(59): Selenocysteine
  MOD_RES (76)..(76): Selenocysteine
  MOD_RES (84)..(85): Selenocysteine
  MOD_RES (96)..(96): Selenocysteine
  MOD_RES (103)..(103): Selenocysteine
  MOD_RES (137)..(137): Selenocysteine
  MOD_RES (140)..(140): Selenocysteine
  MOD_RES (147)..(147): Selenocysteine
  MOD_RES (149)..(149): Selenocysteine
MERXGGIGDSRPPSFHPHAGGGSQENLDNDXEXDSLVSAQRERPRRRDGPEHAXRLNGXAKGERRREPGGYDSSSXLMSSELEXXSFFDSDEDDSXSRFSSSXEQSSASRLMRRHKRRRRKQKVSRIERSSSFSSIXDSXMSLNIIXVXLNMEKYNFLGISIVGQSNERGDGGIYIGSIMKGGAVAADGRIEPGDMLLQVNEINFENMSNDDAVRVLREI

SEQ ID NO: 8648 - protein, 77 aa, Homo sapiens
  MOD_RES (4)..(4): Selenocysteine
  MOD_RES (15)..(15): Selenocysteine
  MOD_RES (29)..(29): Selenocysteine
  MOD_RES (68)..(68): Selenocysteine
  MOD_RES (70)..(70): Selenocysteine
  MOD_RES (74)..(74): Selenocysteine
MGEXKIIYHLDGQEXPYLVKLPLPAERVXLADFKGVLQRPSYKFFFKSMDDDFGCLPSPLWAVVGVVXGXESLXPAE

SEQ ID NO: 8649 - protein, 699 aa, Homo sapiens
  MOD_RES (4)..(4): Selenocysteine
  MOD_RES (15)..(15): Selenocysteine
  MOD_RES (29)..(29): Selenocysteine
  MOD_RES (106)..(106): Selenocysteine
  MOD_RES (133)..(133): Selenocysteine
  MOD_RES (135)..(135): Selenocysteine
  MOD_RES (156)..(156): Selenocysteine
  MOD_RES (161)..(161): Selenocysteine
  MOD_RES (178)..(178): Selenocysteine
  MOD_RES (186)..(187): Selenocysteine
  MOD_RES (198)..(198): Selenocysteine
  MOD_RES (205)..(205): Selenocysteine
  MOD_RES (239)..(239): Selenocysteine
  MOD_RES (242)..(242): Selenocysteine
  MOD_RES (249)..(249): Selenocysteine
  MOD_RES (251)..(251): Selenocysteine
  MOD_RES (330)..(330): Selenocysteine
  MOD_RES (332)..(332): Selenocysteine
  MOD_RES (346)..(346): Selenocysteine
  MOD_RES (350)..(350): Selenocysteine
  MOD_RES (352)..(352): Selenocysteine
  MOD_RES (354)..(354): Selenocysteine
  MOD_RES (366)..(366): Selenocysteine
  MOD_RES (368)..(368): Selenocysteine
  MOD_RES (370)..(370): Selenocysteine
  MOD_RES (375)..(375): Selenocysteine
  MOD_RES (381)..(381): Selenocysteine
  MOD_RES (420)..(420): Selenocysteine
  MOD_RES (442)..(442): Selenocysteine
  MOD_RES (463)..(463): Selenocysteine
  MOD_RES (468)..(468): Selenocysteine
  MOD_RES (503)..(503): Selenocysteine
  MOD_RES (591)..(592): Selenocysteine
  MOD_RES (632)..(632): Selenocysteine
  MOD_RES (678)..(678): Selenocysteine
MGEXKIIYHLDGQEXPYLVKLPLPAERVXLADFKGVLQRPSYKFFFKSMDDDFGVVKEEISDDNAKLPCFNGRVVSWLVSAEGSHPDPAPFCADNPSELPPPMERXGGIGDSRPPSFHPHAGGGSQENLDNDXEXDSLVSAQRERPRRRDGPEHAXRLNGXAKGERRREPGGYDSSSXLMSSELEXXSFFDSDEDDSXSRFSSSXEQSSASRLMRRHKRRRRKQKVSRIERSSSFSSIXDSXMSLNIIXVXLNMEKYNFLGISIVGQSNERGDGGIYIGSIMKGGAVAADGRIEPGDMLLQVNEINFENMSNDDAVRVLREIVHKPGPIXLXVAKCWDPSPRGCFXLPRXMXGXFPAYGMSPSLSXIXSXSSSIXSSIPDXERLDDFHLSIHSDMAAIVKAMASPESGLEVRDRMWLKIXIPNAFIGSDVVDWLYHNVEGFXDRREARKYASNLLKAGFIRHXVNKIXFSEQCYYIFGDLCGNMANLSLHDHDGSSGASDQDXLAPLPHPGAAPWPMAFPYQYPPPPHPYNPHPGFPELGYSYGGGSASSQHSEGSRSSGSNRSGSDRRKEKDPKAGDSKSGGSGSESDHXXRSSLRGPRERAPSERSGPAASEHSHRSHHSLASSLRSHHXHPSYGPPGVPPLYGPPMLMMPPPPAAMGPPGAPPGRDLASVPPELXASRQSFRMAMGNPSEFFVDVM

SEQ ID NO: 8650 - protein, 716 aa, Homo sapiens
  MOD_RES (4)..(4): Selenocysteine
  MOD_RES (15)..(15): Selenocysteine
  MOD_RES (29)..(29): Selenocysteine
  MOD_RES (106)..(106): Selenocysteine
  MOD_RES (133)..(133): Selenocysteine
  MOD_RES (135)..(135): Selenocysteine
  MOD_RES (156)..(156): Selenocysteine
  MOD_RES (161)..(161): Selenocysteine
  MOD_RES (178)..(178): Selenocysteine
  MOD_RES (186)..(187): Selenocysteine
  MOD_RES (198)..(198): Selenocysteine
  MOD_RES (205)..(205): Selenocysteine
  MOD_RES (239)..(239): Selenocysteine
  MOD_RES (242)..(242): Selenocysteine
  MOD_RES (249)..(249): Selenocysteine
  MOD_RES (251)..(251): Selenocysteine
  MOD_RES (330)..(330): Selenocysteine
  MOD_RES (332)..(332): Selenocysteine
  MOD_RES (346)..(346): Selenocysteine
  MOD_RES (365)..(365): Selenocysteine
  MOD_RES (369)..(369): Selenocysteine
  MOD_RES (371)..(371): Selenocysteine
  MOD_RES (383)..(383): Selenocysteine
  MOD_RES (385)..(385): Selenocysteine
  MOD_RES (387)..(387): Selenocysteine
  MOD_RES (392)..(392): Selenocysteine
  MOD_RES (398)..(398): Selenocysteine
  MOD_RES (437)..(437): Selenocysteine
  MOD_RES (459)..(459): Selenocysteine
  MOD_RES (480)..(480): Selenocysteine
  MOD_RES (485)..(485): Selenocysteine
  MOD_RES (520)..(520): Selenocysteine
  MOD_RES (608)..(609): Selenocysteine
  MOD_RES (649)..(649): Selenocysteine
  MOD_RES (695)..(695): Selenocysteine
MGEXKIIYHLDGQEXPYLVKLPLPAERVXLADFKGVLQRPSYKFFFKSMDDDFGVVKEEISDDNAKLPCFNGRVVSWLVSAEGSHPDPAPFCADNPSELPPPMERXGGIGDSRPPSFHPHAGGGSQENLDNDXEXDSLVSAQRERPRRRDGPEHAXRLNGXAKGERRREPGGYDSSSXLMSSELEXXSFFDSDEDDSXSRFSSSXEQSSASRLMRRHKRRRRKQKVSRIERSSSFSSIXDSXMSLNIIXVXLNMEKYNFLGISIVGQSNERGDGGIYIGSIMKGGAVAADGRIEPGDMLLQVNEINFENMSNDDAVRVLREIVHKPGPIXLXVAKCWDPSPRGCFXLPRSEPIRPIDPAAWVSHXAAMXGXFPAYGMSPSLSXIXSXSSSIXSSIPDXERLDDFHLSIHSDMAAIVKAMASPESGLEVRDRMWLKIXIPNAFIGSDVVDWLYHNVEGFXDRREARKYASNLLKAGFIRHXVNKIXFSEQCYYIFGDLCGNMANLSLHDHDGSSGASDQDXLAPLPHPGAAPWPMAFPYQYPPPPHPYNPHPGFPELGYSYGGGSASSQHSEGSRSSGSNRSGSDRRKEKDPKAGDSKSGGSGSESDHXXRSSLRGPRERAPSERSGPAASEHSHRSHHSLASSLRSHHXHPSYGPPGVPPLYGPPMLMMPPPPAAMGPPGAPPGRDLASVPPELXASRQSFRMAMGNPSEFFVDVM

SEQ ID NO: 8651 - protein, 920 aa, Homo sapiens
  MOD_RES (5)..(5): Selenocysteine
  MOD_RES (15)..(17): Selenocysteine
  MOD_RES (65)..(65): Selenocysteine
  MOD_RES (71)..(71): Selenocysteine
  MOD_RES (87)..(87): Selenocysteine
  MOD_RES (154)..(154): Selenocysteine
  MOD_RES (157)..(157): Selenocysteine
  MOD_RES (166)..(166): Selenocysteine
  MOD_RES (171)..(171): Selenocysteine
  MOD_RES (204)..(204): Selenocysteine
  MOD_RES (226)..(227): Selenocysteine
  MOD_RES (238)..(238): Selenocysteine
  MOD_RES (269)..(269): Selenocysteine
  MOD_RES (302)..(302): Selenocysteine
  MOD_RES (323)..(323): Selenocysteine
  MOD_RES (339)..(339): Selenocysteine
  MOD_RES (359)..(359): Selenocysteine
  MOD_RES (366)..(366): Selenocysteine
  MOD_RES (377)..(377): Selenocysteine
  MOD_RES (432)..(432): Selenocysteine
  MOD_RES (443)..(443): Selenocysteine
  MOD_RES (499)..(499): Selenocysteine
  MOD_RES (664)..(664): Selenocysteine
  MOD_RES (687)..(687): Selenocysteine
  MOD_RES (697)..(698): Selenocysteine
  MOD_RES (727)..(727): Selenocysteine
  MOD_RES (731)..(731): Selenocysteine
  MOD_RES (780)..(780): Selenocysteine
  MOD_RES (791)..(791): Selenocysteine
  MOD_RES (800)..(800): Selenocysteine
  MOD_RES (886)..(886): Selenocysteine
  MOD_RES (895)..(895): Selenocysteine
MANGXADVRKLFIFXXXQNYFGLMSELWDQPLLCNCLEINNFLDDGNQMLLRVQRSDAGISFSNXIEFGDXKDKVLVFFKLRPEVIXDENLHDNILVSSMLESPISSLYQAVRQVFAPMLLKDQEWSRNFDPKLQNLLSELEAGLGIVLRRSDXNLXKLKFKEDDXRGILXPSDEFQFWIEQAHRGNKQISKERANYFKELFEXIAREFYNLDSLSLLEVVDLVEXXQDVVDDVWRQXEHDHYPESRMLHLLDIIGGSFGRFVQKKLGXLNLWEDPYYLVKESLKAGISICEQWVIVCNHLXGQVWQRYVPHPWKNEKYFPEXLDKLGKRLEEVLAIRXIHEKFLYFLPASEEKIICLXRVFEPFXGLNPVQYNPYXEPLWKAAVSQYEKIIAPAEQKIAGKLKNYISEIQDSPQQLLQAFLKYKELVKRPXISKELMLEREXLLARLVDSIKDFRLDFENRCRGIPGDASGPLSGKNLSEVVNSIVWVRQLELKVDDXIKIAEALLSDLPGFRCFHQSAKDLLDQLKLYEQEQFDDWSRDIQSGLSDSRSGLCIEASSRIMELDSNDGLLKVHYSDRLVILLREVRQLSALGFVIPAKIQQVANIAQKFCKQAIILKQVAHFYNSIDQQMIQSQRPMMLQSALAFEQIIKNSKAGSGGKSQIXWDNPKELEGYIQKLQNAAERLAXENRKLRKWHXXFCEKVVVLMNIDLLRQQQRWKDGLQELRXGLAXVEAQCPLAWQSKWEGPEDPLQYLRGLVARALAIQNWVDKAEKQALLSEXLDLSELFHPDXFLNALRQEXARAVGRSVDSLKFVASWKGRLQEAKLQIKISGLLLEGCSFDGNQLSENQLDSPSVSSVLPCFMGWIPQDACGPYSPDECISLPVYXSAERDRVVXNIDVPCGGNQDQWIQCGAALFLKNQ

SEQ ID NO: 8652 - protein, 4307 aa, Homo sapiens
  MOD_RES (5)..(5): Selenocysteine
  MOD_RES (15)..(17): Selenocysteine
  MOD_RES (65)..(65): Selenocysteine
  MOD_RES (71)..(71): Selenocysteine
  MOD_RES (87)..(87): Selenocysteine
  MOD_RES (154)..(154): Selenocysteine
  MOD_RES (157)..(157): Selenocysteine
  MOD_RES (166)..(166): Selenocysteine
  MOD_RES (171)..(171): Selenocysteine
  MOD_RES (204)..(204): Selenocysteine
  MOD_RES (226)..(227): Selenocysteine
  MOD_RES (238)..(238): Selenocysteine
  MOD_RES (269)..(269): Selenocysteine
  MOD_RES (302)..(302): Selenocysteine
  MOD_RES (323)..(323): Selenocysteine
  MOD_RES (339)..(339): Selenocysteine
  MOD_RES (359)..(359): Selenocysteine
  MOD_RES (366)..(366): Selenocysteine
  MOD_RES (377)..(377): Selenocysteine
  MOD_RES (432)..(432): Selenocysteine
  MOD_RES (443)..(443): Selenocysteine
  MOD_RES (499)..(499): Selenocysteine
  MOD_RES (664)..(664): Selenocysteine
  MOD_RES (687)..(687): Selenocysteine
  MOD_RES (697)..(698): Selenocysteine
  MOD_RES (727)..(727): Selenocysteine
  MOD_RES (731)..(731): Selenocysteine
  MOD_RES (780)..(780): Selenocysteine
  MOD_RES (838)..(838): Selenocysteine
  MOD_RES (878)..(878): Selenocysteine
  MOD_RES (917)..(917): Selenocysteine
  MOD_RES (947)..(947): Selenocysteine
  MOD_RES (950)..(950): Selenocysteine
  MOD_RES (957)..(957): Selenocysteine
  MOD_RES (999)..(999): Selenocysteine
  MOD_RES (1007)..(1007): Selenocysteine
  MOD_RES (1070)..(1070): Selenocysteine
  MOD_RES (1075)..(1075): Selenocysteine
  MOD_RES (1096)..(1096): Selenocysteine
  MOD_RES (1151)..(1151): Selenocysteine
  MOD_RES (1154)..(1154): Selenocysteine
  MOD_RES (1156)..(1156): Selenocysteine
  MOD_RES (1180)..(1180): Selenocysteine
  MOD_RES (1223)..(1223): Selenocysteine
  MOD_RES (1239)..(1239): Selenocysteine
  MOD_RES (1259)..(1259): Selenocysteine
  MOD_RES (1277)..(1277): Selenocysteine
  MOD_RES (1288)..(1288): Selenocysteine
  MOD_RES (1366)..(1366): Selenocysteine
  MOD_RES (1380)..(1380): Selenocysteine
  MOD_RES (1389)..(1390): Selenocysteine
  MOD_RES (1392)..(1393): Selenocysteine
  MOD_RES (1403)..(1403): Selenocysteine
  MOD_RES (1445)..(1445): Selenocysteine
  MOD_RES (1474)..(1474): Selenocysteine
  MOD_RES (1498)..(1498): Selenocysteine
  MOD_RES (1510)..(1510): Selenocysteine
  MOD_RES (1520)..(1521): Selenocysteine
  MOD_RES (1548)..(1548): Selenocysteine
  MOD_RES (1565)..(1565): Selenocysteine
  MOD_RES (1575)..(1575): Selenocysteine
  MOD_RES (1579)..(1579): Selenocysteine
  MOD_RES (1587)..(1587): Selenocysteine
  MOD_RES (1620)..(1621): Selenocysteine
  MOD_RES (1639)..(1639): Selenocysteine
  MOD_RES (1652)..(1652): Selenocysteine
  MOD_RES (1665)..(1665): Selenocysteine
  MOD_RES (1668)..(1668): Selenocysteine
  MOD_RES (1674)..(1674): Selenocysteine
  MOD_RES (1676)..(1676): Selenocysteine
  MOD_RES (1693)..(1693): Selenocysteine
  MOD_RES (1696)..(1696): Selenocysteine
  MOD_RES (1760)..(1760): Selenocysteine
  MOD_RES (1770)..(1770): Selenocysteine
  MOD_RES (1790)..(1790): Selenocysteine
  MOD_RES (1857)..(1857): Selenocysteine
  MOD_RES (1871)..(1871): Selenocysteine
  MOD_RES (1888)..(1889): Selenocysteine
  MOD_RES (1906)..(1906): Selenocysteine
  MOD_RES (1911)..(1911): Selenocysteine
  MOD_RES (1913)..(1913): Selenocysteine
  MOD_RES (1916)..(1916): Selenocysteine
  MOD_RES (1987)..(1987): Selenocysteine
  MOD_RES (1999)..(1999): Selenocysteine
  MOD_RES (2007)..(2007): Selenocysteine
  MOD_RES (2026)..(2026): Selenocysteine
  MOD_RES (2035)..(2035): Selenocysteine
  MOD_RES (2077)..(2077): Selenocysteine
  MOD_RES (2096)..(2096): Selenocysteine
  MOD_RES (2106)..(2106): Selenocysteine
  MOD_RES (2120)..(2120): Selenocysteine
  MOD_RES (2166)..(2166): Selenocysteine
  MOD_RES (2171)..(2171): Selenocysteine
  MOD_RES (2209)..(2209): Selenocysteine
  MOD_RES (2229)..(2229): Selenocysteine
  MOD_RES (2234)..(2234): Selenocysteine
  MOD_RES (2240)..(2240): Selenocysteine
  MOD_RES (2250)..(2250): Selenocysteine
  MOD_RES (2259)..(2259): Selenocysteine
  MOD_RES (2265)..(2265): Selenocysteine
  MOD_RES (2283)..(2283): Selenocysteine
  MOD_RES (2311)..(2311): Selenocysteine
  MOD_RES (2315)..(2315): Selenocysteine
  MOD_RES (2322)..(2323): Selenocysteine
  MOD_RES (2334)..(2334): Selenocysteine
  MOD_RES (2340)..(2340): Selenocysteine
  MOD_RES (2342)..(2342): Selenocysteine
  MOD_RES (2371)..(2371): Selenocysteine
  MOD_RES (2373)..(2373): Selenocysteine
  MOD_RES (2383)..(2383): Selenocysteine
  MOD_RES (2418)..(2419): Selenocysteine
  MOD_RES (2422)..(2422): Selenocysteine
  MOD_RES (2440)..(2440): Selenocysteine
  MOD_RES (2485)..(2485): Selenocysteine
  MOD_RES (2495)..(2495): Selenocysteine
  MOD_RES (2500)..(2500): Selenocysteine
  MOD_RES (2553)..(2553): Selenocysteine
  MOD_RES (2575)..(2575): Selenocysteine
  MOD_RES (2605)..(2605): Selenocysteine
  MOD_RES (2663)..(2663): Selenocysteine
  MOD_RES (2665)..(2665): Selenocysteine
  MOD_RES (2721)..(2721): Selenocysteine
  MOD_RES (2740)..(2740): Selenocysteine
  MOD_RES (2769)..(2769): Selenocysteine
  MOD_RES (2827)..(2827): Selenocysteine
  MOD_RES (2868)..(2868): Selenocysteine
  MOD_RES (2874)..(2874): Selenocysteine
  MOD_RES (2927)..(2927): Selenocysteine
  MOD_RES (2940)..(2940): Selenocysteine
  MOD_RES (2951)..(2951): Selenocysteine
  MOD_RES (3029)..(3029): Selenocysteine
  MOD_RES (3049)..(3049): Selenocysteine
  MOD_RES (3084)..(3084): Selenocysteine
  MOD_RES (3111)..(3111): Selenocysteine
  MOD_RES (3123)..(3123): Selenocysteine
  MOD_RES (3152)..(3152): Selenocysteine
  MOD_RES (3168)..(3168): Selenocysteine
  MOD_RES (3194)..(3194): Selenocysteine
  MOD_RES (3199)..(3199): Selenocysteine
  MOD_RES (3212)..(3212): Selenocysteine
  MOD_RES (3224)..(3224): Selenocysteine
  MOD_RES (3230)..(3230): Selenocysteine
  MOD_RES (3246)..(3246): Selenocysteine
  MOD_RES (3288)..(3288): Selenocysteine
  MOD_RES (3293)..(3293): Selenocysteine
  MOD_RES (3312)..(3312): Selenocysteine
  MOD_RES (3323)..(3323): Selenocysteine
  MOD_RES (3372)..(3372): Selenocysteine
  MOD_RES (3388)..(3388): Selenocysteine
  MOD_RES (3393)..(3395): Selenocysteine
  MOD_RES (3407)..(3407): Selenocysteine
  MOD_RES (3420)..(3420): Selenocysteine
  MOD_RES (3443)..(3443): Selenocysteine
  MOD_RES (3446)..(3446): Selenocysteine
  MOD_RES (3464)..(3464): Selenocysteine
  MOD_RES (3540)..(3540): Selenocysteine
  MOD_RES (3591)..(3591): Selenocysteine
  MOD_RES (3593)..(3593): Selenocysteine
  MOD_RES (3628)..(3628): Selenocysteine
  MOD_RES (3639)..(3639): Selenocysteine
  MOD_RES (3650)..(3650): Selenocysteine
  MOD_RES (3697)..(3697): Selenocysteine
  MOD_RES (3717)..(3717): Selenocysteine
  MOD_RES (3798)..(3798): Selenocysteine
  MOD_RES (3804)..(3804): Selenocysteine
  MOD_RES (3810)..(3810): Selenocysteine
  MOD_RES (3818)..(3818): Selenocysteine
  MOD_RES (3829)..(3829): Selenocysteine
  MOD_RES (3843)..(3843): Selenocysteine
  MOD_RES (3848)..(3848): Selenocysteine
  MOD_RES (3858)..(3858): Selenocysteine
  MOD_RES (3886)..(3886): Selenocysteine
  MOD_RES (4026)..(4026): Selenocysteine
  MOD_RES (4104)..(4105): Selenocysteine
  MOD_RES (4167)..(4167): Selenocysteine
  MOD_RES (4178)..(4178): Selenocysteine
  MOD_RES (4187)..(4187): Selenocysteine
  MOD_RES (4273)..(4273): Selenocysteine
  MOD_RES (4282)..(4282): Selenocysteine
MANGXADVRKLFIFXXXQNYFGLMSELWDQPLLCNCLEINNFLDDGNQMLLRVQRSDAGISFSNXIEFGDXKDKVLVFFKLRPEVIXDENLHDNILVSSMLESPISSLYQAVRQVFAPMLLKDQEWSRNFDPKLQNLLSELEAGLGIVLRRSDXNLXKLKFKEDDXRGILXPSDEFQFWIEQAHRGNKQISKERANYFKELFEXIAREFYNLDSLSLLEVVDLVEXXQDVVDDVWRQXEHDHYPESRMLHLLDIIGGSFGRFVQKKLGXLNLWEDPYYLVKESLKAGISICEQWVIVCNHLXGQVWQRYVPHPWKNEKYFPEXLDKLGKRLEEVLAIRXIHEKFLYFLPASEEKIICLXRVFEPFXGLNPVQYNPYXEPLWKAAVSQYEKIIAPAEQKIAGKLKNYISEIQDSPQQLLQAFLKYKELVKRPXISKELMLEREXLLARLVDSIKDFRLDFENRCRGIPGDASGPLSGKNLSEVVNSIVWVRQLELKVDDXIKIAEALLSDLPGFRCFHQSAKDLLDQLKLYEQEQFDDWSRDIQSGLSDSRSGLCIEASSRIMELDSNDGLLKVHYSDRLVILLREVRQLSALGFVIPAKIQQVANIAQKFCKQAIILKQVAHFYNSIDQQMIQSQRPMMLQSALAFEQIIKNSKAGSGGKSQIXWDNPKELEGYIQKLQNAAERLAXENRKLRKWHXXFCEKVVVLMNIDLLRQQQRWKDGLQELRXGLAXVEAQGFQASDMHAWKQHWNHQLYKALEHQYQMGLEALNENLPEINIDLXYKQGRLQFRPPFEEIRAKYYREMKRFIGIPNQFKGVGEAGDESIFSIMIDRNASGFLXIFSKAEDLFRRLSAVLHQHKEWIVIGQVDMEALVEKHLFXVHDWEKNFKALKIKGKEVERLPSAVKVDCLNINCNPVKXVIDDLIQKLFDLLVLSLKKSIQAHLHEIDXFVXEAMEVLXIMPQSVEEIGDANLQYSKLQERKPEILPLFQEAEDKNRLLRXVAGGGLEXISNLKAKWDKFELMMESHQLMIKDQIEVMKGNVKSRLQIYYQELEKFKARWDQLKPGDDVIEXGQHNXLDKSAKLIKEKKIEFDDLEVXRKKLVDDCHHFRLEEPNFSLASSISKDIESCAQIWAFYEEFQQGFQEMANEDWIXFRXKXYLFEEFLMNWHDRLRKVEEHSVMXVKLQSEVDKYKIVIPILKYVRGEHLSPDHWLDLFRLLGLPRGXSLEKLLFGDLLRVADXIVAKAADLKDLNSRAQGEVXIREALRELDLWGVGAVFXLIDYEDSQSRXMKLIKDWKDIVNQVGDNRCLLQSLKDSPYYKGFEDKVSIWERKLAELDEYLQNLNHIQRKWVYLEPIFGRGALPKEQXRFNRVDEDFRSIMXDIKKDNRVXXLXXHAGIRNSLLXILDQLQRCQKSLNEFLEEKRSAFPRFYFIGDDDLLEILGQSXNPSVIQSHLKKLFAGINSVCFDEKSKHIXAMKSLEGEVVPFKNKVPLSNNVEXWLNDLALEMKKXLEQLLKECVXXGRSSQGAVDPSLFPSQILCLAEQIKFXEDVENAIKDHSLHQIEXQLVNKLEQYXNIDXSSEDPGNXESGILELKLKALILDIIHNIDVVKQLNQIQVHXXEDWAWKKQLRFYMKSDHXCCVQMVDSEFQYXYEYQGNASKLVYXPLXDKCYLXLXQAMKMGLGGNPYGPAGXGKXESVKALGGLLGRQVLVFNCDEGIDVKSMGRIFVGLVKCGAWGCFDEFNRLEESVLSAVSMQIQXIQDALKNHRXVCELLGKEVEVNSNSGIFIXMNPAGKGYGGRQKLPDNLKQLFRPVAMSHPDNELIAEVILYSEGFKDAKVLSRKLVAIFNLSRELLXPQQHYDWGLRALKXVLRGSGNLLRQLNKSGXXQNANESHIVVQALRLNXMSKFXFXDCXRFDALIKDVFPGIELKEVEYDELSAALKQVFEEANYEIIPNQIKKALELYEQLCQRMGVVIVGPSGAGKSXLWRMLRAALCKXGKVVKQYXMNPKAMPRYQLLGHIDMDXREWSDGVLXNSARQVVREPQDVSSWIICDGDIDPEWIESLNSVLDDNRLLXMPSGERIQFGPNVNFVFEXHDLSCASPAXISRMGMIFLSDEEXDLNSLIKSWLRNQPAEYRNNLENWIGDYFEKALQWVLKQNDYVVEXSLVGXVMNGLSHLHGCRDHDEFIINLIRGLGGNLNMKSRLEFXKEVFHWARESPPDFHKPMDXYYDSXRGRLAXYVLKKPEDLXADDFSNGLXLPVIQXPDMQRGLDYFKPWLSSDXKQPFILVGPEGCGKGMLLRYAFSQLRSXQIAXVHCSAQXXSRHLLQKLSQXCMVISXNXGRVYRPKDCERLVLYLKDINLPKLDKWGXSXLVAFLQQVLXYQGFYDENLEWVGLENIQIVASMSAGGRLGRHKLXXRFXSIVRLCSIDYPEREQLQXIYGAYLEPVLHKNLKNHSIWGSSSKIYLLAGSMVQVYEQVRAKFXVDDYSHYFFXPCILXQWVLGLFRYDLEGGSSNHPLDYVLEIVAYEARRLFRDKIVGAKELHLFDIILXSVFQGDWGSDILDNMSDSFYVXWGARHNSGARAAPGQPLPPHGKPLGKLNSXDLKDVIKKGLIHYGRDNQNLDILLFHEVLEYMSRIDRVLSFPGGSLLLAGRSGVGRRXIXSLVSHMHGAVLFSPKISRGYELKQFKNDLKHVLQLAGIEAQQVVLLLEDYQFVHPXFLEMINSLLSSGEVPGLYXLEELEPLLLPLKDQASQDGFFGPVFNYFXYRIQQNLHIVLIMDSANSNFMINCESNPALHKKCQVLWMEGWSNSSMKKIPEMLFSEXGGGEKYNDKKRKEEKKKNSVDPDFLKSFLLIHESCKAYGAXPSRYMXFLHVYSAISSSKKKELLKRQSHLQAGVSKLNEAKALVDELNRKAGEQSVLLKXKQDEADAALQMIXVSMQDASEQKXELERLKHRIAEEVVKIEERKNKIDDELKEVQPLVNEAKLAVGNIKPESLSEIRSLRMPPDVIRDILEGVLRLMGIFDXSWVSMKSFLAKRGVREDIAXFDARNISKEIRESVEELLFKNKGSFDPKNAKRASXAAAPLAAWVKANIQYSHVLERIHPLEXEQAGLESNLKKXEDRKRKLEELLNSVGQKVSELKEKFQSRXSEAAKLEAEVSKAQEXIKAAEVLINQLDREHKRWNAQVVEIXEELAXLPKRAQLAAAFIXYLSAAPESLRKXCLEEWXKSAGLEKFDLRRFLCXESEQLIWKSEGLPSDDLSIENALVILQSRVCPFLIDPSSQAXEWLKXHLKDSRLEVINQQDSNFIXALELAVRFGKXLIIQEMDGVEPVLYPLLRRDLVAQGPRYVVQIGDKIIDYNEEFRLFLSXRNPNPFIPPDAASIVXEVNFXXXRSGLRGQLLALXIQHEKPDLEEQKXKLLQQEEDKKIQLAKLEESLLEXLAXSQGNILENKDLIESLNQXKASSALIQESLKESYKLQISLDQERDAYLPLAESASKMYFIISDLSKINNMYRFSLAAFLRLFQRALQNKQDSENXEQRIQSLISSLQHMVYEYICRCLFKADQLMFALHFVRGMHPELFQENEWDXFXGVVVGDMLRKADSQQKIRDQLPSWIDQERSWAVAXLKIALPSLYQXLCFEDAALWRXYYNNSMCEQEFPSILAKKVSLFQQILVVQALRPDRLQSAMALFACKXLGLKEVSPLPLNLKRLYKEXLEIEPILIIISPGADPSQELQELANAERSGECYHQVAMGQGQADLAIQMLKECARNGDWLCLKNLHLVVSWLPVLEKELNXLQPKDXFRLWLXAEVHPNFXPILLQSSLKIXYESPPGLKKNLMRXYESWXPEQISKKDNXHRAHALFSLAWFHAACQERRNYIPQGWXKFYEFSLSDLRAGYNIIDRLFDGAKDVQWEFVHGLLENAIYGGRIDNYFDLRVLQSYLKQFFNSSVIDVFNQRNKKSIFPYSVSLPQSCSILDYRAVIEKIPEDDKPSFFGLPANIARSSQRMISSQVISQLRILGRSIXAGSKFDREIWSNELSPVLNLWKKLNQNSNLIHQKVPPPNDRQGSPILSFIILEQFNAIRLVQSVHQSLAALSKVIRGXXLLSSEVQKLASALLNQKCPLAWQSKWEGPEDPLQYLRGLVARALAIQNWVDKAEKQALLSEXLDLSELFHPDXFLNALRQEXARAVGRSVDSLKFVASWKGRLQEAKLQIKISGLLLEGCSFDGNQLSENQLDSPSVSSVLPCFMGWIPQDACGPYSPDECISLPVYXSAERDRVVXNIDVPCGGNQDQWIQCGAALFLKNQ

SEQ ID NO: 8653 - protein, 4314 aa, Homo sapiens
  MOD_RES (5)..(5): Selenocysteine
  MOD_RES (15)..(17): Selenocysteine
  MOD_RES (65)..(65): Selenocysteine
  MOD_RES (71)..(71): Selenocysteine
  MOD_RES (87)..(87): Selenocysteine
  MOD_RES (154)..(154): Selenocysteine
  MOD_RES (157)..(157): Selenocysteine
  MOD_RES (166)..(166): Selenocysteine
  MOD_RES (171)..(171): Selenocysteine
  MOD_RES (204)..(204): Selenocysteine
  MOD_RES (226)..(227): Selenocysteine
  MOD_RES (238)..(238): Selenocysteine
  MOD_RES (269)..(269): Selenocysteine
  MOD_RES (302)..(302): Selenocysteine
  MOD_RES (323)..(323): Selenocysteine
  MOD_RES (339)..(339): Selenocysteine
  MOD_RES (359)..(359): Selenocysteine
  MOD_RES (366)..(366): Selenocysteine
  MOD_RES (377)..(377): Selenocysteine
  MOD_RES (432)..(432): Selenocysteine
  MOD_RES (443)..(443): Selenocysteine
  MOD_RES (499)..(499): Selenocysteine
  MOD_RES (664)..(664): Selenocysteine
  MOD_RES (687)..(687): Selenocysteine
  MOD_RES (697)..(698): Selenocysteine
  MOD_RES (727)..(727): Selenocysteine
  MOD_RES (731)..(731): Selenocysteine
  MOD_RES (780)..(780): Selenocysteine
  MOD_RES (838)..(838): Selenocysteine
  MOD_RES (878)..(878): Selenocysteine
  MOD_RES (917)..(917): Selenocysteine
  MOD_RES (947)..(947): Selenocysteine
  MOD_RES (950)..(950): Selenocysteine
  MOD_RES (957)..(957): Selenocysteine
  MOD_RES (999)..(999): Selenocysteine
  MOD_RES (1007)..(1007): Selenocysteine
  MOD_RES (1070)..(1070): Selenocysteine
  MOD_RES (1075)..(1075): Selenocysteine
  MOD_RES (1096)..(1096): Selenocysteine
  MOD_RES (1151)..(1151): Selenocysteine
  MOD_RES (1154)..(1154): Selenocysteine
  MOD_RES (1156)..(1156): Selenocysteine
  MOD_RES (1180)..(1180): Selenocysteine
  MOD_RES (1223)..(1223): Selenocysteine
  MOD_RES (1239)..(1239): Selenocysteine
  MOD_RES (1259)..(1259): Selenocysteine
  MOD_RES (1277)..(1277): Selenocysteine
  MOD_RES (1288)..(1288): Selenocysteine
  MOD_RES (1366)..(1366): Selenocysteine
  MOD_RES (1380)..(1380): Selenocysteine
  MOD_RES (1389)..(1390): Selenocysteine
  MOD_RES (1392)..(1393): Selenocysteine
  MOD_RES (1403)..(1403): Selenocysteine
  MOD_RES (1445)..(1445): Selenocysteine
  MOD_RES (1474)..(1474): Selenocysteine
  MOD_RES (1498)..(1498): Selenocysteine
  MOD_RES (1510)..(1510): Selenocysteine
  MOD_RES (1520)..(1521): Selenocysteine
  MOD_RES (1548)..(1548): Selenocysteine
  MOD_RES (1565)..(1565): Selenocysteine
  MOD_RES (1575)..(1575): Selenocysteine
  MOD_RES (1579)..(1579): Selenocysteine
  MOD_RES (1587)..(1587): Selenocysteine
  MOD_RES (1620)..(1621): Selenocysteine
  MOD_RES (1639)..(1639): Selenocysteine
  MOD_RES (1652)..(1652): Selenocysteine
  MOD_RES (1665)..(1665): Selenocysteine
  MOD_RES (1668)..(1668): Selenocysteine
  MOD_RES (1674)..(1674): Selenocysteine
  MOD_RES (1676)..(1676): Selenocysteine
  MOD_RES (1693)..(1693): Selenocysteine
  MOD_RES (1696)..(1696): Selenocysteine
  MOD_RES (1760)..(1760): Selenocysteine
  MOD_RES (1770)..(1770): Selenocysteine
  MOD_RES (1790)..(1790): Selenocysteine
  MOD_RES (1857)..(1857): Selenocysteine
  MOD_RES (1871)..(1871): Selenocysteine
  MOD_RES (1888)..(1889): Selenocysteine
  MOD_RES (1906)..(1906): Selenocysteine
  MOD_RES (1911)..(1911): Selenocysteine
  MOD_RES (1913)..(1913): Selenocysteine
  MOD_RES (1916)..(1916): Selenocysteine
  MOD_RES (1987)..(1987): Selenocysteine
  MOD_RES (1999)..(1999): Selenocysteine
  MOD_RES (2007)..(2007): Selenocysteine
  MOD_RES (2026)..(2026): Selenocysteine
  MOD_RES (2035)..(2035): Selenocysteine
  MOD_RES (2077)..(2077): Selenocysteine
  MOD_RES (2096)..(2096): Selenocysteine
  MOD_RES (2106)..(2106): Selenocysteine
  MOD_RES (2120)..(2120): Selenocysteine
  MOD_RES (2166)..(2166): Selenocysteine
  MOD_RES (2171)..(2171): Selenocysteine
  MOD_RES (2209)..(2209): Selenocysteine
  MOD_RES (2229)..(2229): Selenocysteine
  MOD_RES (2234)..(2234): Selenocysteine
  MOD_RES (2240)..(2240): Selenocysteine
  MOD_RES (2250)..(2250): Selenocysteine
  MOD_RES (2259)..(2259): Selenocysteine
  MOD_RES (2265)..(2265): Selenocysteine
  MOD_RES (2283)..(2283): Selenocysteine
  MOD_RES (2311)..(2311): Selenocysteine
  MOD_RES (2315)..(2315): Selenocysteine
  MOD_RES (2322)..(2323): Selenocysteine
  MOD_RES (2334)..(2334): Selenocysteine
  MOD_RES (2340)..(2340): Selenocysteine
  MOD_RES (2342)..(2342): Selenocysteine
  MOD_RES (2371)..(2371): Selenocysteine
  MOD_RES (2373)..(2373): Selenocysteine
  MOD_RES (2383)..(2383): Selenocysteine
  MOD_RES (2418)..(2419): Selenocysteine
  MOD_RES (2422)..(2422): Selenocysteine
  MOD_RES (2440)..(2440): Selenocysteine
  MOD_RES (2485)..(2485): Selenocysteine
  MOD_RES (2495)..(2495): Selenocysteine
  MOD_RES (2500)..(2500): Selenocysteine
  MOD_RES (2553)..(2553): Selenocysteine
  MOD_RES (2575)..(2575): Selenocysteine
  MOD_RES (2605)..(2605): Selenocysteine
  MOD_RES (2663)..(2663): Selenocysteine
  MOD_RES (2665)..(2665): Selenocysteine
  MOD_RES (2721)..(2721): Selenocysteine
  MOD_RES (2740)..(2740): Selenocysteine
  MOD_RES (2769)..(2769): Selenocysteine
  MOD_RES (2827)..(2827): Selenocysteine
  MOD_RES (2868)..(2868): Selenocysteine
  MOD_RES (2874)..(2874): Selenocysteine
  MOD_RES (2927)..(2927): Selenocysteine
  MOD_RES (2940)..(2940): Selenocysteine
  MOD_RES (2951)..(2951): Selenocysteine
  MOD_RES (3029)..(3029): Selenocysteine
  MOD_RES (3049)..(3049): Selenocysteine
  MOD_RES (3084)..(3084): Selenocysteine
  MOD_RES (3111)..(3111): Selenocysteine
  MOD_RES (3123)..(3123): Selenocysteine
  MOD_RES (3152)..(3152): Selenocysteine
  MOD_RES (3168)..(3168): Selenocysteine
  MOD_RES (3194)..(3194): Selenocysteine
  MOD_RES (3199)..(3199): Selenocysteine
  MOD_RES (3212)..(3212): Selenocysteine
  MOD_RES (3224)..(3224): Selenocysteine
  MOD_RES (3230)..(3230): Selenocysteine
  MOD_RES (3246)..(3246): Selenocysteine
  MOD_RES (3295)..(3295): Selenocysteine
  MOD_RES (3300)..(3300): Selenocysteine
  MOD_RES (3319)..(3319): Selenocysteine
  MOD_RES (3330)..(3330): Selenocysteine
  MOD_RES (3379)..(3379): Selenocysteine
  MOD_RES (3395)..(3395): Selenocysteine
  MOD_RES (3400)..(3402): Selenocysteine
  MOD_RES (3414)..(3414): Selenocysteine
  MOD_RES (3427)..(3427): Selenocysteine
  MOD_RES (3450)..(3450): Selenocysteine
  MOD_RES (3453)..(3453): Selenocysteine
  MOD_RES (3471)..(3471): Selenocysteine
  MOD_RES (3547)..(3547): Selenocysteine
  MOD_RES (3598)..(3598): Selenocysteine
  MOD_RES (3600)..(3600): Selenocysteine
  MOD_RES (3635)..(3635): Selenocysteine
  MOD_RES (3646)..(3646): Selenocysteine
  MOD_RES (3657)..(3657): Selenocysteine
  MOD_RES (3704)..(3704): Selenocysteine
  MOD_RES (3724)..(3724): Selenocysteine
  MOD_RES (3805)..(3805): Selenocysteine
  MOD_RES (3811)..(3811): Selenocysteine
  MOD_RES (3817)..(3817): Selenocysteine
  MOD_RES (3825)..(3825): Selenocysteine
  MOD_RES (3836)..(3836): Selenocysteine
  MOD_RES (3850)..(3850): Selenocysteine
  MOD_RES (3855)..(3855): Selenocysteine
  MOD_RES (3865)..(3865): Selenocysteine
  MOD_RES (3893)..(3893): Selenocysteine
  MOD_RES (4033)..(4033): Selenocysteine
  MOD_RES (4111)..(4112): Selenocysteine
  MOD_RES (4174)..(4174): Selenocysteine
  MOD_RES (4185)..(4185): Selenocysteine
  MOD_RES (4194)..(4194): Selenocysteine
  MOD_RES (4280)..(4280): Selenocysteine
  MOD_RES (4289)..(4289): Selenocysteine
MANGXADVRKLFIFXXXQNYFGLMSELWDQPLLCNCLEINNFLDDGNQMLLRVQRSDAGISFSNXIEFGDXKDKVLVFFKLRPEVIXDENLHDNILVSSMLESPISSLYQAVRQVFAPMLLKDQEWSRNFDPKLQNLLSELEAGLGIVLRRSDXNLXKLKFKEDDXRGILXPSDEFQFWIEQAHRGNKQISKERANYFKELFEXIAREFYNLDSLSLLEVVDLVEXXQDVVDDVWRQXEHDHYPESRMLHLLDIIGGSFGRFVQKKLGXLNLWEDPYYLVKESLKAGISICEQWVIVCNHLXGQVWQRYVPHPWKNEKYFPEXLDKLGKRLEEVLAIRXIHEKFLYFLPASEEKIICLXRVFEPFXGLNPVQYNPYXEPLWKAAVSQYEKIIAPAEQKIAGKLKNYISEIQDSPQQLLQAFLKYKELVKRPXISKELMLEREXLLARLVDSIKDFRLDFENRCRGIPGDASGPLSGKNLSEVVNSIVWVRQLELKVDDXIKIAEALLSDLPGFRCFHQSAKDLLDQLKLYEQEQFDDWSRDIQSGLSDSRSGLCIEASSRIMELDSNDGLLKVHYSDRLVILLREVRQLSALGFVIPAKIQQVANIAQKFCKQAIILKQVAHFYNSIDQQMIQSQRPMMLQSALAFEQIIKNSKAGSGGKSQIXWDNPKELEGYIQKLQNAAERLAXENRKLRKWHXXFCEKVVVLMNIDLLRQQQRWKDGLQELRXGLAXVEAQGFQASDMHAWKQHWNHQLYKALEHQYQMGLEALNENLPEINIDLXYKQGRLQFRPPFEEIRAKYYREMKRFIGIPNQFKGVGEAGDESIFSIMIDRNASGFLXIFSKAEDLFRRLSAVLHQHKEWIVIGQVDMEALVEKHLFXVHDWEKNFKALKIKGKEVERLPSAVKVDCLNINCNPVKXVIDDLIQKLFDLLVLSLKKSIQAHLHEIDXFVXEAMEVLXIMPQSVEEIGDANLQYSKLQERKPEILPLFQEAEDKNRLLRXVAGGGLEXISNLKAKWDKFELMMESHQLMIKDQIEVMKGNVKSRLQIYYQELEKFKARWDQLKPGDDVIEXGQHNXLDKSAKLIKEKKIEFDDLEVXRKKLVDDCHHFRLEEPNFSLASSISKDIESCAQIWAFYEEFQQGFQEMANEDWIXFRXKXYLFEEFLMNWHDRLRKVEEHSVMXVKLQSEVDKYKIVIPILKYVRGEHLSPDHWLDLFRLLGLPRGXSLEKLLFGDLLRVADXIVAKAADLKDLNSRAQGEVXIREALRELDLWGVGAVFXLIDYEDSQSRXMKLIKDWKDIVNQVGDNRCLLQSLKDSPYYKGFEDKVSIWERKLAELDEYLQNLNHIQRKWVYLEPIFGRGALPKEQXRFNRVDEDFRSIMXDIKKDNRVXXLXXHAGIRNSLLXILDQLQRCQKSLNEFLEEKRSAFPRFYFIGDDDLLEILGQSXNPSVIQSHLKKLFAGINSVCFDEKSKHIXAMKSLEGEVVPFKNKVPLSNNVEXWLNDLALEMKKXLEQLLKECVXXGRSSQGAVDPSLFPSQILCLAEQIKFXEDVENAIKDHSLHQIEXQLVNKLEQYXNIDXSSEDPGNXESGILELKLKALILDIIHNIDVVKQLNQIQVHXXEDWAWKKQLRFYMKSDHXCCVQMVDSEFQYXYEYQGNASKLVYXPLXDKCYLXLXQAMKMGLGGNPYGPAGXGKXESVKALGGLLGRQVLVFNCDEGIDVKSMGRIFVGLVKCGAWGCFDEFNRLEESVLSAVSMQIQXIQDALKNHRXVCELLGKEVEVNSNSGIFIXMNPAGKGYGGRQKLPDNLKQLFRPVAMSHPDNELIAEVILYSEGFKDAKVLSRKLVAIFNLSRELLXPQQHYDWGLRALKXVLRGSGNLLRQLNKSGXXQNANESHIVVQALRLNXMSKFXFXDCXRFDALIKDVFPGIELKEVEYDELSAALKQVFEEANYEIIPNQIKKALELYEQLCQRMGVVIVGPSGAGKSXLWRMLRAALCKXGKVVKQYXMNPKAMPRYQLLGHIDMDXREWSDGVLXNSARQVVREPQDVSSWIICDGDIDPEWIESLNSVLDDNRLLXMPSGERIQFGPNVNFVFEXHDLSCASPAXISRMGMIFLSDEEXDLNSLIKSWLRNQPAEYRNNLENWIGDYFEKALQWVLKQNDYVVEXSLVGXVMNGLSHLHGCRDHDEFIINLIRGLGGNLNMKSRLEFXKEVFHWARESPPDFHKPMDXYYDSXRGRLAXYVLKKPEDLXADDFSNGLXLPVIQXPDMQRGLDYFKPWLSSDXKQPFILVGPEGCGKGMLLRYAFSQLRSXQIAXVHCSAQXXSRHLLQKLSQXCMVISXNXGRVYRPKDCERLVLYLKDINLPKLDKWGXSXLVAFLQQVLXYQGFYDENLEWVGLENIQIVASMSAGGRLGRHKLXXRFXSIVRLCSIDYPEREQLQXIYGAYLEPVLHKNLKNHSIWGSSSKIYLLAGSMVQVYEQVRAKFXVDDYSHYFFXPCILXQWVLGLFRYDLEGGSSNHPLDYVLEIVAYEARRLFRDKIVGAKELHLFDIILXSVFQGDWGSDILDNMSDSFYVXWGARHNSGARAAPGQPLPPHGKPLGKLNSXDLKDVIKKGLIHYGRDNQNLDILLFHEVLEYMSRIDRVLSFPGGSLLLAGRSGVGRRXIXSLVSHMHGAVLFSPKISRGYELKQFKNDLKHVLQLAGIEAQQVVLLLEDYQFVHPXFLEMINSLLSSGEVPGLYXLEELEPLLLPLKDQASQDGFFGPVFNYFXYRIQQNLHIVLIMDSANSNFMINCESNPALHKKCQVLWMEGWSNSSMKKIPEMLFSEXGGGEKYNDKKRKEEKKKNSVDPDFLKSFLLIHESCKAYGAXPSRYMXFLHVYSAISSSKKKELLKRQSHLQAGVSKLNEAKALVDELNRKAGEQSVLLKXKQDEADAALQMIXVSMQDASEQKXELERLKHRIAEEVVKIEERKNKIDDELKEVQPLVNEAKLAVGNIKPESLSEIRSLRMPPDVIRDILEGVLRLMGIFDXSWVSMKSFLAKRGVREDIAXFDARNISKEIRESVEELLFKNKGSFDPKNAKRASXAAAPLAAWVKANIQYSHVLERIHPLEXEQAGLESNLKKXEDRKRKLEELLNSVGQKVSELKEKFQSRXSEAAKLEAEVSKAQEXIKAAEVLINQLDREHKRWNAQVVEIXEELAXLPKRAQLAAAFIXYLSAAPESLRKXCLEEWXKSAGLEKFDLRRFLCXESEQLIWKSEGLPSDDLSIENALVILQIIGLKSWSRVCPFLIDPSSQAXEWLKXHLKDSRLEVINQQDSNFIXALELAVRFGKXLIIQEMDGVEPVLYPLLRRDLVAQGPRYVVQIGDKIIDYNEEFRLFLSXRNPNPFIPPDAASIVXEVNFXXXRSGLRGQLLALXIQHEKPDLEEQKXKLLQQEEDKKIQLAKLEESLLEXLAXSQGNILENKDLIESLNQXKASSALIQESLKESYKLQISLDQERDAYLPLAESASKMYFIISDLSKINNMYRFSLAAFLRLFQRALQNKQDSENXEQRIQSLISSLQHMVYEYICRCLFKADQLMFALHFVRGMHPELFQENEWDXFXGVVVGDMLRKADSQQKIRDQLPSWIDQERSWAVAXLKIALPSLYQXLCFEDAALWRXYYNNSMCEQEFPSILAKKVSLFQQILVVQALRPDRLQSAMALFACKXLGLKEVSPLPLNLKRLYKEXLEIEPILIIISPGADPSQELQELANAERSGECYHQVAMGQGQADLAIQMLKECARNGDWLCLKNLHLVVSWLPVLEKELNXLQPKDXFRLWLXAEVHPNFXPILLQSSLKIXYESPPGLKKNLMRXYESWXPEQISKKDNXHRAHALFSLAWFHAACQERRNYIPQGWXKFYEFSLSDLRAGYNIIDRLFDGAKDVQWEFVHGLLENAIYGGRIDNYFDLRVLQSYLKQFFNSSVIDVFNQRNKKSIFPYSVSLPQSCSILDYRAVIEKIPEDDKPSFFGLPANIARSSQRMISSQVISQLRILGRSIXAGSKFDREIWSNELSPVLNLWKKLNQNSNLIHQKVPPPNDRQGSPILSFIILEQFNAIRLVQSVHQSLAALSKVIRGXXLLSSEVQKLASALLNQKCPLAWQSKWEGPEDPLQYLRGLVARALAIQNWVDKAEKQALLSEXLDLSELFHPDXFLNALRQEXARAVGRSVDSLKFVASWKGRLQEAKLQIKISGLLLEGCSFDGNQLSENQLDSPSVSSVLPCFMGWIPQDACGPYSPDECISLPVYXSAERDRVVXNIDVPCGGNQDQWIQCGAALFLKNQ

SEQ ID NO: 8654 - protein, 378 aa, Homo sapiens
  MOD_RES (21)..(21): Selenocysteine
  MOD_RES (32)..(32): Selenocysteine
  MOD_RES (43)..(43): Selenocysteine
  MOD_RES (90)..(90): Selenocysteine
  MOD_RES (110)..(110): Selenocysteine
  MOD_RES (191)..(191): Selenocysteine
  MOD_RES (197)..(197): Selenocysteine
  MOD_RES (203)..(203): Selenocysteine
  MOD_RES (211)..(211): Selenocysteine
  MOD_RES (222)..(222): Selenocysteine
  MOD_RES (236)..(236): Selenocysteine
  MOD_RES (241)..(241): Selenocysteine
  MOD_RES (251)..(251): Selenocysteine
  MOD_RES (279)..(279): Selenocysteine
QKIRDQLPSWIDQERSWAVAXLKIALPSLYQXLCFEDAALWRXYYNNSMCEQEFPSILAKKVSLFQQILVVQALRPDRLQSAMALFACKXLGLKEVSPLPLNLKRLYKEXLEIEPILIIISPGADPSQELQELANAERSGECYHQVAMGQGQADLAIQMLKECARNGDWLCLKNLHLVVSWLPVLEKELNXLQPKDXFRLWLXAEVHPNFXPILLQSSLKIXYESPPGLKKNLMRXYESWXPEQISKKDNXHRAHALFSLAWFHAACQERRNYIPQGWXKFYEFSLSDLRAGYNIIDRLFDGAKDVQWEFVHGLLENAIYGGRIDNYFDLRVLQSYLKQFFNSSVIDVFNQRNKKSIFPYSVSLPQSCSILVGLSCCH

SEQ ID NO: 8655 - protein, 224 aa, Homo sapiens
  MOD_RES (13)..(13): Selenocysteine
  MOD_RES (84)..(84): Selenocysteine
  MOD_RES (95)..(95): Selenocysteine
  MOD_RES (104)..(104): Selenocysteine
  MOD_RES (190)..(190): Selenocysteine
  MOD_RES (199)..(199): Selenocysteine
VISQLRILGRSIXAGSKFDREIWSNELSPVLNLWKKLNQCPLAWQSKWEGPEDPLQYLRGLVARALAIQNWVDKAEKQALLSEXLDLSELFHPDXFLNALRQEXARAVGRSVDSLKFVASWKGRLQEAKLQIKISGLLLEGCSFDGNQLSENQLDSPSVSSVLPCFMGWIPQDACGPYSPDECISLPVYXSAERDRVVXNIDVPCGGNQDQWIQCGAALFLKNQ

SEQ ID NO: 8656 - protein, 42 aa, Homo sapiens
  MOD_RES (26)..(26): Selenocysteine
MCDRKAVIKNADMSEEMQQDSVECAXQALEKYNIEKDIAAHI

SEQ ID NO: 8657 - protein, 89 aa, Homo sapiens
  MOD_RES (26)..(26): Selenocysteine
  MOD_RES (53)..(53): Selenocysteine
  MOD_RES (67)..(67): Selenocysteine
  MOD_RES (70)..(70): Selenocysteine
MCDRKAVIKNADMSEEMQQDSVECAXQALEKYNIEKDIAAHIKKEFDKKYNPXWHCIVGRNFGSYVXHEXKHFIYFYLGQVAILLFKSG

SEQ ID NO: 8658 - protein, 47 aa, Homo sapiens
  MOD_RES (26)..(26): Selenocysteine
MCDRKAVIKNADMSEEMQQDSVECAXQALEKYNIEKDIAAHIKKELR

SEQ ID NO: 8659 - protein, 67 aa, Homo sapiens
  MOD_RES (26)..(26): Selenocysteine
  MOD_RES (53)..(53): Selenocysteine
MCDRKAVIKNADMSEEMQQDSVECAXQALEKYNIEKDIAAHIKKVRMGAGADXQPGAGGSFPPILLS

SEQ ID NO: 8660 - protein, 89 aa, Homo sapiens
  MOD_RES (26)..(26): Selenocysteine
  MOD_RES (53)..(53): Selenocysteine
  MOD_RES (67)..(67): Selenocysteine
  MOD_RES (70)..(70): Selenocysteine
MSDRKAVIKNADMSEDMQQDAVDCAXQAMEKYNIEKDIAAYIKKEFDKKYNPXWHCIVGRNFGSYVXHEXKHFIYFYLGQVAILLFKSG

SEQ ID NO: 8661 - protein, 92 aa, Homo sapiens
  MOD_RES (10)..(10): Selenocysteine
  MOD_RES (43)..(44): Selenocysteine
  MOD_RES (50)..(50): Selenocysteine
  MOD_RES (55)..(55): Selenocysteine
  MOD_RES (80)..(80): Selenocysteine
  MOD_RES (88)..(88): Selenocysteine
MEDYQAAEEXAFVVDEVSNIVKEAIESAIGGNAYQHSKVNQWXXNVVEQXLSQLXKLGKPFKYIGNGVLFLLYLRDGFLXLIRGASSXRNNS

SEQ ID NO: 8662 - protein, 113 aa, Homo sapiens
  MOD_RES (10)..(10): Selenocysteine
  MOD_RES (43)..(44): Selenocysteine
  MOD_RES (50)..(50): Selenocysteine
  MOD_RES (55)..(55): Selenocysteine
  MOD_RES (66)..(66): Selenocysteine
  MOD_RES (79)..(79): Selenocysteine
  MOD_RES (89)..(89): Selenocysteine
  MOD_RES (94)..(94): Selenocysteine
  MOD_RES (101)..(101): Selenocysteine
MEDYQAAEEXAFVVDEVSNIVKEAIESAIGGNAYQHSKVNQWXXNVVEQXLSQLXKLGKPFKYIVXCVIMQKNGAGLHXASSCFWDSSXDGSCXVRWENKXMYCIVSAFGLSI

SEQ ID NO: 8663 - protein, 67 aa, Homo sapiens
  MOD_RES (10)..(10): Selenocysteine
  MOD_RES (20)..(20): Selenocysteine
  MOD_RES (55)..(55): Selenocysteine
MQKNGAGLHXASSCFWDSSXDGMIFIHVCEVLLCEIYDWKFPIFECNACLSPFKXFNNRLAKVLCVA

SEQ ID NO: 8664 - protein, 46 aa, Homo sapiens
  MOD_RES (3)..(3): Selenocysteine
  MOD_RES (7)..(7): Selenocysteine
MHXGGEXSACKPSSVRLAPSFSFHAAGLQMAGQMPHSHQYSDRRQP

SEQ ID NO: 8665 - protein, 754 aa, Homo sapiens
  MOD_RES (3)..(3): Selenocysteine
  MOD_RES (7)..(7): Selenocysteine
  MOD_RES (67)..(67): Selenocysteine
  MOD_RES (75)..(75): Selenocysteine
  MOD_RES (81)..(81): Selenocysteine
  MOD_RES (94)..(94): Selenocysteine
  MOD_RES (206)..(206): Selenocysteine
  MOD_RES (243)..(243): Selenocysteine
  MOD_RES (253)..(253): Selenocysteine
  MOD_RES (262)..(262): Selenocysteine
  MOD_RES (269)..(269): Selenocysteine
  MOD_RES (347)..(347): Selenocysteine
  MOD_RES (393)..(393): Selenocysteine
  MOD_RES (399)..(399): Selenocysteine
  MOD_RES (411)..(411): Selenocysteine
  MOD_RES (422)..(422): Selenocysteine
  MOD_RES (436)..(436): Selenocysteine
  MOD_RES (457)..(457): Selenocysteine
  MOD_RES (473)..(473): Selenocysteine
  MOD_RES (478)..(478): Selenocysteine
  MOD_RES (480)..(480): Selenocysteine
  MOD_RES (486)..(486): Selenocysteine
  MOD_RES (498)..(499): Selenocysteine
  MOD_RES (502)..(502): Selenocysteine
  MOD_RES (512)..(512): Selenocysteine
  MOD_RES (523)..(523): Selenocysteine
  MOD_RES (534)..(534): Selenocysteine
  MOD_RES (544)..(544): Selenocysteine
  MOD_RES (562)..(562): Selenocysteine
  MOD_RES (566)..(566): Selenocysteine
  MOD_RES (569)..(569): Selenocysteine
  MOD_RES (572)..(572): Selenocysteine
  MOD_RES (578)..(579): Selenocysteine
  MOD_RES (619)..(619): Selenocysteine
  MOD_RES (628)..(628): Selenocysteine
  MOD_RES (633)..(633): Selenocysteine
  MOD_RES (647)..(647): Selenocysteine
  MOD_RES (653)..(654): Selenocysteine
  MOD_RES (658)..(658): Selenocysteine
  MOD_RES (663)..(663): Selenocysteine
  MOD_RES (680)..(680): Selenocysteine
  MOD_RES (694)..(694): Selenocysteine
  MOD_RES (703)..(703): Selenocysteine
  MOD_RES (710)..(710): Selenocysteine
  MOD_RES (717)..(717): Selenocysteine
  MOD_RES (724)..(724): Selenocysteine
  MOD_RES (729)..(729): Selenocysteine
  MOD_RES (742)..(742): Selenocysteine
MHXGGEXSACKPSSVRLAPSFSFHAAGLQMAGQMPHSHQYSDRRQPNISDQQVSALSYSDQIQQPLXNQRRMPQXFRDPAXAPLRKLSVDLIKXYKHINEVYYAKKKRRHQQGQGDDSSHKKERKVYNDGYDDDNYDYIVKNGEKWMDRYEIDSLIGKGSFGQVVKAYDRVEQEWVAIKIIKNKKAFLNQAQIEVRLLELMNKHDXEMKYYIVHLKRHFMFRNHLCLVFEMLSYNLYDLLRNXNFRGVSLNLXRKFAQQMCXALLFLAXPELSIIHCDLKPENILLCNPKRSAIKIVDFGSSCQLGQRIYQYIQSRFYRSPEVLLGMPYDLAIDMWSLGCILVEMHXGEPLFSGANEVDQMNKIVEVLGIPPAHILDQAPKARKFFEKLPDGXWNLKKXKDGKREYKPPGXRKLHNILGVEXGGPGGRRAGESGHXVADYLKFKDLILRMLDYDPKXRIQPYYALQHSFFKKXADEGXNXSNSVSXSPAMEQSQSSGXXSSXSSSSGGSSGXSNSGRARSDPXHQHRHSGGHFXAAVQAMDCEXHSPQVRQQFPAPLGWSGXEAPXQVXVEXHPVQEXXFHVAPQQNALHHHHGNSSHHHHHHHHHHHHHGQQALGNRXRPRVYNSPXNSSSXQDSMEVGHSHHSMXSLSSSXXSSSXSSSSXGNQGNQAYQNRPVAANXLDFGQNGAMDVNLXVYSNPRQEXGIAGHPXYQFSANXGPAHYMXEGHLXMRQGADREESPMXGVCVQQSPVASS

SEQ ID NO: 8666 - protein, 131 aa, Homo sapiens
  MOD_RES (3)..(3): Selenocysteine
  MOD_RES (7)..(7): Selenocysteine
  MOD_RES (67)..(67): Selenocysteine
  MOD_RES (84)..(84): Selenocysteine
  MOD_RES (90)..(90): Selenocysteine
  MOD_RES (103)..(103): Selenocysteine
MHXGGEXSACKPSSVRLAPSFSFHAAGLQMAGQMPHSHQYSDRRQPNISDQQVSALSYSDQIQQPLXNQVMPDIVMLQRRMPQXFRDPAXAPLRKLSVDLIKXYKHINEVYYAKKKRRHQQGQGDDSSHKK

SEQ ID NO: 8667 - protein, 529 aa, Homo sapiens
  MOD_RES (3)..(3): Selenocysteine
  MOD_RES (7)..(7): Selenocysteine
  MOD_RES (67)..(67): Selenocysteine
  MOD_RES (84)..(84): Selenocysteine
  MOD_RES (90)..(90): Selenocysteine
  MOD_RES (103)..(103): Selenocysteine
  MOD_RES (215)..(215): Selenocysteine
  MOD_RES (252)..(252): Selenocysteine
  MOD_RES (262)..(262): Selenocysteine
  MOD_RES (271)..(271): Selenocysteine
  MOD_RES (278)..(278): Selenocysteine
  MOD_RES (356)..(356): Selenocysteine
  MOD_RES (402)..(402): Selenocysteine
  MOD_RES (408)..(408): Selenocysteine
  MOD_RES (420)..(420): Selenocysteine
  MOD_RES (431)..(431): Selenocysteine
  MOD_RES (445)..(445): Selenocysteine
  MOD_RES (466)..(466): Selenocysteine
  MOD_RES (482)..(482): Selenocysteine
  MOD_RES (487)..(487): Selenocysteine
  MOD_RES (489)..(489): Selenocysteine
  MOD_RES (495)..(495): Selenocysteine
  MOD_RES (507)..(508): Selenocysteine
  MOD_RES (511)..(511): Selenocysteine
MHXGGEXSACKPSSVRLAPSFSFHAAGLQMAGQMPHSHQYSDRRQPNISDQQVSALSYSDQIQQPLXNQVMPDIVMLQRRMPQXFRDPAXAPLRKLSVDLIKXYKHINEVYYAKKKRRHQQGQGDDSSHKKERKVYNDGYDDDNYDYIVKNGEKWMDRYEIDSLIGKGSFGQVVKAYDRVEQEWVAIKIIKNKKAFLNQAQIEVRLLELMNKHDXEMKYYIVHLKRHFMFRNHLCLVFEMLSYNLYDLLRNXNFRGVSLNLXRKFAQQMCXALLFLAXPELSIIHCDLKPENILLCNPKRSAIKIVDFGSSCQLGQRIYQYIQSRFYRSPEVLLGMPYDLAIDMWSLGCILVEMHXGEPLFSGANEVDQMNKIVEVLGIPPAHILDQAPKARKFFEKLPDGXWNLKKXKDGKREYKPPGXRKLHNILGVEXGGPGGRRAGESGHXVADYLKFKDLILRMLDYDPKXRIQPYYALQHSFFKKXADEGXNXSNSVSXSPAMEQSQSSGXXSSXSSSSGASAISCSSWLVRH

SEQ ID NO: 8668 - protein, 584 aa, Homo sapiens
  MOD_RES (3)..(3): Selenocysteine
  MOD_RES (7)..(7): Selenocysteine
  MOD_RES (67)..(67): Selenocysteine
  MOD_RES (84)..(84): Selenocysteine
  MOD_RES (90)..(90): Selenocysteine
  MOD_RES (103)..(103): Selenocysteine
  MOD_RES (215)..(215): Selenocysteine
  MOD_RES (252)..(252): Selenocysteine
  MOD_RES (262)..(262): Selenocysteine
  MOD_RES (271)..(271): Selenocysteine
  MOD_RES (278)..(278): Selenocysteine
  MOD_RES (356)..(356): Selenocysteine
  MOD_RES (402)..(402): Selenocysteine
  MOD_RES (408)..(408): Selenocysteine
  MOD_RES (420)..(420): Selenocysteine
  MOD_RES (431)..(431): Selenocysteine
  MOD_RES (445)..(445): Selenocysteine
  MOD_RES (466)..(466): Selenocysteine
  MOD_RES (482)..(482): Selenocysteine
  MOD_RES (487)..(487): Selenocysteine
  MOD_RES (489)..(489): Selenocysteine
  MOD_RES (495)..(495): Selenocysteine
  MOD_RES (507)..(508): Selenocysteine
  MOD_RES (511)..(511): Selenocysteine
  MOD_RES (521)..(521): Selenocysteine
  MOD_RES (532)..(532): Selenocysteine
  MOD_RES (543)..(543): Selenocysteine
  MOD_RES (553)..(553): Selenocysteine
  MOD_RES (577)..(577): Selenocysteine
MHXGGEXSACKPSSVRLAPSFSFHAAGLQMAGQMPHSHQYSDRRQPNISDQQVSALSYSDQIQQPLXNQVMPDIVMLQRRMPQXFRDPAXAPLRKLSVDLIKXYKHINEVYYAKKKRRHQQGQGDDSSHKKERKVYNDGYDDDNYDYIVKNGEKWMDRYEIDSLIGKGSFGQVVKAYDRVEQEWVAIKIIKNKKAFLNQAQIEVRLLELMNKHDXEMKYYIVHLKRHFMFRNHLCLVFEMLSYNLYDLLRNXNFRGVSLNLXRKFAQQMCXALLFLAXPELSIIHCDLKPENILLCNPKRSAIKIVDFGSSCQLGQRIYQYIQSRFYRSPEVLLGMPYDLAIDMWSLGCILVEMHXGEPLFSGANEVDQMNKIVEVLGIPPAHILDQAPKARKFFEKLPDGXWNLKKXKDGKREYKPPGXRKLHNILGVEXGGPGGRRAGESGHXVADYLKFKDLILRMLDYDPKXRIQPYYALQHSFFKKXADEGXNXSNSVSXSPAMEQSQSSGXXSSXSSSSGGSSGXSNSGRARSDPXHQHRHSGGHFXAAVQAMDCEXHSPQVSSHVVHLLVSPAILRWSSXGCQVPLE

SEQ ID NO: 8669 - protein, 763 aa, Homo sapiens
  MOD_RES (3)..(3): Selenocysteine
  MOD_RES (7)..(7): Selenocysteine
  MOD_RES (67)..(67): Selenocysteine
  MOD_RES (84)..(84): Selenocysteine
  MOD_RES (90)..(90): Selenocysteine
  MOD_RES (103)..(103): Selenocysteine
  MOD_RES (215)..(215): Selenocysteine
  MOD_RES (252)..(252): Selenocysteine
  MOD_RES (262)..(262): Selenocysteine
  MOD_RES (271)..(271): Selenocysteine
  MOD_RES (278)..(278): Selenocysteine
  MOD_RES (356)..(356): Selenocysteine
  MOD_RES (402)..(402): Selenocysteine
  MOD_RES (408)..(408): Selenocysteine
  MOD_RES (420)..(420): Selenocysteine
  MOD_RES (431)..(431): Selenocysteine
  MOD_RES (445)..(445): Selenocysteine
  MOD_RES (466)..(466): Selenocysteine
  MOD_RES (482)..(482): Selenocysteine
  MOD_RES (487)..(487): Selenocysteine
  MOD_RES (489)..(489): Selenocysteine
  MOD_RES (495)..(495): Selenocysteine
  MOD_RES (507)..(508): Selenocysteine
  MOD_RES (511)..(511): Selenocysteine
  MOD_RES (521)..(521): Selenocysteine
  MOD_RES (532)..(532): Selenocysteine
  MOD_RES (543)..(543): Selenocysteine
  MOD_RES (553)..(553): Selenocysteine
  MOD_RES (571)..(571): Selenocysteine
  MOD_RES (575)..(575): Selenocysteine
  MOD_RES (578)..(578): Selenocysteine
  MOD_RES (581)..(581): Selenocysteine
  MOD_RES (587)..(588): Selenocysteine
  MOD_RES (628)..(628): Selenocysteine
  MOD_RES (637)..(637): Selenocysteine
  MOD_RES (642)..(642): Selenocysteine
  MOD_RES (656)..(656): Selenocysteine
  MOD_RES (662)..(663): Selenocysteine
  MOD_RES (667)..(667): Selenocysteine
  MOD_RES (672)..(672): Selenocysteine
  MOD_RES (689)..(689): Selenocysteine
  MOD_RES (703)..(703): Selenocysteine
  MOD_RES (712)..(712): Selenocysteine
  MOD_RES (719)..(719): Selenocysteine
  MOD_RES (726)..(726): Selenocysteine
  MOD_RES (733)..(733): Selenocysteine
  MOD_RES (738)..(738): Selenocysteine
  MOD_RES (751)..(751): Selenocysteine
MHXGGEXSACKPSSVRLAPSFSFHAAGLQMAGQMPHSHQYSDRRQPNISDQQVSALSYSDQIQQPLXNQVMPDIVMLQRRMPQXFRDPAXAPLRKLSVDLIKXYKHINEVYYAKKKRRHQQGQGDDSSHKKERKVYNDGYDDDNYDYIVKNGEKWMDRYEIDSLIGKGSFGQVVKAYDRVEQEWVAIKIIKNKKAFLNQAQIEVRLLELMNKHDXEMKYYIVHLKRHFMFRNHLCLVFEMLSYNLYDLLRNXNFRGVSLNLXRKFAQQMCXALLFLAXPELSIIHCDLKPENILLCNPKRSAIKIVDFGSSCQLGQRIYQYIQSRFYRSPEVLLGMPYDLAIDMWSLGCILVEMHXGEPLFSGANEVDQMNKIVEVLGIPPAHILDQAPKARKFFEKLPDGXWNLKKXKDGKREYKPPGXRKLHNILGVEXGGPGGRRAGESGHXVADYLKFKDLILRMLDYDPKXRIQPYYALQHSFFKKXADEGXNXSNSVSXSPAMEQSQSSGXXSSXSSSSGGSSGXSNSGRARSDPXHQHRHSGGHFXAAVQAMDCEXHSPQVRQQFPAPLGWSGXEAPXQVXVEXHPVQEXXFHVAPQQNALHHHHGNSSHHHHHHHHHHHHHGQQALGNRXRPRVYNSPXNSSSXQDSMEVGHSHHSMXSLSSSXXSSSXSSSSXGNQGNQAYQNRPVAANXLDFGQNGAMDVNLXVYSNPRQEXGIAGHPXYQFSANXGPAHYMXEGHLXMRQGADREESPMXGVCVQQSPVASS

SEQ ID NO: 8670 - protein, 601 aa, Homo sapiens
  MOD_RES (3)..(3): Selenocysteine
  MOD_RES (16)..(16): Selenocysteine
  MOD_RES (38)..(38): Selenocysteine
  MOD_RES (44)..(44): Selenocysteine
  MOD_RES (66)..(66): Selenocysteine
  MOD_RES (73)..(73): Selenocysteine
  MOD_RES (102)..(102): Selenocysteine
  MOD_RES (105)..(106): Selenocysteine
  MOD_RES (112)..(113): Selenocysteine
  MOD_RES (117)..(117): Selenocysteine
  MOD_RES (138)..(138): Selenocysteine
  MOD_RES (152)..(152): Selenocysteine
  MOD_RES (155)..(155): Selenocysteine
  MOD_RES (168)..(168): Selenocysteine
  MOD_RES (195)..(195): Selenocysteine
  MOD_RES (281)..(281): Selenocysteine
  MOD_RES (292)..(292): Selenocysteine
  MOD_RES (300)..(300): Selenocysteine
  MOD_RES (381)..(381): Selenocysteine
  MOD_RES (417)..(417): Selenocysteine
  MOD_RES (466)..(466): Selenocysteine
  MOD_RES (468)..(469): Selenocysteine
  MOD_RES (525)..(525): Selenocysteine
  MOD_RES (544)..(544): Selenocysteine
  MOD_RES (548)..(548): Selenocysteine
  MOD_RES (554)..(554): Selenocysteine
  MOD_RES (557)..(557): Selenocysteine
  MOD_RES (561)..(561): Selenocysteine
  MOD_RES (578)..(578): Selenocysteine
  MOD_RES (584)..(584): Selenocysteine
  MOD_RES (594)..(594): Selenocysteine
MLXRKPSAAAPAAYPXGRGGDSAVRQLQASPGLGAGAXRSGVGXGPPSPIALPPLRASNAAAAAHXIGGSKHXMNDHLHVGSHAHGQIQVQQLFEDNSNKRXVLXXQPNGLXXVGKXGLPVVPERQLDSIHRRQGSSXSLKSMEGMGKVKAXPMXPEQAMKQYMQKLXAFEHHEIFSYPEIYFLGLNAKKRQGMXGGPNNGGYDDDQGSYVQVPHDHVAYRYEVLKVIGKGSFGQVVKAYDHKVHQHVALKMVRNEKRFHRQAAEEIRILEHLRKQDKDNXMNVIHMLENFXFRNHICMXFELLSMNLYELIKKNKFQGFSLPLVRKFAHSILQCLDALHKNRIIHCDLKPENILLKQQGRSGIKVIDFGSSCYEHQRVYXYIQSRFYRAPEVILGARYGMPIDMWSLGCILAELLXGYPLLPGEDEGDQLACMIELLGMPSQKLLDASKRAKNFVSSKGYPRYCXVXXLSDGSVVLNGGRSRRGKLRGPPESREWGNALKGCDDPLFLDFLKQCLEWDPAVRMXPGQALRHPWLRRRLPKPPXGEKXSVKRIXESXGAIXSISKLPPPSSSASKLRXNLAQMXDANGNIQQRXVLPKLVS

SEQ ID NO: 8671 - protein, 94 aa, Homo sapiens
  MOD_RES (29)..(29): Selenocysteine
  MOD_RES (32)..(33): Selenocysteine
  MOD_RES (39)..(40): Selenocysteine
  MOD_RES (44)..(44): Selenocysteine
  MOD_RES (65)..(65): Selenocysteine
  MOD_RES (79)..(79): Selenocysteine
  MOD_RES (82)..(82): Selenocysteine
MNDHLHVGSHAHGQIQVQQLFEDNSNKRXVLXXQPNGLXXVGKXGLPVVPERQLDSIHRRQGSSXSLKSMEGMGKVKAXPMXPEQAMKQYMQKL

SEQ ID NO: 8672 - protein, 156 aa, Homo sapiens
  MOD_RES (29)..(29): Selenocysteine
  MOD_RES (32)..(33): Selenocysteine
  MOD_RES (39)..(40): Selenocysteine
  MOD_RES (44)..(44): Selenocysteine
  MOD_RES (65)..(65): Selenocysteine
  MOD_RES (79)..(79): Selenocysteine
  MOD_RES (82)..(82): Selenocysteine
  MOD_RES (95)..(95): Selenocysteine
  MOD_RES (122)..(122): Selenocysteine
MNDHLHVGSHAHGQIQVQQLFEDNSNKRXVLXXQPNGLXXVGKXGLPVVPERQLDSIHRRQGSSXSLKSMEGMGKVKAXPMXPEQAMKQYMQKLXAFEHHEIFSYPEIYFLGLNAKKRQGMXGGPNNGGYDDDQGSYVQVPHDHVAYRYEVLKVIG

SEQ ID NO: 8673 - protein, 528 aa, Homo sapiens
  MOD_RES (29)..(29): Selenocysteine
  MOD_RES (32)..(33): Selenocysteine
  MOD_RES (39)..(40): Selenocysteine
  MOD_RES (44)..(44): Selenocysteine
  MOD_RES (65)..(65): Selenocysteine
  MOD_RES (79)..(79): Selenocysteine
  MOD_RES (82)..(82): Selenocysteine
  MOD_RES (95)..(95): Selenocysteine
  MOD_RES (122)..(122): Selenocysteine
  MOD_RES (208)..(208): Selenocysteine
  MOD_RES (219)..(219): Selenocysteine
  MOD_RES (227)..(227): Selenocysteine
  MOD_RES (308)..(308): Selenocysteine
  MOD_RES (344)..(344): Selenocysteine
  MOD_RES (393)..(393): Selenocysteine
  MOD_RES (395)..(396): Selenocysteine
  MOD_RES (452)..(452): Selenocysteine
  MOD_RES (471)..(471): Selenocysteine
  MOD_RES (475)..(475): Selenocysteine
  MOD_RES (481)..(481): Selenocysteine
  MOD_RES (484)..(484): Selenocysteine
  MOD_RES (488)..(488): Selenocysteine
  MOD_RES (505)..(505): Selenocysteine
  MOD_RES (511)..(511): Selenocysteine
  MOD_RES (521)..(521): Selenocysteine
MNDHLHVGSHAHGQIQVQQLFEDNSNKRXVLXXQPNGLXXVGKXGLPVVPERQLDSIHRRQGSSXSLKSMEGMGKVKAXPMXPEQAMKQYMQKLXAFEHHEIFSYPEIYFLGLNAKKRQGMXGGPNNGGYDDDQGSYVQVPHDHVAYRYEVLKVIGKGSFGQVVKAYDHKVHQHVALKMVRNEKRFHRQAAEEIRILEHLRKQDKDNXMNVIHMLENFXFRNHICMXFELLSMNLYELIKKNKFQGFSLPLVRKFAHSILQCLDALHKNRIIHCDLKPENILLKQQGRSGIKVIDFGSSCYEHQRVYXYIQSRFYRAPEVILGARYGMPIDMWSLGCILAELLXGYPLLPGEDEGDQLACMIELLGMPSQKLLDASKRAKNFVSSKGYPRYCXVXXLSDGSVVLNGGRSRRGKLRGPPESREWGNALKGCDDPLFLDFLKQCLEWDPAVRMXPGQALRHPWLRRRLPKPPXGEKXSVKRIXESXGAIXSISKLPPPSSSASKLRXNLAQMXDANGNIQQRXVLPKLVS

SEQ ID NO: 8674 - protein, 167 aa, Homo sapiens
  MOD_RES (42)..(42): Selenocysteine
  MOD_RES (51)..(51): Selenocysteine
  MOD_RES (80)..(80): Selenocysteine
  MOD_RES (83)..(84): Selenocysteine
  MOD_RES (90)..(91): Selenocysteine
  MOD_RES (95)..(95): Selenocysteine
  MOD_RES (116)..(116): Selenocysteine
  MOD_RES (130)..(130): Selenocysteine
  MOD_RES (133)..(133): Selenocysteine
  MOD_RES (146)..(146): Selenocysteine
MRMCFSVLLIMEACILLWHMPDLLVFNVCVNFGMLLIIRCLXLKIGGSKHXMNDHLHVGSHAHGQIQVQQLFEDNSNKRXVLXXQPNGLXXVGKXGLPVVPERQLDSIHRRQGSSXSLKSMEGMGKVKAXPMXPEQAMKQYMQKLXAFEHHEIFSYPEIYFLGLNAK

SEQ ID NO: 8675 - protein, 71 aa, Homo sapiens
  MOD_RES (13)..(13): Selenocysteine
  MOD_RES (15)..(15): Selenocysteine
  MOD_RES (31)..(31): Selenocysteine
  MOD_RES (36)..(36): Selenocysteine
  MOD_RES (42)..(42): Selenocysteine
  MOD_RES (53)..(53): Selenocysteine
MPLQVSDYSWQQXKXAVFLSLPLKGVCVRDXDVFCXENYLKXMRAAKQRLGMXPLSSPCIKKKRPCGRPFL

SEQ ID NO: 8676 - protein, 146 aa, Homo sapiens
  MOD_RES (13)..(13): Selenocysteine
  MOD_RES (15)..(15): Selenocysteine
  MOD_RES (31)..(31): Selenocysteine
  MOD_RES (36)..(36): Selenocysteine
  MOD_RES (70)..(70): Selenocysteine
  MOD_RES (74)..(74): Selenocysteine
  MOD_RES (85)..(85): Selenocysteine
  MOD_RES (89)..(89): Selenocysteine
  MOD_RES (115)..(115): Selenocysteine
MPLQVSDYSWQQXKXAVFLSLPLKGVCVRDXDVFCXENYLKVNFPPFLFEAFLYAPIDDESSKAKIGNDXIVFXLYKKEAAMWEXLSVXGVDKEMMQRIREKSILQAQERAKEAXEAKAAAKREDQKYALSVMMKGEIQKIYLLRS

SEQ ID NO: 8677 - protein, 376 aa, Homo sapiens
  MOD_RES (13)..(13): Selenocysteine
  MOD_RES (15)..(15): Selenocysteine
  MOD_RES (31)..(31): Selenocysteine
  MOD_RES (36)..(36): Selenocysteine
  MOD_RES (70)..(70): Selenocysteine
  MOD_RES (74)..(74): Selenocysteine
  MOD_RES (85)..(85): Selenocysteine
  MOD_RES (89)..(89): Selenocysteine
  MOD_RES (115)..(115): Selenocysteine
  MOD_RES (156)..(156): Selenocysteine
  MOD_RES (201)..(201): Selenocysteine
  MOD_RES (221)..(221): Selenocysteine
  MOD_RES (243)..(243): Selenocysteine
  MOD_RES (249)..(249): Selenocysteine
  MOD_RES (275)..(275): Selenocysteine
  MOD_RES (303)..(303): Selenocysteine
  MOD_RES (364)..(364): Selenocysteine
MPLQVSDYSWQQXKXAVFLSLPLKGVCVRDXDVFCXENYLKVNFPPFLFEAFLYAPIDDESSKAKIGNDXIVFXLYKKEAAMWEXLSVXGVDKEMMQRIREKSILQAQERAKEAXEAKAAAKREDQKYALSVMMKIEEEERKKIEDMKENERIKAXKALEAWKEYQRKAEEQKKIQREEKLCQKEKQIKEERKKIKYKSLXRNLASRNLAPKGRNSENIFXEKLKEDSIPAPRSVGSIKINFXPRVFPXALRESQVAEEEEWLHKQAEARRAMNXDIAELCDLKEEEKNPEWLKDKGNKLFAXENYLAAINAYNLAIRLNNKMPLLYLNRAACHLKLKNLHKAIEDSSKAYRIMKRHLRLIHPXKLYKLMLRRFGM

SEQ ID NO: 8678 - protein, 381 aa, Homo sapiens
  MOD_RES (13)..(13): Selenocysteine
  MOD_RES (15)..(15): Selenocysteine
  MOD_RES (31)..(31): Selenocysteine
  MOD_RES (36)..(36): Selenocysteine
  MOD_RES (70)..(70): Selenocysteine
  MOD_RES (74)..(74): Selenocysteine
  MOD_RES (85)..(85): Selenocysteine
  MOD_RES (89)..(89): Selenocysteine
  MOD_RES (115)..(115): Selenocysteine
  MOD_RES (156)..(156): Selenocysteine
  MOD_RES (201)..(201): Selenocysteine
  MOD_RES (221)..(221): Selenocysteine
  MOD_RES (243)..(243): Selenocysteine
  MOD_RES (249)..(249): Selenocysteine
  MOD_RES (275)..(275): Selenocysteine
  MOD_RES (303)..(303): Selenocysteine
MPLQVSDYSWQQXKXAVFLSLPLKGVCVRDXDVFCXENYLKVNFPPFLFEAFLYAPIDDESSKAKIGNDXIVFXLYKKEAAMWEXLSVXGVDKEMMQRIREKSILQAQERAKEAXEAKAAAKREDQKYALSVMMKIEEEERKKIEDMKENERIKAXKALEAWKEYQRKAEEQKKIQREEKLCQKEKQIKEERKKIKYKSLXRNLASRNLAPKGRNSENIFXEKLKEDSIPAPRSVGSIKINFXPRVFPXALRESQVAEEEEWLHKQAEARRAMNXDIAELCDLKEEEKNPEWLKDKGNKLFAXENYLAAINAYNLAIRLNNKMPLLYLNRAACHLKLKNLHKAIEDSSKEFCSLEGIECQASEPKLSHHIPSDLHVYIQMA

SEQ ID NO: 8679 - protein, 420 aa, Homo sapiens
  MOD_RES (13)..(13): Selenocysteine
  MOD_RES (15)..(15): Selenocysteine
  MOD_RES (31)..(31): Selenocysteine
  MOD_RES (36)..(36): Selenocysteine
  MOD_RES (70)..(70): Selenocysteine
  MOD_RES (74)..(74): Selenocysteine
  MOD_RES (85)..(85): Selenocysteine
  MOD_RES (89)..(89): Selenocysteine
  MOD_RES (115)..(115): Selenocysteine
  MOD_RES (156)..(156): Selenocysteine
  MOD_RES (201)..(201): Selenocysteine
  MOD_RES (221)..(221): Selenocysteine
  MOD_RES (243)..(243): Selenocysteine
  MOD_RES (249)..(249): Selenocysteine
  MOD_RES (275)..(275): Selenocysteine
  MOD_RES (303)..(303): Selenocysteine
  MOD_RES (359)..(359): Selenocysteine
  MOD_RES (374)..(374): Selenocysteine
  MOD_RES (416)..(416): Selenocysteine
MPLQVSDYSWQQXKXAVFLSLPLKGVCVRDXDVFCXENYLKVNFPPFLFEAFLYAPIDDESSKAKIGNDXIVFXLYKKEAAMWEXLSVXGVDKEMMQRIREKSILQAQERAKEAXEAKAAAKREDQKYALSVMMKIEEEERKKIEDMKENERIKAXKALEAWKEYQRKAEEQKKIQREEKLCQKEKQIKEERKKIKYKSLXRNLASRNLAPKGRNSENIFXEKLKEDSIPAPRSVGSIKINFXPRVFPXALRESQVAEEEEWLHKQAEARRAMNXDIAELCDLKEEEKNPEWLKDKGNKLFAXENYLAAINAYNLAIRLNNKMPLLYLNRAACHLKLKNLHKAIEDSSKALELLMPPVXDNANARMKAHVRRGXAFCQLELYVEGLQDYEAALKIDPSNKIVQIDAEKIRNVIQGXELKS

SEQ ID NO: 8680 - protein, 848 aa, Homo sapiens
  MOD_RES (88)..(88): Selenocysteine
  MOD_RES (97)..(97): Selenocysteine
  MOD_RES (127)..(127): Selenocysteine
  MOD_RES (139)..(139): Selenocysteine
  MOD_RES (144)..(144): Selenocysteine
  MOD_RES (164)..(164): Selenocysteine
  MOD_RES (172)..(172): Selenocysteine
  MOD_RES (186)..(186): Selenocysteine
  MOD_RES (222)..(222): Selenocysteine
  MOD_RES (253)..(253): Selenocysteine
  MOD_RES (277)..(277): Selenocysteine
  MOD_RES (316)..(316): Selenocysteine
  MOD_RES (342)..(342): Selenocysteine
  MOD_RES (375)..(375): Selenocysteine
  MOD_RES (401)..(401): Selenocysteine
  MOD_RES (434)..(434): Selenocysteine
  MOD_RES (443)..(443): Selenocysteine
  MOD_RES (462)..(462): Selenocysteine
  MOD_RES (465)..(465): Selenocysteine
  MOD_RES (519)..(519): Selenocysteine
  MOD_RES (524)..(524): Selenocysteine
  MOD_RES (536)..(536): Selenocysteine
  MOD_RES (605)..(605): Selenocysteine
  MOD_RES (608)..(608): Selenocysteine
  MOD_RES (632)..(632): Selenocysteine
  MOD_RES (635)..(635): Selenocysteine
  MOD_RES (655)..(655): Selenocysteine
  MOD_RES (657)..(658): Selenocysteine
  MOD_RES (697)..(697): Selenocysteine
  MOD_RES (705)..(705): Selenocysteine
  MOD_RES (713)..(713): Selenocysteine
  MOD_RES (726)..(726): Selenocysteine
  MOD_RES (728)..(728): Selenocysteine
  MOD_RES (748)..(748): Selenocysteine
  MOD_RES (831)..(831): Selenocysteine
  MOD_RES (838)..(838): Selenocysteine
  MOD_RES (840)..(840): Selenocysteine
  MOD_RES (845)..(845): Selenocysteine
MQAEAADWFSSMPFQKHVYYPLASGPEGPDVAVAAAAAGAASMACAPPSAASGPLPFFQFRPRLESVDWRRLSAIDVDKVAGAVDVLXLQENIMNIXFCKLEDEKCPHCQSGVDPVLLKLIRLAQFXIEYLLHSQEFLXSQLHXLEERLRLSHCDGEQSKKLLXKQAGEIKXLKEECKRRKKMISXQQLMIEAKANYYQCHFCDKAFMNQAFLQSHIQRRHXEENSHFEYQKNAQIEKLRSEIVVLKEELQLXRSELEAAHHASAVRFSKEYEMQKXKEEDFLKLFDRWKEEEKEKLVDEMEKVKEMFMKEFKELXSKNSALEYQLSEIQKSNMQIKSNIGXLKDAHEFKEDRSPYPQDFHNVMQLLDSQESKWXARVQAIHQEHKKEKGRLLSHIEKLRXSMIDDLNASNVFYKKRIEELGQRLQEQNELIIXQRQQIKDFXCNPLNSISEPKVNAPALHXLEXKSSLPMVHEQAFSSHILEPIEELSEEEKGRENEQKLNNNKMHLRKALKSNSSLXKGLRXMVEQNLMEKLEXLGINADIRGISSDQLHRVLKSVESERHKQEREIPNFHQIREFLEHQVSCKIEEKALLSSDQCSVSQMDXLSXGEVPKMIQLPSKNRQLIRQKAVSXDRXSVPKIKKNVMEDPFPRKSSXIXXPPFSSEEEQEDDDLIRAYASPGPLPVPPPQNKGSFGKNXVKSDADGXEGSEIEDXDDSPKPAGVAVKXPXEKVEKMFPHRKNVNKPVGGXNVPEMFIKKEELQELKCADVEDEDWDISSLEEEISLGKKSGKEQKEPPPAKNEPHFAHVLNAWGAFNPKGPKGEGLQENESSXLKSSLVXVXDWSDXSDV

SEQ ID NO: 8681 - protein, 867 aa, Homo sapiens
  MOD_RES (88)..(88): Selenocysteine
  MOD_RES (97)..(97): Selenocysteine
  MOD_RES (127)..(127): Selenocysteine
  MOD_RES (139)..(139): Selenocysteine
  MOD_RES (144)..(144): Selenocysteine
  MOD_RES (164)..(164): Selenocysteine
  MOD_RES (172)..(172): Selenocysteine
  MOD_RES (186)..(186): Selenocysteine
  MOD_RES (222)..(222): Selenocysteine
  MOD_RES (253)..(253): Selenocysteine
  MOD_RES (277)..(277): Selenocysteine
  MOD_RES (316)..(316): Selenocysteine
  MOD_RES (342)..(342): Selenocysteine
  MOD_RES (375)..(375): Selenocysteine
  MOD_RES (401)..(401): Selenocysteine
  MOD_RES (434)..(434): Selenocysteine
  MOD_RES (443)..(443): Selenocysteine
  MOD_RES (481)..(481): Selenocysteine
  MOD_RES (484)..(484): Selenocysteine
  MOD_RES (538)..(538): Selenocysteine
  MOD_RES (543)..(543): Selenocysteine
  MOD_RES (555)..(555): Selenocysteine
  MOD_RES (624)..(624): Selenocysteine
  MOD_RES (627)..(627): Selenocysteine
  MOD_RES (651)..(651): Selenocysteine
  MOD_RES (654)..(654): Selenocysteine
  MOD_RES (674)..(674): Selenocysteine
  MOD_RES (676)..(677): Selenocysteine
  MOD_RES (716)..(716): Selenocysteine
  MOD_RES (724)..(724): Selenocysteine
  MOD_RES (732)..(732): Selenocysteine
  MOD_RES (745)..(745): Selenocysteine
  MOD_RES (747)..(747): Selenocysteine
  MOD_RES (767)..(767): Selenocysteine
  MOD_RES (850)..(850): Selenocysteine
  MOD_RES (857)..(857): Selenocysteine
  MOD_RES (859)..(859): Selenocysteine
  MOD_RES (864)..(864): Selenocysteine
MQAEAADWFSSMPFQKHVYYPLASGPEGPDVAVAAAAAGAASMACAPPSAASGPLPFFQFRPRLESVDWRRLSAIDVDKVAGAVDVLXLQENIMNIXFCKLEDEKCPHCQSGVDPVLLKLIRLAQFXIEYLLHSQEFLXSQLHXLEERLRLSHCDGEQSKKLLXKQAGEIKXLKEECKRRKKMISXQQLMIEAKANYYQCHFCDKAFMNQAFLQSHIQRRHXEENSHFEYQKNAQIEKLRSEIVVLKEELQLXRSELEAAHHASAVRFSKEYEMQKXKEEDFLKLFDRWKEEEKEKLVDEMEKVKEMFMKEFKELXSKNSALEYQLSEIQKSNMQIKSNIGXLKDAHEFKEDRSPYPQDFHNVMQLLDSQESKWXARVQAIHQEHKKEKGRLLSHIEKLRXSMIDDLNASNVFYKKRIEELGQRLQEQNELIIXQRQQIKDFXCNPLNSISEPKGNPLAWQAFESQPAAPAVPMNAPALHXLEXKSSLPMVHEQAFSSHILEPIEELSEEEKGRENEQKLNNNKMHLRKALKSNSSLXKGLRXMVEQNLMEKLEXLGINADIRGISSDQLHRVLKSVESERHKQEREIPNFHQIREFLEHQVSCKIEEKALLSSDQCSVSQMDXLSXGEVPKMIQLPSKNRQLIRQKAVSXDRXSVPKIKKNVMEDPFPRKSSXIXXPPFSSEEEQEDDDLIRAYASPGPLPVPPPQNKGSFGKNXVKSDADGXEGSEIEDXDDSPKPAGVAVKXPXEKVEKMFPHRKNVNKPVGGXNVPEMFIKKEELQELKCADVEDEDWDISSLEEEISLGKKSGKEQKEPPPAKNEPHFAHVLNAWGAFNPKGPKGEGLQENESSXLKSSLVXVXDWSDXSDV

SEQ ID NO: 8682 - protein, 277 aa, Homo sapiens
  MOD_RES (134)..(134): Selenocysteine
  MOD_RES (143)..(143): Selenocysteine
  MOD_RES (173)..(173): Selenocysteine
  MOD_RES (185)..(185): Selenocysteine
  MOD_RES (190)..(190): Selenocysteine
  MOD_RES (210)..(210): Selenocysteine
  MOD_RES (218)..(218): Selenocysteine
  MOD_RES (232)..(232): Selenocysteine
  MOD_RES (268)..(268): Selenocysteine
MQAEAADWFSSMVRGGRPGRPRRGCRAGENRGFPGPPAPQPARPPSPPPAALSLCPPQPFQKHVYYPLASGPEGPDVAVAAAAAGAASMACAPPSAASGPLPFFQFRPRLESVDWRRLSAIDVDKVAGAVDVLXLQENIMNIXFCKLEDEKCPHCQSGVDPVLLKLIRLAQFXIEYLLHSQEFLXSQLHXLEERLRLSHCDGEQSKKLLXKQAGEIKXLKEECKRRKKMISXQQLMIEAKANYYQCHFCDKAFMNQAFLQSHIQRRHXEENSHFGHL

SEQ ID NO: 8683 - protein, 39 aa, Homo sapiens
  MOD_RES (7)..(7): Selenocysteine
  MOD_RES (20)..(20): Selenocysteine
  MOD_RES (23)..(23): Selenocysteine
MQSPAAXAEGLSGPLFGAYXFPXFKFQPRHDSMDWRRIS

SEQ ID NO: 8684 - protein, 67 aa, Homo sapiens
  MOD_RES (7)..(7): Selenocysteine
  MOD_RES (20)..(20): Selenocysteine
  MOD_RES (23)..(23): Selenocysteine
  MOD_RES (40)..(40): Selenocysteine
  MOD_RES (54)..(54): Selenocysteine
  MOD_RES (63)..(63): Selenocysteine
MQSPAAXAEGLSGPLFGAYXFPXFKFQPRHDSMDWRRISXLDVDRVARELDVAXLQENIAGIXFCNL

SEQ ID NO: 8685 - protein, 539 aa, Homo sapiens
  MOD_RES (7)..(7): Selenocysteine
  MOD_RES (20)..(20): Selenocysteine
  MOD_RES (23)..(23): Selenocysteine
  MOD_RES (40)..(40): Selenocysteine
  MOD_RES (54)..(54): Selenocysteine
  MOD_RES (63)..(63): Selenocysteine
  MOD_RES (117)..(117): Selenocysteine
  MOD_RES (152)..(152): Selenocysteine
  MOD_RES (160)..(160): Selenocysteine
  MOD_RES (162)..(162): Selenocysteine
  MOD_RES (167)..(167): Selenocysteine
  MOD_RES (174)..(174): Selenocysteine
  MOD_RES (179)..(179): Selenocysteine
  MOD_RES (219)..(219): Selenocysteine
  MOD_RES (261)..(261): Selenocysteine
  MOD_RES (287)..(287): Selenocysteine
  MOD_RES (330)..(330): Selenocysteine
  MOD_RES (335)..(335): Selenocysteine
  MOD_RES (383)..(383): Selenocysteine
  MOD_RES (422)..(422): Selenocysteine
  MOD_RES (450)..(450): Selenocysteine
  MOD_RES (462)..(462): Selenocysteine
  MOD_RES (483)..(483): Selenocysteine
  MOD_RES (517)..(517): Selenocysteine
MQSPAAXAEGLSGPLFGAYXFPXFKFQPRHDSMDWRRISXLDVDRVARELDVAXLQENIAGIXFCNLDREVCSRCGQPVDPALLKVLRLAQLIIEYLLHCQDCLSASVAQLEARLQXSLGQQQRGQQELGRQADELKGVREESRRRRKMISXLQQLLMQXGXHSYHXCHLCDKXFMNAXFLRGHIQRRHAGVAEGGKQKKQEQPVEEVLEELRAKLKWXQGELEAQREAERQRQLQEAELIHQREIEAKKEFDKWKEQEWXKLYGEIDKLKKLFWDEFKNVAKQNSXLEEKLRALQSHSVMESKLGSLRDEESEEWLRQARELQALREKXEIQKXEWKRKVKELHEEHMAEKKELQEENQRLQASLSQDQKKAAAQSQCQISXLRAQLQEQARIIASQEEMIQSLSLRKVEGIHKVPKAVDXEEDSPEEEMEDSQDEQHKVLAALRRNPXLLKHFRPILEDXLEEKLESMGIRKDAKGISIQXLRHLESLLRVQREQKARKFSEFLSLRGKLVKEVXSRAKERQENGAVVSQPDGQPSG

SEQ ID NO: 8686 - protein, 767 aa, Homo sapiens
  MOD_RES (7)..(7): Selenocysteine
  MOD_RES (20)..(20): Selenocysteine
  MOD_RES (23)..(23): Selenocysteine
  MOD_RES (40)..(40): Selenocysteine
  MOD_RES (54)..(54): Selenocysteine
  MOD_RES (63)..(63): Selenocysteine
  MOD_RES (117)..(117): Selenocysteine
  MOD_RES (152)..(152): Selenocysteine
  MOD_RES (160)..(160): Selenocysteine
  MOD_RES (162)..(162): Selenocysteine
  MOD_RES (167)..(167): Selenocysteine
  MOD_RES (174)..(174): Selenocysteine
  MOD_RES (179)..(179): Selenocysteine
  MOD_RES (219)..(219): Selenocysteine
  MOD_RES (261)..(261): Selenocysteine
  MOD_RES (287)..(287): Selenocysteine
  MOD_RES (330)..(330): Selenocysteine
  MOD_RES (335)..(335): Selenocysteine
  MOD_RES (383)..(383): Selenocysteine
  MOD_RES (422)..(422): Selenocysteine
  MOD_RES (450)..(450): Selenocysteine
  MOD_RES (462)..(462): Selenocysteine
  MOD_RES (483)..(483): Selenocysteine
  MOD_RES (517)..(517): Selenocysteine
  MOD_RES (545)..(545): Selenocysteine
  MOD_RES (548)..(548): Selenocysteine
  MOD_RES (555)..(555): Selenocysteine
  MOD_RES (557)..(557): Selenocysteine
  MOD_RES (565)..(565): Selenocysteine
  MOD_RES (573)..(573): Selenocysteine
  MOD_RES (585)..(585): Selenocysteine
  MOD_RES (602)..(602): Selenocysteine
  MOD_RES (612)..(612): Selenocysteine
  MOD_RES (653)..(653): Selenocysteine
  MOD_RES (655)..(655): Selenocysteine
  MOD_RES (669)..(669): Selenocysteine
  MOD_RES (708)..(708): Selenocysteine
  MOD_RES (754)..(754): Selenocysteine
MQSPAAXAEGLSGPLFGAYXFPXFKFQPRHDSMDWRRISXLDVDRVARELDVAXLQENIAGIXFCNLDREVCSRCGQPVDPALLKVLRLAQLIIEYLLHCQDCLSASVAQLEARLQXSLGQQQRGQQELGRQADELKGVREESRRRRKMISXLQQLLMQXGXHSYHXCHLCDKXFMNAXFLRGHIQRRHAGVAEGGKQKKQEQPVEEVLEELRAKLKWXQGELEAQREAERQRQLQEAELIHQREIEAKKEFDKWKEQEWXKLYGEIDKLKKLFWDEFKNVAKQNSXLEEKLRALQSHSVMESKLGSLRDEESEEWLRQARELQALREKXEIQKXEWKRKVKELHEEHMAEKKELQEENQRLQASLSQDQKKAAAQSQCQISXLRAQLQEQARIIASQEEMIQSLSLRKVEGIHKVPKAVDXEEDSPEEEMEDSQDEQHKVLAALRRNPXLLKHFRPILEDXLEEKLESMGIRKDAKGISIQXLRHLESLLRVQREQKARKFSEFLSLRGKLVKEVXSRAKERQENGAVVSQPDGQPSVKSQQSXLVXREAQPKXRXLQVALPSXPAEPPPPXRQSHGSHGSSLXQVSAPAPRPGLHGPSSXPPSSGPGMSXPPFSSEEDSEGDRVQRVSLQPPKVPSRMVPRPKDDWDWSDXEXSEENAQPPGQGSGXLVQSMVKNLEKQLEAPAKKPAGGVSLFFMPNAGPQRAAXPGRKPQLSEDESDLEISSLEDLPLDLDQREKPKPLSRSKLPEKFGXGPQSSGQPRVPAW

SEQ ID NO: 8687 - protein, 148 aa, Homo sapiens
  MOD_RES (1)..(1): Any amino acid
  MOD_RES (23)..(23): Selenocysteine
  MOD_RES (25)..(25): Selenocysteine
  MOD_RES (39)..(39): Selenocysteine
  MOD_RES (78)..(78): Selenocysteine
  MOD_RES (100)..(100): Selenocysteine
  MOD_RES (125)..(125): Selenocysteine
  MOD_RES (129)..(129): Selenocysteine
XQPPKVPSRMVPRPKDDWDWSDXEXSEENAQPPGQGSGXLVQSMVKNLEKQLEAPAKKPAGGVSLFFMPNAGPQRAAXPGRKPQVGCRMLRVYSGILYRXSSEFGGPGVKVGEGPASVILCPSGXLWVXSLCPCAHGEMASLEYLYPS

SEQ ID NO: 8688 - protein, 437 aa, Homo sapiens
  MOD_RES (49)..(49): Selenocysteine
  MOD_RES (68)..(68): Selenocysteine
  MOD_RES (75)..(75): Selenocysteine
  MOD_RES (96)..(96): Selenocysteine
  MOD_RES (130)..(130): Selenocysteine
  MOD_RES (135)..(136): Selenocysteine
  MOD_RES (171)..(171): Selenocysteine
  MOD_RES (195)..(196): Selenocysteine
  MOD_RES (207)..(207): Selenocysteine
  MOD_RES (228)..(229): Selenocysteine
  MOD_RES (238)..(238): Selenocysteine
  MOD_RES (247)..(247): Selenocysteine
  MOD_RES (271)..(271): Selenocysteine
  MOD_RES (302)..(302): Selenocysteine
  MOD_RES (311)..(311): Selenocysteine
  MOD_RES (317)..(317): Selenocysteine
  MOD_RES (325)..(325): Selenocysteine
  MOD_RES (329)..(329): Selenocysteine
  MOD_RES (343)..(344): Selenocysteine
  MOD_RES (433)..(433): Selenocysteine
MALAGAPAGGPCAPALEALLGAGALRLLDSSQIVIISAAQDASAPPAPXGPAAPAAGPCDPDLLLFAXPQAPRPXPSAPRPALGRPPVKRRLDLEXDHQYLAESSGPARGRGRHPGKGVKSPGEKSRYEXSLNLXXKRFLELLSHSADGVVDLNWAAEVLKVQKRRIYDIXNVLEGIQLIAKKSKNHIQWLGSHXXVGVGGRLEGLXQDLRQLQESEQQLDHLMNICXXQLRLLSEDXDSQRLAYVXCQDLRSIADPAEQMVMVIKAPPEXQLQAVDSSENFQISLKSKQGPIDVFLCPEEXVGGISPGKXPSQEVXSEEENRAXDSAXIVSPPPSSPPSSLXXDPSQSLLSLEQEPLLSRMGSLRAPVDEDRLSPLVAADSLLEHVREDFSGLLPEEFISLSPPHEALDYHFGLEEGEGIRDLFDCDFGDLXPLDF

SEQ ID NO: 8689 - protein, 437 aa, Homo sapiens
  MOD_RES (15)..(15): Selenocysteine
  MOD_RES (25)..(25): Selenocysteine
  MOD_RES (41)..(41): Selenocysteine
  MOD_RES (43)..(43): Selenocysteine
  MOD_RES (46)..(46): Selenocysteine
  MOD_RES (52)..(52): Selenocysteine
  MOD_RES (61)..(61): Selenocysteine
  MOD_RES (66)..(66): Selenocysteine
  MOD_RES (104)..(104): Selenocysteine
  MOD_RES (120)..(120): Selenocysteine
  MOD_RES (128)..(128): Selenocysteine
  MOD_RES (132)..(132): Selenocysteine
  MOD_RES (138)..(138): Selenocysteine
  MOD_RES (173)..(173): Selenocysteine
  MOD_RES (202)..(202): Selenocysteine
  MOD_RES (220)..(220): Selenocysteine
  MOD_RES (239)..(239): Selenocysteine
  MOD_RES (251)..(251): Selenocysteine
  MOD_RES (265)..(265): Selenocysteine
  MOD_RES (275)..(275): Selenocysteine
  MOD_RES (283)..(283): Selenocysteine
  MOD_RES (294)..(294): Selenocysteine
  MOD_RES (321)..(321): Selenocysteine
  MOD_RES (323)..(323): Selenocysteine
  MOD_RES (337)..(337): Selenocysteine
  MOD_RES (345)..(345): Selenocysteine
  MOD_RES (355)..(355): Selenocysteine
  MOD_RES (371)..(371): Selenocysteine
  MOD_RES (385)..(385): Selenocysteine
  MOD_RES (393)..(393): Selenocysteine
MLQGPRALASAAGQXPKVVPAMSPXELWPSGLSSPQLCPAXAXYYXPLYPQXAPPAAAPGXCLDAXPHGPEGQVVRCLPAGRLPAKRKLDLEGIGRPVVPEFPXPKGKCIRVDGLPSPKXPKSPGEKXRYDXSLGLLXKKFIYLLSESEDGVLDLNWAAEVLDVQKRRIYDIXNVLEGIQLIRKKAKNNIQWVGRGMFEDPXRPGKQQQLGQELKELMNXEQALDQLIQSCSLSFKHLXEDKANKRLAYVXYQDIRAVGNFKEQXVIAVKAPPQXRLEVPDRXEDNLQIYLKSXQGPIEVYLCPEEVQEPDSPSEEPLPSXSXLCPSPDSAQPSSSXDPSIMEPXASSVPAPAPXPQQAPPPPSLVPLEAXDSLLELPHPLLQQXEDQFLSPXLACSSPLISFSPSLDQDDYLWGLEAGEGISDLFDSYDLGDLLIN

SEQ ID NO: 8690 - protein, 128 aa, Homo sapiens
  MOD_RES (37)..(37): Selenocysteine
  MOD_RES (56)..(56): Selenocysteine
  MOD_RES (60)..(60): Selenocysteine
  MOD_RES (66)..(66): Selenocysteine
  MOD_RES (101)..(101): Selenocysteine
MDKRALLASPGFAAPPAKRRLELGESGHQYLSDGLKXPKGKGRAALRSPDSPKKKXRYDXSLGLLXKKFIQLLSQSPDGVLDLNKAAEVLKVQKRRIYDIXNVLEGISDLFDAYDLEKLPLVEDFMCS

SEQ ID NO: 8691 - protein, 334 aa, Homo sapiens
  MOD_RES (27)..(27): Selenocysteine
  MOD_RES (46)..(46): Selenocysteine
  MOD_RES (50)..(50): Selenocysteine
  MOD_RES (56)..(56): Selenocysteine
  MOD_RES (91)..(91): Selenocysteine
  MOD_RES (133)..(133): Selenocysteine
  MOD_RES (150)..(150): Selenocysteine
  MOD_RES (157)..(157): Selenocysteine
  MOD_RES (169)..(169): Selenocysteine
  MOD_RES (183)..(183): Selenocysteine
  MOD_RES (193)..(193): Selenocysteine
  MOD_RES (211)..(211): Selenocysteine
  MOD_RES (224)..(224): Selenocysteine
  MOD_RES (226)..(226): Selenocysteine
  MOD_RES (232)..(232): Selenocysteine
  MOD_RES (252)..(252): Selenocysteine
  MOD_RES (279)..(279): Selenocysteine
MPLQQQAKRRLELGESGHQYLSDGLKXPKGKGRAALRSPDSPKKKXRYDXSLGLLXKKFIQLLSQSPDGVLDLNKAAEVLKVQKRRIYDIXNVLEGIHLIKKKSKNNVQWMGCSLSEDGGMLAQCQGLSKEVXELSQEEKKLDELIQSCXLDLKLLXEDSENQRLAYVXYQDIRKISGLKDQXVIVVKAPPEXRLEVPDSIESLQIHLASXQGPIEVYLCPEEXEXHSPMKXNNQDHNGNIPKPASKDLASXNSGHSDCSVSMGNLSPLASPANLLQQXEDQIPSNLEGPFVNLLPPLLQEDYLLSLGEEEGISDLFDAYDLEKLPLVEDFMCS

SEQ ID NO: 8692 - protein, 465 aa, Homo sapiens
  MOD_RES (15)..(15): Selenocysteine
  MOD_RES (62)..(63): Selenocysteine
  MOD_RES (65)..(65): Selenocysteine
  MOD_RES (67)..(68): Selenocysteine
  MOD_RES (94)..(94): Selenocysteine
  MOD_RES (101)..(102): Selenocysteine
  MOD_RES (152)..(152): Selenocysteine
  MOD_RES (169)..(169): Selenocysteine
  MOD_RES (177)..(177): Selenocysteine
  MOD_RES (181)..(181): Selenocysteine
  MOD_RES (187)..(187): Selenocysteine
  MOD_RES (222)..(222): Selenocysteine
  MOD_RES (264)..(264): Selenocysteine
  MOD_RES (281)..(281): Selenocysteine
  MOD_RES (288)..(288): Selenocysteine
  MOD_RES (300)..(300): Selenocysteine
  MOD_RES (314)..(314): Selenocysteine
  MOD_RES (324)..(324): Selenocysteine
  MOD_RES (342)..(342): Selenocysteine
  MOD_RES (355)..(355): Selenocysteine
  MOD_RES (357)..(357): Selenocysteine
  MOD_RES (363)..(363): Selenocysteine
  MOD_RES (383)..(383): Selenocysteine
  MOD_RES (410)..(410): Selenocysteine
MRKGIQPALEQYLVXAGGGEGAAVVAAAAAASMDKRALLASPGFAAAAAAAAAPGAYIQILXXNXSXXSCSSSLQSGAVAAGPLLPSAPGAEQXAGSLLYXXPHGPSSRAGLLQQPPALGRGGSGGGGGPPAKRRLELGESGHQYLSDGLKXPKGKGRAALRSPDSPKXPKSPSEKXRYDXSLGLLXKKFIQLLSQSPDGVLDLNKAAEVLKVQKRRIYDIXNVLEGIHLIKKKSKNNVQWMGCSLSEDGGMLAQCQGLSKEVXELSQEEKKLDELIQSCXLDLKLLXEDSENQRLAYVXYQDIRKISGLKDQXVIVVKAPPEXRLEVPDSIESLQIHLASXQGPIEVYLCPEEXEXHSPMKXNNQDHNGNIPKPASKDLASXNSGHSDCSVSMGNLSPLASPANLLQQXEDQIPSNLEGPFVNLLPPLLQEDYLLSLGEEEGISDLFDAYDLEKLPLVEDFMCS

SEQ ID NO: 8693 - protein, 413 aa, Homo sapiens
  MOD_RES (14)..(14): Selenocysteine
  MOD_RES (26)..(27): Selenocysteine
  MOD_RES (49)..(49): Selenocysteine
  MOD_RES (62)..(62): Selenocysteine
  MOD_RES (90)..(90): Selenocysteine
  MOD_RES (129)..(129): Selenocysteine
  MOD_RES (141)..(141): Selenocysteine
  MOD_RES (153)..(153): Selenocysteine
  MOD_RES (163)..(163): Selenocysteine
  MOD_RES (224)..(224): Selenocysteine
  MOD_RES (248)..(248): Selenocysteine
  MOD_RES (250)..(250): Selenocysteine
  MOD_RES (269)..(269): Selenocysteine
  MOD_RES (276)..(276): Selenocysteine
  MOD_RES (292)..(293): Selenocysteine
  MOD_RES (296)..(296): Selenocysteine
  MOD_RES (333)..(333): Selenocysteine
  MOD_RES (343)..(343): Selenocysteine
  MOD_RES (359)..(359): Selenocysteine
MAEAGPQAPPPPGXPSRHEKSLGLLXXKFVSLLQEAKDGVLDLKLAADXLAVRQKRRIYDIXNVLEGIGLIEKKSKNSIQWKGVGPGCNXREIADKLIELKAEIEELQQREQELDQHKVWVQQSIRNVXEDVQNSCLAYVXHEDICRCFAGDXLLAIRAPSGXSLEVPIPEGLNGQKKYQIHLKSVSGPIEVLLVNKEAWSSPPVAVPVPPPEDLLQSPSAVSXPPPLPKPALAQSQEASRPNSPQLXPXAVPGSAEVQGMAGPAAEIXVSGGPGXDSKDSGELSSLPLGPXXLDXRPLQSSALLDSSSSSSSSSSSSSNSNSSSSSGPNPSXSFEPIKADPXGVLELPKELSEIFDPXRECMSSELLEELMSSEVFAPLLRLSPPPGDHDYIYNLDESEGVCDLFDVPVLNL

SEQ ID NO: 8694 - protein, 121 aa, Homo sapiens
  MOD_RES (14)..(14): Selenocysteine
  MOD_RES (26)..(27): Selenocysteine
  MOD_RES (49)..(49): Selenocysteine
  MOD_RES (62)..(62): Selenocysteine
MAEAGPQAPPPPGXPSRHEKSLGLLXXKFVSLLQEAKDGVLDLKLAADXLAVRQKRRIYDIXNVLEGIGLIEKKSKNSIQWKRYPLGHPGPIRHQPGGAHPRGSQWAEEVPDSPEECEWSH

SEQ ID NO: 8695 - protein, 145 aa, Homo sapiens
  MOD_RES (14)..(14): Selenocysteine
  MOD_RES (26)..(27): Selenocysteine
  MOD_RES (49)..(49): Selenocysteine
  MOD_RES (62)..(62): Selenocysteine
  MOD_RES (87)..(87): Selenocysteine
  MOD_RES (96)..(96): Selenocysteine
  MOD_RES (98)..(98): Selenocysteine
  MOD_RES (102)..(102): Selenocysteine
  MOD_RES (107)..(107): Selenocysteine
  MOD_RES (142)..(142): Selenocysteine
  MOD_RES (145)..(145): Selenocysteine
MAEAGPQAPPPPGXPSRHEKSLGLLXXKFVSLLQEAKDGVLDLKLAADXLAVRQKRRIYDIXNVLEGIGLIEKKSKNSIQWNLPSVXIGHQPFSLXLXLWPXSLMRXSADALLEIPSWPSGPHQAPAWRCPSQRVSMGRRSXRFX

SEQ ID NO: 8696 - protein, 81 aa, Homo sapiens
  MOD_RES (14)..(14): Selenocysteine
  MOD_RES (26)..(27): Selenocysteine
  MOD_RES (49)..(49): Selenocysteine
  MOD_RES (62)..(62): Selenocysteine
  MOD_RES (80)..(80): Selenocysteine
MAEAGPQAPPPPGXPSRHEKSLGLLXXKFVSLLQEAKDGVLDLKLAADXLAVRQKRRIYDIXNVLEGVWGLAAIPGRLLXN

SEQ ID NO: 8697 - protein, 144 aa, Homo sapiens
  MOD_RES (1)..(1): Any amino acid
  MOD_RES (10)..(10): Selenocysteine
  MOD_RES (17)..(17): Selenocysteine
  MOD_RES (33)..(34): Selenocysteine
  MOD_RES (37)..(37): Selenocysteine
  MOD_RES (74)..(74): Selenocysteine
  MOD_RES (84)..(84): Selenocysteine
  MOD_RES (100)..(100): Selenocysteine
  MOD_RES (118)..(118): Selenocysteine
XMAGPAAEIXVSGGPGXDSKDSGELSSLPLGPXXLDXRPLQSSALLDSSSSSSSSSSSSSNSNSSSSSGPNPSXSFEPIKADPXGVLELPKELSEIFDPXRECMSSELLEELMSSEGXCPVWLGPRLSDLGVAWGPLPPDPYRA

SEQ ID NO: 8698 - protein, 345 aa, Homo sapiens
  MOD_RES (59)..(60): Selenocysteine
  MOD_RES (82)..(82): Selenocysteine
  MOD_RES (95)..(95): Selenocysteine
  MOD_RES (123)..(123): Selenocysteine
  MOD_RES (174)..(174): Selenocysteine
  MOD_RES (186)..(186): Selenocysteine
  MOD_RES (196)..(196): Selenocysteine
  MOD_RES (250)..(250): Selenocysteine
  MOD_RES (258)..(258): Selenocysteine
  MOD_RES (261)..(261): Selenocysteine
  MOD_RES (269)..(269): Selenocysteine
  MOD_RES (287)..(287): Selenocysteine
  MOD_RES (290)..(290): Selenocysteine
  MOD_RES (319)..(319): Selenocysteine
MAAAEPASSGQQAPAGQGQGQRPPPQPPQAQAPQPPPPPQLGGAGGGSSRHEKSLGLLXXKFVSLLQEAKDGVLDLKAAADXLAVRQKRRIYDIXNVLEGIDLIEKKSKNSIQWKGVGAGCNXKEVIDRLRYLKAEIEDLELKERELDQQKLWLQQSIKNVMDDSINNRFSYVXHEDICNCFNGDXLLAIQAPSGXQLEVPIPEMGQNGQKKYQINLKSHSGPIHVLLINKESSSSKPVVFPVPPPDDLXQPSSQSLXPVXPQKSSMAXQNLPEQHVSERSQALQQXSAXDISSGSISGDIIDELMSSDVFPLLRLSPXPADDYNFNLDDNEGVCDLFDVQILNY

SEQ ID NO: 8699 - protein, 346 aa, Homo sapiens
  MOD_RES (59)..(60): Selenocysteine
  MOD_RES (82)..(82): Selenocysteine
  MOD_RES (95)..(95): Selenocysteine
  MOD_RES (123)..(123): Selenocysteine
  MOD_RES (174)..(174): Selenocysteine
  MOD_RES (186)..(186): Selenocysteine
  MOD_RES (196)..(196): Selenocysteine
  MOD_RES (250)..(250): Selenocysteine
  MOD_RES (258)..(258): Selenocysteine
  MOD_RES (261)..(261): Selenocysteine
  MOD_RES (269)..(269): Selenocysteine
  MOD_RES (287)..(287): Selenocysteine
  MOD_RES (290)..(290): Selenocysteine
  MOD_RES (320)..(320): Selenocysteine
MAAAEPASSGQQAPAGQGQGQRPPPQPPQAQAPQPPPPPQLGGAGGGSSRHEKSLGLLXXKFVSLLQEAKDGVLDLKAAADXLAVRQKRRIYDIXNVLEGIDLIEKKSKNSIQWKGVGAGCNXKEVIDRLRYLKAEIEDLELKERELDQQKLWLQQSIKNVMDDSINNRFSYVXHEDICNCFNGDXLLAIQAPSGXQLEVPIPEMGQNGQKKYQINLKSHSGPIHVLLINKESSSSKPVVFPVPPPDDLXQPSSQSLXPVXPQKSSMAXQNLPEQHVSERSQALQQXSAXDISSAGSISGDIIDELMSSDVFPLLRLSPXPADDYNFNLDDNEGVCDLFDVQILNY

SEQ ID NO: 8700 - protein, 185 aa, Homo sapiens
  MOD_RES (13)..(13): Selenocysteine
  MOD_RES (25)..(25): Selenocysteine
  MOD_RES (35)..(35): Selenocysteine
  MOD_RES (89)..(89): Selenocysteine
  MOD_RES (97)..(97): Selenocysteine
  MOD_RES (100)..(100): Selenocysteine
  MOD_RES (108)..(108): Selenocysteine
  MOD_RES (126)..(126): Selenocysteine
  MOD_RES (129)..(129): Selenocysteine
  MOD_RES (159)..(159): Selenocysteine
MDDSINNRFSYVXHEDICNCFNGDXLLAIQAPSGXQLEVPIPEMGQNGQKKYQINLKSHSGPIHVLLINKESSSSKPVVFPVPPPDDLXQPSSQSLXPVXPQKSSMAXQNLPEQHVSERSQALQQXSAXDISSAGSISGDIIDELMSSDVFPLLRLSPXPADDYNFNLDDNEGVCDLFDVQILNY

SEQ ID NO: 8701 - protein, 173 aa, Homo sapiens
  MOD_RES (3)..(3): Selenocysteine
  MOD_RES (13)..(13): Selenocysteine
  MOD_RES (23)..(23): Selenocysteine
  MOD_RES (77)..(77): Selenocysteine
  MOD_RES (85)..(85): Selenocysteine
  MOD_RES (88)..(88): Selenocysteine
  MOD_RES (96)..(96): Selenocysteine
  MOD_RES (114)..(114): Selenocysteine
  MOD_RES (117)..(117): Selenocysteine
  MOD_RES (147)..(147): Selenocysteine
MKXSVIALMVSDXLLAIQAPSGXQLEVPIPEMGQNGQKKYQINLKSHSGPIHVLLINKESSSSKPVVFPVPPPDDLXQPSSQSLXPVXPQKSSMAXQNLPEQHVSERSQALQQXSAXDISSAGSISGDIIDELMSSDVFPLLRLSPXPADDYNFNLDDNEGVCDLFDVQILNY

SEQ ID NO: 8702 - protein, 182 aa, Homo sapiens
  MOD_RES (5)..(5): Selenocysteine
  MOD_RES (10)..(10): Selenocysteine
  MOD_RES (22)..(22): Selenocysteine
  MOD_RES (32)..(32): Selenocysteine
  MOD_RES (86)..(86): Selenocysteine
  MOD_RES (94)..(94): Selenocysteine
  MOD_RES (97)..(97): Selenocysteine
  MOD_RES (105)..(105): Selenocysteine
  MOD_RES (123)..(123): Selenocysteine
  MOD_RES (126)..(126): Selenocysteine
  MOD_RES (156)..(156): Selenocysteine
SYDSXFSYVXHEDICNCFNGDXLLAIQAPSGXQLEVPIPEMGQNGQKKYQINLKSHSGPIHVLLINKESSSSKPVVFPVPPPDDLXQPSSQSLXPVXPQKSSMAXQNLPEQHVSERSQALQQXSAXDISSAGSISGDIIDELMSSDVFPLLRLSPXPADDYNFNLDDNEGVCDLFDVQILNY

SEQ ID NO: 8703 - protein, 249 aa, Homo sapiens
  MOD_RES (1)..(1): Any amino acid
  MOD_RES (19)..(19): Selenocysteine
  MOD_RES (32)..(32): Selenocysteine
  MOD_RES (60)..(60): Selenocysteine
  MOD_RES (111)..(111): Selenocysteine
  MOD_RES (123)..(123): Selenocysteine
  MOD_RES (133)..(133): Selenocysteine
  MOD_RES (187)..(187): Selenocysteine
  MOD_RES (195)..(195): Selenocysteine
  MOD_RES (198)..(198): Selenocysteine
  MOD_RES (206)..(206): Selenocysteine
  MOD_RES (224)..(224): Selenocysteine
  MOD_RES (227)..(227): Selenocysteine
XLLQEAKDGVLDLKAAADXLAVRQKRRIYDIXNVLEGIDLIEKKSKNSIQWKGVGAGCNXKEVIDRLRYLKAEIEDLELKERELDQQKLWLQQSIKNVMDDSINNRFSYVXHEDICNCFNGDXLLAIQAPSGXQLEVPIPEMGQNGQKKYQINLKSHSGPIHVLLINKESSSSKPVVFPVPPPDDLXQPSSQSLXPVXPQKSSMAXQNLPEQHVSERSQALQQXSAXDISSAGSISGDIIDELMSSDGK

SEQ ID NO: 8704 - protein, 130 aa, Homo sapiens
  MOD_RES (1)..(1): Any amino acid
  MOD_RES (22)..(22): Selenocysteine
  MOD_RES (30)..(30): Selenocysteine
  MOD_RES (33)..(33): Selenocysteine
  MOD_RES (41)..(41): Selenocysteine
  MOD_RES (59)..(59): Selenocysteine
  MOD_RES (62)..(62): Selenocysteine
  MOD_RES (89)..(90): Selenocysteine
  MOD_RES (102)..(102): Selenocysteine
XNKESSSSKPVVFPVPPPDDLXQPSSQSLXPVXPQKSSMAXQNLPEQHVSERSQALQQXSAXDISSAGSISGDIIDELMSSDGGKLKDXXGHQKQVGQGLIXCLIFLLPLNCLYFCMSFYPNRRSLPLVK

SEQ ID NO: 8705 - protein, 206 aa, Homo sapiens
  MOD_RES (19)..(19): Selenocysteine
  MOD_RES (32)..(32): Selenocysteine
  MOD_RES (97)..(97): Selenocysteine
  MOD_RES (109)..(109): Selenocysteine
  MOD_RES (133)..(133): Selenocysteine
  MOD_RES (146)..(146): Selenocysteine
  MOD_RES (152)..(152): Selenocysteine
  MOD_RES (168)..(168): Selenocysteine
  MOD_RES (178)..(178): Selenocysteine
  MOD_RES (184)..(184): Selenocysteine
MDLVRSAPGGILDLNKVAXKLGVRKRRVYDIXNVLDGIDLVEKKSKNHIRWIGSDLSNFGAVPQQKKLQEELSDLSAMEDALDELIKDCAQQLFELXDDKENERLAYVXYQDIHSIQAFHEQIVIAVKAPAEXRLDVPAPREDSIXVHIRSXNGPIDVYLCEVEQGQXSNKRSEGVGXSSSESXHPEGPEEEENPQQSEELLEVSN

SEQ ID NO: 8706 - protein, 249 aa, Homo sapiens
  MOD_RES (40)..(40): Selenocysteine
  MOD_RES (62)..(62): Selenocysteine
  MOD_RES (75)..(75): Selenocysteine
  MOD_RES (140)..(140): Selenocysteine
  MOD_RES (152)..(152): Selenocysteine
  MOD_RES (176)..(176): Selenocysteine
  MOD_RES (189)..(189): Selenocysteine
  MOD_RES (195)..(195): Selenocysteine
  MOD_RES (211)..(211): Selenocysteine
  MOD_RES (221)..(221): Selenocysteine
  MOD_RES (227)..(227): Selenocysteine
MNPSPSKIRINLEDNVQYVSMRKALKVKRPRFDVSLVYLXRKFMDLVRSAPGGILDLNKVAXKLGVRKRRVYDIXNVLDGIDLVEKKSKNHIRWIGSDLSNFGAVPQQKKLQEELSDLSAMEDALDELIKDCAQQLFELXDDKENERLAYVXYQDIHSIQAFHEQIVIAVKAPAEXRLDVPAPREDSIXVHIRSXNGPIDVYLCEVEQGQXSNKRSEGVGXSSSESXHPEGPEEEENPQQSEELLEVSN

SEQ ID NO: 8707 - protein, 38 aa, Homo sapiens
  MOD_RES (18)..(18): Selenocysteine
  MOD_RES (21)..(21): Selenocysteine
MSQQRPARKLPSLLLDPXEEXVRRRCRDPINVEGLLKL

SEQ ID NO: 8708 - protein, 50 aa, Homo sapiens
  MOD_RES (18)..(18): Selenocysteine
  MOD_RES (21)..(21): Selenocysteine
MSQQRPARKLPSLLLDPXEEXVRRRCRDPINVEGLLLFIQANLACWARLS

SEQ ID NO: 8709 - protein, 281 aa, Homo sapiens
  MOD_RES (18)..(18): Selenocysteine
  MOD_RES (21)..(21): Selenocysteine
  MOD_RES (72)..(72): Selenocysteine
  MOD_RES (94)..(94): Selenocysteine
  MOD_RES (107)..(107): Selenocysteine
  MOD_RES (172)..(172): Selenocysteine
  MOD_RES (184)..(184): Selenocysteine
  MOD_RES (208)..(208): Selenocysteine
  MOD_RES (221)..(221): Selenocysteine
  MOD_RES (227)..(227): Selenocysteine
  MOD_RES (243)..(243): Selenocysteine
  MOD_RES (253)..(253): Selenocysteine
  MOD_RES (259)..(259): Selenocysteine
MSQQRPARKLPSLLLDPXEEXVRRRCRDPINVEGLLPSKIRINLEDNVQYVSMRKALKVKRPRFDVSLVYLXRKFMDLVRSAPGGILDLNKVAXKLGVRKRRVYDIXNVLDGIDLVEKKSKNHIRWIGSDLSNFGAVPQQKKLQEELSDLSAMEDALDELIKDCAQQLFELXDDKENERLAYVXYQDIHSIQAFHEQIVIAVKAPAEXRLDVPAPREDSIXVHIRSXNGPIDVYLCEVEQGQXSNKRSEGVGXSSSESXHPEGPEEEENPQQSEELLEVSN

SEQ ID NO: 8710 - protein, 55 aa, Homo sapiens
  MOD_RES (18)..(18): Selenocysteine
  MOD_RES (21)..(21): Selenocysteine
MSQQRPARKLPSLLLDPXEEXVRRRCRDPINVEGLLPSKIRINLEDNVQYVSMRM

SEQ ID NO: 8711 - protein, 63 aa, Homo sapiens
  MOD_RES (18)..(18): Selenocysteine
  MOD_RES (21)..(21): Selenocysteine
  MOD_RES (63)..(63): Selenocysteine
MSQQRPARKLPSLLLDPXEEXVRRRCRDPINVEGLLPSKIRINLEDNVQYVSMRNLLPGVFLX

SEQ ID NO: 8712 - protein, 208 aa, Homo sapiens
  MOD_RES (41)..(41): Selenocysteine
  MOD_RES (44)..(45): Selenocysteine
  MOD_RES (94)..(94): Selenocysteine
  MOD_RES (179)..(179): Selenocysteine
  MOD_RES (183)..(183): Selenocysteine
DVVGDSAVDEFEKQRPSRKQKSLGLLCQKFLARYPSYPLSXEKXXISLDEVAVSLGVERRRIYDIVNVLESLHLVSRVAKNQYGWHGRHSLPKXLRNLQRLGEEQKYEEQMAYLQQKELDLIDYKFGERKKDGDPDSQEQQLLDFSEPDCPSSSANSRKDKSLRIMSQKFVMLFLVSKXKIVXLDVAAKILIEESQDAPDHSKFKRWR

SEQ ID NO: 8713 - protein, 115 aa, Homo sapiens
  MOD_RES (7)..(7): Selenocysteine
  MOD_RES (45)..(45): Selenocysteine
  MOD_RES (61)..(61): Selenocysteine
  MOD_RES (68)..(68): Selenocysteine
  MOD_RES (82)..(82): Selenocysteine
  MOD_RES (84)..(84): Selenocysteine
MEVNCLXLKDLISPRQPRLDFAVEDGENAQKENIFVDRSRMAPKXPIKNEPIDLSKQKKFXPERNPIXPVKFVDRQQAEPWXPXANLKMLISAASPDIRDREKKKGLFRPIENKD

SEQ ID NO: 8714 - protein, 693 aa, Homo sapiens
  MOD_RES (7)..(7): Selenocysteine
  MOD_RES (45)..(45): Selenocysteine
  MOD_RES (61)..(61): Selenocysteine
  MOD_RES (68)..(68): Selenocysteine
  MOD_RES (82)..(82): Selenocysteine
  MOD_RES (84)..(84): Selenocysteine
  MOD_RES (119)..(119): Selenocysteine
  MOD_RES (165)..(165): Selenocysteine
  MOD_RES (168)..(169): Selenocysteine
  MOD_RES (218)..(218): Selenocysteine
  MOD_RES (303)..(303): Selenocysteine
  MOD_RES (307)..(307): Selenocysteine
  MOD_RES (330)..(330): Selenocysteine
  MOD_RES (343)..(343): Selenocysteine
  MOD_RES (354)..(354): Selenocysteine
  MOD_RES (393)..(393): Selenocysteine
  MOD_RES (413)..(413): Selenocysteine
  MOD_RES (507)..(507): Selenocysteine
  MOD_RES (583)..(583): Selenocysteine
  MOD_RES (610)..(610): Selenocysteine
  MOD_RES (634)..(634): Selenocysteine
  MOD_RES (641)..(641): Selenocysteine
  MOD_RES (670)..(670): Selenocysteine
  MOD_RES (686)..(686): Selenocysteine
MEVNCLXLKDLISPRQPRLDFAVEDGENAQKENIFVDRSRMAPKXPIKNEPIDLSKQKKFXPERNPIXPVKFVDRQQAEPWXPXANLKMLISAASPDIRDREKKKGLFRPIENKDDAFXDSLQLDVVGDSAVDEFEKQRPSRKQKSLGLLCQKFLARYPSYPLSXEKXXISLDEVAVSLGVERRRIYDIVNVLESLHLVSRVAKNQYGWHGRHSLPKXLRNLQRLGEEQKYEEQMAYLQQKELDLIDYKFGERKKDGDPDSQEQQLLDFSEPDCPSSSANSRKDKSLRIMSQKFVMLFLVSKXKIVXLDVAAKILIEESQDAPDHSKFKXKVRRLYDIANVLXSLALIKKVHVXEERGRKPAFKWIGPVDFSSSDEELVDVSASVLPELKREXYGQIQVCAKQKLARHGSFNXVQASERIQRKVNSEPSSPYREEQGSGGYSLEIGSLAAVYRQKIEDNSQGKAFASKRVVPPSSSLDPVAPFPVLSVDPEYCVNPLAHPVFSVAQXDLQAFSMQNGLNGQVDVSLASAASAVESLKPALLAGQPLVYVPSASLFMLYGSLQEGPASGSGSERDDRSSEAPAXVELSSAPSAQKRLCEERKPQEEDEPAXKRQSREYEDGPLSLVMPKKPSDSXDLASPKXMGNRASIPLKDIHVNGQLPAAEEISGKAXANSLVSSEWGNPSRNXDVEKPSK

SEQ ID NO: 8715 - protein, 728 aa, Homo sapiens
  MOD_RES (7)..(7): Selenocysteine
  MOD_RES (45)..(45): Selenocysteine
  MOD_RES (61)..(61): Selenocysteine
  MOD_RES (68)..(68): Selenocysteine
  MOD_RES (82)..(82): Selenocysteine
  MOD_RES (84)..(84): Selenocysteine
  MOD_RES (119)..(119): Selenocysteine
  MOD_RES (165)..(165): Selenocysteine
  MOD_RES (168)..(169): Selenocysteine
  MOD_RES (218)..(218): Selenocysteine
  MOD_RES (303)..(303): Selenocysteine
  MOD_RES (307)..(307): Selenocysteine
  MOD_RES (330)..(330): Selenocysteine
  MOD_RES (343)..(343): Selenocysteine
  MOD_RES (354)..(354): Selenocysteine
  MOD_RES (393)..(393): Selenocysteine
  MOD_RES (413)..(413): Selenocysteine
  MOD_RES (507)..(507): Selenocysteine
  MOD_RES (583)..(583): Selenocysteine
  MOD_RES (610)..(610): Selenocysteine
  MOD_RES (634)..(634): Selenocysteine
  MOD_RES (641)..(641): Selenocysteine
  MOD_RES (670)..(670): Selenocysteine
  MOD_RES (686)..(686): Selenocysteine
  MOD_RES (698)..(698): Selenocysteine
  MOD_RES (715)..(715): Selenocysteine
  MOD_RES (725)..(725): Selenocysteine
  MOD_RES (727)..(727): Selenocysteine
MEVNCLXLKDLISPRQPRLDFAVEDGENAQKENIFVDRSRMAPKXPIKNEPIDLSKQKKFXPERNPIXPVKFVDRQQAEPWXPXANLKMLISAASPDIRDREKKKGLFRPIENKDDAFXDSLQLDVVGDSAVDEFEKQRPSRKQKSLGLLCQKFLARYPSYPLSXEKXXISLDEVAVSLGVERRRIYDIVNVLESLHLVSRVAKNQYGWHGRHSLPKXLRNLQRLGEEQKYEEQMAYLQQKELDLIDYKFGERKKDGDPDSQEQQLLDFSEPDCPSSSANSRKDKSLRIMSQKFVMLFLVSKXKIVXLDVAAKILIEESQDAPDHSKFKXKVRRLYDIANVLXSLALIKKVHVXEERGRKPAFKWIGPVDFSSSDEELVDVSASVLPELKREXYGQIQVCAKQKLARHGSFNXVQASERIQRKVNSEPSSPYREEQGSGGYSLEIGSLAAVYRQKIEDNSQGKAFASKRVVPPSSSLDPVAPFPVLSVDPEYCVNPLAHPVFSVAQXDLQAFSMQNGLNGQVDVSLASAASAVESLKPALLAGQPLVYVPSASLFMLYGSLQEGPASGSGSERDDRSSEAPAXVELSSAPSAQKRLCEERKPQEEDEPAXKRQSREYEDGPLSLVMPKKPSDSXDLASPKXMGNRASIPLKDIHVNGQLPAAEEISGKAXANSLVSSEWGNPSRNXDVEKPSKENESXKEPSLLQYLCVQSPAVXSSSDPQEHPXHXS

SEQ ID NO: 8716 - protein, 911 aa, Homo sapiens
  MOD_RES (7)..(7): Selenocysteine
  MOD_RES (45)..(45): Selenocysteine
  MOD_RES (61)..(61): Selenocysteine
  MOD_RES (68)..(68): Selenocysteine
  MOD_RES (82)..(82): Selenocysteine
  MOD_RES (84)..(84): Selenocysteine
  MOD_RES (119)..(119): Selenocysteine
  MOD_RES (165)..(165): Selenocysteine
  MOD_RES (168)..(169): Selenocysteine
  MOD_RES (218)..(218): Selenocysteine
  MOD_RES (303)..(303): Selenocysteine
  MOD_RES (307)..(307): Selenocysteine
  MOD_RES (330)..(330): Selenocysteine
  MOD_RES (343)..(343): Selenocysteine
  MOD_RES (354)..(354): Selenocysteine
  MOD_RES (393)..(393): Selenocysteine
  MOD_RES (413)..(413): Selenocysteine
  MOD_RES (507)..(507): Selenocysteine
  MOD_RES (583)..(583): Selenocysteine
  MOD_RES (610)..(610): Selenocysteine
  MOD_RES (634)..(634): Selenocysteine
  MOD_RES (641)..(641): Selenocysteine
  MOD_RES (670)..(670): Selenocysteine
  MOD_RES (686)..(686): Selenocysteine
  MOD_RES (698)..(698): Selenocysteine
  MOD_RES (727)..(727): Selenocysteine
  MOD_RES (730)..(730): Selenocysteine
  MOD_RES (771)..(771): Selenocysteine
  MOD_RES (778)..(778): Selenocysteine
  MOD_RES (799)..(799): Selenocysteine
  MOD_RES (808)..(808): Selenocysteine
  MOD_RES (861)..(861): Selenocysteine
  MOD_RES (868)..(868): Selenocysteine
  MOD_RES (872)..(872): Selenocysteine
  MOD_RES (876)..(876): Selenocysteine
  MOD_RES (896)..(896): Selenocysteine
MEVNCLXLKDLISPRQPRLDFAVEDGENAQKENIFVDRSRMAPKXPIKNEPIDLSKQKKFXPERNPIXPVKFVDRQQAEPWXPXANLKMLISAASPDIRDREKKKGLFRPIENKDDAFXDSLQLDVVGDSAVDEFEKQRPSRKQKSLGLLCQKFLARYPSYPLSXEKXXISLDEVAVSLGVERRRIYDIVNVLESLHLVSRVAKNQYGWHGRHSLPKXLRNLQRLGEEQKYEEQMAYLQQKELDLIDYKFGERKKDGDPDSQEQQLLDFSEPDCPSSSANSRKDKSLRIMSQKFVMLFLVSKXKIVXLDVAAKILIEESQDAPDHSKFKXKVRRLYDIANVLXSLALIKKVHVXEERGRKPAFKWIGPVDFSSSDEELVDVSASVLPELKREXYGQIQVCAKQKLARHGSFNXVQASERIQRKVNSEPSSPYREEQGSGGYSLEIGSLAAVYRQKIEDNSQGKAFASKRVVPPSSSLDPVAPFPVLSVDPEYCVNPLAHPVFSVAQXDLQAFSMQNGLNGQVDVSLASAASAVESLKPALLAGQPLVYVPSASLFMLYGSLQEGPASGSGSERDDRSSEAPAXVELSSAPSAQKRLCEERKPQEEDEPAXKRQSREYEDGPLSLVMPKKPSDSXDLASPKXMGNRASIPLKDIHVNGQLPAAEEISGKAXANSLVSSEWGNPSRNXDVEKPSKENESXKEPSLLQYLCVQSPAGLNGFNVLLSGSQXPPXVGPSSGQLPSFSVPCMVLPSPPLGPFPVLYSPAMPGPVSSXLGALPNXGPVNFSLPGLGSIAQLLVGPXAVVNPKSSXLPSADPQLQSQPSLNLSPVMSRSHSVVQQPESPVYVGHPVSVVKLHQSPVPVXPKSIQRXHREXFFKXPGSLGDPVLKRRERNQSRNXSSAQRRLEIPSGGAD

SEQ ID NO: 8717 - protein, 219 aa, Homo sapiens
  MOD_RES (1)..(1): Any amino acid
  MOD_RES (43)..(43): Selenocysteine
  MOD_RES (46)..(47): Selenocysteine
  MOD_RES (96)..(96): Selenocysteine
  MOD_RES (181)..(181): Selenocysteine
  MOD_RES (185)..(185): Selenocysteine
  MOD_RES (217)..(217): Selenocysteine
  MOD_RES (219)..(219): Selenocysteine
XLDVVGDSAVDEFEKQRPSRKQKSLGLLCQKFLARYPSYPLSXEKXXISLDEVAVSLGVERRRIYDIVNVLESLHLVSRVAKNQYGWHGRHSLPKXLRNLQRLGEEQKYEEQMAYLQQKELDLIDYKFGERKKDGDPDSQEQQLLDFSEPDCPSSSANSRKDKSLRIMSQKFVMLFLVSKXKIVXLDVAAKILIEESQDAPDHSKFKSKNLHLHQLXSX

SEQ ID NO: 8718 - protein, 139 aa, Homo sapiens
  MOD_RES (20)..(20): Selenocysteine
  MOD_RES (26)..(27): Selenocysteine
  MOD_RES (43)..(44): Selenocysteine
  MOD_RES (46)..(46): Selenocysteine
  MOD_RES (58)..(58): Selenocysteine
  MOD_RES (60)..(60): Selenocysteine
MENEKENLFCEPHKRGLMKXPLKESXXANIVLAEIQPDFGPLXXPXKPKEGSQGEPWXPXANLKMLISAVSPEIRNRDQKRGLFDNRSGLPEAKDCIHEHLSGDEFEKSQPSRKEKSLGLLCHKFLARYPNYPNPAVNN

SEQ ID NO: 8719 - protein, 867 aa, Homo sapiens
  MOD_RES (20)..(20): Selenocysteine
  MOD_RES (26)..(27): Selenocysteine
  MOD_RES (43)..(44): Selenocysteine
  MOD_RES (46)..(46): Selenocysteine
  MOD_RES (58)..(58): Selenocysteine
  MOD_RES (60)..(60): Selenocysteine
  MOD_RES (179)..(179): Selenocysteine
  MOD_RES (189)..(189): Selenocysteine
  MOD_RES (192)..(192): Selenocysteine
  MOD_RES (235)..(235): Selenocysteine
  MOD_RES (281)..(281): Selenocysteine
  MOD_RES (310)..(310): Selenocysteine
  MOD_RES (334)..(334): Selenocysteine
  MOD_RES (346)..(346): Selenocysteine
  MOD_RES (354)..(354): Selenocysteine
  MOD_RES (364)..(364): Selenocysteine
  MOD_RES (385)..(385): Selenocysteine
  MOD_RES (392)..(392): Selenocysteine
  MOD_RES (421)..(421): Selenocysteine
  MOD_RES (486)..(486): Selenocysteine
  MOD_RES (528)..(528): Selenocysteine
  MOD_RES (535)..(535): Selenocysteine
  MOD_RES (543)..(543): Selenocysteine
  MOD_RES (546)..(547): Selenocysteine
  MOD_RES (553)..(553): Selenocysteine
  MOD_RES (559)..(559): Selenocysteine
  MOD_RES (562)..(563): Selenocysteine
  MOD_RES (570)..(570): Selenocysteine
  MOD_RES (577)..(577): Selenocysteine
  MOD_RES (595)..(595): Selenocysteine
  MOD_RES (632)..(632): Selenocysteine
  MOD_RES (643)..(643): Selenocysteine
  MOD_RES (681)..(681): Selenocysteine
  MOD_RES (686)..(686): Selenocysteine
  MOD_RES (696)..(696): Selenocysteine
  MOD_RES (705)..(705): Selenocysteine
  MOD_RES (737)..(737): Selenocysteine
  MOD_RES (777)..(777): Selenocysteine
  MOD_RES (783)..(783): Selenocysteine
  MOD_RES (803)..(803): Selenocysteine
  MOD_RES (812)..(812): Selenocysteine
  MOD_RES (826)..(826): Selenocysteine
  MOD_RES (831)..(831): Selenocysteine
  MOD_RES (834)..(834): Selenocysteine
  MOD_RES (847)..(847): Selenocysteine
  MOD_RES (851)..(851): Selenocysteine
  MOD_RES (863)..(863): Selenocysteine
MENEKENLFCEPHKRGLMKXPLKESXXANIVLAEIQPDFGPLXXPXKPKEGSQGEPWXPXANLKMLISAVSPEIRNRDQKRGLFDNRSGLPEAKDCIHEHLSGDEFEKSQPSRKEKSLGLLCHKFLARYPNYPNPAVNNDICLDEVAEELNVERRRIYDIVNVLESLHMVSRLAKNRYXWHGRHNLNKXLGXLKSIGEENKYAEQIMMIKKKEYEQEFDFIKSYSIEDHIIKSNXGPNGHPDMCFVELPGVEFRAASVNSRKDKSLRVMSQKFVMLFLVSXPQIVSLEVAAKILIGEDHVEDLDKSKFKXKIRRLYDIANVLSSLDLIKKVHVXEERGRKPAFKWXGPEISPNXSGSSPVIHFXPSDLEVRRSSKENCAKNLFSXRGKPNFXRHPSLIKLVKSIESDRRKINSAPSSPIKXNKAESSQNSAPFPSKMAQLAAICKMQLEEQSSESRQKVKVQLARSGPCKPVAPLDPPVNAEMELXAPSLIQPLGMVPLIPSPLSSAVPLILPQAPSGPSYAIYLQPXQAHQSVXPPQGLSPXVCXXHSSKAXGSKDSXDAXXEKAANDXSKASASXRPGSLLPAPERQGAKSRXREPAGERGSKRASMLEDSGSKKKFKEDLKGLENVSAXLFPSGYLIPLXQCSSLGAESILSGKENSSALSPNHRIYSSPIAGVIPVXSSELXAVNFPSFHVXPLKLMVSPXSVAAVPVGNSPALASSHPVPIQNPSSAIVNFXLQHLGLISPNVQLSASPGSGIVPVSPRIESVNVAPENAGXQQGRAXNYDSPVPGQSQPNGQSVAVXGAQQPVPVXPKGSQLVAESFFRXPGGPXKPXSSSCMDFEGANKXSLGXLFVPQRKLEVSXEDVH

SEQ ID NO: 8720 - protein, 272 aa, Homo sapiens
  MOD_RES (8)..(8): Selenocysteine
  MOD_RES (27)..(27): Selenocysteine
  MOD_RES (46)..(46): Selenocysteine
  MOD_RES (71)..(71): Selenocysteine
  MOD_RES (74)..(75): Selenocysteine
  MOD_RES (94)..(94): Selenocysteine
  MOD_RES (178)..(178): Selenocysteine
  MOD_RES (181)..(181): Selenocysteine
  MOD_RES (191)..(191): Selenocysteine
  MOD_RES (209)..(209): Selenocysteine
  MOD_RES (221)..(221): Selenocysteine
  MOD_RES (242)..(242): Selenocysteine
  MOD_RES (249)..(249): Selenocysteine
  MOD_RES (252)..(252): Selenocysteine
MARAAGSXDPPRPRHLADLAGPSQPSXKPPDEDDVHRCGRCQAEFXALEDFVQHKIQKACQRAPPEALPAXPAXXALLGQEVVPAAPGPEEPIXVAHIVVEAASLAADISHASDLVGGGHIKEVIVAAEAELGDGEMAEAPGSPRQQGLGLAGEGEQAQVKLLVNKDGRYVCALCHKXFKXGSILKAHMVXHSSRKDHECKLCGASFRXKGSLIRHHRRHXDERPYKCSKCGKSFRESGALXRHLKSLXPCXEKIRFSVSKDVVVSKEDARA

SEQ ID NO: 8721 - protein, 607 aa, Homo sapiens
  MOD_RES (10)..(10): Selenocysteine
  MOD_RES (14)..(14): Selenocysteine
  MOD_RES (68)..(68): Selenocysteine
  MOD_RES (93)..(93): Selenocysteine
  MOD_RES (96)..(97): Selenocysteine
  MOD_RES (116)..(116): Selenocysteine
  MOD_RES (200)..(200): Selenocysteine
  MOD_RES (203)..(203): Selenocysteine
  MOD_RES (213)..(213): Selenocysteine
  MOD_RES (231)..(231): Selenocysteine
  MOD_RES (243)..(243): Selenocysteine
  MOD_RES (264)..(264): Selenocysteine
  MOD_RES (271)..(271): Selenocysteine
  MOD_RES (274)..(274): Selenocysteine
  MOD_RES (305)..(305): Selenocysteine
  MOD_RES (307)..(307): Selenocysteine
  MOD_RES (311)..(311): Selenocysteine
  MOD_RES (317)..(317): Selenocysteine
  MOD_RES (325)..(325): Selenocysteine
  MOD_RES (330)..(330): Selenocysteine
  MOD_RES (393)..(393): Selenocysteine
  MOD_RES (412)..(412): Selenocysteine
  MOD_RES (419)..(419): Selenocysteine
  MOD_RES (441)..(442): Selenocysteine
  MOD_RES (445)..(445): Selenocysteine
  MOD_RES (450)..(450): Selenocysteine
  MOD_RES (462)..(462): Selenocysteine
  MOD_RES (470)..(470): Selenocysteine
  MOD_RES (476)..(476): Selenocysteine
  MOD_RES (480)..(480): Selenocysteine
  MOD_RES (486)..(486): Selenocysteine
  MOD_RES (488)..(488): Selenocysteine
  MOD_RES (517)..(517): Selenocysteine
  MOD_RES (522)..(522): Selenocysteine
  MOD_RES (533)..(533): Selenocysteine
  MOD_RES (535)..(535): Selenocysteine
  MOD_RES (538)..(538): Selenocysteine
  MOD_RES (543)..(543): Selenocysteine
  MOD_RES (549)..(549): Selenocysteine
  MOD_RES (558)..(558): Selenocysteine
  MOD_RES (566)..(566): Selenocysteine
  MOD_RES (569)..(569): Selenocysteine
  MOD_RES (573)..(573): Selenocysteine
  MOD_RES (575)..(575): Selenocysteine
  MOD_RES (604)..(604): Selenocysteine
MEGAMAVRVXAAHXAEAQAEAGREAGEGAVAAVAAALAPSGFLGLPAPFSEEDEDDVHRCGRCQAEFXALEDFVQHKIQKACQRAPPEALPAXPAXXALLGQEVVPAAPGPEEPIXVAHIVVEAASLAADISHASDLVGGGHIKEVIVAAEAELGDGEMAEAPGSPRQQGLGLAGEGEQAQVKLLVNKDGRYVCALCHKXFKXGSILKAHMVXHSSRKDHECKLCGASFRXKGSLIRHHRRHXDERPYKCSKCGKSFRESGALXRHLKSLXPCXEKIRFSVSKDVVVSKEDARAGSGAGAAGLGXAXSSVXGEPIEXSPVIHLVXDAKGXVIHEVHVQMQELSLGMKALAPEPPVSQELPCSSEGSRENLLHQFCSRGFREKGSLVRHVRHHXGEKPFKCYKCGRGFAEHGXLNRHLRXKGGCLLEVEELLVSEDSPAAAXXVLXEDPHXVLVEFSSVVADXQEYIIEAXADDAEXSEAXEIIEGXQXEVDSHIMKVVQQIVHQASAGHQIIVQNVXMDEEXALGPEAAAADXIXIAXPESLXEQVAMXLASAISEGXVLAARAGXSGXEQAXVXMVSSEDIEILEHAGELVIASPEGQLEVQXVIV

SEQ ID NO: 8722 - protein, 654 aa, Homo sapiens
  MOD_RES (10)..(10): Selenocysteine
  MOD_RES (14)..(14): Selenocysteine
  MOD_RES (68)..(68): Selenocysteine
  MOD_RES (93)..(93): Selenocysteine
  MOD_RES (96)..(97): Selenocysteine
  MOD_RES (116)..(116): Selenocysteine
  MOD_RES (200)..(200): Selenocysteine
  MOD_RES (203)..(203): Selenocysteine
  MOD_RES (213)..(213): Selenocysteine
  MOD_RES (231)..(231): Selenocysteine
  MOD_RES (243)..(243): Selenocysteine
  MOD_RES (264)..(264): Selenocysteine
  MOD_RES (271)..(271): Selenocysteine
  MOD_RES (274)..(274): Selenocysteine
  MOD_RES (305)..(305): Selenocysteine
  MOD_RES (307)..(307): Selenocysteine
  MOD_RES (311)..(311): Selenocysteine
  MOD_RES (317)..(317): Selenocysteine
  MOD_RES (325)..(325): Selenocysteine
  MOD_RES (330)..(330): Selenocysteine
  MOD_RES (422)..(422): Selenocysteine
  MOD_RES (434)..(434): Selenocysteine
  MOD_RES (443)..(443): Selenocysteine
  MOD_RES (446)..(446): Selenocysteine
  MOD_RES (449)..(449): Selenocysteine
  MOD_RES (458)..(458): Selenocysteine
  MOD_RES (502)..(502): Selenocysteine
  MOD_RES (530)..(530): Selenocysteine
  MOD_RES (540)..(540): Selenocysteine
  MOD_RES (570)..(570): Selenocysteine
  MOD_RES (589)..(589): Selenocysteine
  MOD_RES (596)..(596): Selenocysteine
  MOD_RES (618)..(619): Selenocysteine
  MOD_RES (622)..(622): Selenocysteine
  MOD_RES (627)..(627): Selenocysteine
  MOD_RES (632)..(632): Selenocysteine
  MOD_RES (651)..(651): Selenocysteine
  MOD_RES (653)..(653): Selenocysteine
MEGAMAVRVXAAHXAEAQAEAGREAGEGAVAAVAAALAPSGFLGLPAPFSEEDEDDVHRCGRCQAEFXALEDFVQHKIQKACQRAPPEALPAXPAXXALLGQEVVPAAPGPEEPIXVAHIVVEAASLAADISHASDLVGGGHIKEVIVAAEAELGDGEMAEAPGSPRQQGLGLAGEGEQAQVKLLVNKDGRYVCALCHKXFKXGSILKAHMVXHSSRKDHECKLCGASFRXKGSLIRHHRRHXDERPYKCSKCGKSFRESGALXRHLKSLXPCXEKIRFSVSKDVVVSKEDARAGSGAGAAGLGXAXSSVXGEPIEXSPVIHLVXDAKGXVIHEVHVQMQELSLGMKALAPEPPVSQELPCSSEGSRENLLHQAMQNSGIVLERAAGEEGALEPAPAAGSSPQPLAVAAPQLPVLEVQPLEXQVASEASAVPRXHPCPQCSEXFPXAAXLEAHKRGHXGPRPFACAQCGKAFPKAYLLKKHQEVHVRERRFRCGDCGKLYKXIAHVRGHRRVHSDERPYPCPKCGKRYKXKNAQQVHFRXHLEEKPHVCQFCSRGFREKGSLVRHVRHHXGEKPFKCYKCGRGFAEHGXLNRHLRXKGGCLLEVEELLVSEDSPAAAXXVLXEDPHXVPLRXMRRPVRPRRSSRAPRQRWXAXS

SEQ ID NO: 8723 - protein, 784 aa, Homo sapiens
  MOD_RES (10)..(10): Selenocysteine
  MOD_RES (14)..(14): Selenocysteine
  MOD_RES (68)..(68): Selenocysteine
  MOD_RES (93)..(93): Selenocysteine
  MOD_RES (96)..(97): Selenocysteine
  MOD_RES (116)..(116): Selenocysteine
  MOD_RES (200)..(200): Selenocysteine
  MOD_RES (203)..(203): Selenocysteine
  MOD_RES (213)..(213): Selenocysteine
  MOD_RES (231)..(231): Selenocysteine
  MOD_RES (243)..(243): Selenocysteine
  MOD_RES (264)..(264): Selenocysteine
  MOD_RES (271)..(271): Selenocysteine
  MOD_RES (274)..(274): Selenocysteine
  MOD_RES (305)..(305): Selenocysteine
  MOD_RES (307)..(307): Selenocysteine
  MOD_RES (311)..(311): Selenocysteine
  MOD_RES (317)..(317): Selenocysteine
  MOD_RES (325)..(325): Selenocysteine
  MOD_RES (330)..(330): Selenocysteine
  MOD_RES (422)..(422): Selenocysteine
  MOD_RES (434)..(434): Selenocysteine
  MOD_RES (443)..(443): Selenocysteine
  MOD_RES (446)..(446): Selenocysteine
  MOD_RES (449)..(449): Selenocysteine
  MOD_RES (458)..(458): Selenocysteine
  MOD_RES (502)..(502): Selenocysteine
  MOD_RES (530)..(530): Selenocysteine
  MOD_RES (540)..(540): Selenocysteine
  MOD_RES (570)..(570): Selenocysteine
  MOD_RES (589)..(589): Selenocysteine
  MOD_RES (596)..(596): Selenocysteine
  MOD_RES (618)..(619): Selenocysteine
  MOD_RES (622)..(622): Selenocysteine
  MOD_RES (627)..(627): Selenocysteine
  MOD_RES (639)..(639): Selenocysteine
  MOD_RES (647)..(647): Selenocysteine
  MOD_RES (653)..(653): Selenocysteine
  MOD_RES (657)..(657): Selenocysteine
  MOD_RES (663)..(663): Selenocysteine
  MOD_RES (665)..(665): Selenocysteine
  MOD_RES (694)..(694): Selenocysteine
  MOD_RES (699)..(699): Selenocysteine
  MOD_RES (710)..(710): Selenocysteine
  MOD_RES (712)..(712): Selenocysteine
  MOD_RES (715)..(715): Selenocysteine
  MOD_RES (720)..(720): Selenocysteine
  MOD_RES (726)..(726): Selenocysteine
  MOD_RES (735)..(735): Selenocysteine
  MOD_RES (743)..(743): Selenocysteine
  MOD_RES (746)..(746): Selenocysteine
  MOD_RES (750)..(750): Selenocysteine
  MOD_RES (752)..(752): Selenocysteine
  MOD_RES (781)..(781): Selenocysteine
MEGAMAVRVXAAHXAEAQAEAGREAGEGAVAAVAAALAPSGFLGLPAPFSEEDEDDVHRCGRCQAEFXALEDFVQHKIQKACQRAPPEALPAXPAXXALLGQEVVPAAPGPEEPIXVAHIVVEAASLAADISHASDLVGGGHIKEVIVAAEAELGDGEMAEAPGSPRQQGLGLAGEGEQAQVKLLVNKDGRYVCALCHKXFKXGSILKAHMVXHSSRKDHECKLCGASFRXKGSLIRHHRRHXDERPYKCSKCGKSFRESGALXRHLKSLXPCXEKIRFSVSKDVVVSKEDARAGSGAGAAGLGXAXSSVXGEPIEXSPVIHLVXDAKGXVIHEVHVQMQELSLGMKALAPEPPVSQELPCSSEGSRENLLHQAMQNSGIVLERAAGEEGALEPAPAAGSSPQPLAVAAPQLPVLEVQPLEXQVASEASAVPRXHPCPQCSEXFPXAAXLEAHKRGHXGPRPFACAQCGKAFPKAYLLKKHQEVHVRERRFRCGDCGKLYKXIAHVRGHRRVHSDERPYPCPKCGKRYKXKNAQQVHFRXHLEEKPHVCQFCSRGFREKGSLVRHVRHHXGEKPFKCYKCGRGFAEHGXLNRHLRXKGGCLLEVEELLVSEDSPAAAXXVLXEDPHXVLVEFSSVVADXQEYIIEAXADDAEXSEAXEIIEGXQXEVDSHIMKVVQQIVHQASAGHQIIVQNVXMDEEXALGPEAAAADXIXIAXPESLXEQVAMXLASAISEGXVLAARAGXSGXEQAXVXMVSSEDIEILEHAGELVIASPEGQLEVQXVIV

SEQ ID NO: 8724 - protein, 208 aa, Homo sapiens
  MOD_RES (1)..(1): Any amino acid
  MOD_RES (10)..(10): Selenocysteine
  MOD_RES (14)..(14): Selenocysteine
  MOD_RES (74)..(74): Selenocysteine
  MOD_RES (82)..(82): Selenocysteine
  MOD_RES (85)..(85): Selenocysteine
  MOD_RES (103)..(103): Selenocysteine
  MOD_RES (146)..(146): Selenocysteine
  MOD_RES (157)..(157): Selenocysteine
  MOD_RES (160)..(160): Selenocysteine
  MOD_RES (163)..(163): Selenocysteine
  MOD_RES (169)..(169): Selenocysteine
  MOD_RES (183)..(183): Selenocysteine
XEGAMAVRVXAAHXAEAQAEAGREAGEGAVAAVAAALAPSGFLGLPAPFSEEGLEEKPDGALAAQPPPSQALLXAGSLQMRXMCXDAAAARQSSPPWRILFSXRFRRPASGPLRRPCLPPLPPQRCWARRWCRQHQAQRSPSLWPXSWWRRPLWQQXSAXHLXLLVVGXSKRSSWLLRRSWEXVRWPRPRAAPASRGWGSQGRVSRPR

SEQ ID NO: 8725 - protein, 35 aa, Homo sapiens
  MOD_RES (33)..(33): Selenocysteine
MNSAAGFSHLDRRERVLKLGESFEKQPRCAFHXVR

SEQ ID NO: 8726 - protein, 263 aa, Homo sapiens
  MOD_RES (33)..(33): Selenocysteine
  MOD_RES (45)..(45): Selenocysteine
  MOD_RES (60)..(60): Selenocysteine
  MOD_RES (62)..(62): Selenocysteine
  MOD_RES (70)..(70): Selenocysteine
  MOD_RES (74)..(74): Selenocysteine
  MOD_RES (95)..(95): Selenocysteine
  MOD_RES (108)..(108): Selenocysteine
  MOD_RES (112)..(112): Selenocysteine
  MOD_RES (137)..(137): Selenocysteine
  MOD_RES (206)..(206): Selenocysteine
  MOD_RES (209)..(209): Selenocysteine
  MOD_RES (218)..(218): Selenocysteine
  MOD_RES (220)..(220): Selenocysteine
  MOD_RES (244)..(244): Selenocysteine
MNSAAGFSHLDRRERVLKLGESFEKQPRCAFHXVRYDFKPASIDXSSEGYLEVGEGEQVXIXLPNIEGSXPPVXVFKGSKKPYLKECILIINHDXGECRLEKLSSNIXVKKXRVEGSSKIQYRKEQQQQQMWNSARXPNLVKHSPSEDKMSPASPIDDIERELKAEASLMDQMSSCDSSSDSKSSSSSSSEDSSSDSEDEDCKSSXSDXGNCVSGHPXMXQYRIPDIDASHNRFRDNSGLLMNXLNNLSSHSFSSLYDPLLSH

SEQ ID NO: 8727 - protein, 260 aa, Homo sapiens
  MOD_RES (33)..(33): Selenocysteine
  MOD_RES (45)..(45): Selenocysteine
  MOD_RES (60)..(60): Selenocysteine
  MOD_RES (62)..(62): Selenocysteine
  MOD_RES (70)..(70): Selenocysteine
  MOD_RES (74)..(74): Selenocysteine
  MOD_RES (95)..(95): Selenocysteine
  MOD_RES (108)..(108): Selenocysteine
  MOD_RES (112)..(112): Selenocysteine
  MOD_RES (137)..(137): Selenocysteine
  MOD_RES (206)..(206): Selenocysteine
  MOD_RES (209)..(209): Selenocysteine
  MOD_RES (218)..(218): Selenocysteine
  MOD_RES (220)..(220): Selenocysteine
  MOD_RES (244)..(244): Selenocysteine
MNSAAGFSHLDRRERVLKLGESFEKQPRCAFHXVRYDFKPASIDXSSEGYLEVGEGEQVXIXLPNIEGSXPPVXVFKGSKKPYLKECILIINHDXGECRLEKLSSNIXVKKXRVEGSSKIQYRKEQQQQQMWNSARXPNLVKHSPSEDKMSPASPIDDIERELKAEASLMDQMSSCDSSSDSKSSSSSSSEDSSSDSEDEDCKSSXSDXGNCVSGHPXMXQYRIPDIDASHNRFRDNSGLLMNXLRNDLQLSESGSDSDD

SEQ ID NO: 8728 - protein, 68 aa, Homo sapiens
  MOD_RES (33)..(33): Selenocysteine
  MOD_RES (45)..(45): Selenocysteine
  MOD_RES (60)..(60): Selenocysteine
  MOD_RES (62)..(62): Selenocysteine
MNSAAGFSHLDRRERVLKLGESFEKQPRCAFHXVRYDFKPASIDXSSEGYLEVGEGEQVXIXLPNIES

SEQ ID NO: 8729 - protein, 560 aa, Homo sapiens
  MOD_RES (29)..(29): Selenocysteine
  MOD_RES (41)..(41): Selenocysteine
  MOD_RES (87)..(87): Selenocysteine
  MOD_RES (104)..(104): Selenocysteine
  MOD_RES (122)..(122): Selenocysteine
  MOD_RES (135)..(135): Selenocysteine
  MOD_RES (156)..(156): Selenocysteine
  MOD_RES (194)..(195): Selenocysteine
  MOD_RES (230)..(230): Selenocysteine
  MOD_RES (243)..(244): Selenocysteine
  MOD_RES (248)..(248): Selenocysteine
  MOD_RES (266)..(266): Selenocysteine
  MOD_RES (275)..(275): Selenocysteine
  MOD_RES (283)..(283): Selenocysteine
  MOD_RES (295)..(295): Selenocysteine
  MOD_RES (307)..(307): Selenocysteine
  MOD_RES (314)..(314): Selenocysteine
  MOD_RES (320)..(320): Selenocysteine
  MOD_RES (396)..(396): Selenocysteine
  MOD_RES (423)..(423): Selenocysteine
  MOD_RES (428)..(428): Selenocysteine
  MOD_RES (443)..(444): Selenocysteine
  MOD_RES (448)..(448): Selenocysteine
  MOD_RES (454)..(455): Selenocysteine
  MOD_RES (473)..(473): Selenocysteine
  MOD_RES (492)..(492): Selenocysteine
  MOD_RES (497)..(497): Selenocysteine
  MOD_RES (535)..(535): Selenocysteine
  MOD_RES (540)..(540): Selenocysteine
  MOD_RES (542)..(542): Selenocysteine
  MOD_RES (544)..(544): Selenocysteine
MFGIQESIQRSGSSMKEEPLGSGMNAVRXWMQGAGVLDANXAAQSGVGLARAHFEKQPPSNLRKSNFFHFVLALYDRQGQPVEIERXAFVGFVEKEKEANSEKXNNGIHYRLQLLYSNGIRXEQDFYVRLIDSMXKQAIVYEGQDKNPEMCRVLLXHEIMCRFFLKFFLKCNQNCLKNAGNPRDMRRFQVVVSXXVNVDGHVLAVSDNMFVHNNSKHGRRARRLDPSEAXPCIKAISPSEGWXXGGAXVIIIGDNFFDGLQVIFGXMLVWSELIXPHAIRVQXPPRHIPGVVEVXLSYKSKQFCKGXPGRFIYXALNEPXIDYGFQRLQKVIPRHPGDPERLPKEVILKRAADLVEALYGMPHNNQEIILKRAADIAEALYSVPRNHNQLPALANXSVHAGMMGVNSFSGQLAVNVSEASQAXNQGFXRNSSSVSPHGYVPSXXPQQXNYNSVXXSMNGYGSAAMSNLGGSPXFLNGSAANSPYAIVPSSPXMASSXSLPSNCSSSSGIFSFSPANMVSAVKQKSAFAPVVRPQXSPPPXCXSXNGNSLQAISGMIVPPM

SEQ ID NO: 8730 - protein, 523 aa, Homo sapiens
  MOD_RES (29)..(29): Selenocysteine
  MOD_RES (41)..(41): Selenocysteine
  MOD_RES (87)..(87): Selenocysteine
  MOD_RES (104)..(104): Selenocysteine
  MOD_RES (122)..(122): Selenocysteine
  MOD_RES (135)..(135): Selenocysteine
  MOD_RES (156)..(156): Selenocysteine
  MOD_RES (176)..(176): Selenocysteine
  MOD_RES (217)..(218): Selenocysteine
  MOD_RES (253)..(253): Selenocysteine
  MOD_RES (266)..(267): Selenocysteine
  MOD_RES (271)..(271): Selenocysteine
  MOD_RES (289)..(289): Selenocysteine
  MOD_RES (298)..(298): Selenocysteine
  MOD_RES (306)..(306): Selenocysteine
  MOD_RES (318)..(318): Selenocysteine
  MOD_RES (330)..(330): Selenocysteine
  MOD_RES (337)..(337): Selenocysteine
  MOD_RES (343)..(343): Selenocysteine
  MOD_RES (419)..(419): Selenocysteine
  MOD_RES (446)..(446): Selenocysteine
  MOD_RES (455)..(455): Selenocysteine
  MOD_RES (460)..(460): Selenocysteine
  MOD_RES (498)..(498): Selenocysteine
  MOD_RES (503)..(503): Selenocysteine
  MOD_RES (505)..(505): Selenocysteine
  MOD_RES (507)..(507): Selenocysteine
MFGIQESIQRSGSSMKEEPLGSGMNAVRXWMQGAGVLDANXAAQSGVGLARAHFEKQPPSNLRKSNFFHFVLALYDRQGQPVEIERXAFVGFVEKEKEANSEKXNNGIHYRLQLLYSNGIRXEQDFYVRLIDSMXKQAIVYEGQDKNPEMCRVLLXHEIMCSRCCDKKSCGNRNEXPSDPVIIDRFFLKFFLKCNQNCLKNAGNPRDMRRFQVVVSXXVNVDGHVLAVSDNMFVHNNSKHGRRARRLDPSEAXPCIKAISPSEGWXXGGAXVIIIGDNFFDGLQVIFGXMLVWSELIXPHAIRVQXPPRHIPGVVEVXLSYKSKQFCKGXPGRFIYXALNEPXIDYGFQRLQKVIPRHPGDPERLPKEVILKRAADLVEALYGMPHNNQEIILKRAADIAEALYSVPRNHNQLPALANXSVHAGMMGVNSFSGQLAVNVSEASQAXNQVVPSSPXMASSXSLPSNCSSSSGIFSFSPANMVSAVKQKSAFAPVVRPQXSPPPXCXSXNGNSLQAISGMIVPPM

SEQ ID NO: 8731 - protein, 591 aa, Homo sapiens
  MOD_RES (29)..(29): Selenocysteine
  MOD_RES (41)..(41): Selenocysteine
  MOD_RES (87)..(87): Selenocysteine
  MOD_RES (104)..(104): Selenocysteine
  MOD_RES (122)..(122): Selenocysteine
  MOD_RES (135)..(135): Selenocysteine
  MOD_RES (156)..(156): Selenocysteine
  MOD_RES (176)..(176): Selenocysteine
  MOD_RES (217)..(218): Selenocysteine
  MOD_RES (253)..(253): Selenocysteine
  MOD_RES (261)..(261): Selenocysteine
  MOD_RES (274)..(275): Selenocysteine
  MOD_RES (279)..(279): Selenocysteine
  MOD_RES (297)..(297): Selenocysteine
  MOD_RES (306)..(306): Selenocysteine
  MOD_RES (314)..(314): Selenocysteine
  MOD_RES (326)..(326): Selenocysteine
  MOD_RES (338)..(338): Selenocysteine
  MOD_RES (345)..(345): Selenocysteine
  MOD_RES (351)..(351): Selenocysteine
  MOD_RES (427)..(427): Selenocysteine
  MOD_RES (454)..(454): Selenocysteine
  MOD_RES (459)..(459): Selenocysteine
  MOD_RES (474)..(475): Selenocysteine
  MOD_RES (479)..(479): Selenocysteine
  MOD_RES (485)..(486): Selenocysteine
  MOD_RES (504)..(504): Selenocysteine
  MOD_RES (523)..(523): Selenocysteine
  MOD_RES (528)..(528): Selenocysteine
  MOD_RES (566)..(566): Selenocysteine
  MOD_RES (571)..(571): Selenocysteine
  MOD_RES (573)..(573): Selenocysteine
  MOD_RES (575)..(575): Selenocysteine
MFGIQESIQRSGSSMKEEPLGSGMNAVRXWMQGAGVLDANXAAQSGVGLARAHFEKQPPSNLRKSNFFHFVLALYDRQGQPVEIERXAFVGFVEKEKEANSEKXNNGIHYRLQLLYSNGIRXEQDFYVRLIDSMXKQAIVYEGQDKNPEMCRVLLXHEIMCSRCCDKKSCGNRNEXPSDPVIIDRFFLKFFLKCNQNCLKNAGNPRDMRRFQVVVSXXVNVDGHVLAVSDNMFVHNNSKHGRRARRLDPSEGXPSYLEHAXPCIKAISPSEGWXXGGAXVIIIGDNFFDGLQVIFGXMLVWSELIXPHAIRVQXPPRHIPGVVEVXLSYKSKQFCKGXPGRFIYXALNEPXIDYGFQRLQKVIPRHPGDPERLPKEVILKRAADLVEALYGMPHNNQEIILKRAADIAEALYSVPRNHNQLPALANXSVHAGMMGVNSFSGQLAVNVSEASQAXNQGFXRNSSSVSPHGYVPSXXPQQXNYNSVXXSMNGYGSAAMSNLGGSPXFLNGSAANSPYAIVPSSPXMASSXSLPSNCSSSSGIFSFSPANMVSAVKQKSAFAPVVRPQXSPPPXCXSXNGNSLQAISGMIVPPM

SEQ ID NO: 8732 - protein, 407 aa, Homo sapiens
  MOD_RES (33)..(34): Selenocysteine
  MOD_RES (69)..(69): Selenocysteine
  MOD_RES (77)..(77): Selenocysteine
  MOD_RES (90)..(91): Selenocysteine
  MOD_RES (95)..(95): Selenocysteine
  MOD_RES (113)..(113): Selenocysteine
  MOD_RES (122)..(122): Selenocysteine
  MOD_RES (130)..(130): Selenocysteine
  MOD_RES (142)..(142): Selenocysteine
  MOD_RES (154)..(154): Selenocysteine
  MOD_RES (161)..(161): Selenocysteine
  MOD_RES (167)..(167): Selenocysteine
  MOD_RES (243)..(243): Selenocysteine
  MOD_RES (270)..(270): Selenocysteine
  MOD_RES (275)..(275): Selenocysteine
  MOD_RES (290)..(291): Selenocysteine
  MOD_RES (295)..(295): Selenocysteine
  MOD_RES (301)..(302): Selenocysteine
  MOD_RES (320)..(320): Selenocysteine
  MOD_RES (339)..(339): Selenocysteine
  MOD_RES (344)..(344): Selenocysteine
  MOD_RES (382)..(382): Selenocysteine
  MOD_RES (387)..(387): Selenocysteine
  MOD_RES (389)..(389): Selenocysteine
  MOD_RES (391)..(391): Selenocysteine
RFFLKFFLKCNQNCLKNAGNPRDMRRFQVVVSXXVNVDGHVLAVSDNMFVHNNSKHGRRARRLDPSEGXPSYLEHAXPCIKAISPSEGWXXGGAXVIIIGDNFFDGLQVIFGXMLVWSELIXPHAIRVQXPPRHIPGVVEVXLSYKSKQFCKGXPGRFIYXALNEPXIDYGFQRLQKVIPRHPGDPERLPKEVILKRAADLVEALYGMPHNNQEIILKRAADIAEALYSVPRNHNQLPALANXSVHAGMMGVNSFSGQLAVNVSEASQAXNQGFXRNSSSVSPHGYVPSXXPQQXNYNSVXXSMNGYGSAAMSNLGGSPXFLNGSAANSPYAIVPSSPXMASSXSLPSNCSSSSGIFSFSPANMVSAVKQKSAFAPVVRPQXSPPPXCXSXNGNSLQAISGMIVPPM

SEQ ID NO: 8733 - protein, 427 aa, Homo sapiens
  MOD_RES (7)..(7): Selenocysteine
  MOD_RES (27)..(27): Selenocysteine
  MOD_RES (52)..(52): Selenocysteine
  MOD_RES (68)..(69): Selenocysteine
  MOD_RES (104)..(104): Selenocysteine
  MOD_RES (117)..(118): Selenocysteine
  MOD_RES (140)..(140): Selenocysteine
  MOD_RES (149)..(149): Selenocysteine
  MOD_RES (157)..(157): Selenocysteine
  MOD_RES (169)..(169): Selenocysteine
  MOD_RES (188)..(188): Selenocysteine
  MOD_RES (194)..(194): Selenocysteine
  MOD_RES (235)..(235): Selenocysteine
  MOD_RES (294)..(294): Selenocysteine
  MOD_RES (305)..(305): Selenocysteine
  MOD_RES (318)..(318): Selenocysteine
  MOD_RES (326)..(326): Selenocysteine
  MOD_RES (356)..(356): Selenocysteine
  MOD_RES (368)..(368): Selenocysteine
  MOD_RES (374)..(374): Selenocysteine
  MOD_RES (420)..(420): Selenocysteine
MCRVLLXHEVMCSRCCEKKSCGNRNEXPSDPVIIDRFFLKFFLKCNQNCLKXAGNPRDMRRFQVVLSXXVNVDGHVLAVSDNMFVHNNSKHGRRARRLDPSEAXPCIKAISPSEGWXXGGAMVIIIGDNFFDGLQVVFGXMLVWSELIXPHAIRVQXPPRHIPGVVEVXLSYKSKQFCKGAPGRFIYXALNEPXIDYGFQRLQKVIPRHPGDPERLAKEMLLKRAADLVEALYGXPHNNQDIILKRAADIAEALYSVPRNPSQLPALSSSPAHSGMMGINSYGSQLGVSISESXQGNNQGYIRNXSSISPRGYSSSSXPQQSNYSXSSNSMNGYSNVPMANLGVPGSPGFLNGSPXGSPYGIMSSSPXVGSSSXSSILPFSSSVFPAVKQKSAFAPVIRPQGSPSPACSSGNGNGFRAMXGLVVPPM

SEQ ID NO: 8734 - protein, 575 aa, Homo sapiens
  MOD_RES (7)..(7): Selenocysteine
  MOD_RES (13)..(13): Selenocysteine
  MOD_RES (86)..(86): Selenocysteine
  MOD_RES (103)..(103): Selenocysteine
  MOD_RES (107)..(107): Selenocysteine
  MOD_RES (121)..(121): Selenocysteine
  MOD_RES (134)..(134): Selenocysteine
  MOD_RES (155)..(155): Selenocysteine
  MOD_RES (175)..(175): Selenocysteine
  MOD_RES (200)..(200): Selenocysteine
  MOD_RES (216)..(217): Selenocysteine
  MOD_RES (252)..(252): Selenocysteine
  MOD_RES (265)..(266): Selenocysteine
  MOD_RES (288)..(288): Selenocysteine
  MOD_RES (297)..(297): Selenocysteine
  MOD_RES (305)..(305): Selenocysteine
  MOD_RES (317)..(317): Selenocysteine
  MOD_RES (336)..(336): Selenocysteine
  MOD_RES (342)..(342): Selenocysteine
  MOD_RES (383)..(383): Selenocysteine
  MOD_RES (442)..(442): Selenocysteine
  MOD_RES (453)..(453): Selenocysteine
  MOD_RES (466)..(466): Selenocysteine
  MOD_RES (474)..(474): Selenocysteine
  MOD_RES (504)..(504): Selenocysteine
  MOD_RES (516)..(516): Selenocysteine
  MOD_RES (522)..(522): Selenocysteine
  MOD_RES (568)..(568): Selenocysteine
MFGIQDXLGRGPXLKEKSLGAEMDSVRSWVRNVGVVDANVAAQSGVALSRAHFEKQPPSNLRKSNFFHFVLALYDRQGQPVEIERXAFVDFVENDKEQGNEKXNNGXHYKLQLLYSNGVRXEQDLYVRLIDSVXKQPIAYEGQNKNPEMCRVLLXHEVMCSRCCEKKSCGNRNEXPSDPVIIDRFFLKFFLKCNQNCLKXAGNPRDMRRFQVVLSXXVNVDGHVLAVSDNMFVHNNSKHGRRARRLDPSEAXPCIKAISPSEGWXXGGAMVIIIGDNFFDGLQVVFGXMLVWSELIXPHAIRVQXPPRHIPGVVEVXLSYKSKQFCKGAPGRFIYXALNEPXIDYGFQRLQKVIPRHPGDPERLAKEMLLKRAADLVEALYGXPHNNQDIILKRAADIAEALYSVPRNPSQLPALSSSPAHSGMMGINSYGSQLGVSISESXQGNNQGYIRNXSSISPRGYSSSSXPQQSNYSXSSNSMNGYSNVPMANLGVPGSPGFLNGSPXGSPYGIMSSSPXVGSSSXSSILPFSSSVFPAVKQKSAFAPVIRPQGSPSPACSSGNGNGFRAMXGLVVPPM

SEQ ID NO: 8735 - protein, 264 aa, Homo sapiens
  MOD_RES (19)..(19): Selenocysteine
  MOD_RES (28)..(28): Selenocysteine
  MOD_RES (36)..(36): Selenocysteine
  MOD_RES (48)..(48): Selenocysteine
  MOD_RES (67)..(67): Selenocysteine
  MOD_RES (73)..(73): Selenocysteine
  MOD_RES (114)..(114): Selenocysteine
  MOD_RES (173)..(173): Selenocysteine
  MOD_RES (184)..(184): Selenocysteine
  MOD_RES (197)..(197): Selenocysteine
  MOD_RES (205)..(205): Selenocysteine
  MOD_RES (235)..(235): Selenocysteine
  MOD_RES (241)..(241): Selenocysteine
  MOD_RES (246)..(246): Selenocysteine
  MOD_RES (260)..(260): Selenocysteine
MVIIIGDNFFDGLQVVFGXMLVWSELIXPHAIRVQXPPRHIPGVVEVXLSYKSKQFCKGAPGRFIYXALNEPXIDYGFQRLQKVIPRHPGDPERLAKEMLLKRAADLVEALYGXPHNNQDIILKRAADIAEALYSVPRNPSQLPALSSSPAHSGMMGINSYGSQLGVSISESXQGNNQGYIRNXSSISPRGYSSSSXPQQSNYSXSSNSMNGYSNVPMANLGVPGSPGFLNGSPXGSPYGXGLWLXWLLKAFWGKKRIEXIPFL

SEQ ID NO: 8736 - protein, 551 aa, Homo sapiens
  MOD_RES (13)..(14): Selenocysteine
  MOD_RES (33)..(33): Selenocysteine
  MOD_RES (41)..(41): Selenocysteine
  MOD_RES (87)..(87): Selenocysteine
  MOD_RES (104)..(104): Selenocysteine
  MOD_RES (122)..(122): Selenocysteine
  MOD_RES (135)..(135): Selenocysteine
  MOD_RES (156)..(156): Selenocysteine
  MOD_RES (176)..(176): Selenocysteine
  MOD_RES (217)..(218): Selenocysteine
  MOD_RES (253)..(253): Selenocysteine
  MOD_RES (266)..(267): Selenocysteine
  MOD_RES (271)..(271): Selenocysteine
  MOD_RES (289)..(289): Selenocysteine
  MOD_RES (298)..(298): Selenocysteine
  MOD_RES (306)..(306): Selenocysteine
  MOD_RES (318)..(318): Selenocysteine
  MOD_RES (337)..(337): Selenocysteine
  MOD_RES (343)..(343): Selenocysteine
  MOD_RES (415)..(415): Selenocysteine
  MOD_RES (423)..(423): Selenocysteine
  MOD_RES (442)..(442): Selenocysteine
  MOD_RES (455)..(455): Selenocysteine
  MOD_RES (468)..(468): Selenocysteine
  MOD_RES (476)..(476): Selenocysteine
  MOD_RES (479)..(479): Selenocysteine
  MOD_RES (533)..(533): Selenocysteine
MFGIQENIPRGGXXMKEEPLGSGMNPVRSWMHXAGVVDANXAAQSGVGLARAHFEKQPPSNLRKSNFFHFVLALYDRQGQPVEIERXAFVDFVEKEKEPNNEKXNNGIHYKLQLLYSNGVRXEQDLYVRLIDSMXKQAIVYEGQDKNPEMCRVLLXHEIMCSRCCDKKSCGNRNEXPSDPVIIDRFFLKFFLKCNQNCLKNAGNPRDMRRFQVVVSXXVNVDGHVLAVSDNMFVHNNSKHGRRARRLDPSEAXPCIKAISPSEGWXXGGAXVIIIGDNFFDGLQVVFGXMLVWSELIXPHAIRVQXPPRHIPGVVEVXLSYKSKQFCKGAPGRFVYXALNEPXIDYGFQRLQKVIPRHPGDPERLPKEVLLKRAADLVEALYGMPHNNQEIILKRAADIAEALYSVPRNHNQIPXLGNNPAHXGMMGVNSFSSQLAVNVSEXSQANDQVGYSRNXSSVSPRGYVPSSXPQQSNYNXVSXSMNGYGSGAMASLGVPGSPGFLNGSSANSPYGMKQKSAFAPVVRPQASPPPSCXSANGNGLQAMSGLVVPPM

SEQ ID NO: 8737 - protein, 596 aa, Homo sapiens
  MOD_RES (13)..(14): Selenocysteine
  MOD_RES (33)..(33): Selenocysteine
  MOD_RES (41)..(41): Selenocysteine
  MOD_RES (87)..(87): Selenocysteine
  MOD_RES (104)..(104): Selenocysteine
  MOD_RES (122)..(122): Selenocysteine
  MOD_RES (135)..(135): Selenocysteine
  MOD_RES (156)..(156): Selenocysteine
  MOD_RES (176)..(176): Selenocysteine
  MOD_RES (217)..(218): Selenocysteine
  MOD_RES (253)..(253): Selenocysteine
  MOD_RES (262)..(262): Selenocysteine
  MOD_RES (275)..(276): Selenocysteine
  MOD_RES (280)..(280): Selenocysteine
  MOD_RES (298)..(298): Selenocysteine
  MOD_RES (307)..(307): Selenocysteine
  MOD_RES (315)..(315): Selenocysteine
  MOD_RES (327)..(327): Selenocysteine
  MOD_RES (346)..(346): Selenocysteine
  MOD_RES (352)..(352): Selenocysteine
  MOD_RES (424)..(424): Selenocysteine
  MOD_RES (432)..(432): Selenocysteine
  MOD_RES (451)..(451): Selenocysteine
  MOD_RES (464)..(464): Selenocysteine
  MOD_RES (477)..(477): Selenocysteine
  MOD_RES (485)..(485): Selenocysteine
  MOD_RES (488)..(488): Selenocysteine
  MOD_RES (527)..(527): Selenocysteine
  MOD_RES (534)..(534): Selenocysteine
  MOD_RES (542)..(542): Selenocysteine
  MOD_RES (578)..(578): Selenocysteine
MFGIQENIPRGGXXMKEEPLGSGMNPVRSWMHXAGVVDANXAAQSGVGLARAHFEKQPPSNLRKSNFFHFVLALYDRQGQPVEIERXAFVDFVEKEKEPNNEKXNNGIHYKLQLLYSNGVRXEQDLYVRLIDSMXKQAIVYEGQDKNPEMCRVLLXHEIMCSRCCDKKSCGNRNEXPSDPVIIDRFFLKFFLKCNQNCLKNAGNPRDMRRFQVVVSXXVNVDGHVLAVSDNMFVHNNSKHGRRARRLDPSEGXAPSYLENAXPCIKAISPSEGWXXGGAXVIIIGDNFFDGLQVVFGXMLVWSELIXPHAIRVQXPPRHIPGVVEVXLSYKSKQFCKGAPGRFVYXALNEPXIDYGFQRLQKVIPRHPGDPERLPKEVLLKRAADLVEALYGMPHNNQEIILKRAADIAEALYSVPRNHNQIPXLGNNPAHXGMMGVNSFSSQLAVNVSEXSQANDQVGYSRNXSSVSPRGYVPSSXPQQSNYNXVSXSMNGYGSGAMASLGVPGSPGFLNGSSANSPYGIVPSSPXMAASSVXLPSNCSSXHGIFSFSPANVISAVKQKSAFAPVVRPQASPPPSCXSANGNGLQAMSGLVVPPM

SEQ ID NO: 8738 - protein, 191 aa, Homo sapiens
  MOD_RES (1)..(1): Any amino acid
  MOD_RES (13)..(13): Selenocysteine
  MOD_RES (26)..(26): Selenocysteine
  MOD_RES (39)..(39): Selenocysteine
  MOD_RES (47)..(47): Selenocysteine
  MOD_RES (50)..(50): Selenocysteine
  MOD_RES (89)..(89): Selenocysteine
  MOD_RES (96)..(96): Selenocysteine
  MOD_RES (104)..(104): Selenocysteine
  MOD_RES (140)..(140): Selenocysteine
  MOD_RES (162)..(162): Selenocysteine
  MOD_RES (184)..(184): Selenocysteine
XFSSQLAVNVSEXSQANDQVGYSRNXSSVSPRGYVPSSXPQQSNYNXVSXSMNGYGSGAMASLGVPGSPGFLNGSSANSPYGIVPSSPXMAASSVXLPSNCSSXHGIFSFSPANVISAVKQKSAFAPVVRPQASPPPSCXSANGNGLQGSLLGAEDVAAEKXNWPFCEVGGIFHFDELMLKKGXGKLCLGW

SEQ ID NO: 8739 - protein, 177 aa, Homo sapiens
  MOD_RES (27)..(27): Selenocysteine
  MOD_RES (47)..(47): Selenocysteine
  MOD_RES (88)..(89): Selenocysteine
  MOD_RES (126)..(126): Selenocysteine
  MOD_RES (130)..(130): Selenocysteine
  MOD_RES (132)..(132): Selenocysteine
  MOD_RES (174)..(174): Selenocysteine
LIDSMSKQAIIYEGQDKNPEMCRVLLXHEIMCSRCCDRKSCGNRNEXPSDPVIIDRFFLKFFLKCNQNCLKNAGNPRDMRRFQVVVSXXVSVDGHVLAVSDNMFVHNNSKHGRRARRLDPSEAAPXSFEXCXLMLAASCLPVGALGMEEAEEGVPGLLYLGSSPSGCLMDSGPXHSQ

SEQ ID NO: 8740 - protein, 540 aa, Homo sapiens
  MOD_RES (38)..(38): Selenocysteine
  MOD_RES (84)..(84): Selenocysteine
  MOD_RES (101)..(101): Selenocysteine
  MOD_RES (119)..(119): Selenocysteine
  MOD_RES (153)..(153): Selenocysteine
  MOD_RES (173)..(173): Selenocysteine
  MOD_RES (214)..(215): Selenocysteine
  MOD_RES (251)..(251): Selenocysteine
  MOD_RES (264)..(265): Selenocysteine
  MOD_RES (269)..(269): Selenocysteine
  MOD_RES (296)..(296): Selenocysteine
  MOD_RES (304)..(304): Selenocysteine
  MOD_RES (316)..(316): Selenocysteine
  MOD_RES (335)..(335): Selenocysteine
  MOD_RES (341)..(341): Selenocysteine
  MOD_RES (404)..(404): Selenocysteine
  MOD_RES (441)..(441): Selenocysteine
  MOD_RES (503)..(503): Selenocysteine
  MOD_RES (505)..(505): Selenocysteine
  MOD_RES (524)..(524): Selenocysteine
MDALPRSGLNLKEEPLLPAGLGSVRSWMQGAGILDASXAAQSGVGLARAHFEKQPPSNLRKSNFFHFVLAMYDRQGQPVEVERXAFIDFVEKDREPGAEKXNNGIHYRLRLVYNNGLRXEQDLYVRLIDSMSKQAIIYEGQDKNPEMCRVLLXHEIMCSRCCDRKSCGNRNEXPSDPVIIDRFFLKFFLKCNQNCLKNAGNPRDMRRFQVVVSXXVSVDGHVLAVSDNMFVHNNSKHGRRARRLDPSEAAXPCIKAISPGEGWXXGGAXVIVIGDNFFDGLQVVFGNVLVWSELIXPHAIRVQXPPRHIPGVVEVXLSYKSKQFCKGCPGRFVYXALNEPXIDYGFQRLQKVIPRHPGDPERLPKEVLLKRAADLAEALYGVPGSNQELLLKRAADVAEALYSXPRAPGPLAPLAPSHPHPAVVGINAFSSPLAIAVGDAXPGPEPGYARSCSSASPRGFAPSPGSQQSGYGGGLGAGLGGYGAPGVAGLGVPGSPSFLNGSXAXSPFAKERLRPRAAPPKLPXPGLPQSPRRGASRPVF

SEQ ID NO: 8741 - protein, 598 aa, Homo sapiens
  MOD_RES (38)..(38): Selenocysteine
  MOD_RES (84)..(84): Selenocysteine
  MOD_RES (101)..(101): Selenocysteine
  MOD_RES (119)..(119): Selenocysteine
  MOD_RES (153)..(153): Selenocysteine
  MOD_RES (173)..(173): Selenocysteine
  MOD_RES (214)..(215): Selenocysteine
  MOD_RES (251)..(251): Selenocysteine
  MOD_RES (264)..(265): Selenocysteine
  MOD_RES (269)..(269): Selenocysteine
  MOD_RES (296)..(296): Selenocysteine
  MOD_RES (304)..(304): Selenocysteine
  MOD_RES (316)..(316): Selenocysteine
  MOD_RES (335)..(335): Selenocysteine
  MOD_RES (341)..(341): Selenocysteine
  MOD_RES (404)..(404): Selenocysteine
  MOD_RES (441)..(441): Selenocysteine
  MOD_RES (503)..(503): Selenocysteine
  MOD_RES (505)..(505): Selenocysteine
  MOD_RES (531)..(532): Selenocysteine
MDALPRSGLNLKEEPLLPAGLGSVRSWMQGAGILDASXAAQSGVGLARAHFEKQPPSNLRKSNFFHFVLAMYDRQGQPVEVERXAFIDFVEKDREPGAEKXNNGIHYRLRLVYNNGLRXEQDLYVRLIDSMSKQAIIYEGQDKNPEMCRVLLXHEIMCSRCCDRKSCGNRNEXPSDPVIIDRFFLKFFLKCNQNCLKNAGNPRDMRRFQVVVSXXVSVDGHVLAVSDNMFVHNNSKHGRRARRLDPSEAAXPCIKAISPGEGWXXGGAXVIVIGDNFFDGLQVVFGNVLVWSELIXPHAIRVQXPPRHIPGVVEVXLSYKSKQFCKGCPGRFVYXALNEPXIDYGFQRLQKVIPRHPGDPERLPKEVLLKRAADLAEALYGVPGSNQELLLKRAADVAEALYSXPRAPGPLAPLAPSHPHPAVVGINAFSSPLAIAVGDAXPGPEPGYARSCSSASPRGFAPSPGSQQSGYGGGLGAGLGGYGAPGVAGLGVPGSPSFLNGSXAXSPFAIMPSSPPLAAASSMSLPAAAPXXSVFSFSPVNMISAVKQRSAFAPVLRPPSSPPQACPRAHGEGLPDQSFEDSDKFHSPARGLQGLAYS

SEQ ID NO: 8742 - protein, 602 aa, Homo sapiens
  MOD_RES (42)..(42): Selenocysteine
  MOD_RES (88)..(88): Selenocysteine
  MOD_RES (105)..(105): Selenocysteine
  MOD_RES (123)..(123): Selenocysteine
  MOD_RES (157)..(157): Selenocysteine
  MOD_RES (177)..(177): Selenocysteine
  MOD_RES (218)..(219): Selenocysteine
  MOD_RES (255)..(255): Selenocysteine
  MOD_RES (268)..(269): Selenocysteine
  MOD_RES (273)..(273): Selenocysteine
  MOD_RES (300)..(300): Selenocysteine
  MOD_RES (308)..(308): Selenocysteine
  MOD_RES (320)..(320): Selenocysteine
  MOD_RES (339)..(339): Selenocysteine
  MOD_RES (345)..(345): Selenocysteine
  MOD_RES (408)..(408): Selenocysteine
  MOD_RES (445)..(445): Selenocysteine
  MOD_RES (507)..(507): Selenocysteine
  MOD_RES (509)..(509): Selenocysteine
  MOD_RES (535)..(536): Selenocysteine
MFPAQDALPRSGLNLKEEPLLPAGLGSVRSWMQGAGILDASXAAQSGVGLARAHFEKQPPSNLRKSNFFHFVLAMYDRQGQPVEVERXAFIDFVEKDREPGAEKXNNGIHYRLRLVYNNGLRXEQDLYVRLIDSMSKQAIIYEGQDKNPEMCRVLLXHEIMCSRCCDRKSCGNRNEXPSDPVIIDRFFLKFFLKCNQNCLKNAGNPRDMRRFQVVVSXXVSVDGHVLAVSDNMFVHNNSKHGRRARRLDPSEAAXPCIKAISPGEGWXXGGAXVIVIGDNFFDGLQVVFGNVLVWSELIXPHAIRVQXPPRHIPGVVEVXLSYKSKQFCKGCPGRFVYXALNEPXIDYGFQRLQKVIPRHPGDPERLPKEVLLKRAADLAEALYGVPGSNQELLLKRAADVAEALYSXPRAPGPLAPLAPSHPHPAVVGINAFSSPLAIAVGDAXPGPEPGYARSCSSASPRGFAPSPGSQQSGYGGGLGAGLGGYGAPGVAGLGVPGSPSFLNGSXAXSPFAIMPSSPPLAAASSMSLPAAAPXXSVFSFSPVNMISAVKQRSAFAPVLRPPSSPPQACPRAHGEGLPDQSFEDSDKFHSPARGLQGLAYS

SEQ ID NO: 8743 - protein, 621 aa, Homo sapiens
  MOD_RES (9)..(9): Selenocysteine
  MOD_RES (61)..(61): Selenocysteine
  MOD_RES (107)..(107): Selenocysteine
  MOD_RES (124)..(124): Selenocysteine
  MOD_RES (142)..(142): Selenocysteine
  MOD_RES (176)..(176): Selenocysteine
  MOD_RES (196)..(196): Selenocysteine
  MOD_RES (237)..(238): Selenocysteine
  MOD_RES (274)..(274): Selenocysteine
  MOD_RES (287)..(288): Selenocysteine
  MOD_RES (292)..(292): Selenocysteine
  MOD_RES (319)..(319): Selenocysteine
  MOD_RES (327)..(327): Selenocysteine
  MOD_RES (339)..(339): Selenocysteine
  MOD_RES (358)..(358): Selenocysteine
  MOD_RES (364)..(364): Selenocysteine
  MOD_RES (427)..(427): Selenocysteine
  MOD_RES (464)..(464): Selenocysteine
  MOD_RES (526)..(526): Selenocysteine
  MOD_RES (528)..(528): Selenocysteine
  MOD_RES (554)..(555): Selenocysteine
RPRRGGAGXGPRGESAGLLLLLLQDALPRSGLNLKEEPLLPAGLGSVRSWMQGAGILDASXAAQSGVGLARAHFEKQPPSNLRKSNFFHFVLAMYDRQGQPVEVERXAFIDFVEKDREPGAEKXNNGIHYRLRLVYNNGLRXEQDLYVRLIDSMSKQAIIYEGQDKNPEMCRVLLXHEIMCSRCCDRKSCGNRNEXPSDPVIIDRFFLKFFLKCNQNCLKNAGNPRDMRRFQVVVSXXVSVDGHVLAVSDNMFVHNNSKHGRRARRLDPSEAAXPCIKAISPGEGWXXGGAXVIVIGDNFFDGLQVVFGNVLVWSELIXPHAIRVQXPPRHIPGVVEVXLSYKSKQFCKGCPGRFVYXALNEPXIDYGFQRLQKVIPRHPGDPERLPKEVLLKRAADLAEALYGVPGSNQELLLKRAADVAEALYSXPRAPGPLAPLAPSHPHPAVVGINAFSSPLAIAVGDAXPGPEPGYARSCSSASPRGFAPSPGSQQSGYGGGLGAGLGGYGAPGVAGLGVPGSPSFLNGSXAXSPFAIMPSSPPLAAASSMSLPAAAPXXSVFSFSPVNMISAVKQRSAFAPVLRPPSSPPQACPRAHGEGLPDQSFEDSDKFHSPARGLQGLAYS

SEQ ID NO: 8744 - protein, 229 aa, Homo sapiens
  MOD_RES (2)..(2): Selenocysteine
  MOD_RES (29)..(29): Selenocysteine
  MOD_RES (49)..(49): Selenocysteine
  MOD_RES (57)..(57): Selenocysteine
  MOD_RES (65)..(65): Selenocysteine
  MOD_RES (83)..(83): Selenocysteine
  MOD_RES (85)..(85): Selenocysteine
  MOD_RES (87)..(87): Selenocysteine
  MOD_RES (90)..(90): Selenocysteine
  MOD_RES (92)..(92): Selenocysteine
  MOD_RES (107)..(107): Selenocysteine
  MOD_RES (123)..(123): Selenocysteine
  MOD_RES (186)..(186): Selenocysteine
  MOD_RES (209)..(209): Selenocysteine
  MOD_RES (222)..(222): Selenocysteine
  MOD_RES (224)..(224): Selenocysteine
MXPQLLLALVLWASCPPCSGRKGPPAALXLPRVQCRASRYPIAVDCSWXLPPAPNSXSPVSFIAXYRLGMAARGHSWPCLQQXPXSXSCXIXDVQLFSMAPYVLNVXAVHPWGSSSSFVPFIXEHIIKPDPPEGVRLSPLAERQLQVQWEPPGSWPFPEIFSLKYWIRYKRQGAARFHRVGPIEAXSFILRAVRPRARYYVQVAAQDLXDYGELSDWSLPAXAXMSLGK

SEQ ID NO: 8745 - protein, 146 aa, Homo sapiens
  MOD_RES (2)..(3): Selenocysteine
  MOD_RES (28)..(28): Selenocysteine
  MOD_RES (39)..(39): Selenocysteine
  MOD_RES (45)..(46): Selenocysteine
  MOD_RES (60)..(60): Selenocysteine
  MOD_RES (118)..(118): Selenocysteine
  MOD_RES (123)..(123): Selenocysteine
  MOD_RES (125)..(125): Selenocysteine
MXXNAGPLHPYWPQHLRLDNFVPNDRPXWHILAGLFSVXGVLVVXXWLLSGRAAVVPLGXWRRLSLCWFAVCGFIHLVIEGWFVLYYEDLLGDQAFLSQLWKEYAKGDSRYILGDNFXVCMEXIXACLWGPLSLWVVIAFLRQHPL

SEQ ID NO: 8746 - protein, 160 aa, Homo sapiens
  MOD_RES (2)..(3): Selenocysteine
  MOD_RES (28)..(28): Selenocysteine
  MOD_RES (39)..(39): Selenocysteine
  MOD_RES (45)..(46): Selenocysteine
  MOD_RES (60)..(60): Selenocysteine
  MOD_RES (118)..(118): Selenocysteine
  MOD_RES (123)..(123): Selenocysteine
  MOD_RES (125)..(125): Selenocysteine
MXXNAGPLHPYWPQHLRLDNFVPNDRPXWHILAGLFSVXGVLVVXXWLLSGRAAVVPLGXWRRLSLCWFAVCGFIHLVIEGWFVLYYEDLLGDQAFLSQLWKEYAKGDSRYILGDNFXVCMEXIXACLWGPLSLWVVIAFLRQHPLRFILQLVVSVGQIY

SEQ ID NO: 8747 - protein, 230 aa, Homo sapiens
  MOD_RES (2)..(3): Selenocysteine
  MOD_RES (28)..(28): Selenocysteine
  MOD_RES (39)..(39): Selenocysteine
  MOD_RES (45)..(46): Selenocysteine
  MOD_RES (60)..(60): Selenocysteine
  MOD_RES (118)..(118): Selenocysteine
  MOD_RES (123)..(123): Selenocysteine
  MOD_RES (125)..(125): Selenocysteine
  MOD_RES (168)..(168): Selenocysteine
  MOD_RES (212)..(212): Selenocysteine
  MOD_RES (217)..(217): Selenocysteine
  MOD_RES (223)..(223): Selenocysteine
MXXNAGPLHPYWPQHLRLDNFVPNDRPXWHILAGLFSVXGVLVVXXWLLSGRAAVVPLGXWRRLSLCWFAVCGFIHLVIEGWFVLYYEDLLGDQAFLSQLWKEYAKGDSRYILGDNFXVCMEXIXACLWGPLSLWVVIAFLRQHPLRFILQLVVSVGQIYGDVLYFLXEHRDGFQHGELGHPLYFWFYFVFMNALWLVLPGVLVLDAVKHLXHAQSXLDAKAXKAKSKKN

SEQ ID NO: 8748 - protein, 601 aa, Homo sapiens
  MOD_RES (4)..(4): Selenocysteine
  MOD_RES (9)..(9): Selenocysteine
  MOD_RES (13)..(13): Selenocysteine
  MOD_RES (44)..(44): Selenocysteine
  MOD_RES (79)..(79): Selenocysteine
  MOD_RES (99)..(99): Selenocysteine
  MOD_RES (135)..(135): Selenocysteine
  MOD_RES (162)..(163): Selenocysteine
  MOD_RES (166)..(166): Selenocysteine
  MOD_RES (175)..(175): Selenocysteine
  MOD_RES (251)..(251): Selenocysteine
  MOD_RES (256)..(256): Selenocysteine
  MOD_RES (260)..(260): Selenocysteine
  MOD_RES (285)..(285): Selenocysteine
  MOD_RES (345)..(345): Selenocysteine
  MOD_RES (349)..(349): Selenocysteine
  MOD_RES (408)..(408): Selenocysteine
  MOD_RES (423)..(423): Selenocysteine
  MOD_RES (439)..(439): Selenocysteine
  MOD_RES (483)..(483): Selenocysteine
  MOD_RES (495)..(495): Selenocysteine
  MOD_RES (513)..(513): Selenocysteine
  MOD_RES (520)..(521): Selenocysteine
  MOD_RES (531)..(532): Selenocysteine
  MOD_RES (543)..(543): Selenocysteine
  MOD_RES (590)..(590): Selenocysteine
  MOD_RES (595)..(595): Selenocysteine
  MOD_RES (599)..(599): Selenocysteine
MEEXMKLAXMEDXVEYCLFLIPDESRDSDKHKEILQKYIERIIXRFAPMLVPYIWQNQPFNLKYKPGKGGVPAHMFGVXKFGDNIEDEWFIVYVIKQIXKEFPELVARIEDNDGEFLLIEAADFLPKWLDPENSXNRVFFCHGELCIIPAPRKSGAESWLPXXPPXIPQALNIIXAHSEKILASESIRAAVNRRIRGYPEKIQASLHRAHCFLPAGIVAVLKQRPRLVAAAVQAFYLRDPIDLRACRVFKXFLPEXRIMXSAHGFEILCSKCSPHFSDCKKSLVXASPLWASFLESLKKNDYFKGLIEGSAQYRERLEMAENYFQLSVDWPESSLAMSPGEEILXLLQXIPFDIEDLKKEAANLPPEDDDQWLDLSPDQLDQLLQEAVGKKESESVSKEEKEQNYDLXEVSESMKAFISKVSXHKGAELPREPSEAPIXFDADSFLNYFDKILGPRPNESDSDDLDDEDFECLDSDDDLDFEXHEPGEEASLKGXLDNLKSYMAQMDQELAHXCISKSFXXRNQVEPVSQXXDNNSDEEDSGXGESVMAPVDVDLNLVSNILESYSSQAGLAGPASNLLQSMGVQLPDNXDHRPXSKPXKN

SEQ ID NO: 8749 - protein, 644 aa, Homo sapiens
  MOD_RES (4)..(4): Selenocysteine
  MOD_RES (9)..(9): Selenocysteine
  MOD_RES (13)..(13): Selenocysteine
  MOD_RES (44)..(44): Selenocysteine
  MOD_RES (79)..(79): Selenocysteine
  MOD_RES (99)..(99): Selenocysteine
  MOD_RES (135)..(135): Selenocysteine
  MOD_RES (162)..(163): Selenocysteine
  MOD_RES (166)..(166): Selenocysteine
  MOD_RES (175)..(175): Selenocysteine
  MOD_RES (251)..(251): Selenocysteine
  MOD_RES (256)..(256): Selenocysteine
  MOD_RES (260)..(260): Selenocysteine
  MOD_RES (263)..(263): Selenocysteine
  MOD_RES (265)..(265): Selenocysteine
  MOD_RES (328)..(328): Selenocysteine
  MOD_RES (388)..(388): Selenocysteine
  MOD_RES (392)..(392): Selenocysteine
  MOD_RES (451)..(451): Selenocysteine
  MOD_RES (466)..(466): Selenocysteine
  MOD_RES (482)..(482): Selenocysteine
  MOD_RES (526)..(526): Selenocysteine
  MOD_RES (538)..(538): Selenocysteine
  MOD_RES (556)..(556): Selenocysteine
  MOD_RES (563)..(564): Selenocysteine
  MOD_RES (574)..(575): Selenocysteine
  MOD_RES (586)..(586): Selenocysteine
  MOD_RES (633)..(633): Selenocysteine
  MOD_RES (638)..(638): Selenocysteine
  MOD_RES (642)..(642): Selenocysteine
MEEXMKLAXMEDXVEYCLFLIPDESRDSDKHKEILQKYIERIIXRFAPMLVPYIWQNQPFNLKYKPGKGGVPAHMFGVXKFGDNIEDEWFIVYVIKQIXKEFPELVARIEDNDGEFLLIEAADFLPKWLDPENSXNRVFFCHGELCIIPAPRKSGAESWLPXXPPXIPQALNIIXAHSEKILASESIRAAVNRRIRGYPEKIQASLHRAHCFLPAGIVAVLKQRPRLVAAAVQAFYLRDPIDLRACRVFKXFLPEXRIMXSVXFXKCLYAQLVQQRFVPDRRSGYRLPPPSDPQYRAHELGMKLAHGFEILCSKCSPHFSDCKKSLVXASPLWASFLESLKKNDYFKGLIEGSAQYRERLEMAENYFQLSVDWPESSLAMSPGEEILXLLQXIPFDIEDLKKEAANLPPEDDDQWLDLSPDQLDQLLQEAVGKKESESVSKEEKEQNYDLXEVSESMKAFISKVSXHKGAELPREPSEAPIXFDADSFLNYFDKILGPRPNESDSDDLDDEDFECLDSDDDLDFEXHEPGEEASLKGXLDNLKSYMAQMDQELAHXCISKSFXXRNQVEPVSQXXDNNSDEEDSGXGESVMAPVDVDLNLVSNILESYSSQAGLAGPASNLLQSMGVQLPDNXDHRPXSKPXKN

SEQ ID NO: 8750 - protein, 677 aa, Homo sapiens
  MOD_RES (4)..(4): Selenocysteine
  MOD_RES (9)..(9): Selenocysteine
  MOD_RES (13)..(13): Selenocysteine
  MOD_RES (44)..(44): Selenocysteine
  MOD_RES (79)..(79): Selenocysteine
  MOD_RES (99)..(99): Selenocysteine
  MOD_RES (135)..(135): Selenocysteine
  MOD_RES (162)..(163): Selenocysteine
  MOD_RES (166)..(166): Selenocysteine
  MOD_RES (175)..(175): Selenocysteine
  MOD_RES (251)..(251): Selenocysteine
  MOD_RES (256)..(256): Selenocysteine
  MOD_RES (260)..(260): Selenocysteine
  MOD_RES (263)..(263): Selenocysteine
  MOD_RES (265)..(265): Selenocysteine
  MOD_RES (328)..(328): Selenocysteine
  MOD_RES (395)..(395): Selenocysteine
  MOD_RES (405)..(405): Selenocysteine
  MOD_RES (421)..(421): Selenocysteine
  MOD_RES (425)..(425): Selenocysteine
  MOD_RES (484)..(484): Selenocysteine
  MOD_RES (499)..(499): Selenocysteine
  MOD_RES (515)..(515): Selenocysteine
  MOD_RES (559)..(559): Selenocysteine
  MOD_RES (571)..(571): Selenocysteine
  MOD_RES (589)..(589): Selenocysteine
  MOD_RES (596)..(597): Selenocysteine
  MOD_RES (607)..(608): Selenocysteine
  MOD_RES (619)..(619): Selenocysteine
  MOD_RES (666)..(666): Selenocysteine
  MOD_RES (671)..(671): Selenocysteine
  MOD_RES (675)..(675): Selenocysteine
MEEXMKLAXMEDXVEYCLFLIPDESRDSDKHKEILQKYIERIIXRFAPMLVPYIWQNQPFNLKYKPGKGGVPAHMFGVXKFGDNIEDEWFIVYVIKQIXKEFPELVARIEDNDGEFLLIEAADFLPKWLDPENSXNRVFFCHGELCIIPAPRKSGAESWLPXXPPXIPQALNIIXAHSEKILASESIRAAVNRRIRGYPEKIQASLHRAHCFLPAGIVAVLKQRPRLVAAAVQAFYLRDPIDLRACRVFKXFLPEXRIMXSVXFXKCLYAQLVQQRFVPDRRSGYRLPPPSDPQYRAHELGMKLAHGFEILCSKCSPHFSDCKKSLVXASPLWASFLESLKKNDYFKGLIEGSAQYRERLEMAENYFQLSVDWPERLEVQWRDPGLLQAPPPGFXPFICLSLLSXWDNSSLAMSPGEEILXLLQXIPFDIEDLKKEAANLPPEDDDQWLDLSPDQLDQLLQEAVGKKESESVSKEEKEQNYDLXEVSESMKAFISKVSXHKGAELPREPSEAPIXFDADSFLNYFDKILGPRPNESDSDDLDDEDFECLDSDDDLDFEXHEPGEEASLKGXLDNLKSYMAQMDQELAHXCISKSFXXRNQVEPVSQXXDNNSDEEDSGXGESVMAPVDVDLNLVSNILESYSSQAGLAGPASNLLQSMGVQLPDNXDHRPXSKPXKN

SEQ ID NO: 8751 - protein, 217 aa, Homo sapiens
  MOD_RES (4)..(4): Selenocysteine
  MOD_RES (9)..(9): Selenocysteine
  MOD_RES (13)..(13): Selenocysteine
  MOD_RES (44)..(44): Selenocysteine
  MOD_RES (79)..(79): Selenocysteine
  MOD_RES (99)..(99): Selenocysteine
  MOD_RES (109)..(109): Selenocysteine
  MOD_RES (136)..(137): Selenocysteine
  MOD_RES (140)..(140): Selenocysteine
  MOD_RES (149)..(149): Selenocysteine
MEEXMKLAXMEDXVEYCLFLIPDESRDSDKHKEILQKYIERIIXRFAPMLVPYIWQNQPFNLKYKPGKGGVPAHMFGVXKFGDNIEDEWFIVYVIKQIXKEFPELVASXNRVFFCHGELCIIPAPRKSGAESWLPXXPPXIPQALNIIXAHSEKILASESIRAAVNRRIRGYPEKIQASLHRAHCFLPAGIVAVLKQRPRLVAAAVQAFYLRDPIDL

SEQ ID NO: 8752 - protein, 163 aa, Homo sapiens
  MOD_RES (5)..(5): Selenocysteine
  MOD_RES (25)..(25): Selenocysteine
  MOD_RES (61)..(61): Selenocysteine
  MOD_RES (88)..(89): Selenocysteine
  MOD_RES (92)..(92): Selenocysteine
  MOD_RES (101)..(101): Selenocysteine
  MOD_RES (142)..(142): Selenocysteine
  MOD_RES (147)..(147): Selenocysteine
  MOD_RES (157)..(157): Selenocysteine
MFGVXKFGDNIEDEWFIVYVIKQIXKEFPELVARIEDNDGEFLLIEAADFLPKWLDPENSXNRVFFCHGELCIIPAPRKSGAESWLPXXPPXIPQALNIIXAHSEKILASESIRAAVNRRIRGSHSLNVYMHNWCNKGLCQXGGVDXGCLLHLIPSXEPMNWA

SEQ ID NO: 8753 - protein, 212 aa, Homo sapiens
  MOD_RES (5)..(5): Selenocysteine
  MOD_RES (25)..(25): Selenocysteine
  MOD_RES (61)..(61): Selenocysteine
  MOD_RES (88)..(89): Selenocysteine
  MOD_RES (92)..(92): Selenocysteine
  MOD_RES (101)..(101): Selenocysteine
  MOD_RES (177)..(177): Selenocysteine
  MOD_RES (182)..(182): Selenocysteine
  MOD_RES (186)..(186): Selenocysteine
  MOD_RES (189)..(189): Selenocysteine
  MOD_RES (191)..(191): Selenocysteine
MFGVXKFGDNIEDEWFIVYVIKQIXKEFPELVARIEDNDGEFLLIEAADFLPKWLDPENSXNRVFFCHGELCIIPAPRKSGAESWLPXXPPXIPQALNIIXAHSEKILASESIRAAVNRRIRGYPEKIQASLHRAHCFLPAGIVAVLKQRPRLVAAAVQAFYLRDPIDLRACRVFKXFLPEXRIMXSVXFXKCLYAQLVQQRFVPDRRSGYR

SEQ ID NO: 8754 - protein, 87 aa, Homo sapiens
  MOD_RES (1)..(1): Any amino acid
  MOD_RES (46)..(46): Selenocysteine
  MOD_RES (51)..(51): Selenocysteine
  MOD_RES (74)..(74): Selenocysteine
XSVMAPVDVDLNLVSNILESYSSQAGLAGPASNLLQSMGVQLPDNXDHRPXNGVSLCCPGWSAVALSWLNASSXSQVHAILLPQPPE

SEQ ID NO: 8755 - protein, 883 aa, Homo sapiens
  MOD_RES (85)..(85): Selenocysteine
  MOD_RES (111)..(111): Selenocysteine
  MOD_RES (132)..(132): Selenocysteine
  MOD_RES (145)..(145): Selenocysteine
  MOD_RES (153)..(153): Selenocysteine
  MOD_RES (167)..(167): Selenocysteine
  MOD_RES (175)..(175): Selenocysteine
  MOD_RES (211)..(211): Selenocysteine
  MOD_RES (214)..(214): Selenocysteine
  MOD_RES (261)..(261): Selenocysteine
  MOD_RES (280)..(281): Selenocysteine
  MOD_RES (292)..(292): Selenocysteine
  MOD_RES (326)..(326): Selenocysteine
  MOD_RES (344)..(344): Selenocysteine
  MOD_RES (348)..(348): Selenocysteine
  MOD_RES (352)..(352): Selenocysteine
  MOD_RES (386)..(386): Selenocysteine
  MOD_RES (393)..(393): Selenocysteine
  MOD_RES (411)..(411): Selenocysteine
  MOD_RES (413)..(413): Selenocysteine
  MOD_RES (431)..(431): Selenocysteine
  MOD_RES (498)..(498): Selenocysteine
  MOD_RES (515)..(516): Selenocysteine
  MOD_RES (533)..(533): Selenocysteine
  MOD_RES (537)..(537): Selenocysteine
  MOD_RES (547)..(547): Selenocysteine
  MOD_RES (552)..(552): Selenocysteine
  MOD_RES (568)..(568): Selenocysteine
  MOD_RES (586)..(586): Selenocysteine
  MOD_RES (602)..(602): Selenocysteine
  MOD_RES (674)..(674): Selenocysteine
  MOD_RES (677)..(677): Selenocysteine
  MOD_RES (685)..(685): Selenocysteine
  MOD_RES (723)..(723): Selenocysteine
  MOD_RES (755)..(755): Selenocysteine
  MOD_RES (777)..(777): Selenocysteine
  MOD_RES (814)..(814): Selenocysteine
  MOD_RES (832)..(832): Selenocysteine
  MOD_RES (842)..(842): Selenocysteine
  MOD_RES (855)..(855): Selenocysteine
MASPGAGRAPPELPERNCGYREVEYWDQRYQGAADSAPYDWFGDFSSFRALLEPELRPEDRILVLGCGNSALSYELFLGGFPNVXSVDYSSVVVAAMQARHAHVPQLRWEXMDVRKLDFPSASFDVVLEKGXLDALLAGERDPWXVSSEGVHXVDQVLSEVGFQKGXRQLLGSRXQLELVLAGASLLLAALLLGCLVALGVQYHRDPSHSXCLXEACIRVAGKILESLDRGVSPCEDFYQFSCGGWIRRNPLPDGRSRWNXFNSLWDQNQAILKHLLENXXFNSSSEAEQKXQRFYLSCLQVERIEELGAQPLRDLIEKIGGWNIXGPWDQDNFMEVLKAVAGXYRAXPFFXVYISADSKSSNSNVIQVDQSGLFLPSRDYYLNRXANEKVLXAYLDYMEELGMLLGGRPXSXREQMQQVLELEIQLANIXVPQDQRRDEEKIYHKMSISELQALAPSMDWLEFLSFLLSPLELSDSEPVVVYGMDYLQQVSELINRXEPSILNNYLIWNLVQKXXSSLDRRFESAQEKLLEXLYGXKKSCVPRWQXCISNXDDALGFALGSLFVKAXFDRQSKEIAEGMISEIRXAFEEALGQLVWMDEKXRQAAKEKADAIYDMIGFPDFILEPKELDDVYDGYEISEDSFFQNMLNLYNFSAKVMADQLRKPPSRDQWSMXPQXVNAYYLPXKNEIVFPAGILQAPFYARNHPKALNFGGIGVVMGHELXHAFDDQGREYDKEGNLRPWWQNESLAAFRNHXACMEEQYNQYQVNGERLNGRQXLGENIADNGGLKAAYNAYKAWLRKHGEEQQLPAVGLXNHQLFFVGFAQVWCSVRXPESSHEGLVXDPHSPARFRVLGXLSNSRDFLRHFGCPVGSPMNPGQLCEVW

SEQ ID NO: 8756 - protein, 255 aa, Homo sapiens
  MOD_RES (85)..(85): Selenocysteine
  MOD_RES (111)..(111): Selenocysteine
  MOD_RES (132)..(132): Selenocysteine
  MOD_RES (145)..(145): Selenocysteine
  MOD_RES (153)..(153): Selenocysteine
  MOD_RES (175)..(175): Selenocysteine
  MOD_RES (183)..(183): Selenocysteine
  MOD_RES (199)..(199): Selenocysteine
  MOD_RES (236)..(236): Selenocysteine
MASPGAGRAPPELPERNCGYREVEYWDQRYQGAADSAPYDWFGDFSSFRALLEPELRPEDRILVLGCGNSALSYELFLGGFPNVXSVDYSSVVVAAMQARHAHVPQLRWEXMDVRKLDFPSASFDVVLEKGXLDALLAGERDPWXVSSEGVHXVDQVLSEVSRVLVPGGRFISMXSAAPHFRXRHYAQAYYGWSLRHAXYGSGFHFHLYLMHKGGKLSVAQLALGAQILSPPRPPXSPCFLQDSDHEDFLSAIQL

SEQ ID NO: 8757 - protein, 765 aa, Homo sapiens
  MOD_RES (21)..(21): Selenocysteine
  MOD_RES (30)..(30): Selenocysteine
  MOD_RES (49)..(49): Selenocysteine
  MOD_RES (57)..(57): Selenocysteine
  MOD_RES (93)..(93): Selenocysteine
  MOD_RES (96)..(96): Selenocysteine
  MOD_RES (143)..(143): Selenocysteine
  MOD_RES (162)..(163): Selenocysteine
  MOD_RES (174)..(174): Selenocysteine
  MOD_RES (208)..(208): Selenocysteine
  MOD_RES (226)..(226): Selenocysteine
  MOD_RES (230)..(230): Selenocysteine
  MOD_RES (234)..(234): Selenocysteine
  MOD_RES (268)..(268): Selenocysteine
  MOD_RES (275)..(275): Selenocysteine
  MOD_RES (293)..(293): Selenocysteine
  MOD_RES (295)..(295): Selenocysteine
  MOD_RES (313)..(313): Selenocysteine
  MOD_RES (380)..(380): Selenocysteine
  MOD_RES (397)..(398): Selenocysteine
  MOD_RES (415)..(415): Selenocysteine
  MOD_RES (419)..(419): Selenocysteine
  MOD_RES (429)..(429): Selenocysteine
  MOD_RES (434)..(434): Selenocysteine
  MOD_RES (450)..(450): Selenocysteine
  MOD_RES (468)..(468): Selenocysteine
  MOD_RES (484)..(484): Selenocysteine
  MOD_RES (556)..(556): Selenocysteine
  MOD_RES (559)..(559): Selenocysteine
  MOD_RES (567)..(567): Selenocysteine
  MOD_RES (605)..(605): Selenocysteine
  MOD_RES (637)..(637): Selenocysteine
  MOD_RES (659)..(659): Selenocysteine
  MOD_RES (696)..(696): Selenocysteine
  MOD_RES (714)..(714): Selenocysteine
  MOD_RES (724)..(724): Selenocysteine
  MOD_RES (737)..(737): Selenocysteine
MNVALQELGAGSNMVEYKRAXLRDEDAPEXPVEGGASPDAMEVGFQKGXRQLLGSRXQLELVLAGASLLLAALLLGCLVALGVQYHRDPSHSXCLXEACIRVAGKILESLDRGVSPCEDFYQFSCGGWIRRNPLPDGRSRWNXFNSLWDQNQAILKHLLENXXFNSSSEAEQKXQRFYLSCLQVERIEELGAQPLRDLIEKIGGWNIXGPWDQDNFMEVLKAVAGXYRAXPFFXVYISADSKSSNSNVIQVDQSGLFLPSRDYYLNRXANEKVLXAYLDYMEELGMLLGGRPXSXREQMQQVLELEIQLANIXVPQDQRRDEEKIYHKMSISELQALAPSMDWLEFLSFLLSPLELSDSEPVVVYGMDYLQQVSELINRXEPSILNNYLIWNLVQKXXSSLDRRFESAQEKLLEXLYGXKKSCVPRWQXCISNXDDALGFALGSLFVKAXFDRQSKEIAEGMISEIRXAFEEALGQLVWMDEKXRQAAKEKADAIYDMIGFPDFILEPKELDDVYDGYEISEDSFFQNMLNLYNFSAKVMADQLRKPPSRDQWSMXPQXVNAYYLPXKNEIVFPAGILQAPFYARNHPKALNFGGIGVVMGHELXHAFDDQGREYDKEGNLRPWWQNESLAAFRNHXACMEEQYNQYQVNGERLNGRQXLGENIADNGGLKAAYNAYKAWLRKHGEEQQLPAVGLXNHQLFFVGFAQVWCSVRXPESSHEGLVXDPHSPARFRVLGXLSNSRDFLRHFGCPVGSPMNPGQLCEVW

SEQ ID NO: 8758 - protein, 811 aa, Homo sapiens
  MOD_RES (21)..(21): Selenocysteine
  MOD_RES (30)..(30): Selenocysteine
  MOD_RES (59)..(59): Selenocysteine
  MOD_RES (62)..(62): Selenocysteine
  MOD_RES (73)..(73): Selenocysteine
  MOD_RES (87)..(87): Selenocysteine
  MOD_RES (95)..(95): Selenocysteine
  MOD_RES (103)..(103): Selenocysteine
  MOD_RES (139)..(139): Selenocysteine
  MOD_RES (142)..(142): Selenocysteine
  MOD_RES (189)..(189): Selenocysteine
  MOD_RES (208)..(209): Selenocysteine
  MOD_RES (220)..(220): Selenocysteine
  MOD_RES (254)..(254): Selenocysteine
  MOD_RES (272)..(272): Selenocysteine
  MOD_RES (276)..(276): Selenocysteine
  MOD_RES (280)..(280): Selenocysteine
  MOD_RES (314)..(314): Selenocysteine
  MOD_RES (321)..(321): Selenocysteine
  MOD_RES (339)..(339): Selenocysteine
  MOD_RES (341)..(341): Selenocysteine
  MOD_RES (359)..(359): Selenocysteine
  MOD_RES (426)..(426): Selenocysteine
  MOD_RES (443)..(444): Selenocysteine
  MOD_RES (461)..(461): Selenocysteine
  MOD_RES (465)..(465): Selenocysteine
  MOD_RES (475)..(475): Selenocysteine
  MOD_RES (480)..(480): Selenocysteine
  MOD_RES (496)..(496): Selenocysteine
  MOD_RES (514)..(514): Selenocysteine
  MOD_RES (530)..(530): Selenocysteine
  MOD_RES (602)..(602): Selenocysteine
  MOD_RES (605)..(605): Selenocysteine
  MOD_RES (613)..(613): Selenocysteine
  MOD_RES (651)..(651): Selenocysteine
  MOD_RES (683)..(683): Selenocysteine
  MOD_RES (705)..(705): Selenocysteine
  MOD_RES (742)..(742): Selenocysteine
  MOD_RES (760)..(760): Selenocysteine
  MOD_RES (770)..(770): Selenocysteine
  MOD_RES (783)..(783): Selenocysteine
MNVALQELGAGSNMVEYKRAXLRDEDAPEXPVEGGASPDAMEVGKGASPFSPGPSPGMXPGXPRSSGLFWRVXCPHLRSISGLCSRXMVGFQKGXRQLLGSRXQLELVLAGASLLLAALLLGCLVALGVQYHRDPSHSXCLXEACIRVAGKILESLDRGVSPCEDFYQFSCGGWIRRNPLPDGRSRWNXFNSLWDQNQAILKHLLENXXFNSSSEAEQKXQRFYLSCLQVERIEELGAQPLRDLIEKIGGWNIXGPWDQDNFMEVLKAVAGXYRAXPFFXVYISADSKSSNSNVIQVDQSGLFLPSRDYYLNRXANEKVLXAYLDYMEELGMLLGGRPXSXREQMQQVLELEIQLANIXVPQDQRRDEEKIYHKMSISELQALAPSMDWLEFLSFLLSPLELSDSEPVVVYGMDYLQQVSELINRXEPSILNNYLIWNLVQKXXSSLDRRFESAQEKLLEXLYGXKKSCVPRWQXCISNXDDALGFALGSLFVKAXFDRQSKEIAEGMISEIRXAFEEALGQLVWMDEKXRQAAKEKADAIYDMIGFPDFILEPKELDDVYDGYEISEDSFFQNMLNLYNFSAKVMADQLRKPPSRDQWSMXPQXVNAYYLPXKNEIVFPAGILQAPFYARNHPKALNFGGIGVVMGHELXHAFDDQGREYDKEGNLRPWWQNESLAAFRNHXACMEEQYNQYQVNGERLNGRQXLGENIADNGGLKAAYNAYKAWLRKHGEEQQLPAVGLXNHQLFFVGFAQVWCSVRXPESSHEGLVXDPHSPARFRVLGXLSNSRDFLRHFGCPVGSPMNPGQLCEVW

SEQ ID NO: 8759 - protein, 736 aa, Homo sapiens
  MOD_RES (20)..(20): Selenocysteine
  MOD_RES (28)..(28): Selenocysteine
  MOD_RES (64)..(64): Selenocysteine
  MOD_RES (67)..(67): Selenocysteine
  MOD_RES (114)..(114): Selenocysteine
  MOD_RES (133)..(134): Selenocysteine
  MOD_RES (145)..(145): Selenocysteine
  MOD_RES (179)..(179): Selenocysteine
  MOD_RES (197)..(197): Selenocysteine
  MOD_RES (201)..(201): Selenocysteine
  MOD_RES (205)..(205): Selenocysteine
  MOD_RES (239)..(239): Selenocysteine
  MOD_RES (246)..(246): Selenocysteine
  MOD_RES (264)..(264): Selenocysteine
  MOD_RES (266)..(266): Selenocysteine
  MOD_RES (284)..(284): Selenocysteine
  MOD_RES (351)..(351): Selenocysteine
  MOD_RES (368)..(369): Selenocysteine
  MOD_RES (386)..(386): Selenocysteine
  MOD_RES (390)..(390): Selenocysteine
  MOD_RES (400)..(400): Selenocysteine
  MOD_RES (405)..(405): Selenocysteine
  MOD_RES (421)..(421): Selenocysteine
  MOD_RES (439)..(439): Selenocysteine
  MOD_RES (455)..(455): Selenocysteine
  MOD_RES (527)..(527): Selenocysteine
  MOD_RES (530)..(530): Selenocysteine
  MOD_RES (538)..(538): Selenocysteine
  MOD_RES (576)..(576): Selenocysteine
  MOD_RES (608)..(608): Selenocysteine
  MOD_RES (630)..(630): Selenocysteine
  MOD_RES (667)..(667): Selenocysteine
  MOD_RES (685)..(685): Selenocysteine
  MOD_RES (695)..(695): Selenocysteine
  MOD_RES (708)..(708): Selenocysteine
MNVALQELGAGSNVGFQKGXRQLLGSRXQLELVLAGASLLLAALLLGCLVALGVQYHRDPSHSXCLXEACIRVAGKILESLDRGVSPCEDFYQFSCGGWIRRNPLPDGRSRWNXFNSLWDQNQAILKHLLENXXFNSSSEAEQKXQRFYLSCLQVERIEELGAQPLRDLIEKIGGWNIXGPWDQDNFMEVLKAVAGXYRAXPFFXVYISADSKSSNSNVIQVDQSGLFLPSRDYYLNRXANEKVLXAYLDYMEELGMLLGGRPXSXREQMQQVLELEIQLANIXVPQDQRRDEEKIYHKMSISELQALAPSMDWLEFLSFLLSPLELSDSEPVVVYGMDYLQQVSELINRXEPSILNNYLIWNLVQKXXSSLDRRFESAQEKLLEXLYGXKKSCVPRWQXCISNXDDALGFALGSLFVKAXFDRQSKEIAEGMISEIRXAFEEALGQLVWMDEKXRQAAKEKADAIYDMIGFPDFILEPKELDDVYDGYEISEDSFFQNMLNLYNFSAKVMADQLRKPPSRDQWSMXPQXVNAYYLPXKNEIVFPAGILQAPFYARNHPKALNFGGIGVVMGHELXHAFDDQGREYDKEGNLRPWWQNESLAAFRNHXACMEEQYNQYQVNGERLNGRQXLGENIADNGGLKAAYNAYKAWLRKHGEEQQLPAVGLXNHQLFFVGFAQVWCSVRXPESSHEGLVXDPHSPARFRVLGXLSNSRDFLRHFGCPVGSPMNPGQLCEVW

SEQ ID NO: 8760 - protein, 67 aa, Homo sapiens
  MOD_RES (20)..(20): Selenocysteine
  MOD_RES (28)..(28): Selenocysteine
  MOD_RES (66)..(66): Selenocysteine
MNVALQELGAGSNVGFQKGXRQLLGSRXQLELVLAGASLLLAALLLGCLVALGVQYHREFASSRQXD

SEQ ID NO: 8761 - protein, 716 aa, Homo sapiens
  MOD_RES (5)..(5): Selenocysteine
  MOD_RES (8)..(8): Selenocysteine
  MOD_RES (19)..(19): Selenocysteine
  MOD_RES (33)..(33): Selenocysteine
  MOD_RES (41)..(41): Selenocysteine
  MOD_RES (49)..(49): Selenocysteine
  MOD_RES (85)..(85): Selenocysteine
  MOD_RES (88)..(88): Selenocysteine
  MOD_RES (135)..(135): Selenocysteine
  MOD_RES (154)..(155): Selenocysteine
  MOD_RES (166)..(166): Selenocysteine
  MOD_RES (200)..(200): Selenocysteine
  MOD_RES (218)..(218): Selenocysteine
  MOD_RES (222)..(222): Selenocysteine
  MOD_RES (226)..(226): Selenocysteine
  MOD_RES (260)..(260): Selenocysteine
  MOD_RES (267)..(267): Selenocysteine
  MOD_RES (285)..(285): Selenocysteine
  MOD_RES (287)..(287): Selenocysteine
  MOD_RES (305)..(305): Selenocysteine
  MOD_RES (372)..(372): Selenocysteine
  MOD_RES (389)..(390): Selenocysteine
  MOD_RES (407)..(407): Selenocysteine
  MOD_RES (411)..(411): Selenocysteine
  MOD_RES (421)..(421): Selenocysteine
  MOD_RES (426)..(426): Selenocysteine
  MOD_RES (442)..(442): Selenocysteine
  MOD_RES (460)..(460): Selenocysteine
  MOD_RES (476)..(476): Selenocysteine
  MOD_RES (548)..(548): Selenocysteine
  MOD_RES (551)..(551): Selenocysteine
  MOD_RES (559)..(559): Selenocysteine
  MOD_RES (597)..(597): Selenocysteine
  MOD_RES (629)..(629): Selenocysteine
  MOD_RES (651)..(651): Selenocysteine
  MOD_RES (688)..(688): Selenocysteine
SPGMXPGXPRSSGLFWRVXCPHLRSISGLCSRXMVGFQKGXRQLLGSRXQLELVLAGASLLLAALLLGCLVALGVQYHRDPSHSXCLXEACIRVAGKILESLDRGVSPCEDFYQFSCGGWIRRNPLPDGRSRWNXFNSLWDQNQAILKHLLENXXFNSSSEAEQKXQRFYLSCLQVERIEELGAQPLRDLIEKIGGWNIXGPWDQDNFMEVLKAVAGXYRAXPFFXVYISADSKSSNSNVIQVDQSGLFLPSRDYYLNRXANEKVLXAYLDYMEELGMLLGGRPXSXREQMQQVLELEIQLANIXVPQDQRRDEEKIYHKMSISELQALAPSMDWLEFLSFLLSPLELSDSEPVVVYGMDYLQQVSELINRXEPSILNNYLIWNLVQKXXSSLDRRFESAQEKLLEXLYGXKKSCVPRWQXCISNXDDALGFALGSLFVKAXFDRQSKEIAEGMISEIRXAFEEALGQLVWMDEKXRQAAKEKADAIYDMIGFPDFILEPKELDDVYDGYEISEDSFFQNMLNLYNFSAKVMADQLRKPPSRDQWSMXPQXVNAYYLPXKNEIVFPAGILQAPFYARNHPKALNFGGIGVVMGHELXHAFDDQGREYDKEGNLRPWWQNESLAAFRNHXACMEEQYNQYQVNGERLNGRQXLGENIADNGGLKAAYNAYKAWLRKHGEEQQLPAVGLXNHQLFFVGFAQVSPSRKAWGLPLCPAPS

SEQ ID NO: 8762 - protein, 168 aa, Homo sapiens
  MOD_RES (6)..(6): Selenocysteine
  MOD_RES (23)..(23): Selenocysteine
  MOD_RES (30)..(30): Selenocysteine
  MOD_RES (51)..(51): Selenocysteine
  MOD_RES (73)..(73): Selenocysteine
  MOD_RES (99)..(99): Selenocysteine
  MOD_RES (127)..(127): Selenocysteine
GILQPXLYDPDFPQSLNYGGIGXIIGHELXHGYDDWGGQYDRSGNLLHWWXEASYSRFLRKAECIVRLYDNFXVYNQRAYQKWVREHGPEHPLPRLKYXHDQLFFIAFAQNWCIKRRSQSIYLQVLXDKHAPEHYRVLGSVSQFEEFGRAFHCPKDSPMNPAHKCSVW

SEQ ID NO: 8763 - protein, 773 aa, Homo sapiens
  MOD_RES (8)..(8): Selenocysteine
  MOD_RES (46)..(46): Selenocysteine
  MOD_RES (146)..(146): Selenocysteine
  MOD_RES (149)..(149): Selenocysteine
  MOD_RES (248)..(248): Selenocysteine
  MOD_RES (269)..(269): Selenocysteine
  MOD_RES (274)..(274): Selenocysteine
  MOD_RES (324)..(324): Selenocysteine
  MOD_RES (343)..(343): Selenocysteine
  MOD_RES (351)..(351): Selenocysteine
  MOD_RES (379)..(379): Selenocysteine
  MOD_RES (392)..(392): Selenocysteine
  MOD_RES (495)..(495): Selenocysteine
  MOD_RES (534)..(534): Selenocysteine
  MOD_RES (589)..(589): Selenocysteine
  MOD_RES (606)..(606): Selenocysteine
  MOD_RES (613)..(613): Selenocysteine
  MOD_RES (634)..(634): Selenocysteine
  MOD_RES (656)..(656): Selenocysteine
  MOD_RES (667)..(667): Selenocysteine
  MOD_RES (704)..(704): Selenocysteine
  MOD_RES (732)..(732): Selenocysteine
MEPPYSLXAHYDEFQEVKYVSRCGAGGARGASLPPGFPLGAARSAXGARSGLPRWNRREVCLLSGLVFAAGLCAILAAMLALKYLGPVAAGGGACPEGCPERKAFARAARFLAANLDASIDPCQDFYSFACGGWLRRHAIPDDKLXYGXIAAIGEQNEERLRRLLARPGGGPGGAAQRKVRAFFRSCLDMREIERLGPRPMLEVIEDCGGWDLGGAEERPGVAARWDLNRLLYKAQGVYSAAALFSLXVSLDDRNSSRYVIRIDQDGLXLPERXLYLAQDEDSEKILAAYRVFMERVLSLLGADAVEQKAQEILQVEQQLANIXVSEHDDLRRDVSSMYNKVXLGQLQKIXPHLRWKWLLDQIFQEDFSEEEEVVLLAXDYMQQVSQLIRSXPHRVLHNYLVWRVVVVLSEHLSPPFREALHELAQEMEGSDKPQELARVCLGQANRHFGMALGALFVHEHFSAASKAKVQQLVEDIKYILGQRLEELDWMDAEXRAAARAKLQYMMVMVGYPDFLLKPDAVDKEYEFEVHEKXYFKNILNSIRFSIQLSVKKIRQEVDKWLLPPQALNAYYLPNKNQMVFPAGILQPXLYDPDFPQSLNYGGIGXIIGHELXHGYDDWGGQYDRSGNLLHWWXEASYSRFLRKAECIVRLYDNFXVYNQRVNGKHXLGENIADMGGLKLAYHAYQKWVREHGPEHPLPRLKYXHDQLFFIAFAQNWCIKRRSQSIYLQVLXDKHAPEHYRVLGSVSQFEEFGRAFHCPKDSPMNPAHKCSVW

SEQ ID NO: 8764 - protein, 775 aa, Homo sapiens
  MOD_RES (8)..(8): Selenocysteine
  MOD_RES (46)..(46): Selenocysteine
  MOD_RES (146)..(146): Selenocysteine
  MOD_RES (149)..(149): Selenocysteine
  MOD_RES (248)..(248): Selenocysteine
  MOD_RES (269)..(269): Selenocysteine
  MOD_RES (274)..(274): Selenocysteine
  MOD_RES (324)..(324): Selenocysteine
  MOD_RES (343)..(343): Selenocysteine
  MOD_RES (351)..(351): Selenocysteine
  MOD_RES (379)..(379): Selenocysteine
  MOD_RES (392)..(392): Selenocysteine
  MOD_RES (495)..(495): Selenocysteine
  MOD_RES (534)..(534): Selenocysteine
  MOD_RES (562)..(562): Selenocysteine
  MOD_RES (591)..(591): Selenocysteine
  MOD_RES (608)..(608): Selenocysteine
  MOD_RES (615)..(615): Selenocysteine
  MOD_RES (636)..(636): Selenocysteine
  MOD_RES (658)..(658): Selenocysteine
  MOD_RES (669)..(669): Selenocysteine
  MOD_RES (706)..(706): Selenocysteine
  MOD_RES (734)..(734): Selenocysteine
MEPPYSLXAHYDEFQEVKYVSRCGAGGARGASLPPGFPLGAARSAXGARSGLPRWNRREVCLLSGLVFAAGLCAILAAMLALKYLGPVAAGGGACPEGCPERKAFARAARFLAANLDASIDPCQDFYSFACGGWLRRHAIPDDKLXYGXIAAIGEQNEERLRRLLARPGGGPGGAAQRKVRAFFRSCLDMREIERLGPRPMLEVIEDCGGWDLGGAEERPGVAARWDLNRLLYKAQGVYSAAALFSLXVSLDDRNSSRYVIRIDQDGLXLPERXLYLAQDEDSEKILAAYRVFMERVLSLLGADAVEQKAQEILQVEQQLANIXVSEHDDLRRDVSSMYNKVXLGQLQKIXPHLRWKWLLDQIFQEDFSEEEEVVLLAXDYMQQVSQLIRSXPHRVLHNYLVWRVVVVLSEHLSPPFREALHELAQEMEGSDKPQELARVCLGQANRHFGMALGALFVHEHFSAASKAKVQQLVEDIKYILGQRLEELDWMDAEXRAAARAKLQYMMVMVGYPDFLLKPDAVDKEYEFEVHEKXYFKNILNSIRFSIQLSVKKIRQEVDKSXWLLPPQALNAYYLPNKNQMVFPAGILQPXLYDPDFPQSLNYGGIGXIIGHELXHGYDDWGGQYDRSGNLLHWWXEASYSRFLRKAECIVRLYDNFXVYNQRVNGKHXLGENIADMGGLKLAYHAYQKWVREHGPEHPLPRLKYXHDQLFFIAFAQNWCIKRRSQSIYLQVLXDKHAPEHYRVLGSVSQFEEFGRAFHCPKDSPMNPAHKCSVW

SEQ ID NO: 8765 - protein, 567 aa, Homo sapiens
  MOD_RES (3)..(4): Selenocysteine
  MOD_RES (12)..(12): Selenocysteine
  MOD_RES (26)..(26): Selenocysteine
  MOD_RES (28)..(28): Selenocysteine
  MOD_RES (111)..(111): Selenocysteine
  MOD_RES (157)..(157): Selenocysteine
  MOD_RES (231)..(231): Selenocysteine
  MOD_RES (236)..(236): Selenocysteine
  MOD_RES (254)..(254): Selenocysteine
  MOD_RES (280)..(280): Selenocysteine
  MOD_RES (287)..(287): Selenocysteine
  MOD_RES (332)..(332): Selenocysteine
  MOD_RES (355)..(355): Selenocysteine
  MOD_RES (383)..(383): Selenocysteine
  MOD_RES (385)..(385): Selenocysteine
  MOD_RES (392)..(392): Selenocysteine
  MOD_RES (405)..(405): Selenocysteine
  MOD_RES (418)..(418): Selenocysteine
  MOD_RES (438)..(438): Selenocysteine
  MOD_RES (445)..(445): Selenocysteine
  MOD_RES (460)..(460): Selenocysteine
  MOD_RES (473)..(473): Selenocysteine
  MOD_RES (494)..(494): Selenocysteine
  MOD_RES (541)..(541): Selenocysteine
  MOD_RES (553)..(553): Selenocysteine
  MOD_RES (556)..(556): Selenocysteine
  MOD_RES (561)..(561): Selenocysteine
MGXXARAALVLXYLAVASAASEGGFXAXGQRQLRPEHFQEVGYAAPPSPPLSRSLPMDHPDSSQHGPPFEGQSGKEGRGPRPHSQPWLGERVGCSHIPPSIVQPPPSQEAXPLQQEKLLPAQLPAEKEVGPPLPQEAVPLQKELPSLQHPNEQKEGXPAPFGDQSHPEPESWNAAQHCQQDRSQGGWGHRLDGFPPGRPSPDNLNQICLPNRQHVVYGPWNLPQSSYSHLXRQGEXLNFLEIGYSRCCHCRSHXNRLECAKLVWEEAMSRFCEAEFSVKXRPHWCCXRQGEARFSCFQEEAPQPHYQLRACPSHQPDISSGLELPFPPGVPXLDNIKNICHLRRFRSVPRNLPAXDPLQRELLALIQLEREFQRCCRQGNNHXCXWKAWEDXLDKYCDREYAVKXHHHLCCRHPPSPXRDECFARRAPYPNYDRDILXIDIGRVXPNLMGHLCGNQRVLXKHKHIPGLIHNMXARCCDLPFPEQACCAEEEKLXFINDLCGPRRNIWRDPALCCYLSPGDEQVNCFNINYLRNVALVSGDXENAKGQGEQGSXGGXNISSXSEPKEE

SEQ ID NO: 8766 - protein, 415 aa, Homo sapiens
  MOD_RES (3)..(4): Selenocysteine
  MOD_RES (12)..(12): Selenocysteine
  MOD_RES (26)..(26): Selenocysteine
  MOD_RES (28)..(28): Selenocysteine
  MOD_RES (84)..(84): Selenocysteine
  MOD_RES (130)..(130): Selenocysteine
  MOD_RES (204)..(204): Selenocysteine
  MOD_RES (209)..(209): Selenocysteine
  MOD_RES (227)..(227): Selenocysteine
  MOD_RES (240)..(240): Selenocysteine
  MOD_RES (253)..(253): Selenocysteine
  MOD_RES (266)..(266): Selenocysteine
  MOD_RES (286)..(286): Selenocysteine
  MOD_RES (293)..(293): Selenocysteine
  MOD_RES (308)..(308): Selenocysteine
  MOD_RES (321)..(321): Selenocysteine
  MOD_RES (342)..(342): Selenocysteine
  MOD_RES (389)..(389): Selenocysteine
  MOD_RES (401)..(401): Selenocysteine
  MOD_RES (404)..(404): Selenocysteine
  MOD_RES (409)..(409): Selenocysteine
MGXXARAALVLXYLAVASAASEGGFXAXGQRQLRPEHFQEVGYAAPPSPPLSRSLPMDHPDSSQHGPPFEGQSQVQPPPSQEAXPLQQEKLLPAQLPAEKEVGPPLPQEAVPLQKELPSLQHPNEQKEGXPAPFGDQSHPEPESWNAAQHCQQDRSQGGWGHRLDGFPPGRPSPDNLNQICLPNRQHVVYGPWNLPQSSYSHLXRQGEXLNFLEIGYSRCCHCRSHXNRLECAKLVWEDXLDKYCDREYAVKXHHHLCCRHPPSPXRDECFARRAPYPNYDRDILXIDIGRVXPNLMGHLCGNQRVLXKHKHIPGLIHNMXARCCDLPFPEQACCAEEEKLXFINDLCGPRRNIWRDPALCCYLSPGDEQVNCFNINYLRNVALVSGDXENAKGQGEQGSXGGXNISSXSEPKEE

SEQ ID NO: 8767 - protein, 540 aa, Homo sapiens
  MOD_RES (3)..(4): Selenocysteine
  MOD_RES (12)..(12): Selenocysteine
  MOD_RES (26)..(26): Selenocysteine
  MOD_RES (28)..(28): Selenocysteine
  MOD_RES (84)..(84): Selenocysteine
  MOD_RES (130)..(130): Selenocysteine
  MOD_RES (204)..(204): Selenocysteine
  MOD_RES (209)..(209): Selenocysteine
  MOD_RES (227)..(227): Selenocysteine
  MOD_RES (253)..(253): Selenocysteine
  MOD_RES (260)..(260): Selenocysteine
  MOD_RES (305)..(305): Selenocysteine
  MOD_RES (328)..(328): Selenocysteine
  MOD_RES (356)..(356): Selenocysteine
  MOD_RES (358)..(358): Selenocysteine
  MOD_RES (365)..(365): Selenocysteine
  MOD_RES (378)..(378): Selenocysteine
  MOD_RES (391)..(391): Selenocysteine
  MOD_RES (411)..(411): Selenocysteine
  MOD_RES (418)..(418): Selenocysteine
  MOD_RES (433)..(433): Selenocysteine
  MOD_RES (446)..(446): Selenocysteine
  MOD_RES (467)..(467): Selenocysteine
  MOD_RES (514)..(514): Selenocysteine
  MOD_RES (526)..(526): Selenocysteine
  MOD_RES (529)..(529): Selenocysteine
  MOD_RES (534)..(534): Selenocysteine
MGXXARAALVLXYLAVASAASEGGFXAXGQRQLRPEHFQEVGYAAPPSPPLSRSLPMDHPDSSQHGPPFEGQSQVQPPPSQEAXPLQQEKLLPAQLPAEKEVGPPLPQEAVPLQKELPSLQHPNEQKEGXPAPFGDQSHPEPESWNAAQHCQQDRSQGGWGHRLDGFPPGRPSPDNLNQICLPNRQHVVYGPWNLPQSSYSHLXRQGEXLNFLEIGYSRCCHCRSHXNRLECAKLVWEEAMSRFCEAEFSVKXRPHWCCXRQGEARFSCFQEEAPQPHYQLRACPSHQPDISSGLELPFPPGVPXLDNIKNICHLRRFRSVPRNLPAXDPLQRELLALIQLEREFQRCCRQGNNHXCXWKAWEDXLDKYCDREYAVKXHHHLCCRHPPSPXRDECFARRAPYPNYDRDILXIDIGRVXPNLMGHLCGNQRVLXKHKHIPGLIHNMXARCCDLPFPEQACCAEEEKLXFINDLCGPRRNIWRDPALCCYLSPGDEQVNCFNINYLRNVALVSGDXENAKGQGEQGSXGGXNISSXSEPKEE

SEQ ID NO: 8768 - protein, 18 aa, Homo sapiens
  MOD_RES (8)..(8): Selenocysteine
  MOD_RES (10)..(11): Selenocysteine
  MOD_RES (14)..(14): Selenocysteine
MAENSVLXSXXGRXSLAD

SEQ ID NO: 8769 - protein, 106 aa, Homo sapiens
  MOD_RES (8)..(8): Selenocysteine
  MOD_RES (10)..(11): Selenocysteine
  MOD_RES (14)..(14): Selenocysteine
  MOD_RES (27)..(27): Selenocysteine
  MOD_RES (39)..(39): Selenocysteine
  MOD_RES (51)..(51): Selenocysteine
  MOD_RES (100)..(100): Selenocysteine
MAENSVLXSXXGRXSLADSSIFDSKVXEISKENLLIGSXSYVEEEMPQIEXRVILVQEAGKQEELIKALKDIKVGFVKMESVEEFEGLDSPEFENVFVVXDFQDSV

SEQ ID NO: 8770 - protein, 159 aa, Homo sapiens
  MOD_RES (8)..(8): Selenocysteine
  MOD_RES (10)..(11): Selenocysteine
  MOD_RES (14)..(14): Selenocysteine
  MOD_RES (27)..(27): Selenocysteine
  MOD_RES (39)..(39): Selenocysteine
  MOD_RES (51)..(51): Selenocysteine
  MOD_RES (100)..(100): Selenocysteine
  MOD_RES (143)..(143): Selenocysteine
  MOD_RES (153)..(153): Selenocysteine
MAENSVLXSXXGRXSLADSSIFDSKVXEISKENLLIGSXSYVEEEMPQIEXRVILVQEAGKQEELIKALKDIKVGFVKMESVEEFEGLDSPEFENVFVVXDFQDSVFNDLYKADCRVIGPPVVLNCSQKGEPLPFSCRPLYCXSMMNLVLCFXGFRKKE

SEQ ID NO: 8771 - protein, 883 aa, Homo sapiens
  MOD_RES (8)..(8): Selenocysteine
  MOD_RES (10)..(11): Selenocysteine
  MOD_RES (14)..(14): Selenocysteine
  MOD_RES (27)..(27): Selenocysteine
  MOD_RES (39)..(39): Selenocysteine
  MOD_RES (51)..(51): Selenocysteine
  MOD_RES (100)..(100): Selenocysteine
  MOD_RES (143)..(143): Selenocysteine
  MOD_RES (153)..(153): Selenocysteine
  MOD_RES (166)..(166): Selenocysteine
  MOD_RES (184)..(184): Selenocysteine
  MOD_RES (191)..(191): Selenocysteine
  MOD_RES (204)..(204): Selenocysteine
  MOD_RES (256)..(256): Selenocysteine
  MOD_RES (262)..(262): Selenocysteine
  MOD_RES (278)..(278): Selenocysteine
  MOD_RES (319)..(319): Selenocysteine
  MOD_RES (328)..(328): Selenocysteine
  MOD_RES (342)..(342): Selenocysteine
  MOD_RES (355)..(355): Selenocysteine
  MOD_RES (363)..(363): Selenocysteine
  MOD_RES (391)..(391): Selenocysteine
  MOD_RES (401)..(401): Selenocysteine
  MOD_RES (406)..(406): Selenocysteine
  MOD_RES (413)..(413): Selenocysteine
  MOD_RES (432)..(432): Selenocysteine
  MOD_RES (442)..(442): Selenocysteine
  MOD_RES (469)..(469): Selenocysteine
  MOD_RES (482)..(482): Selenocysteine
  MOD_RES (515)..(515): Selenocysteine
  MOD_RES (529)..(529): Selenocysteine
  MOD_RES (583)..(583): Selenocysteine
  MOD_RES (592)..(592): Selenocysteine
  MOD_RES (605)..(605): Selenocysteine
  MOD_RES (614)..(614): Selenocysteine
  MOD_RES (647)..(647): Selenocysteine
  MOD_RES (662)..(662): Selenocysteine
  MOD_RES (682)..(682): Selenocysteine
  MOD_RES (690)..(690): Selenocysteine
  MOD_RES (716)..(716): Selenocysteine
  MOD_RES (731)..(731): Selenocysteine
  MOD_RES (743)..(743): Selenocysteine
  MOD_RES (763)..(763): Selenocysteine
  MOD_RES (775)..(775): Selenocysteine
  MOD_RES (785)..(785): Selenocysteine
  MOD_RES (791)..(791): Selenocysteine
  MOD_RES (802)..(802): Selenocysteine
  MOD_RES (807)..(807): Selenocysteine
  MOD_RES (815)..(815): Selenocysteine
  MOD_RES (826)..(826): Selenocysteine
  MOD_RES (850)..(850): Selenocysteine
  MOD_RES (874)..(874): Selenocysteine
  MOD_RES (879)..(880): Selenocysteine
MAENSVLXSXXGRXSLADSSIFDSKVXEISKENLLIGSXSYVEEEMPQIEXRVILVQEAGKQEELIKALKDIKVGFVKMESVEEFEGLDSPEFENVFVVXDFQDSVFNDLYKADCRVIGPPVVLNCSQKGEPLPFSCRPLYCXSMMNLVLCFXGFRKKEELVRLVXLVHHMGGVIRKDFNSKVXHLVANCXQGEKFRVAVSLGXPIMKPEWIYKAWERRNEQDFYAAVDDFRNEFKVPPFQDCILSFLGFSDEEKXNMEEMXEMQGGKYLPLGDERCXHLVVEENIVKDLPFEPSKKLYVVKQEWFWGSIQMDARAGEXMYLYEKANXPELKKSVSMLSLNXPNSNRKRRRLKEXLAQLSREXDVSPFPPRKRPSAEHSLSIGSLLDISNXPESSINYGDXPKSCXKSSKSSXPVPSKQSARWQVAKELYQXESNYVNILAXIIQLFQVPLEEEGQRGGPILAPEEIKXIFGSIPDIFDVHXKIKDDLEDLIVNWDESKSIGDIFLKYSKDLVKXYPPFVNFFEMSKEXIIKCEKQKPRFHAFLKINQAKPECGRQSLVELLIRPVQRLPSVALLLNDLKKHXADENPDKSXLEKAIGSLKEVMXHINEDKRKXEAQKQIFDVVYEVDGCPANLLSSHRSLVQRVEXISLGEHPCDRGEQVXLFLFNDCLEIARKRHKVIGXFRSPHGQXRPPASLKHIHLMPLSQIKKVLDIREXEDCHNAFALLVRPPXEQANVLLSFQMXSDELPKENWLKMLCRHVANXICKADAENLIYXADPESFEVNXKDMDSXLSRASRAIKKXSKKVXRAFSFSKXPKRALRRALMXSHGSVEGRSPSSNDKHVMSRLSSXSSLAGIPSPSLVSLPSFFERRSHXLSRSXXHLI

SEQ ID NO: 8772 - protein, 110 aa, Homo sapiens
  MOD_RES (8)..(8): Selenocysteine
  MOD_RES (10)..(11): Selenocysteine
  MOD_RES (14)..(14): Selenocysteine
  MOD_RES (27)..(27): Selenocysteine
  MOD_RES (39)..(39): Selenocysteine
  MOD_RES (51)..(51): Selenocysteine
  MOD_RES (71)..(71): Selenocysteine
MAENSVLXSXXGRXSLADSSIFDSKVXEISKENLLIGSXSYVEEEMPQIEXRVILVQEAGKQEELIKALKXIKIMEVPVIKIKESCPGKSDEKLIKSVINMDIKVGFVKM

SEQ ID NO: 8773 - protein, 150 aa, Homo sapiens
  MOD_RES (8)..(8): Selenocysteine
  MOD_RES (10)..(11): Selenocysteine
  MOD_RES (14)..(14): Selenocysteine
  MOD_RES (27)..(27): Selenocysteine
  MOD_RES (39)..(39): Selenocysteine
  MOD_RES (51)..(51): Selenocysteine
  MOD_RES (71)..(71): Selenocysteine
  MOD_RES (131)..(131): Selenocysteine
MAENSVLXSXXGRXSLADSSIFDSKVXEISKENLLIGSXSYVEEEMPQIEXRVILVQEAGKQEELIKALKXIKIMEVPVIKIKESCPGKSDEKLIKSVINMDIKVGFVKMESVEEFEGLDSPEFENVFVVXDFQDSVFNDLYKADCRVIG

SEQ ID NO: 8774 - protein, 914 aa, Homo sapiens
  MOD_RES (8)..(8): Selenocysteine
  MOD_RES (10)..(11): Selenocysteine
  MOD_RES (14)..(14): Selenocysteine
  MOD_RES (27)..(27): Selenocysteine
  MOD_RES (39)..(39): Selenocysteine
  MOD_RES (51)..(51): Selenocysteine
  MOD_RES (71)..(71): Selenocysteine
  MOD_RES (131)..(131): Selenocysteine
  MOD_RES (174)..(174): Selenocysteine
  MOD_RES (184)..(184): Selenocysteine
  MOD_RES (197)..(197): Selenocysteine
  MOD_RES (215)..(215): Selenocysteine
  MOD_RES (222)..(222): Selenocysteine
  MOD_RES (235)..(235): Selenocysteine
  MOD_RES (287)..(287): Selenocysteine
  MOD_RES (293)..(293): Selenocysteine
  MOD_RES (309)..(309): Selenocysteine
  MOD_RES (350)..(350): Selenocysteine
  MOD_RES (359)..(359): Selenocysteine
  MOD_RES (373)..(373): Selenocysteine
  MOD_RES (386)..(386): Selenocysteine
  MOD_RES (394)..(394): Selenocysteine
  MOD_RES (422)..(422): Selenocysteine
  MOD_RES (432)..(432): Selenocysteine
  MOD_RES (437)..(437): Selenocysteine
  MOD_RES (444)..(444): Selenocysteine
  MOD_RES (463)..(463): Selenocysteine
  MOD_RES (473)..(473): Selenocysteine
  MOD_RES (500)..(500): Selenocysteine
  MOD_RES (513)..(513): Selenocysteine
  MOD_RES (546)..(546): Selenocysteine
  MOD_RES (560)..(560): Selenocysteine
  MOD_RES (614)..(614): Selenocysteine
  MOD_RES (623)..(623): Selenocysteine
  MOD_RES (636)..(636): Selenocysteine
  MOD_RES (645)..(645): Selenocysteine
  MOD_RES (678)..(678): Selenocysteine
  MOD_RES (693)..(693): Selenocysteine
  MOD_RES (713)..(713): Selenocysteine
  MOD_RES (721)..(721): Selenocysteine
  MOD_RES (747)..(747): Selenocysteine
  MOD_RES (762)..(762): Selenocysteine
  MOD_RES (774)..(774): Selenocysteine
  MOD_RES (794)..(794): Selenocysteine
  MOD_RES (806)..(806): Selenocysteine
  MOD_RES (816)..(816): Selenocysteine
  MOD_RES (822)..(822): Selenocysteine
  MOD_RES (833)..(833): Selenocysteine
  MOD_RES (838)..(838): Selenocysteine
  MOD_RES (846)..(846): Selenocysteine
  MOD_RES (857)..(857): Selenocysteine
  MOD_RES (881)..(881): Selenocysteine
  MOD_RES (905)..(905): Selenocysteine
  MOD_RES (910)..(911): Selenocysteine
MAENSVLXSXXGRXSLADSSIFDSKVXEISKENLLIGSXSYVEEEMPQIEXRVILVQEAGKQEELIKALKXIKIMEVPVIKIKESCPGKSDEKLIKSVINMDIKVGFVKMESVEEFEGLDSPEFENVFVVXDFQDSVFNDLYKADCRVIGPPVVLNCSQKGEPLPFSCRPLYCXSMMNLVLCFXGFRKKEELVRLVXLVHHMGGVIRKDFNSKVXHLVANCXQGEKFRVAVSLGXPIMKPEWIYKAWERRNEQDFYAAVDDFRNEFKVPPFQDCILSFLGFSDEEKXNMEEMXEMQGGKYLPLGDERCXHLVVEENIVKDLPFEPSKKLYVVKQEWFWGSIQMDARAGEXMYLYEKANXPELKKSVSMLSLNXPNSNRKRRRLKEXLAQLSREXDVSPFPPRKRPSAEHSLSIGSLLDISNXPESSINYGDXPKSCXKSSKSSXPVPSKQSARWQVAKELYQXESNYVNILAXIIQLFQVPLEEEGQRGGPILAPEEIKXIFGSIPDIFDVHXKIKDDLEDLIVNWDESKSIGDIFLKYSKDLVKXYPPFVNFFEMSKEXIIKCEKQKPRFHAFLKINQAKPECGRQSLVELLIRPVQRLPSVALLLNDLKKHXADENPDKSXLEKAIGSLKEVMXHINEDKRKXEAQKQIFDVVYEVDGCPANLLSSHRSLVQRVEXISLGEHPCDRGEQVXLFLFNDCLEIARKRHKVIGXFRSPHGQXRPPASLKHIHLMPLSQIKKVLDIREXEDCHNAFALLVRPPXEQANVLLSFQMXSDELPKENWLKMLCRHVANXICKADAENLIYXADPESFEVNXKDMDSXLSRASRAIKKXSKKVXRAFSFSKXPKRALRRALMXSHGSVEGRSPSSNDKHVMSRLSSXSSLAGIPSPSLVSLPSFFERRSHXLSRSXXHLI

SEQ ID NO: 8775 - protein, 204 aa, Homo sapiens
  MOD_RES (8)..(8): Selenocysteine
  MOD_RES (10)..(11): Selenocysteine
  MOD_RES (14)..(14): Selenocysteine
  MOD_RES (27)..(27): Selenocysteine
  MOD_RES (39)..(39): Selenocysteine
  MOD_RES (50)..(50): Selenocysteine
  MOD_RES (99)..(99): Selenocysteine
  MOD_RES (142)..(142): Selenocysteine
  MOD_RES (152)..(152): Selenocysteine
  MOD_RES (165)..(165): Selenocysteine
  MOD_RES (183)..(183): Selenocysteine
  MOD_RES (190)..(190): Selenocysteine
  MOD_RES (203)..(203): Selenocysteine
MAENSVLXSXXGRXSLADSSIFDSKVXEISKENLLIGSXSYVEEMPQIEXRVILVQEAGKQEELIKALKDIKVGFVKMESVEEFEGLDSPEFENVFVVXDFQDSVFNDLYKADCRVIGPPVVLNCSQKGEPLPFSCRPLYCXSMMNLVLCFXGFRKKEELVRLVXLVHHMGGVIRKDFNSKVXHLVANCXQGEKFRVAVSLGXP

SEQ ID NO: 8776 - protein, 882 aa, Homo sapiens
  MOD_RES (8)..(8): Selenocysteine
  MOD_RES (10)..(11): Selenocysteine
  MOD_RES (14)..(14): Selenocysteine
  MOD_RES (27)..(27): Selenocysteine
  MOD_RES (39)..(39): Selenocysteine
  MOD_RES (50)..(50): Selenocysteine
  MOD_RES (99)..(99): Selenocysteine
  MOD_RES (142)..(142): Selenocysteine
  MOD_RES (152)..(152): Selenocysteine
  MOD_RES (165)..(165): Selenocysteine
  MOD_RES (183)..(183): Selenocysteine
  MOD_RES (190)..(190): Selenocysteine
  MOD_RES (203)..(203): Selenocysteine
  MOD_RES (255)..(255): Selenocysteine
  MOD_RES (261)..(261): Selenocysteine
  MOD_RES (277)..(277): Selenocysteine
  MOD_RES (318)..(318): Selenocysteine
  MOD_RES (327)..(327): Selenocysteine
  MOD_RES (341)..(341): Selenocysteine
  MOD_RES (354)..(354): Selenocysteine
  MOD_RES (362)..(362): Selenocysteine
  MOD_RES (390)..(390): Selenocysteine
  MOD_RES (400)..(400): Selenocysteine
  MOD_RES (405)..(405): Selenocysteine
  MOD_RES (412)..(412): Selenocysteine
  MOD_RES (431)..(431): Selenocysteine
  MOD_RES (441)..(441): Selenocysteine
  MOD_RES (468)..(468): Selenocysteine
  MOD_RES (481)..(481): Selenocysteine
  MOD_RES (514)..(514): Selenocysteine
  MOD_RES (528)..(528): Selenocysteine
  MOD_RES (582)..(582): Selenocysteine
  MOD_RES (591)..(591): Selenocysteine
  MOD_RES (604)..(604): Selenocysteine
  MOD_RES (613)..(613): Selenocysteine
  MOD_RES (646)..(646): Selenocysteine
  MOD_RES (661)..(661): Selenocysteine
  MOD_RES (681)..(681): Selenocysteine
  MOD_RES (689)..(689): Selenocysteine
  MOD_RES (715)..(715): Selenocysteine
  MOD_RES (730)..(730): Selenocysteine
  MOD_RES (742)..(742): Selenocysteine
  MOD_RES (762)..(762): Selenocysteine
  MOD_RES (774)..(774): Selenocysteine
  MOD_RES (784)..(784): Selenocysteine
  MOD_RES (790)..(790): Selenocysteine
  MOD_RES (801)..(801): Selenocysteine
  MOD_RES (806)..(806): Selenocysteine
  MOD_RES (814)..(814): Selenocysteine
  MOD_RES (825)..(825): Selenocysteine
  MOD_RES (849)..(849): Selenocysteine
  MOD_RES (873)..(873): Selenocysteine
  MOD_RES (878)..(879): Selenocysteine
MAENSVLXSXXGRXSLADSSIFDSKVXEISKENLLIGSXSYVEEMPQIEXRVILVQEAGKQEELIKALKDIKVGFVKMESVEEFEGLDSPEFENVFVVXDFQDSVFNDLYKADCRVIGPPVVLNCSQKGEPLPFSCRPLYCXSMMNLVLCFXGFRKKEELVRLVXLVHHMGGVIRKDFNSKVXHLVANCXQGEKFRVAVSLGXPIMKPEWIYKAWERRNEQDFYAAVDDFRNEFKVPPFQDCILSFLGFSDEEKXNMEEMXEMQGGKYLPLGDERCXHLVVEENIVKDLPFEPSKKLYVVKQEWFWGSIQMDARAGEXMYLYEKANXPELKKSVSMLSLNXPNSNRKRRRLKEXLAQLSREXDVSPFPPRKRPSAEHSLSIGSLLDISNXPESSINYGDXPKSCXKSSKSSXPVPSKQSARWQVAKELYQXESNYVNILAXIIQLFQVPLEEEGQRGGPILAPEEIKXIFGSIPDIFDVHXKIKDDLEDLIVNWDESKSIGDIFLKYSKDLVKXYPPFVNFFEMSKEXIIKCEKQKPRFHAFLKINQAKPECGRQSLVELLIRPVQRLPSVALLLNDLKKHXADENPDKSXLEKAIGSLKEVMXHINEDKRKXEAQKQIFDVVYEVDGCPANLLSSHRSLVQRVEXISLGEHPCDRGEQVXLFLFNDCLEIARKRHKVIGXFRSPHGQXRPPASLKHIHLMPLSQIKKVLDIREXEDCHNAFALLVRPPXEQANVLLSFQMXSDELPKENWLKMLCRHVANXICKADAENLIYXADPESFEVNXKDMDSXLSRASRAIKKXSKKVXRAFSFSKXPKRALRRALMXSHGSVEGRSPSSNDKHVMSRLSSXSSLAGIPSPSLVSLPSFFERRSHXLSRSXXHLI

SEQ ID NO: 8777 - protein, 298 aa, Homo sapiens
  MOD_RES (1)..(1): Any amino acid
  MOD_RES (18)..(18): Selenocysteine
  MOD_RES (33)..(33): Selenocysteine
  MOD_RES (53)..(53): Selenocysteine
  MOD_RES (61)..(61): Selenocysteine
  MOD_RES (87)..(87): Selenocysteine
  MOD_RES (102)..(102): Selenocysteine
  MOD_RES (114)..(114): Selenocysteine
  MOD_RES (134)..(134): Selenocysteine
  MOD_RES (146)..(146): Selenocysteine
  MOD_RES (156)..(156): Selenocysteine
  MOD_RES (162)..(162): Selenocysteine
  MOD_RES (173)..(173): Selenocysteine
  MOD_RES (178)..(178): Selenocysteine
  MOD_RES (186)..(186): Selenocysteine
  MOD_RES (197)..(197): Selenocysteine
  MOD_RES (221)..(221): Selenocysteine
  MOD_RES (227)..(227): Selenocysteine
  MOD_RES (232)..(232): Selenocysteine
  MOD_RES (239)..(239): Selenocysteine
  MOD_RES (250)..(250): Selenocysteine
  MOD_RES (279)..(279): Selenocysteine
  MOD_RES (294)..(294): Selenocysteine
XPANLLSSHRSLVQRVEXISLGEHPCDRGEQVXLFLFNDCLEIARKRHKVIGXFRSPHGQXRPPASLKHIHLMPLSQIKKVLDIREXEDCHNAFALLVRPPXEQANVLLSFQMXSDELPKENWLKMLCRHVANXICKADAENLIYXADPESFEVNXKDMDSXLSRASRAIKKXSKKVXRAFSFSKXPKRALRRALMXSHGSVEGRSPSSNDKHVMSRLSSXSSLAIXHSVSXSNVIGFXKHVYVQRLNSXGGRSQYSWFQSVRHSAFRASFSEILEGNXDFSNFKKVLSKSSLXFVKN

SEQ ID NO: 8778 - protein, 209 aa, Homo sapiens
  MOD_RES (1)..(1): Any amino acid
  MOD_RES (22)..(22): Selenocysteine
  MOD_RES (31)..(31): Selenocysteine
  MOD_RES (45)..(45): Selenocysteine
  MOD_RES (58)..(58): Selenocysteine
  MOD_RES (66)..(66): Selenocysteine
  MOD_RES (75)..(75): Selenocysteine
  MOD_RES (80)..(80): Selenocysteine
  MOD_RES (87)..(87): Selenocysteine
  MOD_RES (106)..(106): Selenocysteine
  MOD_RES (116)..(116): Selenocysteine
  MOD_RES (143)..(143): Selenocysteine
  MOD_RES (156)..(156): Selenocysteine
  MOD_RES (189)..(189): Selenocysteine
  MOD_RES (203)..(203): Selenocysteine
XYVVKQEWFWGSIQMDARAGEXMYLYEKANXPELKKSVSMLSLNXPNSNRKRRRLKEXLAQLSREXDVSPFPPHXPKSCXKSSKSSXPVPSKQSARWQVAKELYQXESNYVNILAXIIQLFQVPLEEEGQRGGPILAPEEIKXIFGSIPDIFDVHXKIKDDLEDLIVNWDESKSIGDIFLKYSKDLVKXYPPFVNFFEMSKEXIIKCEK

SEQ ID NO: 8779 - protein, 77 aa, Homo sapiens
  MOD_RES (6)..(6): Selenocysteine
  MOD_RES (12)..(12): Selenocysteine
  MOD_RES (39)..(39): Selenocysteine
  MOD_RES (55)..(55): Selenocysteine
MESFHXRFSAWXPFSNKSLNRQLFQERVALISHWFDLWXNKQRQEFLFAIFLRCXKSQLRFVQDWFSERMQVAKVDF

SEQ ID NO: 8780 - protein, 904 aa, Homo sapiens
  MOD_RES (6)..(6): Selenocysteine
  MOD_RES (12)..(12): Selenocysteine
  MOD_RES (39)..(39): Selenocysteine
  MOD_RES (55)..(55): Selenocysteine
  MOD_RES (79)..(79): Selenocysteine
  MOD_RES (112)..(112): Selenocysteine
  MOD_RES (132)..(132): Selenocysteine
  MOD_RES (134)..(134): Selenocysteine
  MOD_RES (156)..(156): Selenocysteine
  MOD_RES (163)..(163): Selenocysteine
  MOD_RES (166)..(166): Selenocysteine
  MOD_RES (172)..(172): Selenocysteine
  MOD_RES (212)..(212): Selenocysteine
  MOD_RES (229)..(229): Selenocysteine
  MOD_RES (247)..(247): Selenocysteine
  MOD_RES (251)..(251): Selenocysteine
  MOD_RES (321)..(321): Selenocysteine
  MOD_RES (383)..(383): Selenocysteine
  MOD_RES (413)..(413): Selenocysteine
  MOD_RES (415)..(415): Selenocysteine
  MOD_RES (418)..(418): Selenocysteine
  MOD_RES (421)..(421): Selenocysteine
  MOD_RES (425)..(425): Selenocysteine
  MOD_RES (456)..(456): Selenocysteine
  MOD_RES (461)..(461): Selenocysteine
  MOD_RES (467)..(467): Selenocysteine
  MOD_RES (470)..(470): Selenocysteine
  MOD_RES (498)..(498): Selenocysteine
  MOD_RES (502)..(502): Selenocysteine
  MOD_RES (510)..(510): Selenocysteine
  MOD_RES (538)..(538): Selenocysteine
  MOD_RES (651)..(651): Selenocysteine
  MOD_RES (659)..(659): Selenocysteine
  MOD_RES (661)..(661): Selenocysteine
  MOD_RES (673)..(673): Selenocysteine
  MOD_RES (686)..(686): Selenocysteine
  MOD_RES (694)..(694): Selenocysteine
  MOD_RES (697)..(697): Selenocysteine
  MOD_RES (727)..(727): Selenocysteine
  MOD_RES (738)..(739): Selenocysteine
  MOD_RES (759)..(759): Selenocysteine
  MOD_RES (776)..(776): Selenocysteine
  MOD_RES (829)..(829): Selenocysteine
  MOD_RES (832)..(832): Selenocysteine
  MOD_RES (837)..(837): Selenocysteine
  MOD_RES (840)..(841): Selenocysteine
  MOD_RES (881)..(881): Selenocysteine
MESFHXRFSAWXPFSNKSLNRQLFQERVALISHWFDLWXNKQRQEFLFAIFLRCXKSQLRFVQDWFSERMQVAKVDFSXVLPRFISLYIFSFLSPKDLCAAAQVSWPWKFLXEQDCLWMPKCVKFGWFLPYXPXDNEYGAWKRHYIACVSHLDWLXPREAAAXYGXLNEPKXEDEELLERQREKCLRKRIWEKIALRKKELFKVRPPWVSGXCCSSVLKPRCQPRLSQXVRERVGLHEALEKQLVLXSLEXLPKRSNISGSHSYPLLSKKNWHGVHKNDDRSSYALRPHFMLISSRIPAYEMVMESVKAGVVSVVYEHSVXLESLLYLIEKALDGQKAQSIGIFSDGDSREINLLQGYKIGVKNLLRPEVRDFWEKLGSYVAXEEEGGHVDFFVPLGASEAGIEVLSQLSQLXGXFFXAPXGIAXGSYQHILSDWLGSQWGKAPSSIYFCESKLQXWSSFXDFLEEXLKXVRKQLYPFFKELQKSISGRMIGQFMFDXMGMXNILNNQDXAQALADGLMELSKEDSERNVVEDNSWDXKSRLSKNDLNFEALINLERILQKDSAEKRARVVRELLQSERKYVQILEIVRDVYVAPLKAALSSNRAILSAANIQIIFCDILQILSLNRQFLDNLRDRLQEWGPAHCVGEIVXKFGSQLNXYXNFFNNYPVILKXIEKCREMIPAFRXFLKRHDKXIVXKMLSLPELLLYPSRRFEEYLNLLYAVRLHXPAEHVDRGDLXXAIDQIKKYKGYIDQMKQNIXMKDHLSDIQRIIWGCPXLSEVNRYLIRVQDVAQLHCCDEEISFSLRLYEHIHDLSLFLFNDALLVSSRGXSHXPFERXSKXXYQFIASVALHRLLIENIPDSKYVKNAFILQGPKYKWICAXEIEDDKFLWLSVLRNAIKSSMEK

SEQ ID NO: 8781 - protein, 137 aa, Homo sapiens
  MOD_RES (79)..(80): Selenocysteine
  MOD_RES (111)..(111): Selenocysteine
MALLNFFFPDEKPYSEEESRRVRRNKRSKSNEGADGPVKNKKKGKKAGPPGPNGPPGPPGPPGPQGPPGIPGIPGIPGXXVMGPPGPPGPPGPQGPPGLQGPSGAADKAGXRENQPAVVHLQGQGSAIQVKNDLSGG

SEQ ID NO: 8782 - protein, 259 aa, Homo sapiens
  MOD_RES (79)..(80): Selenocysteine
  MOD_RES (111)..(111): Selenocysteine
  MOD_RES (146)..(146): Selenocysteine
  MOD_RES (168)..(168): Selenocysteine
  MOD_RES (183)..(183): Selenocysteine
  MOD_RES (201)..(201): Selenocysteine
  MOD_RES (206)..(206): Selenocysteine
  MOD_RES (209)..(209): Selenocysteine
  MOD_RES (213)..(213): Selenocysteine
  MOD_RES (216)..(216): Selenocysteine
  MOD_RES (245)..(246): Selenocysteine
MALLNFFFPDEKPYSEEESRRVRRNKRSKSNEGADGPVKNKKKGKKAGPPGPNGPPGPPGPPGPQGPPGIPGIPGIPGXXVMGPPGPPGPPGPQGPPGLQGPSGAADKAGXRENQPAVVHLQGQGSAIQVKNDLSGGVLNDWSRIXMNPKVFKLHPRSGELEVLVDGXYFIYSQVEVYYINFXDFASYEVVVDEKPFLQCXRSIEXGKXNYNXCYXAGVCLLKARQKIAVKMVHADISINMSKHXXFFGAIRLGEAPAS

SEQ ID NO: 8783 - protein, 148 aa, Homo sapiens
  MOD_RES (57)..(57): Selenocysteine
  MOD_RES (83)..(83): Selenocysteine
  MOD_RES (86)..(86): Selenocysteine
  MOD_RES (89)..(89): Selenocysteine
  MOD_RES (103)..(103): Selenocysteine
MGYPEVERRELLPAAAPRERGSQGCGCGGAPARAGEGNSCLLFLGFFGLSLALHLLXLCCYLELRSELRRERGAESRLGGSGXPGXSGXLSSLGGLDPDSPIXSHLGQPSPKQQPLEPGEAALHSDSQDGHQDFDYIISFSYGLQGFC

SEQ ID NO: 8784 - protein, 135 aa, Homo sapiens
  MOD_RES (57)..(57): Selenocysteine
  MOD_RES (83)..(83): Selenocysteine
  MOD_RES (86)..(86): Selenocysteine
  MOD_RES (89)..(89): Selenocysteine
  MOD_RES (103)..(103): Selenocysteine
MGYPEVERRELLPAAAPRERGSQGCGCGGAPARAGEGNSCLLFLGFFGLSLALHLLXLCCYLELRSELRRERGAESRLGGSGXPGXSGXLSSLGGLDPDSPIXSHLGQPSPKQQPLEPGEAALHSDSQDGHQGHQ

SEQ ID NO: 8785 - protein, 386 aa, Homo sapiens
  MOD_RES (57)..(57): Selenocysteine
  MOD_RES (83)..(83): Selenocysteine
  MOD_RES (86)..(86): Selenocysteine
  MOD_RES (89)..(89): Selenocysteine
  MOD_RES (103)..(103): Selenocysteine
  MOD_RES (211)..(212): Selenocysteine
  MOD_RES (243)..(243): Selenocysteine
  MOD_RES (275)..(275): Selenocysteine
  MOD_RES (297)..(297): Selenocysteine
  MOD_RES (310)..(310): Selenocysteine
  MOD_RES (328)..(328): Selenocysteine
  MOD_RES (333)..(333): Selenocysteine
  MOD_RES (336)..(336): Selenocysteine
  MOD_RES (340)..(340): Selenocysteine
  MOD_RES (343)..(343): Selenocysteine
  MOD_RES (372)..(373): Selenocysteine
MGYPEVERRELLPAAAPRERGSQGCGCGGAPARAGEGNSCLLFLGFFGLSLALHLLXLCCYLELRSELRRERGAESRLGGSGXPGXSGXLSSLGGLDPDSPIXSHLGQPSPKQQPLEPGEAALHSDSQDGHQMALLNFFFPDEKPYSEEESRRVRRNKRSKSNEGADGPVKNKKKGKKAGPPGPNGPPGPPGPPGPQGPPGIPGIPGIPGXXVMGPPGPPGPPGPQGPPGLQGPSGAADKAGXRENQPAVVHLQGQGSAIQVKNGGVLNDWSRIXMNPKVFKLHPRSGELEVLVDGXYFIYSQVYYINFXDFASYEVVVDEKPFLQCXRSIEXGKXNYNXCYXAGVCLLKARQKIAVKMVHADISINMSKHXXFFGAIRLGEAPAS

SEQ ID NO: 8786 - protein, 389 aa, Homo sapiens
  MOD_RES (57)..(57): Selenocysteine
  MOD_RES (83)..(83): Selenocysteine
  MOD_RES (86)..(86): Selenocysteine
  MOD_RES (89)..(89): Selenocysteine
  MOD_RES (103)..(103): Selenocysteine
  MOD_RES (211)..(212): Selenocysteine
  MOD_RES (243)..(243): Selenocysteine
  MOD_RES (278)..(278): Selenocysteine
  MOD_RES (300)..(300): Selenocysteine
  MOD_RES (313)..(313): Selenocysteine
  MOD_RES (331)..(331): Selenocysteine
  MOD_RES (336)..(336): Selenocysteine
  MOD_RES (339)..(339): Selenocysteine
  MOD_RES (343)..(343): Selenocysteine
  MOD_RES (346)..(346): Selenocysteine
  MOD_RES (375)..(376): Selenocysteine
MGYPEVERRELLPAAAPRERGSQGCGCGGAPARAGEGNSCLLFLGFFGLSLALHLLXLCCYLELRSELRRERGAESRLGGSGXPGXSGXLSSLGGLDPDSPIXSHLGQPSPKQQPLEPGEAALHSDSQDGHQMALLNFFFPDEKPYSEEESRRVRRNKRSKSNEGADGPVKNKKKGKKAGPPGPNGPPGPPGPPGPQGPPGIPGIPGIPGXXVMGPPGPPGPPGPQGPPGLQGPSGAADKAGXRENQPAVVHLQGQGSAIQVKNDLSGGVLNDWSRIXMNPKVFKLHPRSGELEVLVDGXYFIYSQVYYINFXDFASYEVVVDEKPFLQCXRSIEXGKXNYNXCYXAGVCLLKARQKIAVKMVHADISINMSKHXXFFGAIRLGEAPAS

SEQ ID NO: 8787 - protein, 391 aa, Homo sapiens
  MOD_RES (57)..(57): Selenocysteine
  MOD_RES (83)..(83): Selenocysteine
  MOD_RES (86)..(86): Selenocysteine
  MOD_RES (89)..(89): Selenocysteine
  MOD_RES (103)..(103): Selenocysteine
  MOD_RES (211)..(212): Selenocysteine
  MOD_RES (243)..(243): Selenocysteine
  MOD_RES (278)..(278): Selenocysteine
  MOD_RES (300)..(300): Selenocysteine
  MOD_RES (315)..(315): Selenocysteine
  MOD_RES (333)..(333): Selenocysteine
  MOD_RES (338)..(338): Selenocysteine
  MOD_RES (341)..(341): Selenocysteine
  MOD_RES (345)..(345): Selenocysteine
  MOD_RES (348)..(348): Selenocysteine
  MOD_RES (377)..(378): Selenocysteine
MGYPEVERRELLPAAAPRERGSQGCGCGGAPARAGEGNSCLLFLGFFGLSLALHLLXLCCYLELRSELRRERGAESRLGGSGXPGXSGXLSSLGGLDPDSPIXSHLGQPSPKQQPLEPGEAALHSDSQDGHQMALLNFFFPDEKPYSEEESRRVRRNKRSKSNEGADGPVKNKKKGKKAGPPGPNGPPGPPGPPGPQGPPGIPGIPGIPGXXVMGPPGPPGPPGPQGPPGLQGPSGAADKAGXRENQPAVVHLQGQGSAIQVKNDLSGGVLNDWSRIXMNPKVFKLHPRSGELEVLVDGXYFIYSQVEVYYINFXDFASYEVVVDEKPFLQCXRSIEXGKXNYNXCYXAGVCLLKARQKIAVKMVHADISINMSKHXXFFGAIRLGEAPAS

SEQ ID NO: 8788 - protein, 147 aa, Homo sapiens
  MOD_RES (57)..(57): Selenocysteine
  MOD_RES (83)..(83): Selenocysteine
  MOD_RES (86)..(86): Selenocysteine
  MOD_RES (89)..(89): Selenocysteine
  MOD_RES (103)..(103): Selenocysteine
MGYPEVERRELLPAAAPRERGSQGCGCGGAPARAGEGNSCLLFLGFFGLSLALHLLXLCCYLELRSELRRERGAESRLGGSGXPGXSGXLSSLGGLDPDSPIXSHLGQPSPKQQPLEPGEAALHSDSQDGHQVSHLVGAAAAPSPRG

SEQ ID NO: 8789 - protein, 318 aa, Homo sapiens
  MOD_RES (17)..(17): Selenocysteine
  MOD_RES (42)..(42): Selenocysteine
  MOD_RES (63)..(63): Selenocysteine
  MOD_RES (76)..(76): Selenocysteine
  MOD_RES (78)..(78): Selenocysteine
  MOD_RES (94)..(94): Selenocysteine
  MOD_RES (108)..(108): Selenocysteine
  MOD_RES (111)..(111): Selenocysteine
  MOD_RES (113)..(113): Selenocysteine
  MOD_RES (129)..(129): Selenocysteine
  MOD_RES (131)..(131): Selenocysteine
  MOD_RES (138)..(138): Selenocysteine
  MOD_RES (151)..(151): Selenocysteine
  MOD_RES (204)..(204): Selenocysteine
  MOD_RES (219)..(219): Selenocysteine
  MOD_RES (232)..(232): Selenocysteine
  MOD_RES (246)..(246): Selenocysteine
  MOD_RES (251)..(251): Selenocysteine
  MOD_RES (256)..(256): Selenocysteine
  MOD_RES (261)..(261): Selenocysteine
  MOD_RES (276)..(276): Selenocysteine
  MOD_RES (290)..(290): Selenocysteine
  MOD_RES (294)..(294): Selenocysteine
  MOD_RES (299)..(299): Selenocysteine
  MOD_RES (303)..(303): Selenocysteine
MDCQENEYWDQWGRCVXCQRCGPGQELSKDCGYGEGGDAYCXACPPRRYKSSWGHHRCQSCIXCAVINRVQKVNCXAXSNAVCGDCLPRFYRKXRIGGLQDQECIPCXKQXPXSEVQCAFQLSLVEADXPXVPPQEAXLVALVSSLLVVFXLAFLGLFFLYCKQFFNRHCQREKLIIFSDPVPASLNLIPEFAGGLLQFEADKXAKEESLFPVPPSKEXSAESQVSENIFQXQPLNPILEDDCSSXSGFPXQESFXMASCXSESHSHWVHSPIECXELDLQKFSSSASYXGAEXLGGNXVESXGDRLELNVPFEVPSP

SEQ ID NO: 8790 - protein, 297 aa, Homo sapiens
  MOD_RES (17)..(17): Selenocysteine
  MOD_RES (42)..(42): Selenocysteine
  MOD_RES (63)..(63): Selenocysteine
  MOD_RES (76)..(76): Selenocysteine
  MOD_RES (78)..(78): Selenocysteine
  MOD_RES (94)..(94): Selenocysteine
  MOD_RES (108)..(108): Selenocysteine
  MOD_RES (111)..(111): Selenocysteine
  MOD_RES (113)..(113): Selenocysteine
  MOD_RES (129)..(129): Selenocysteine
  MOD_RES (131)..(131): Selenocysteine
  MOD_RES (138)..(138): Selenocysteine
  MOD_RES (151)..(151): Selenocysteine
  MOD_RES (183)..(183): Selenocysteine
  MOD_RES (198)..(198): Selenocysteine
  MOD_RES (211)..(211): Selenocysteine
  MOD_RES (225)..(225): Selenocysteine
  MOD_RES (230)..(230): Selenocysteine
  MOD_RES (235)..(235): Selenocysteine
  MOD_RES (240)..(240): Selenocysteine
  MOD_RES (255)..(255): Selenocysteine
  MOD_RES (269)..(269): Selenocysteine
  MOD_RES (273)..(273): Selenocysteine
  MOD_RES (278)..(278): Selenocysteine
  MOD_RES (282)..(282): Selenocysteine
MDCQENEYWDQWGRCVXCQRCGPGQELSKDCGYGEGGDAYCXACPPRRYKSSWGHHRCQSCIXCAVINRVQKVNCXAXSNAVCGDCLPRFYRKXRIGGLQDQECIPCXKQXPXSEVQCAFQLSLVEADXPXVPPQEAXLVALVSSLLVVFXLAFLGLFFLYCKQFFNRHCQRGGLLQFEADKXAKEESLFPVPPSKEXSAESQVSENIFQXQPLNPILEDDCSSXSGFPXQESFXMASCXSESHSHWVHSPIECXELDLQKFSSSASYXGAEXLGGNXVESXGDRLELNVPFEVPSP

SEQ ID NO: 8791 - protein, 448 aa, Homo sapiens
  MOD_RES (8)..(8): Selenocysteine
  MOD_RES (10)..(10): Selenocysteine
  MOD_RES (40)..(41): Selenocysteine
  MOD_RES (64)..(64): Selenocysteine
  MOD_RES (100)..(100): Selenocysteine
  MOD_RES (103)..(103): Selenocysteine
  MOD_RES (145)..(145): Selenocysteine
  MOD_RES (152)..(152): Selenocysteine
  MOD_RES (162)..(162): Selenocysteine
  MOD_RES (167)..(167): Selenocysteine
  MOD_RES (186)..(186): Selenocysteine
  MOD_RES (194)..(194): Selenocysteine
  MOD_RES (213)..(213): Selenocysteine
  MOD_RES (222)..(222): Selenocysteine
  MOD_RES (259)..(259): Selenocysteine
  MOD_RES (261)..(261): Selenocysteine
  MOD_RES (266)..(266): Selenocysteine
  MOD_RES (315)..(315): Selenocysteine
  MOD_RES (346)..(346): Selenocysteine
  MOD_RES (356)..(356): Selenocysteine
  MOD_RES (363)..(363): Selenocysteine
  MOD_RES (373)..(373): Selenocysteine
  MOD_RES (392)..(392): Selenocysteine
  MOD_RES (403)..(403): Selenocysteine
  MOD_RES (413)..(413): Selenocysteine
MAHVGDCXQXPWLPVLVVSLMCSARAEYSNCGENEYYNQXXGLCQECPPCGPGEEPYLSCGYGXKDEDYGCVPCPAEKFSKGGYQICRRHKDCEGFFRAXVLXPGDMENDAECGPCLPGYYMLENRPRNIYGMVCYSCLLAPPNXKECVGAXSGASANFPGXSGSSXLSPFQHAHKELSGQGHLAXALIIAMSXIFIMAIAIVLIIMFYILKXKPSAPACCXSHPGKSVEAQVSKDEEKKEAPDNVVMFSEKDEFEKLXAXPAKPXKSENDASSENEQLLSRSVDSDEEPAPDKQGSPELCLLSLVHLAREKSAXSNKSAGIQSRRKKILDVYANVCGVVEGLSPXELPFDCLEKXSRMLSSXYNSEKAVVKXWRHLAESFGLKRDEIGGMXDGMQLFDRISXAGYSIPELLXKLVQIERLDAVESLCADILEWAGVVPPASQPHAAS

SEQ ID NO: 8792 - protein, 480 aa, Homo sapiens
  MOD_RES (8)..(8): Selenocysteine
  MOD_RES (10)..(10): Selenocysteine
  MOD_RES (40)..(41): Selenocysteine
  MOD_RES (64)..(64): Selenocysteine
  MOD_RES (100)..(100): Selenocysteine
  MOD_RES (103)..(103): Selenocysteine
  MOD_RES (145)..(145): Selenocysteine
  MOD_RES (152)..(152): Selenocysteine
  MOD_RES (162)..(162): Selenocysteine
  MOD_RES (167)..(167): Selenocysteine
  MOD_RES (186)..(186): Selenocysteine
  MOD_RES (194)..(194): Selenocysteine
  MOD_RES (213)..(213): Selenocysteine
  MOD_RES (235)..(235): Selenocysteine
  MOD_RES (254)..(254): Selenocysteine
  MOD_RES (291)..(291): Selenocysteine
  MOD_RES (293)..(293): Selenocysteine
  MOD_RES (298)..(298): Selenocysteine
  MOD_RES (347)..(347): Selenocysteine
  MOD_RES (378)..(378): Selenocysteine
  MOD_RES (388)..(388): Selenocysteine
  MOD_RES (395)..(395): Selenocysteine
  MOD_RES (405)..(405): Selenocysteine
  MOD_RES (424)..(424): Selenocysteine
  MOD_RES (435)..(435): Selenocysteine
  MOD_RES (445)..(445): Selenocysteine
MAHVGDCXQXPWLPVLVVSLMCSARAEYSNCGENEYYNQXXGLCQECPPCGPGEEPYLSCGYGXKDEDYGCVPCPAEKFSKGGYQICRRHKDCEGFFRAXVLXPGDMENDAECGPCLPGYYMLENRPRNIYGMVCYSCLLAPPNXKECVGAXSGASANFPGXSGSSXLSPFQHAHKELSGQGHLAXALIIAMSXIFIMAIAIVLIIMFYILKXKPSAPGDGPHAPVPCFLDSPSXPPVGEPGCSLPPLSPACCXSHPGKSVEAQVSKDEEKKEAPDNVVMFSEKDEFEKLXAXPAKPXKSENDASSENEQLLSRSVDSDEEPAPDKQGSPELCLLSLVHLAREKSAXSNKSAGIQSRRKKILDVYANVCGVVEGLSPXELPFDCLEKXSRMLSSXYNSEKAVVKXWRHLAESFGLKRDEIGGMXDGMQLFDRISXAGYSIPELLXKLVQIERLDAVESLCADILEWAGVVPPASQPHAAS

SEQ ID NO: 8793 - protein, 205 aa, Homo sapiens
  MOD_RES (21)..(21): Selenocysteine
  MOD_RES (25)..(25): Selenocysteine
  MOD_RES (39)..(39): Selenocysteine
  MOD_RES (49)..(49): Selenocysteine
  MOD_RES (51)..(51): Selenocysteine
  MOD_RES (73)..(73): Selenocysteine
  MOD_RES (91)..(91): Selenocysteine
  MOD_RES (101)..(101): Selenocysteine
  MOD_RES (125)..(125): Selenocysteine
  MOD_RES (154)..(154): Selenocysteine
  MOD_RES (165)..(165): Selenocysteine
MASPDDPLRADHMVKEPVEDXDPSXLSFNMSDKYPIQDXELPKAEECDXIXLNCPRNSDMKNQGEENGFPDSXGDPLPEISKDNSCKENCXCSSCLLRAPXISDLLNDQDLLDVIRIKLDPCHPXVKNWRNFASKWGMSYDELCFLEQRPQSPXLEFLLRNSQRXVGQLMELCRLYHRADVEKVLRRWVDEEWPKRERGDPSRHF

SEQ ID NO: 8794 - protein, 215 aa, Homo sapiens
  MOD_RES (5)..(6): Selenocysteine
  MOD_RES (13)..(13): Selenocysteine
  MOD_RES (31)..(31): Selenocysteine
  MOD_RES (35)..(35): Selenocysteine
  MOD_RES (49)..(49): Selenocysteine
  MOD_RES (59)..(59): Selenocysteine
  MOD_RES (61)..(61): Selenocysteine
  MOD_RES (83)..(83): Selenocysteine
  MOD_RES (101)..(101): Selenocysteine
  MOD_RES (111)..(111): Selenocysteine
  MOD_RES (135)..(135): Selenocysteine
  MOD_RES (164)..(164): Selenocysteine
  MOD_RES (175)..(175): Selenocysteine
MGLRXXKQMGRGXKAPGHQEDHMVKEPVEDXDPSXLSFNMSDKYPIQDXELPKAEECDXIXLNCPRNSDMKNQGEENGFPDSXGDPLPEISKDNSCKENCXCSSCLLRAPXISDLLNDQDLLDVIRIKLDPCHPXVKNWRNFASKWGMSYDELCFLEQRPQSPXLEFLLRNSQRXVGQLMELCRLYHRADVEKVLRRWVDEEWPKRERGDPSRHF

SEQ ID NO: 8795 - protein, 84 aa, Homo sapiens
  MOD_RES (9)..(9): Selenocysteine
  MOD_RES (13)..(13): Selenocysteine
  MOD_RES (27)..(27): Selenocysteine
  MOD_RES (37)..(37): Selenocysteine
  MOD_RES (39)..(39): Selenocysteine
  MOD_RES (61)..(61): Selenocysteine
  MOD_RES (79)..(79): Selenocysteine
MVKEPVEDXDPSXLSFNMSDKYPIQDXELPKAEECDXIXLNCPRNSDMKNQGEENGFPDSXGDPLPEISKDNSCKENCXCSSCL

SEQ ID NO: 8796 - protein, 193 aa, Homo sapiens
  MOD_RES (9)..(9): Selenocysteine
  MOD_RES (13)..(13): Selenocysteine
  MOD_RES (27)..(27): Selenocysteine
  MOD_RES (37)..(37): Selenocysteine
  MOD_RES (39)..(39): Selenocysteine
  MOD_RES (61)..(61): Selenocysteine
  MOD_RES (79)..(79): Selenocysteine
  MOD_RES (89)..(89): Selenocysteine
  MOD_RES (113)..(113): Selenocysteine
  MOD_RES (142)..(142): Selenocysteine
  MOD_RES (153)..(153): Selenocysteine
MVKEPVEDXDPSXLSFNMSDKYPIQDXELPKAEECDXIXLNCPRNSDMKNQGEENGFPDSXGDPLPEISKDNSCKENCXCSSCLLRAPXISDLLNDQDLLDVIRIKLDPCHPXVKNWRNFASKWGMSYDELCFLEQRPQSPXLEFLLRNSQRXVGQLMELCRLYHRADVEKVLRRWVDEEWPKRERGDPSRHF

SEQ ID NO: 8797 - protein, 141 aa, Homo sapiens
  MOD_RES (8)..(8): Selenocysteine
  MOD_RES (10)..(10): Selenocysteine
  MOD_RES (18)..(18): Selenocysteine
  MOD_RES (40)..(40): Selenocysteine
  MOD_RES (55)..(55): Selenocysteine
  MOD_RES (58)..(58): Selenocysteine
  MOD_RES (65)..(65): Selenocysteine
  MOD_RES (74)..(74): Selenocysteine
  MOD_RES (91)..(91): Selenocysteine
  MOD_RES (97)..(97): Selenocysteine
  MOD_RES (132)..(132): Selenocysteine
MAESDWDXVXVLRKKGPXAAQAKSKQAILAAQRRGEDVEXSKKWAAGQNKQHSIXKNXAKLDREXEELHHDRVXLEVGKVIQQGRQSKGLXQKDLAXKINEKPQVIADYESGRAIPNNQVLGKIERAIDVGXRSARVLRAQ

SEQ ID NO: 8798 - protein, 139 aa, Homo sapiens
  MOD_RES (8)..(8): Selenocysteine
  MOD_RES (10)..(10): Selenocysteine
  MOD_RES (18)..(18): Selenocysteine
  MOD_RES (40)..(40): Selenocysteine
  MOD_RES (55)..(55): Selenocysteine
  MOD_RES (58)..(58): Selenocysteine
  MOD_RES (65)..(65): Selenocysteine
  MOD_RES (74)..(74): Selenocysteine
  MOD_RES (91)..(91): Selenocysteine
  MOD_RES (97)..(97): Selenocysteine
  MOD_RES (134)..(134): Selenocysteine
MAESDWDXVXVLRKKGPXAAQAKSKQAILAAQRRGEDVEXSKKWAAGQNKQHSIXKNXAKLDREXEELHHDRVXLEVGKVIQQGRQSKGLXQKDLAXKINEKPQVIADYESGRAIPNNQVLGKIERAIGECPSXLRRVR

SEQ ID NO: 8799 - protein, 148 aa, Homo sapiens
  MOD_RES (8)..(8): Selenocysteine
  MOD_RES (10)..(10): Selenocysteine
  MOD_RES (18)..(18): Selenocysteine
  MOD_RES (40)..(40): Selenocysteine
  MOD_RES (55)..(55): Selenocysteine
  MOD_RES (58)..(58): Selenocysteine
  MOD_RES (65)..(65): Selenocysteine
  MOD_RES (74)..(74): Selenocysteine
  MOD_RES (91)..(91): Selenocysteine
  MOD_RES (97)..(97): Selenocysteine
MAESDWDXVXVLRKKGPXAAQAKSKQAILAAQRRGEDVEXSKKWAAGQNKQHSIXKNXAKLDREXEELHHDRVXLEVGKVIQQGRQSKGLXQKDLAXKINEKPQVIADYESGRAIPNNQVLGKIERAIGLKLRGKDIGKPIEKGPRAK

SEQ ID NO: 8800 - protein, 212 aa, Homo sapiens
  MOD_RES (21)..(21): Selenocysteine
  MOD_RES (40)..(40): Selenocysteine
  MOD_RES (76)..(76): Selenocysteine
  MOD_RES (100)..(100): Selenocysteine
  MOD_RES (103)..(103): Selenocysteine
  MOD_RES (177)..(177): Selenocysteine
  MOD_RES (181)..(181): Selenocysteine
  MOD_RES (206)..(206): Selenocysteine
MDYLLMIFSLLFVACQGAPEXAVLGAELSAVGENGGEKPXPSPPWRLRRSKRCSCSSLMDKECVYFCHLDIIWVNXPEHVVPYGLGSPRSKRALENLLPXKAXDRENRCQCASQKDKKCWNFCQAGKELRAEDIMEKDWNNHKKGKDCSKLGKKCIYQQLVRGRKIRRSSEEHLRQXRSEXMRNSVKSSFHDPKLKGKPSRERYVXHNRAHW

SEQ ID NO: 8801 - protein, 178 aa, Homo sapiens
  MOD_RES (6)..(7): Selenocysteine
  MOD_RES (29)..(29): Selenocysteine
  MOD_RES (42)..(42): Selenocysteine
  MOD_RES (72)..(72): Selenocysteine
  MOD_RES (76)..(76): Selenocysteine
  MOD_RES (108)..(108): Selenocysteine
  MOD_RES (116)..(116): Selenocysteine
  MOD_RES (133)..(133): Selenocysteine
  MOD_RES (136)..(136): Selenocysteine
  MOD_RES (139)..(140): Selenocysteine
  MOD_RES (152)..(152): Selenocysteine
  MOD_RES (171)..(171): Selenocysteine
MVSVPXXWCSVALALLVALHEGKGQAAAXLEQPASSSHAQGXHLRLRRCSCSSWLDKECVYFCHLDIIWVNXPEQXAPYGLGNPPRRRRRSLPRRCQCSSARDPACAXFCLRRPWXEAGAVPSRKSPADVFQXGKXGAXXGELLQRLRDISXVKSLFAKRQQEAMREPRSXHSRWRKR

SEQ ID NO: 8802 - protein, 192 aa, Homo sapiens
  MOD_RES (12)..(12): Selenocysteine
  MOD_RES (14)..(14): Selenocysteine
  MOD_RES (38)..(38): Selenocysteine
  MOD_RES (49)..(49): Selenocysteine
  MOD_RES (57)..(57): Selenocysteine
  MOD_RES (65)..(65): Selenocysteine
  MOD_RES (69)..(69): Selenocysteine
  MOD_RES (98)..(98): Selenocysteine
  MOD_RES (101)..(101): Selenocysteine
  MOD_RES (120)..(120): Selenocysteine
  MOD_RES (124)..(124): Selenocysteine
  MOD_RES (174)..(174): Selenocysteine
  MOD_RES (176)..(176): Selenocysteine
  MOD_RES (186)..(186): Selenocysteine
MEPGLWLLFGLXVXSAAGFVPCSQSGDAGRRGVSQAPXAARSEGDCEEXVAGPGEEXVAGPGEGXVAPXALQGPSPGSPGQEQAAEGAPEHHRSRRCXCFXYKDKECVYYCHLDIIWINXPEQXVPYGLSNYRGSFRGKRSAGPLPGNLQLSHRPHLRCACVGRYDKACLHFCXQXLDVSRLKSRXNKASRL

SEQ ID NO: 8803 - protein, 224 aa, Homo sapiens
  MOD_RES (12)..(12): Selenocysteine
  MOD_RES (14)..(14): Selenocysteine
  MOD_RES (38)..(38): Selenocysteine
  MOD_RES (49)..(49): Selenocysteine
  MOD_RES (57)..(57): Selenocysteine
  MOD_RES (65)..(65): Selenocysteine
  MOD_RES (69)..(69): Selenocysteine
  MOD_RES (98)..(98): Selenocysteine
  MOD_RES (101)..(101): Selenocysteine
  MOD_RES (120)..(120): Selenocysteine
  MOD_RES (124)..(124): Selenocysteine
  MOD_RES (174)..(174): Selenocysteine
  MOD_RES (176)..(176): Selenocysteine
  MOD_RES (213)..(213): Selenocysteine
MEPGLWLLFGLXVXSAAGFVPCSQSGDAGRRGVSQAPXAARSEGDCEEXVAGPGEEXVAGPGEGXVAPXALQGPSPGSPGQEQAAEGAPEHHRSRRCXCFXYKDKECVYYCHLDIIWINXPEQXVPYGLSNYRGSFRGKRSAGPLPGNLQLSHRPHLRCACVGRYDKACLHFCXQXLDVSRQVEVKDQQSKQALDLHHPKLMPGSGLALAPSXCPRCLFQEGAP

SEQ ID NO: 8804 - protein, 238 aa, Homo sapiens
  MOD_RES (12)..(12): Selenocysteine
  MOD_RES (14)..(14): Selenocysteine
  MOD_RES (38)..(38): Selenocysteine
  MOD_RES (49)..(49): Selenocysteine
  MOD_RES (57)..(57): Selenocysteine
  MOD_RES (65)..(65): Selenocysteine
  MOD_RES (69)..(69): Selenocysteine
  MOD_RES (98)..(98): Selenocysteine
  MOD_RES (101)..(101): Selenocysteine
  MOD_RES (120)..(120): Selenocysteine
  MOD_RES (124)..(124): Selenocysteine
  MOD_RES (174)..(174): Selenocysteine
  MOD_RES (176)..(176): Selenocysteine
  MOD_RES (185)..(185): Selenocysteine
  MOD_RES (189)..(189): Selenocysteine
  MOD_RES (227)..(227): Selenocysteine
MEPGLWLLFGLXVXSAAGFVPCSQSGDAGRRGVSQAPXAARSEGDCEEXVAGPGEEXVAGPGEGXVAPXALQGPSPGSPGQEQAAEGAPEHHRSRRCXCFXYKDKECVYYCHLDIIWINXPEQXVPYGLSNYRGSFRGKRSAGPLPGNLQLSHRPHLRCACVGRYDKACLHFCXQXLDVSSNSRXAEKXDKEEEGKVEVKDQQSKQALDLHHPKLMPGSGLALAPSXCPRCLFQEGAP

SEQ ID NO: 8805 - protein, 219 aa, Homo sapiens
  MOD_RES (12)..(12): Selenocysteine
  MOD_RES (14)..(14): Selenocysteine
  MOD_RES (38)..(38): Selenocysteine
  MOD_RES (49)..(49): Selenocysteine
  MOD_RES (57)..(57): Selenocysteine
  MOD_RES (65)..(65): Selenocysteine
  MOD_RES (69)..(69): Selenocysteine
  MOD_RES (98)..(98): Selenocysteine
  MOD_RES (101)..(101): Selenocysteine
  MOD_RES (120)..(120): Selenocysteine
  MOD_RES (124)..(124): Selenocysteine
  MOD_RES (174)..(174): Selenocysteine
  MOD_RES (176)..(176): Selenocysteine
  MOD_RES (185)..(185): Selenocysteine
  MOD_RES (189)..(189): Selenocysteine
  MOD_RES (213)..(213): Selenocysteine
MEPGLWLLFGLXVXSAAGFVPCSQSGDAGRRGVSQAPXAARSEGDCEEXVAGPGEEXVAGPGEGXVAPXALQGPSPGSPGQEQAAEGAPEHHRSRRCXCFXYKDKECVYYCHLDIIWINXPEQXVPYGLSNYRGSFRGKRSAGPLPGNLQLSHRPHLRCACVGRYDKACLHFCXQXLDVSSNSRXAEKXDKEEEGKVRGANRGLCQRRLKSRXNKASRL

SEQ ID NO: 8806 - protein, 318 aa, Homo sapiens
  MOD_RES (3)..(3): Selenocysteine
  MOD_RES (28)..(28): Selenocysteine
  MOD_RES (38)..(39): Selenocysteine
  MOD_RES (43)..(43): Selenocysteine
  MOD_RES (50)..(51): Selenocysteine
  MOD_RES (55)..(55): Selenocysteine
  MOD_RES (73)..(73): Selenocysteine
  MOD_RES (76)..(76): Selenocysteine
  MOD_RES (84)..(84): Selenocysteine
  MOD_RES (89)..(89): Selenocysteine
  MOD_RES (100)..(100): Selenocysteine
  MOD_RES (162)..(162): Selenocysteine
  MOD_RES (167)..(167): Selenocysteine
  MOD_RES (170)..(170): Selenocysteine
  MOD_RES (198)..(198): Selenocysteine
  MOD_RES (222)..(222): Selenocysteine
  MOD_RES (250)..(250): Selenocysteine
  MOD_RES (287)..(287): Selenocysteine
  MOD_RES (294)..(294): Selenocysteine
  MOD_RES (308)..(308): Selenocysteine
MEXLCLRASFWLALVGCVISDNPERYSXNLSNHVDDFXXFRGXELSFLVXXHQPXNLVLPSNGSMHNYCPQQXKIXSAFKYINXVISCXIFIVGMVGNAXLLRIIYQNKCMRNGPNALIASLALGDLIYVVIDLPINVFKFYQDVKDWWLFGFYFCMPLVCXAIFYXLMXCEMLNRRNGSLRIALSEHLKQRREVAKXVFCLVVIFALCWFPLHLSRILKKXVYNEMDKNRCELLSFLLLMDYIGINLAXMNSCINPIALYFVSKKFKNCFQSCLCCCCYQSKSLMXSVPMNGXSIQWKNHDQNNHNXDRSSHKDSMN

SEQ ID NO: 8807 - protein, 427 aa, Homo sapiens
  MOD_RES (3)..(3): Selenocysteine
  MOD_RES (28)..(28): Selenocysteine
  MOD_RES (38)..(39): Selenocysteine
  MOD_RES (43)..(43): Selenocysteine
  MOD_RES (50)..(51): Selenocysteine
  MOD_RES (55)..(55): Selenocysteine
  MOD_RES (73)..(73): Selenocysteine
  MOD_RES (76)..(76): Selenocysteine
  MOD_RES (84)..(84): Selenocysteine
  MOD_RES (89)..(89): Selenocysteine
  MOD_RES (100)..(100): Selenocysteine
  MOD_RES (172)..(172): Selenocysteine
  MOD_RES (202)..(202): Selenocysteine
  MOD_RES (238)..(238): Selenocysteine
  MOD_RES (244)..(244): Selenocysteine
  MOD_RES (271)..(271): Selenocysteine
  MOD_RES (276)..(276): Selenocysteine
  MOD_RES (279)..(279): Selenocysteine
  MOD_RES (307)..(307): Selenocysteine
  MOD_RES (331)..(331): Selenocysteine
  MOD_RES (359)..(359): Selenocysteine
  MOD_RES (396)..(396): Selenocysteine
  MOD_RES (403)..(403): Selenocysteine
  MOD_RES (417)..(417): Selenocysteine
MEXLCLRASFWLALVGCVISDNPERYSXNLSNHVDDFXXFRGXELSFLVXXHQPXNLVLPSNGSMHNYCPQQXKIXSAFKYINXVISCXIFIVGMVGNAXLLRIIYQNKCMRNGPNALIASLALGDLIYVVIDLPINVFKLLAGRWPFDHNDFGVFLCKLFPFLQKSSVGIXVLNLCALSVDRYRAVASWSRVQGIGIPLVXAIEIVSIWILSFILAIPEAIGFVMVPFEYRGEQHKXCMLNAXSKFMEFYQDVKDWWLFGFYFCMPLVCXAIFYXLMXCEMLNRRNGSLRIALSEHLKQRREVAKXVFCLVVIFALCWFPLHLSRILKKXVYNEMDKNRCELLSFLLLMDYIGINLAXMNSCINPIALYFVSKKFKNCFQSCLCCCCYQSKSLMXSVPMNGXSIQWKNHDQNNHNXDRSSHKDSMN

SEQ ID NO: 8808 - protein, 187 aa, Homo sapiens
  MOD_RES (3)..(3): Selenocysteine
  MOD_RES (28)..(28): Selenocysteine
  MOD_RES (38)..(39): Selenocysteine
  MOD_RES (43)..(43): Selenocysteine
  MOD_RES (50)..(51): Selenocysteine
  MOD_RES (55)..(55): Selenocysteine
  MOD_RES (73)..(73): Selenocysteine
  MOD_RES (76)..(76): Selenocysteine
  MOD_RES (84)..(84): Selenocysteine
  MOD_RES (89)..(89): Selenocysteine
  MOD_RES (100)..(100): Selenocysteine
  MOD_RES (172)..(172): Selenocysteine
  MOD_RES (185)..(185): Selenocysteine
MEXLCLRASFWLALVGCVISDNPERYSXNLSNHVDDFXXFRGXELSFLVXXHQPXNLVLPSNGSMHNYCPQQXKIXSAFKYINXVISCXIFIVGMVGNAXLLRIIYQNKCMRNGPNALIASLALGDLIYVVIDLPINVFKLLAGRWPFDHNDFGVFLCKLFPFLQKSSVGIXVLNLCALSVDSSXKM

SEQ ID NO: 8809 - protein, 202 aa, Homo sapiens
  MOD_RES (13)..(13): Selenocysteine
  MOD_RES (19)..(19): Selenocysteine
  MOD_RES (46)..(46): Selenocysteine
  MOD_RES (51)..(51): Selenocysteine
  MOD_RES (54)..(54): Selenocysteine
  MOD_RES (82)..(82): Selenocysteine
  MOD_RES (106)..(106): Selenocysteine
  MOD_RES (134)..(134): Selenocysteine
  MOD_RES (171)..(171): Selenocysteine
  MOD_RES (178)..(178): Selenocysteine
  MOD_RES (192)..(192): Selenocysteine
MVPFEYRGEQHKXCMLNAXSKFMEFYQDVKDWWLFGFYFCMPLVCXAIFYXLMXCEMLNRRNGSLRIALSEHLKQRREVAKXVFCLVVIFALCWFPLHLSRILKKXVYNEMDKNRCELLSFLLLMDYIGINLAXMNSCINPIALYFVSKKFKNCFQSCLCCCCYQSKSLMXSVPMNGXSIQWKNHDQNNHNXDRSSHKDSMN

SEQ ID NO: 8810 - protein, 532 aa, Homo sapiens
  MOD_RES (5)..(5): Selenocysteine
  MOD_RES (12)..(12): Selenocysteine
  MOD_RES (83)..(83): Selenocysteine
  MOD_RES (127)..(127): Selenocysteine
  MOD_RES (132)..(132): Selenocysteine
  MOD_RES (137)..(137): Selenocysteine
  MOD_RES (140)..(140): Selenocysteine
  MOD_RES (142)..(142): Selenocysteine
  MOD_RES (167)..(167): Selenocysteine
  MOD_RES (174)..(174): Selenocysteine
  MOD_RES (189)..(189): Selenocysteine
  MOD_RES (195)..(195): Selenocysteine
  MOD_RES (211)..(211): Selenocysteine
  MOD_RES (278)..(278): Selenocysteine
  MOD_RES (308)..(308): Selenocysteine
  MOD_RES (334)..(334): Selenocysteine
  MOD_RES (353)..(353): Selenocysteine
  MOD_RES (361)..(361): Selenocysteine
  MOD_RES (379)..(379): Selenocysteine
  MOD_RES (384)..(384): Selenocysteine
  MOD_RES (387)..(387): Selenocysteine
  MOD_RES (414)..(414): Selenocysteine
  MOD_RES (438)..(438): Selenocysteine
MNKSXCLMAAEXPSKRWRLHCLAFSQRFVRAGPACSSREACSSPRAGWNPAGFRLPGRWSPFVALHLVCQIREALKLRSGHRXPSGAGSSMQPPPSLCGRALVALVLACGLSRIWGEERGFPPDRAXPLLQXAEIMXPPXKXLWPKGSNASLARSLAPAEVPKGDRXAGSPPRXISPPPCQGPIEIKEXFKYINXVVSCLVFVLGIIGNSXLLRIIYKNKCMRNGPNILIASLALGDLLHIVIDIPINVYKLLAEDWPFGAEMCKLVPFIQKASVGIXVLSLCALSIDRYRAVASWSRIKGIGVPKWXAVEIVLIWVVSVVLAVPEAIGFDIIXMDYKGSYLRICLLHPVQKXAFMQFYKXAKDWWLFSFYFCLPLAIXAFFYXLMXCEMLRKKSGMQIALNDHLKQRREVAKXVFCLVLVFALCWLPLHLSRILKLXLYNQNDPNRCELLSFLLVLDYIGINMASLNSCINPIALYLVSKRFKNCFKSCLCCWCQSFEEKQSLEEKQSCLKFKANDHGYDNFRSSNKYSSS

SEQ ID NO: 8811 - protein, 78 aa, Homo sapiens
  MOD_RES (37)..(37): Selenocysteine
  MOD_RES (42)..(42): Selenocysteine
  MOD_RES (47)..(47): Selenocysteine
  MOD_RES (50)..(50): Selenocysteine
  MOD_RES (52)..(52): Selenocysteine
  MOD_RES (77)..(77): Selenocysteine
MQPPPSLCGRALVALVLACGLSRIWGEERGFPPDRAXPLLQXAEIMXPPXKXLWPKGSNASLARSLAPAEVPKGDRXA

SEQ ID NO: 8812 - protein, 436 aa, Homo sapiens
  MOD_RES (37)..(37): Selenocysteine
  MOD_RES (42)..(42): Selenocysteine
  MOD_RES (47)..(47): Selenocysteine
  MOD_RES (50)..(50): Selenocysteine
  MOD_RES (52)..(52): Selenocysteine
  MOD_RES (77)..(77): Selenocysteine
  MOD_RES (84)..(84): Selenocysteine
  MOD_RES (99)..(99): Selenocysteine
  MOD_RES (105)..(105): Selenocysteine
  MOD_RES (121)..(121): Selenocysteine
  MOD_RES (188)..(188): Selenocysteine
  MOD_RES (218)..(218): Selenocysteine
  MOD_RES (244)..(244): Selenocysteine
  MOD_RES (263)..(263): Selenocysteine
  MOD_RES (271)..(271): Selenocysteine
  MOD_RES (289)..(289): Selenocysteine
  MOD_RES (294)..(294): Selenocysteine
  MOD_RES (297)..(297): Selenocysteine
  MOD_RES (324)..(324): Selenocysteine
  MOD_RES (348)..(348): Selenocysteine
  MOD_RES (420)..(420): Selenocysteine
  MOD_RES (426)..(426): Selenocysteine
MQPPPSLCGRALVALVLACGLSRIWGEERGFPPDRAXPLLQXAEIMXPPXKXLWPKGSNASLARSLAPAEVPKGDRXAGSPPRXISPPPCQGPIEIKEXFKYINXVVSCLVFVLGIIGNSXLLRIIYKNKCMRNGPNILIASLALGDLLHIVIDIPINVYKLLAEDWPFGAEMCKLVPFIQKASVGIXVLSLCALSIDRYRAVASWSRIKGIGVPKWXAVEIVLIWVVSVVLAVPEAIGFDIIXMDYKGSYLRICLLHPVQKXAFMQFYKXAKDWWLFSFYFCLPLAIXAFFYXLMXCEMLRKKSGMQIALNDHLKQRREVAKXVFCLVLVFALCWLPLHLSRILKLXLYNQNDPNRCELLSFLLVLDYIGINMASLNSCINPIALYLVSKRFKNCFKAGPHVGNKLVMLFSVNIECDGXVNQNPXMWPERKSNNN

SEQ ID NO: 8813 - protein, 442 aa, Homo sapiens
  MOD_RES (37)..(37): Selenocysteine
  MOD_RES (42)..(42): Selenocysteine
  MOD_RES (47)..(47): Selenocysteine
  MOD_RES (50)..(50): Selenocysteine
  MOD_RES (52)..(52): Selenocysteine
  MOD_RES (77)..(77): Selenocysteine
  MOD_RES (84)..(84): Selenocysteine
  MOD_RES (99)..(99): Selenocysteine
  MOD_RES (105)..(105): Selenocysteine
  MOD_RES (121)..(121): Selenocysteine
  MOD_RES (188)..(188): Selenocysteine
  MOD_RES (218)..(218): Selenocysteine
  MOD_RES (244)..(244): Selenocysteine
  MOD_RES (263)..(263): Selenocysteine
  MOD_RES (271)..(271): Selenocysteine
  MOD_RES (289)..(289): Selenocysteine
  MOD_RES (294)..(294): Selenocysteine
  MOD_RES (297)..(297): Selenocysteine
  MOD_RES (324)..(324): Selenocysteine
  MOD_RES (348)..(348): Selenocysteine
MQPPPSLCGRALVALVLACGLSRIWGEERGFPPDRAXPLLQXAEIMXPPXKXLWPKGSNASLARSLAPAEVPKGDRXAGSPPRXISPPPCQGPIEIKEXFKYINXVVSCLVFVLGIIGNSXLLRIIYKNKCMRNGPNILIASLALGDLLHIVIDIPINVYKLLAEDWPFGAEMCKLVPFIQKASVGIXVLSLCALSIDRYRAVASWSRIKGIGVPKWXAVEIVLIWVVSVVLAVPEAIGFDIIXMDYKGSYLRICLLHPVQKXAFMQFYKXAKDWWLFSFYFCLPLAIXAFFYXLMXCEMLRKKSGMQIALNDHLKQRREVAKXVFCLVLVFALCWLPLHLSRILKLXLYNQNDPNRCELLSFLLVLDYIGINMASLNSCINPIALYLVSKRFKNCFKSCLCCWCQSFEEKQSLEEKQSCLKFKANDHGYDNFRSSNKYSSS

SEQ ID NO: 8814 - protein, 119 aa, Homo sapiens
  MOD_RES (49)..(49): Selenocysteine
  MOD_RES (96)..(96): Selenocysteine
  MOD_RES (104)..(104): Selenocysteine
GSDNEEEDKEAAQLREERLRQYAEKKAKKPALVAKSSILLDVKPWDDEXDMAQLEACVRSIQLDGLVWGASKLVPVGYGIRKLQIQCVVEDDKVGXDLLEEEIXKFEEHSVDIAAFNKI

SEQ ID NO: 8815 - protein, 36 aa, Homo sapiens
MAQLEACVRSIQLDGLVWGASKLVPVGYGIRKLQIQ

SEQ ID NO: 8816 - protein, 35 aa, Homo sapiens
  MOD_RES (3)..(3): Selenocysteine
MAXNFLAHEKIWFDKFKYDDAERRFYEQMNGPVAG

SEQ ID NO: 8817 - protein, 39 aa, Homo sapiens
  MOD_RES (3)..(3): Selenocysteine
MAXNFLAHEKIWFDKFKYDDAERRFYEQMNGPVAGASRQ

SEQ ID NO: 8818 - protein, 63 aa, Homo sapiens
  MOD_RES (3)..(3): Selenocysteine
MAXNFLAHEKIWFDKFKYDDAERRFYEQMNGPVAGASRQENGASVILRDIARARENIQKSLAG

SEQ ID NO: 8819 - protein, 130 aa, Homo sapiens
  MOD_RES (3)..(3): Selenocysteine
  MOD_RES (73)..(73): Selenocysteine
  MOD_RES (125)..(125): Selenocysteine
  MOD_RES (129)..(129): Selenocysteine
MAXNFLAHEKIWFDKFKYDDAERRFYEQMNGPVAGASRQENGASVILRDIARARENIQKSLAGSSGPGASSGXSGDHGELVVRIASLEVENQSLRGVVQELQQAISKLEARLNVLEKSSPGHRAXAPQXQ

SEQ ID NO: 8820 - protein, 166 aa, Homo sapiens
  MOD_RES (3)..(3): Selenocysteine
  MOD_RES (73)..(73): Selenocysteine
  MOD_RES (125)..(125): Selenocysteine
  MOD_RES (129)..(129): Selenocysteine
  MOD_RES (147)..(147): Selenocysteine
MAXNFLAHEKIWFDKFKYDDAERRFYEQMNGPVAGASRQENGASVILRDIARARENIQKSLAGSSGPGASSGXSGDHGELVVRIASLEVENQSLRGVVQELQQAISKLEARLNVLEKSSPGHRAXAPQXQHVSPMRQVEPPAKKPAXPAEDDEDDDIDLFGSDNEE

SEQ ID NO: 8821 - protein, 168 aa, Homo sapiens
  MOD_RES (3)..(3): Selenocysteine
  MOD_RES (73)..(73): Selenocysteine
  MOD_RES (125)..(125): Selenocysteine
  MOD_RES (129)..(129): Selenocysteine
  MOD_RES (147)..(147): Selenocysteine
MAXNFLAHEKIWFDKFKYDDAERRFYEQMNGPVAGASRQENGASVILRDIARARENIQKSLAGSSGPGASSGXSGDHGELVVRIASLEVENQSLRGVVQELQQAISKLEARLNVLEKSSPGHRAXAPQXQHVSPMRQVEPPAKKPAXPAEDDEDDDIDLFGSDNEEED

SEQ ID NO: 8822 - protein, 199 aa, Homo sapiens
  MOD_RES (3)..(3): Selenocysteine
  MOD_RES (73)..(73): Selenocysteine
  MOD_RES (125)..(125): Selenocysteine
  MOD_RES (129)..(129): Selenocysteine
  MOD_RES (147)..(147): Selenocysteine
MAXNFLAHEKIWFDKFKYDDAERRFYEQMNGPVAGASRQENGASVILRDIARARENIQKSLAGSSGPGASSGXSGDHGELVVRIASLEVENQSLRGVVQELQQAISKLEARLNVLEKSSPGHRAXAPQXQHVSPMRQVEPPAKKPAXPAEDDEDDDIDLFGSDNEEEDKEAAQLREERLRQYAEKKAKKPALVAKSSIL

SEQ ID NO: 8823 - protein, 204 aa, Homo sapiens
  MOD_RES (3)..(3): Selenocysteine
  MOD_RES (73)..(73): Selenocysteine
  MOD_RES (125)..(125): Selenocysteine
  MOD_RES (129)..(129): Selenocysteine
  MOD_RES (147)..(147): Selenocysteine
MAXNFLAHEKIWFDKFKYDDAERRFYEQMNGPVAGASRQENGASVILRDIARARENIQKSLAGSSGPGASSGXSGDHGELVVRIASLEVENQSLRGVVQELQQAISKLEARLNVLEKSSPGHRAXAPQXQHVSPMRQVEPPAKKPAXPAEDDEDDDIDLFGSDNEEEDKEAAQLREERLRQYAEKKAKKPALVAKSSILLDVKP

SEQ ID NO: 8824 - protein, 261 aa, Homo sapiens
  MOD_RES (3)..(3): Selenocysteine
  MOD_RES (73)..(73): Selenocysteine
  MOD_RES (125)..(125): Selenocysteine
  MOD_RES (129)..(129): Selenocysteine
  MOD_RES (147)..(147): Selenocysteine
  MOD_RES (209)..(209): Selenocysteine
  MOD_RES (256)..(256): Selenocysteine
MAXNFLAHEKIWFDKFKYDDAERRFYEQMNGPVAGASRQENGASVILRDIARARENIQKSLAGSSGPGASSGXSGDHGELVVRIASLEVENQSLRGVVQELQQAISKLEARLNVLEKSSPGHRAXAPQXQHVSPMRQVEPPAKKPAXPAEDDEDDDIDLFGSDNEEEDKEAAQLREERLRQYAEKKAKKPALVAKSSILLDVKPWDDEXDMAQLEACVRSIQLDGLVWGASKLVPVGYGIRKLQIQCVVEDDKVGXDLLEE

SEQ ID NO: 8825 - protein, 281 aa, Homo sapiens
  MOD_RES (3)..(3): Selenocysteine
  MOD_RES (73)..(73): Selenocysteine
  MOD_RES (125)..(125): Selenocysteine
  MOD_RES (129)..(129): Selenocysteine
  MOD_RES (147)..(147): Selenocysteine
  MOD_RES (209)..(209): Selenocysteine
  MOD_RES (256)..(256): Selenocysteine
  MOD_RES (264)..(264): Selenocysteine
MAXNFLAHEKIWFDKFKYDDAERRFYEQMNGPVAGASRQENGASVILRDIARARENIQKSLAGSSGPGASSGXSGDHGELVVRIASLEVENQSLRGVVQELQQAISKLEARLNVLEKSSPGHRAXAPQXQHVSPMRQVEPPAKKPAXPAEDDEDDDIDLFGSDNEEEDKEAAQLREERLRQYAEKKAKKPALVAKSSILLDVKPWDDEXDMAQLEACVRSIQLDGLVWGASKLVPVGYGIRKLQIQCVVEDDKVGXDLLEEEIXKFEEHVQSVDIAAFNKI

SEQ ID NO: 8826 - protein, 140 aa, Homo sapiens
  MOD_RES (3)..(3): Selenocysteine
  MOD_RES (73)..(73): Selenocysteine
  MOD_RES (106)..(106): Selenocysteine
  MOD_RES (110)..(110): Selenocysteine
  MOD_RES (128)..(128): Selenocysteine
MAXNFLAHEKIWFDKFKYDDAERRFYEQMNGPVAGASRQENGASVILRDIARARENIQKSLAGSSGPGASSGXSGDHVVQELQQAISKLEARLNVLEKSSPGHRAXAPQXQHVSPMRQVEPPAKKPAXPAEDDEDDDIDL

SEQ ID NO: 8827 - protein, 262 aa, Homo sapiens
  MOD_RES (3)..(3): Selenocysteine
  MOD_RES (73)..(73): Selenocysteine
  MOD_RES (106)..(106): Selenocysteine
  MOD_RES (110)..(110): Selenocysteine
  MOD_RES (128)..(128): Selenocysteine
  MOD_RES (190)..(190): Selenocysteine
  MOD_RES (237)..(237): Selenocysteine
  MOD_RES (245)..(245): Selenocysteine
MAXNFLAHEKIWFDKFKYDDAERRFYEQMNGPVAGASRQENGASVILRDIARARENIQKSLAGSSGPGASSGXSGDHVVQELQQAISKLEARLNVLEKSSPGHRAXAPQXQHVSPMRQVEPPAKKPAXPAEDDEDDDIDLFGSDNEEEDKEAAQLREERLRQYAEKKAKKPALVAKSSILLDVKPWDDEXDMAQLEACVRSIQLDGLVWGASKLVPVGYGIRKLQIQCVVEDDKVGXDLLEEEIXKFEEHVQSVDIAAFNKI

SEQ ID NO: 8828 - protein, 106 aa, Homo sapiens
  MOD_RES (3)..(3): Selenocysteine
  MOD_RES (49)..(49): Selenocysteine
  MOD_RES (101)..(101): Selenocysteine
  MOD_RES (105)..(105): Selenocysteine
MAXNFLAHEKIWFDKFKYDDAERRFYEQMNGPVAGASRQSSGPGASSGXSGDHGELVVRIASLEVENQSLRGVVQELQQAISKLEARLNVLEKSSPGHRAXAPQXQ

SEQ ID NO: 8829 - protein, 187 aa, Homo sapiens
  MOD_RES (3)..(3): Selenocysteine
  MOD_RES (49)..(49): Selenocysteine
  MOD_RES (101)..(101): Selenocysteine
  MOD_RES (105)..(105): Selenocysteine
  MOD_RES (123)..(123): Selenocysteine
  MOD_RES (185)..(185): Selenocysteine
MAXNFLAHEKIWFDKFKYDDAERRFYEQMNGPVAGASRQSSGPGASSGXSGDHGELVVRIASLEVENQSLRGVVQELQQAISKLEARLNVLEKSSPGHRAXAPQXQHVSPMRQVEPPAKKPAXPAEDDEDDDIDLFGSDNEEEDKEAAQLREERLRQYAEKKAKKPALVAKSSILLDVKPWDDEXDM

SEQ ID NO: 8830 - protein, 257 aa, Homo sapiens
  MOD_RES (3)..(3): Selenocysteine
  MOD_RES (49)..(49): Selenocysteine
  MOD_RES (101)..(101): Selenocysteine
  MOD_RES (105)..(105): Selenocysteine
  MOD_RES (123)..(123): Selenocysteine
  MOD_RES (185)..(185): Selenocysteine
  MOD_RES (232)..(232): Selenocysteine
  MOD_RES (240)..(240): Selenocysteine
MAXNFLAHEKIWFDKFKYDDAERRFYEQMNGPVAGASRQSSGPGASSGXSGDHGELVVRIASLEVENQSLRGVVQELQQAISKLEARLNVLEKSSPGHRAXAPQXQHVSPMRQVEPPAKKPAXPAEDDEDDDIDLFGSDNEEEDKEAAQLREERLRQYAEKKAKKPALVAKSSILLDVKPWDDEXDMAQLEACVRSIQLDGLVWGASKLVPVGYGIRKLQIQCVVEDDKVGXDLLEEEIXKFEEHVQSVDIAAFNKI

SEQ ID NO: 8831 - protein, 238 aa, Homo sapiens
  MOD_RES (3)..(3): Selenocysteine
  MOD_RES (49)..(49): Selenocysteine
  MOD_RES (82)..(82): Selenocysteine
  MOD_RES (86)..(86): Selenocysteine
  MOD_RES (104)..(104): Selenocysteine
  MOD_RES (166)..(166): Selenocysteine
  MOD_RES (213)..(213): Selenocysteine
  MOD_RES (221)..(221): Selenocysteine
MAXNFLAHEKIWFDKFKYDDAERRFYEQMNGPVAGASRQSSGPGASSGXSGDHVVQELQQAISKLEARLNVLEKSSPGHRAXAPQXQHVSPMRQVEPPAKKPAXPAEDDEDDDIDLFGSDNEEEDKEAAQLREERLRQYAEKKAKKPALVAKSSILLDVKPWDDEXDMAQLEACVRSIQLDGLVWGASKLVPVGYGIRKLQIQCVVEDDKVGXDLLEEEIXKFEEHVQSVDIAAFNKI

SEQ ID NO: 8832 - protein, 99 aa, Homo sapiens
  MOD_RES (3)..(3): Selenocysteine
  MOD_RES (40)..(40): Selenocysteine
  MOD_RES (54)..(54): Selenocysteine
  MOD_RES (67)..(68): Selenocysteine
  MOD_RES (73)..(73): Selenocysteine
  MOD_RES (85)..(85): Selenocysteine
  MOD_RES (95)..(95): Selenocysteine
MAXNFLAHEKIWFDKFKYDDAERRFYEQMNGPVCALSSWXGWSGGLPSWCPWAXVSGSYRFSVWWRXXRWGQXCWRRRSPSLRSXCRVSISQLSXRSEA

SEQ ID NO: 8833 - protein, 697 aa, Homo sapiens
  MOD_RES (18)..(18): Selenocysteine
  MOD_RES (23)..(23): Selenocysteine
  MOD_RES (28)..(28): Selenocysteine
  MOD_RES (59)..(59): Selenocysteine
  MOD_RES (62)..(62): Selenocysteine
  MOD_RES (83)..(83): Selenocysteine
  MOD_RES (199)..(199): Selenocysteine
  MOD_RES (210)..(210): Selenocysteine
  MOD_RES (246)..(246): Selenocysteine
  MOD_RES (249)..(249): Selenocysteine
  MOD_RES (419)..(419): Selenocysteine
  MOD_RES (489)..(489): Selenocysteine
  MOD_RES (541)..(541): Selenocysteine
  MOD_RES (545)..(545): Selenocysteine
  MOD_RES (563)..(563): Selenocysteine
  MOD_RES (625)..(625): Selenocysteine
  MOD_RES (672)..(672): Selenocysteine
  MOD_RES (680)..(680): Selenocysteine
MEAPLGSILSPCPGRAAXGRAGXGRVGXGLRPPAVLQLCPLLAFYRCVRKMRSGKASCXLEXVWEDKHKYEEAERRFYEHEAXQAAASAQQLPAEGPAMNGPGQDDPEDADEAEAPDGGSRRDPRKSQDSRKPLQKKRKRSPKSGLGPADLALLGLSAERVWLDKSLFDQAESSYRQKLADVAAQAAWPPALAPWGLCXHGNQVACHHVXWGIWVNKSSFDQAERAFVEWSQALLLAPDGSRRQGXPNXGQQVAVPDLAHQPSPPVNGQPPLGSLQALVREVWLEKPRYDAAERGFYEALFDGHPPGKVRLQERAGLAEGARRGRRDRRGRNILGNKRAGLRRADGEAPSALPYCYFLQKDAEAPWLSKPAYDSAECRHHAAEALRVAWCLEAASLSHRPGPRSGLSVSSLRPNRKMAXNFLAHEKIWFDKFKYDDAERRFYEQMNGPVAGASRQENGASVILRDIARARENIQKSLAGSSGPGASSGXSGDHGELVVRIASLEVENQSLRGVVQELQQAISKLEARLNVLEKSSPGHRAXAPQXQHVSPMRQVEPPAKKPAXPAEDDEDDDIDLFGSDNEEEDKEAAQLREERLRQYAEKKAKKPALVAKSSILLDVKPWDDEXDMAQLEACVRSIQLDGLVWGASKLVPVGYGIRKLQIQCVVEDDKVGXDLLEEEIXKFEEHVQSVDIAAFNKI

SEQ ID NO: 8834 - protein, 137 aa, Homo sapiens
  MOD_RES (6)..(6): Selenocysteine
  MOD_RES (19)..(19): Selenocysteine
  MOD_RES (89)..(89): Selenocysteine
MLPACXRSQERPASRKMAXNFLAHEKIWFDKFKYDDAERRFYEQMNGPVAGASRQENGASVILRDIARARENIQKSLAGSSGPGASSGXSGDHGELVVRIASLEVENQSLRGVVQELQQAISKLEARLNVLEKSSPG

SEQ ID NO: 8835 - protein, 21 aa, Homo sapiens
  MOD_RES (9)..(9): Selenocysteine
  MOD_RES (12)..(12): Selenocysteine
MRSGKASCXLEXVWEDKHKYE

SEQ ID NO: 8836 - protein, 31 aa, Homo sapiens
  MOD_RES (9)..(9): Selenocysteine
  MOD_RES (12)..(12): Selenocysteine
MRSGKASCXLEXVWEDKHKYEEAERRFYEHE

SEQ ID NO: 8837 - protein, 37 aa, Homo sapiens
  MOD_RES (9)..(9): Selenocysteine
  MOD_RES (12)..(12): Selenocysteine
  MOD_RES (33)..(33): Selenocysteine
MRSGKASCXLEXVWEDKHKYEEAERRFYEHEAXQAAA

SEQ ID NO: 8838 - protein, 49 aa, Homo sapiens
  MOD_RES (9)..(9): Selenocysteine
  MOD_RES (12)..(12): Selenocysteine
  MOD_RES (33)..(33): Selenocysteine
MRSGKASCXLEXVWEDKHKYEEAERRFYEHEAXQAAASAQQLPAEGPAM

SEQ ID NO: 8839 - protein, 53 aa, Homo sapiens
  MOD_RES (9)..(9): Selenocysteine
  MOD_RES (12)..(12): Selenocysteine
  MOD_RES (33)..(33): Selenocysteine
MRSGKASCXLEXVWEDKHKYEEAERRFYEHEAXQAAASAQQLPAEGPAMNGPG

SEQ ID NO: 8840 - protein, 63 aa, Homo sapiens
  MOD_RES (9)..(9): Selenocysteine
  MOD_RES (12)..(12): Selenocysteine
  MOD_RES (33)..(33): Selenocysteine
MRSGKASCXLEXVWEDKHKYEEAERRFYEHEAXQAAASAQQLPAEGPAMNGPGQDDPEDADEA

SEQ ID NO: 8841 - protein, 68 aa, Homo sapiens
  MOD_RES (9)..(9): Selenocysteine
  MOD_RES (12)..(12): Selenocysteine
  MOD_RES (33)..(33): Selenocysteine
MRSGKASCXLEXVWEDKHKYEEAERRFYEHEAXQAAASAQQLPAEGPAMNGPGQDDPEDADEAEAPDG

SEQ ID NO: 8842 - protein, 81 aa, Homo sapiens
  MOD_RES (9)..(9): Selenocysteine
  MOD_RES (12)..(12): Selenocysteine
  MOD_RES (33)..(33): Selenocysteine
MRSGKASCXLEXVWEDKHKYEEAERRFYEHEAXQAAASAQQLPAEGPAMNGPGQDDPEDADEAEAPDGGSRRDPRKSQDSR

SEQ ID NO: 8843 - protein, 84 aa, Homo sapiens
  MOD_RES (9)..(9): Selenocysteine
  MOD_RES (12)..(12): Selenocysteine
  MOD_RES (33)..(33): Selenocysteine
MRSGKASCXLEXVWEDKHKYEEAERRFYEHEAXQAAASAQQLPAEGPAMNGPGQDDPEDADEAEAPDGGSRRDPRKSQDSRKPL

SEQ ID NO: 8844 - protein, 129 aa, Homo sapiens
  MOD_RES (9)..(9): Selenocysteine
  MOD_RES (12)..(12): Selenocysteine
  MOD_RES (33)..(33): Selenocysteine
MRSGKASCXLEXVWEDKHKYEEAERRFYEHEAXQAAASAQQLPAEGPAMNGPGQDDPEDADEAEAPDGGSRRDPRKSQDSRKPLQKKRKRSPKSGLGPADLALLGLSAERVWLDKSLFDQAESSYRQKL

SEQ ID NO: 8845 - protein, 146 aa, Homo sapiens
  MOD_RES (9)..(9): Selenocysteine
  MOD_RES (12)..(12): Selenocysteine
  MOD_RES (33)..(33): Selenocysteine
MRSGKASCXLEXVWEDKHKYEEAERRFYEHEAXQAAASAQQLPAEGPAMNGPGQDDPEDADEAEAPDGGSRRDPRKSQDSRKPLQKKRKRSPKSGLGPADLALLGLSAERVWLDKSLFDQAESSYRQKLADVAAQAAWPPALAPWG

SEQ ID NO: 8846 - protein, 157 aa, Homo sapiens
  MOD_RES (9)..(9): Selenocysteine
  MOD_RES (12)..(12): Selenocysteine
  MOD_RES (33)..(33): Selenocysteine
  MOD_RES (149)..(149): Selenocysteine
MRSGKASCXLEXVWEDKHKYEEAERRFYEHEAXQAAASAQQLPAEGPAMNGPGQDDPEDADEAEAPDGGSRRDPRKSQDSRKPLQKKRKRSPKSGLGPADLALLGLSAERVWLDKSLFDQAESSYRQKLADVAAQAAWPPALAPWGLCXHGNQVACH

SEQ ID NO: 8847 - protein, 179 aa, Homo sapiens
  MOD_RES (9)..(9): Selenocysteine
  MOD_RES (12)..(12): Selenocysteine
  MOD_RES (33)..(33): Selenocysteine
  MOD_RES (149)..(149): Selenocysteine
  MOD_RES (160)..(160): Selenocysteine
MRSGKASCXLEXVWEDKHKYEEAERRFYEHEAXQAAASAQQLPAEGPAMNGPGQDDPEDADEAEAPDGGSRRDPRKSQDSRKPLQKKRKRSPKSGLGPADLALLGLSAERVWLDKSLFDQAESSYRQKLADVAAQAAWPPALAPWGLCXHGNQVACHHVXWGIWVNKSSFDQAERAFVE

SEQ ID NO: 8848 - protein, 181 aa, Homo sapiens
  MOD_RES (9)..(9): Selenocysteine
  MOD_RES (12)..(12): Selenocysteine
  MOD_RES (33)..(33): Selenocysteine
  MOD_RES (149)..(149): Selenocysteine
  MOD_RES (160)..(160): Selenocysteine
MRSGKASCXLEXVWEDKHKYEEAERRFYEHEAXQAAASAQQLPAEGPAMNGPGQDDPEDADEAEAPDGGSRRDPRKSQDSRKPLQKKRKRSPKSGLGPADLALLGLSAERVWLDKSLFDQAESSYRQKLADVAAQAAWPPALAPWGLCXHGNQVACHHVXWGIWVNKSSFDQAERAFVEWS

SEQ ID NO: 8849 - protein, 190 aa, Homo sapiens
  MOD_RES (9)..(9): Selenocysteine
  MOD_RES (12)..(12): Selenocysteine
  MOD_RES (33)..(33): Selenocysteine
  MOD_RES (149)..(149): Selenocysteine
  MOD_RES (160)..(160): Selenocysteine
MRSGKASCXLEXVWEDKHKYEEAERRFYEHEAXQAAASAQQLPAEGPAMNGPGQDDPEDADEAEAPDGGSRRDPRKSQDSRKPLQKKRKRSPKSGLGPADLALLGLSAERVWLDKSLFDQAESSYRQKLADVAAQAAWPPALAPWGLCXHGNQVACHHVXWGIWVNKSSFDQAERAFVEWSQALLLAPDG

SEQ ID NO: 8850 - protein, 257 aa, Homo sapiens
  MOD_RES (9)..(9): Selenocysteine
  MOD_RES (12)..(12): Selenocysteine
  MOD_RES (33)..(33): Selenocysteine
  MOD_RES (149)..(149): Selenocysteine
  MOD_RES (160)..(160): Selenocysteine
  MOD_RES (196)..(196): Selenocysteine
  MOD_RES (199)..(199): Selenocysteine
MRSGKASCXLEXVWEDKHKYEEAERRFYEHEAXQAAASAQQLPAEGPAMNGPGQDDPEDADEAEAPDGGSRRDPRKSQDSRKPLQKKRKRSPKSGLGPADLALLGLSAERVWLDKSLFDQAESSYRQKLADVAAQAAWPPALAPWGLCXHGNQVACHHVXWGIWVNKSSFDQAERAFVEWSQALLLAPDGSRRQGXPNXGQQVAVPDLAHQPSPPVNGQPPLGSLQALVREVWLEKPRYDAAERGFYEALFDGHPPG

SEQ ID NO: 8851 - protein, 300 aa, Homo sapiens
  MOD_RES (9)..(9): Selenocysteine
  MOD_RES (12)..(12): Selenocysteine
  MOD_RES (33)..(33): Selenocysteine
  MOD_RES (149)..(149): Selenocysteine
  MOD_RES (160)..(160): Selenocysteine
  MOD_RES (196)..(196): Selenocysteine
  MOD_RES (199)..(199): Selenocysteine
MRSGKASCXLEXVWEDKHKYEEAERRFYEHEAXQAAASAQQLPAEGPAMNGPGQDDPEDADEAEAPDGGSRRDPRKSQDSRKPLQKKRKRSPKSGLGPADLALLGLSAERVWLDKSLFDQAESSYRQKLADVAAQAAWPPALAPWGLCXHGNQVACHHVXWGIWVNKSSFDQAERAFVEWSQALLLAPDGSRRQGXPNXGQQVAVPDLAHQPSPPVNGQPPLGSLQALVREVWLEKPRYDAAERGFYEALFDGHPPGKVRLQERAGLAEGARRGRRDRRGRNILGNKRAGLRRADGEAPS

SEQ ID NO: 8852 - protein, 631 aa, Homo sapiens
  MOD_RES (9)..(9): Selenocysteine
  MOD_RES (12)..(12): Selenocysteine
  MOD_RES (33)..(33): Selenocysteine
  MOD_RES (149)..(149): Selenocysteine
  MOD_RES (160)..(160): Selenocysteine
  MOD_RES (196)..(196): Selenocysteine
  MOD_RES (199)..(199): Selenocysteine
  MOD_RES (369)..(369): Selenocysteine
  MOD_RES (439)..(439): Selenocysteine
  MOD_RES (491)..(491): Selenocysteine
  MOD_RES (495)..(495): Selenocysteine
  MOD_RES (513)..(513): Selenocysteine
  MOD_RES (575)..(575): Selenocysteine
MRSGKASCXLEXVWEDKHKYEEAERRFYEHEAXQAAASAQQLPAEGPAMNGPGQDDPEDADEAEAPDGGSRRDPRKSQDSRKPLQKKRKRSPKSGLGPADLALLGLSAERVWLDKSLFDQAESSYRQKLADVAAQAAWPPALAPWGLCXHGNQVACHHVXWGIWVNKSSFDQAERAFVEWSQALLLAPDGSRRQGXPNXGQQVAVPDLAHQPSPPVNGQPPLGSLQALVREVWLEKPRYDAAERGFYEALFDGHPPGKVRLQERAGLAEGARRGRRDRRGRNILGNKRAGLRRADGEAPSALPYCYFLQKDAEAPWLSKPAYDSAECRHHAAEALRVAWCLEAASLSHRPGPRSGLSVSSLRPNRKMAXNFLAHEKIWFDKFKYDDAERRFYEQMNGPVAGASRQENGASVILRDIARARENIQKSLAGSSGPGASSGXSGDHGELVVRIASLEVENQSLRGVVQELQQAISKLEARLNVLEKSSPGHRAXAPQXQHVSPMRQVEPPAKKPAXPAEDDEDDDIDLFGSDNEEEDKEAAQLREERLRQYAEKKAKKPALVAKSSILLDVKPWDDEXDMAQLEACVRSIQLDGLVWGASKLVPVGYGIRKLQIQCVGGRQGGDRLAGGGDHQV

SEQ ID NO: 8853 - protein, 647 aa, Homo sapiens
  MOD_RES (9)..(9): Selenocysteine
  MOD_RES (12)..(12): Selenocysteine
  MOD_RES (33)..(33): Selenocysteine
  MOD_RES (149)..(149): Selenocysteine
  MOD_RES (160)..(160): Selenocysteine
  MOD_RES (196)..(196): Selenocysteine
  MOD_RES (199)..(199): Selenocysteine
  MOD_RES (369)..(369): Selenocysteine
  MOD_RES (439)..(439): Selenocysteine
  MOD_RES (491)..(491): Selenocysteine
  MOD_RES (495)..(495): Selenocysteine
  MOD_RES (513)..(513): Selenocysteine
  MOD_RES (575)..(575): Selenocysteine
  MOD_RES (622)..(622): Selenocysteine
  MOD_RES (630)..(630): Selenocysteine
MRSGKASCXLEXVWEDKHKYEEAERRFYEHEAXQAAASAQQLPAEGPAMNGPGQDDPEDADEAEAPDGGSRRDPRKSQDSRKPLQKKRKRSPKSGLGPADLALLGLSAERVWLDKSLFDQAESSYRQKLADVAAQAAWPPALAPWGLCXHGNQVACHHVXWGIWVNKSSFDQAERAFVEWSQALLLAPDGSRRQGXPNXGQQVAVPDLAHQPSPPVNGQPPLGSLQALVREVWLEKPRYDAAERGFYEALFDGHPPGKVRLQERAGLAEGARRGRRDRRGRNILGNKRAGLRRADGEAPSALPYCYFLQKDAEAPWLSKPAYDSAECRHHAAEALRVAWCLEAASLSHRPGPRSGLSVSSLRPNRKMAXNFLAHEKIWFDKFKYDDAERRFYEQMNGPVAGASRQENGASVILRDIARARENIQKSLAGSSGPGASSGXSGDHGELVVRIASLEVENQSLRGVVQELQQAISKLEARLNVLEKSSPGHRAXAPQXQHVSPMRQVEPPAKKPAXPAEDDEDDDIDLFGSDNEEEDKEAAQLREERLRQYAEKKAKKPALVAKSSILLDVKPWDDEXDMAQLEACVRSIQLDGLVWGASKLVPVGYGIRKLQIQCVVEDDKVGXDLLEEEIXKFEEHVQSVDIAAFNKI

SEQ ID NO: 8854 - protein, 109 aa, Homo sapiens
PGKVRLQERAGLAEGARRGRRDRRGRNILGNKRAGLRRADGEAPSALPYCYFLQKDAEAPWLSKPAYDSAECRHHAAEALRVAWCLEAASLSHRPGPRSGLSVSSLRPK

SEQ ID NO: 8855 - protein, 156 aa, Homo sapiens
  MOD_RES (1)..(1): Any amino acid
  MOD_RES (22)..(22): Selenocysteine
  MOD_RES (84)..(84): Selenocysteine
  MOD_RES (131)..(131): Selenocysteine
  MOD_RES (139)..(139): Selenocysteine
XPLWQHVSPMRQVEPPAKKPAXPAEDDEDDDIDLFGSDNEEEDKEAAQLREERLRQYAEKKAKKPALVAKSSILLDVKPWDDEXDMAQLEACVRSIQLDGLVWGASKLVPVGYGIRKLQIQCVVEDDKVGXDLLEEEIXKFEEHVQSVDIAAFNKI

SEQ ID NO: 8856 - protein, 210 aa, Homo sapiens
  MOD_RES (1)..(1): Any amino acid
  MOD_RES (83)..(83): Selenocysteine
  MOD_RES (153)..(153): Selenocysteine
  MOD_RES (205)..(205): Selenocysteine
  MOD_RES (209)..(209): Selenocysteine
XRAGLRRADGEAPSALPYCYFLQKDAEAPWLSKPAYDSAECRHHAAEALRVAWCLEAASLSHRPGPRSGLSVSSLRPNRKMAXNFLAHEKIWFDKFKYDDAERRFYEQMNGPVAGASRQENGASVILRDIARARENIQKSLAGSSGPGASSGXSGDHGELVVRIASLEVENQSLRGVVQELQQAISKLEARLNVLEKSSPGHRAXAPQXQ

SEQ ID NO: 8857 - protein, 139 aa, Homo sapiens
  MOD_RES (35)..(35): Selenocysteine
  MOD_RES (42)..(42): Selenocysteine
  MOD_RES (45)..(46): Selenocysteine
  MOD_RES (64)..(64): Selenocysteine
  MOD_RES (80)..(80): Selenocysteine
  MOD_RES (93)..(93): Selenocysteine
  MOD_RES (109)..(109): Selenocysteine
  MOD_RES (114)..(114): Selenocysteine
  MOD_RES (135)..(135): Selenocysteine
MAAAAELSLLEKSLGLSKGNKYSAQGERQIPVLQXNNGPSLXGLXXIAAHLVKQANKEYLLGSXAEEKAIVQQWLEYRVXQVDGHSSKNDIHXLLKDLNSYLEDKVYLXGYNFXLADILLYYGLHRFIIRKLRHXEVGN

SEQ ID NO: 8858 - protein, 174 aa, Homo sapiens
  MOD_RES (35)..(35): Selenocysteine
  MOD_RES (42)..(42): Selenocysteine
  MOD_RES (45)..(46): Selenocysteine
  MOD_RES (64)..(64): Selenocysteine
  MOD_RES (80)..(80): Selenocysteine
  MOD_RES (93)..(93): Selenocysteine
  MOD_RES (109)..(109): Selenocysteine
  MOD_RES (114)..(114): Selenocysteine
  MOD_RES (132)..(132): Selenocysteine
  MOD_RES (171)..(171): Selenocysteine
MAAAAELSLLEKSLGLSKGNKYSAQGERQIPVLQXNNGPSLXGLXXIAAHLVKQANKEYLLGSXAEEKAIVQQWLEYRVXQVDGHSSKNDIHXLLKDLNSYLEDKVYLXGYNFXLADILLYYGLHRFIVDLXVQEKEKYLNVSRWFCHIQHYPGIRQHLSSVVFIKNRLYXNSH

SEQ ID NO: 8859 - protein, 150 aa, Homo sapiens
  MOD_RES (35)..(35): Selenocysteine
  MOD_RES (42)..(42): Selenocysteine
  MOD_RES (45)..(46): Selenocysteine
  MOD_RES (64)..(64): Selenocysteine
  MOD_RES (80)..(80): Selenocysteine
  MOD_RES (93)..(93): Selenocysteine
  MOD_RES (109)..(109): Selenocysteine
  MOD_RES (114)..(114): Selenocysteine
  MOD_RES (135)..(135): Selenocysteine
  MOD_RES (148)..(148): Selenocysteine
MAAAAELSLLEKSLGLSKGNKYSAQGERQIPVLQXNNGPSLXGLXXIAAHLVKQANKEYLLGSXAEEKAIVQQWLEYRVXQVDGHSSKNDIHXLLKDLNSYLEDKVYLXGYNFXLADILLYYGLHRFIVSICIVXGFFSVVLRMIFKXLS

SEQ ID NO: 8860 - protein, 94 aa, Homo sapiens
  MOD_RES (5)..(5): Selenocysteine
  MOD_RES (31)..(32): Selenocysteine
  MOD_RES (47)..(47): Selenocysteine
  MOD_RES (54)..(54): Selenocysteine
  MOD_RES (57)..(58): Selenocysteine
  MOD_RES (76)..(76): Selenocysteine
  MOD_RES (92)..(92): Selenocysteine
MAERXPKESWPNLGDSGKAFLKPWIISLSVXXHSECGKHHKIPVLQXNNGPSLXGLXXIAAHLVKQANKEYLLGSXAEEKAIVQQWLEYRVXQV

SEQ ID NO: 8861 - protein, 56 aa, Homo sapiens
  MOD_RES (12)..(12): Selenocysteine
  MOD_RES (18)..(18): Selenocysteine
  MOD_RES (54)..(54): Selenocysteine
VDGHSSKNDIHXLLKVLXLSPRLECNGVILAHCNLRLLGSSDSRASASRVNGIXGS

SEQ ID NO: 8862 - protein, 136 aa, Homo sapiens
  MOD_RES (1)..(1): Any amino acid
  MOD_RES (22)..(22): Selenocysteine
  MOD_RES (29)..(29): Selenocysteine
  MOD_RES (32)..(33): Selenocysteine
  MOD_RES (51)..(51): Selenocysteine
  MOD_RES (67)..(67): Selenocysteine
  MOD_RES (80)..(80): Selenocysteine
  MOD_RES (96)..(96): Selenocysteine
  MOD_RES (101)..(101): Selenocysteine
  MOD_RES (130)..(130): Selenocysteine
XGLSKGNKYSAQGERQIPVLQXNNGPSLXGLXXIAAHLVKQANKEYLLGSXAEEKAIVQQWLEYRVXQVDGHSSKNDIHXLLKDLNSYLEDKVYLXGYNFXLADILLYYGLHRFIANHDCFVYKKMRIVXGPHVCL

SEQ ID NO: 8863 - protein, 151 aa, Homo sapiens
  MOD_RES (35)..(35): Selenocysteine
  MOD_RES (42)..(42): Selenocysteine
  MOD_RES (45)..(46): Selenocysteine
  MOD_RES (64)..(64): Selenocysteine
  MOD_RES (80)..(80): Selenocysteine
  MOD_RES (93)..(93): Selenocysteine
  MOD_RES (109)..(109): Selenocysteine
  MOD_RES (114)..(114): Selenocysteine
  MOD_RES (140)..(140): Selenocysteine
MAAAAELSLLEKSLGLSKGNKYSAQGERQIPVLQXNNGPSLXGLXXIAAHLVKQANKEYLLGSXAEEKAIVQQWLEYRVXQVDGHSSKNDIHXLLKDLNSYLEDKVYLXGYNFXLADILLYYGLHRFIILEKFIQGFWIXDQLFKVKLVIL

SEQ ID NO: 8864 - protein, 27 aa, Homo sapiens
  MOD_RES (8)..(8): Selenocysteine
  MOD_RES (11)..(11): Selenocysteine
  MOD_RES (20)..(20): Selenocysteine
  MOD_RES (23)..(23): Selenocysteine
  MOD_RES (25)..(25): Selenocysteine
  MOD_RES (27)..(27): Selenocysteine
MLKALFLXMLXLALVKSQDXEEXIXYX

SEQ ID NO: 8865 - protein, 52 aa, Homo sapiens
  MOD_RES (8)..(8): Selenocysteine
  MOD_RES (11)..(11): Selenocysteine
  MOD_RES (20)..(20): Selenocysteine
  MOD_RES (23)..(23): Selenocysteine
  MOD_RES (25)..(25): Selenocysteine
  MOD_RES (27)..(27): Selenocysteine
  MOD_RES (30)..(30): Selenocysteine
MLKALFLXMLXLALVKSQDXEEXIXYXQCXDGYEWDPVRQQCKDIDECDIVP

SEQ ID NO: 8866 - protein, 62 aa, Homo sapiens
  MOD_RES (8)..(8): Selenocysteine
  MOD_RES (11)..(11): Selenocysteine
  MOD_RES (20)..(20): Selenocysteine
  MOD_RES (23)..(23): Selenocysteine
  MOD_RES (25)..(25): Selenocysteine
  MOD_RES (27)..(27): Selenocysteine
  MOD_RES (30)..(30): Selenocysteine
MLKALFLXMLXLALVKSQDXEEXIXYXQCXDGYEWDPVRQQCKDIDECDIVPDACKGGMKCV

SEQ ID NO: 8867 - protein, 87 aa, Homo sapiens
  MOD_RES (8)..(8): Selenocysteine
  MOD_RES (11)..(11): Selenocysteine
  MOD_RES (20)..(20): Selenocysteine
  MOD_RES (23)..(23): Selenocysteine
  MOD_RES (25)..(25): Selenocysteine
  MOD_RES (27)..(27): Selenocysteine
  MOD_RES (30)..(30): Selenocysteine
  MOD_RES (74)..(74): Selenocysteine
MLKALFLXMLXLALVKSQDXEEXIXYXQCXDGYEWDPVRQQCKDIDECDIVPDACKGGMKCVNHYGGYLCLPKXAQIIVNNEQPQQE

SEQ ID NO: 8868 - protein, 106 aa, Homo sapiens
  MOD_RES (8)..(8): Selenocysteine
  MOD_RES (11)..(11): Selenocysteine
  MOD_RES (20)..(20): Selenocysteine
  MOD_RES (23)..(23): Selenocysteine
  MOD_RES (25)..(25): Selenocysteine
  MOD_RES (27)..(27): Selenocysteine
  MOD_RES (30)..(30): Selenocysteine
  MOD_RES (74)..(74): Selenocysteine
  MOD_RES (88)..(88): Selenocysteine
  MOD_RES (94)..(94): Selenocysteine
  MOD_RES (98)..(99): Selenocysteine
MLKALFLXMLXLALVKSQDXEEXIXYXQCXDGYEWDPVRQQCKDIDECDIVPDACKGGMKCVNHYGGYLCLPKXAQIIVNNEQPQQEXQPAEGXSGAXXGVVAASS

SEQ ID NO: 8869 - protein, 119 aa, Homo sapiens
  MOD_RES (8)..(8): Selenocysteine
  MOD_RES (11)..(11): Selenocysteine
  MOD_RES (20)..(20): Selenocysteine
  MOD_RES (23)..(23): Selenocysteine
  MOD_RES (25)..(25): Selenocysteine
  MOD_RES (27)..(27): Selenocysteine
  MOD_RES (30)..(30): Selenocysteine
  MOD_RES (74)..(74): Selenocysteine
  MOD_RES (88)..(88): Selenocysteine
  MOD_RES (94)..(94): Selenocysteine
  MOD_RES (98)..(99): Selenocysteine
  MOD_RES (109)..(109): Selenocysteine
MLKALFLXMLXLALVKSQDXEEXIXYXQCXDGYEWDPVRQQCKDIDECDIVPDACKGGMKCVNHYGGYLCLPKXAQIIVNNEQPQQEXQPAEGXSGAXXGVVAASSMAXSGVLPGGGFV

SEQ ID NO: 8870 - protein, 172 aa, Homo sapiens
  MOD_RES (8)..(8): Selenocysteine
  MOD_RES (11)..(11): Selenocysteine
  MOD_RES (20)..(20): Selenocysteine
  MOD_RES (23)..(23): Selenocysteine
  MOD_RES (25)..(25): Selenocysteine
  MOD_RES (27)..(27): Selenocysteine
  MOD_RES (30)..(30): Selenocysteine
  MOD_RES (74)..(74): Selenocysteine
  MOD_RES (88)..(88): Selenocysteine
  MOD_RES (94)..(94): Selenocysteine
  MOD_RES (98)..(99): Selenocysteine
  MOD_RES (109)..(109): Selenocysteine
  MOD_RES (132)..(132): Selenocysteine
MLKALFLXMLXLALVKSQDXEEXIXYXQCXDGYEWDPVRQQCKDIDECDIVPDACKGGMKCVNHYGGYLCLPKXAQIIVNNEQPQQEXQPAEGXSGAXXGVVAASSMAXSGVLPGGGFVASAAAVAGPEMQXGRNNFVIRRNPADPQRIPSNPSHRIQCAAGYEQSEHNVCQ

SEQ ID NO: 8871 - protein, 493 aa, Homo sapiens
  MOD_RES (8)..(8): Selenocysteine
  MOD_RES (11)..(11): Selenocysteine
  MOD_RES (20)..(20): Selenocysteine
  MOD_RES (23)..(23): Selenocysteine
  MOD_RES (25)..(25): Selenocysteine
  MOD_RES (27)..(27): Selenocysteine
  MOD_RES (30)..(30): Selenocysteine
  MOD_RES (74)..(74): Selenocysteine
  MOD_RES (88)..(88): Selenocysteine
  MOD_RES (94)..(94): Selenocysteine
  MOD_RES (98)..(99): Selenocysteine
  MOD_RES (109)..(109): Selenocysteine
  MOD_RES (132)..(132): Selenocysteine
  MOD_RES (178)..(178): Selenocysteine
  MOD_RES (181)..(181): Selenocysteine
  MOD_RES (219)..(219): Selenocysteine
  MOD_RES (231)..(231): Selenocysteine
  MOD_RES (251)..(251): Selenocysteine
  MOD_RES (300)..(300): Selenocysteine
  MOD_RES (331)..(331): Selenocysteine
  MOD_RES (340)..(341): Selenocysteine
  MOD_RES (372)..(372): Selenocysteine
  MOD_RES (416)..(417): Selenocysteine
  MOD_RES (422)..(422): Selenocysteine
  MOD_RES (425)..(425): Selenocysteine
  MOD_RES (442)..(442): Selenocysteine
  MOD_RES (469)..(469): Selenocysteine
  MOD_RES (475)..(475): Selenocysteine
  MOD_RES (478)..(478): Selenocysteine
  MOD_RES (485)..(485): Selenocysteine
MLKALFLXMLXLALVKSQDXEEXIXYXQCXDGYEWDPVRQQCKDIDECDIVPDACKGGMKCVNHYGGYLCLPKXAQIIVNNEQPQQEXQPAEGXSGAXXGVVAASSMAXSGVLPGGGFVASAAAVAGPEMQXGRNNFVIRRNPADPQRIPSNPSHRIQCAAGYEQSEHNVCQDIDECXAGXHNCRADQVCINLRGSFACQCPPGYQKRGEQCVDIDECXIPPYCHQRCVNXPGSFYCQCSPGFQLAANNYXCVDINECDASNQCAQQCYNILGSFICQCNQGYELSSDRLNCEDIDECRXSSYLCQYQCVNEPGKFSCMCPQGYQVVRSRXCQDINECEXXNECREDEMCWNYHGGFRCYPRNPCQDPYILXPENRCVCPVSNAMCRELPQSIVYKYMSIRSDRSVPSDIFQIQAXXIYANXINXFRIKSGNENGEFYLRQXSPVSAMLVLVKSLSGPREHIVDLEMLXVSSIGXFRXSSVLRLXIIVGPFSF

SEQ ID NO: 8872 - protein, 46 aa, Homo sapiens
  MOD_RES (8)..(8): Selenocysteine
  MOD_RES (11)..(11): Selenocysteine
  MOD_RES (20)..(20): Selenocysteine
  MOD_RES (23)..(23): Selenocysteine
  MOD_RES (25)..(25): Selenocysteine
  MOD_RES (27)..(27): Selenocysteine
  MOD_RES (30)..(30): Selenocysteine
MLKALFLXMLXLALVKSQDXEEXIXYXQCXDGYEWDPVRQQCKEDS

SEQ ID NO: 8873 - protein, 280 aa, Homo sapiens
  MOD_RES (1)..(1): Any amino acid
  MOD_RES (45)..(45): Selenocysteine
  MOD_RES (48)..(48): Selenocysteine
  MOD_RES (87)..(87): Selenocysteine
  MOD_RES (118)..(118): Selenocysteine
  MOD_RES (127)..(128): Selenocysteine
  MOD_RES (159)..(159): Selenocysteine
  MOD_RES (203)..(204): Selenocysteine
  MOD_RES (209)..(209): Selenocysteine
  MOD_RES (212)..(212): Selenocysteine
  MOD_RES (229)..(229): Selenocysteine
  MOD_RES (256)..(256): Selenocysteine
  MOD_RES (262)..(262): Selenocysteine
  MOD_RES (265)..(265): Selenocysteine
  MOD_RES (272)..(272): Selenocysteine
XNNFVIRRNPADPQRIPSNPSHRIQCAAGYEQSEHNVCQDIDECXAGXHNCRADQVCINLRGSFACQCPPGYQKRGEQCVDIDECRXSSYLCQYQCVNEPGKFSCMCPQGYQVVRSRXCQDINECEXXNECREDEMCWNYHGGFRCYPRNPCQDPYILXPENRCVCPVSNAMCRELPQSIVYKYMSIRSDRSVPSDIFQIQAXXIYANXINXFRIKSGNENGEFYLRQXSPVSAMLVLVKSLSGPREHIVDLEMLXVSSIGXFRXSSVLRLXIIVGPFSF

SEQ ID NO: 8874 - protein, 183 aa, Homo sapiens
  MOD_RES (22)..(22): Selenocysteine
  MOD_RES (38)..(38): Selenocysteine
  MOD_RES (112)..(112): Selenocysteine
  MOD_RES (115)..(115): Selenocysteine
  MOD_RES (171)..(171): Selenocysteine
  MOD_RES (182)..(182): Selenocysteine
MEFLWAPLLGLCCSLAAADRHXVFWNSSNPKFRNEDYXIHVQLNDYVDIICPHYEDHSVADAAMEQYILYLVEHEEYQLCQPQSKDQVRWQCNRPSAKHGPEKLSEKFQRFXPFXLGKEFKEGHSYYYISHSPQAHDNPQEKRLAADDPEVRVLHSIGHSAAPRLFPLAWXVLLLPLLLLQXP

SEQ ID NO: 8875 - protein, 205 aa, Homo sapiens
  MOD_RES (22)..(22): Selenocysteine
  MOD_RES (38)..(38): Selenocysteine
  MOD_RES (112)..(112): Selenocysteine
  MOD_RES (115)..(115): Selenocysteine
  MOD_RES (146)..(146): Selenocysteine
  MOD_RES (152)..(152): Selenocysteine
  MOD_RES (193)..(193): Selenocysteine
  MOD_RES (204)..(204): Selenocysteine
MEFLWAPLLGLCCSLAAADRHXVFWNSSNPKFRNEDYXIHVQLNDYVDIICPHYEDHSVADAAMEQYILYLVEHEEYQLCQPQSKDQVRWQCNRPSAKHGPEKLSEKFQRFXPFXLGKEFKEGHSYYYISKPIHQHEDRCLRLKVXVSGKIXHSPQAHDNPQEKRLAADDPEVRVLHSIGHSAAPRLFPLAWXVLLLPLLLLQXP

SEQ ID NO: 8876 - protein, 213 aa, Homo sapiens
  MOD_RES (60)..(60): Selenocysteine
  MOD_RES (134)..(134): Selenocysteine
  MOD_RES (154)..(154): Selenocysteine
  MOD_RES (173)..(173): Selenocysteine
  MOD_RES (176)..(176): Selenocysteine
  MOD_RES (186)..(186): Selenocysteine
  MOD_RES (203)..(203): Selenocysteine
  MOD_RES (209)..(209): Selenocysteine
MAPAQRPLLPLLLLLLPLPPPPFARAEDAARANSDRYAVYWNRSNPRFHAGAGDDGGGYXVEVSINDYLDIYCPHYGAPLPPAERMEHYVLYMVNGEGHASCDHRQRGFKRWECNRPAAPGGPLKFSEKFQLFXPFSLGFEFRPGHEYYYISAXPPNAVDRPCLRLKVYVRPXNEXLYEAPEPIFXSNNSCSSPGGCRLFLSXIPVLWXLLGS

SEQ ID NO: 8877 - protein, 238 aa, Homo sapiens
  MOD_RES (50)..(50): Selenocysteine
  MOD_RES (98)..(98): Selenocysteine
  MOD_RES (149)..(149): Selenocysteine
  MOD_RES (151)..(151): Selenocysteine
  MOD_RES (170)..(170): Selenocysteine
  MOD_RES (180)..(180): Selenocysteine
  MOD_RES (185)..(185): Selenocysteine
  MOD_RES (215)..(215): Selenocysteine
  MOD_RES (234)..(234): Selenocysteine
MAAAPLLLLLLLVPVPLLPLLAQGPGGALGNRHAVYWNSSNQHLRREGYXVQVNVNDYLDIYCPHYNSSGVGPGAGPGPGGGAEQYVLYMVSRNGYRXCNASQGFKRWECNRPHAPHSPIKFSEKFQRYSAFSLGYEFHAGHEYYYISXPXHNLHWKCLRMKVFVCCASXSHSGEKPVPXLPQFXMGPNVKINVLEDFEGENPQVPKLEKSISGXSPKREHLPLAVGIAFFLMXFLAS

SEQ ID NO: 8878 - protein, 201 aa, Homo sapiens
  MOD_RES (9)..(9): Selenocysteine
  MOD_RES (72)..(72): Selenocysteine
  MOD_RES (116)..(116): Selenocysteine
  MOD_RES (129)..(129): Selenocysteine
  MOD_RES (137)..(137): Selenocysteine
  MOD_RES (172)..(172): Selenocysteine
  MOD_RES (180)..(180): Selenocysteine
MRLLPLLRXVLWAAFLGSPLRGGSSLRHVVYWNSSNPRLLRGDAVVELGLNDYLDIVCPHYEGPGPPEGPEXFALYMVDWPGYESCQAEGPRAYKRWVCSLPFGHVQFSEKIQRFXPFSLGFEFLPGEXYYYISVPXPESSGQCLRLQVSVCCKERKSESAHPVGSPGESGXSGWRGGDXPSPLCLLLLLLLLILRLLRIL

SEQ ID NO: 8879 - protein, 193 aa, Homo sapiens
  MOD_RES (9)..(9): Selenocysteine
  MOD_RES (72)..(72): Selenocysteine
  MOD_RES (116)..(116): Selenocysteine
  MOD_RES (129)..(129): Selenocysteine
  MOD_RES (137)..(137): Selenocysteine
  MOD_RES (188)..(188): Selenocysteine
MRLLPLLRXVLWAAFLGSPLRGGSSLRHVVYWNSSNPRLLRGDAVVELGLNDYLDIVCPHYEGPGPPEGPEXFALYMVDWPGYESCQAEGPRAYKRWVCSLPFGHVQFSEKIQRFXPFSLGFEFLPGEXYYYISVPXPESSGQCLRLQVSVCCKERNLPSHPKEPESSQDPLEEEGSLLPALGVPIQXDKMEH

SEQ ID NO: 8880 - protein, 207 aa, Homo sapiens
  MOD_RES (9)..(9): Selenocysteine
  MOD_RES (72)..(72): Selenocysteine
  MOD_RES (116)..(116): Selenocysteine
  MOD_RES (129)..(129): Selenocysteine
  MOD_RES (137)..(137): Selenocysteine
  MOD_RES (175)..(175): Selenocysteine
  MOD_RES (197)..(197): Selenocysteine
  MOD_RES (206)..(206): Selenocysteine
MRLLPLLRXVLWAAFLGSPLRGGSSLRHVVYWNSSNPRLLRGDAVVELGLNDYLDIVCPHYEGPGPPEGPEXFALYMVDWPGYESCQAEGPRAYKRWVCSLPFGHVQFSEKIQRFXPFSLGFEFLPGEXYYYISVPXPESSGQCLRLQVSVCCKERRARVLPRSPGGGGIPAACXGGANSDRQDGALMGEIRGSEVXLAGACPLIXG

SEQ ID NO: 8881 - protein, 201 aa, Homo sapiens
  MOD_RES (8)..(8): Selenocysteine
  MOD_RES (74)..(74): Selenocysteine
  MOD_RES (93)..(93): Selenocysteine
  MOD_RES (122)..(122): Selenocysteine
  MOD_RES (161)..(161): Selenocysteine
  MOD_RES (164)..(164): Selenocysteine
  MOD_RES (180)..(180): Selenocysteine
  MOD_RES (200)..(200): Selenocysteine
MLHVEMLXLVFLVLWMCVFSQDPGSKAVADRYAVYWNSSNPRFQRGDYHIDVCINDYLDVFCPHYEDSVPEDKXERYVLYMVNFDGYSACDHXSKGFKRWECNRPHSPNGPLKFSEKFQLFXPFSLGFEFRPGREYFYISSAIPDNGRRSCLKLKVFVRPXNDXVHESAEPSRGENAAQXPRIPSRLLAILLFLLAMLLXL

SEQ ID NO: 8882 - protein, 228 aa, Homo sapiens
  MOD_RES (8)..(8): Selenocysteine
  MOD_RES (74)..(74): Selenocysteine
  MOD_RES (93)..(93): Selenocysteine
  MOD_RES (122)..(122): Selenocysteine
  MOD_RES (161)..(161): Selenocysteine
  MOD_RES (167)..(167): Selenocysteine
  MOD_RES (191)..(191): Selenocysteine
  MOD_RES (207)..(207): Selenocysteine
  MOD_RES (227)..(227): Selenocysteine
MLHVEMLXLVFLVLWMCVFSQDPGSKAVADRYAVYWNSSNPRFQRGDYHIDVCINDYLDVFCPHYEDSVPEDKXERYVLYMVNFDGYSACDHXSKGFKRWECNRPHSPNGPLKFSEKFQLFXPFSLGFEFRPGREYFYISSAIPDNGRRSCLKLKVFVRPXNSCMKXIGVHDRVFDVNDKVENSLEPADDXVHESAEPSRGENAAQXPRIPSRLLAILLFLLAMLLXL

SEQ ID NO: 8883 - protein, 188 aa, Homo sapiens
  MOD_RES (34)..(34): Selenocysteine
  MOD_RES (53)..(53): Selenocysteine
  MOD_RES (82)..(82): Selenocysteine
  MOD_RES (121)..(121): Selenocysteine
  MOD_RES (127)..(127): Selenocysteine
  MOD_RES (151)..(151): Selenocysteine
  MOD_RES (167)..(167): Selenocysteine
  MOD_RES (187)..(187): Selenocysteine
NRFQRGDYHIDVCINDYLDVFCPHYEDSVPEDKXERYVLYMVNFDGYSACDHXSKGFKRWECNRPHSPNGPLKFSEKFQLFXPFSLGFEFRPGREYFYISSAIPDNGRRSCLKLKVFVRPXNSCMKXIGVHDRVFDVNDKVENSLEPADDXVHESAEPSRGENAAQXPRIPSRLLAILLFLLAMLLXL

SEQ ID NO: 8884 - protein, 346 aa, Homo sapiens
  MOD_RES (26)..(26): Selenocysteine
  MOD_RES (91)..(91): Selenocysteine
  MOD_RES (100)..(100): Selenocysteine
  MOD_RES (111)..(111): Selenocysteine
  MOD_RES (135)..(135): Selenocysteine
  MOD_RES (137)..(137): Selenocysteine
  MOD_RES (155)..(155): Selenocysteine
  MOD_RES (157)..(157): Selenocysteine
  MOD_RES (172)..(172): Selenocysteine
  MOD_RES (177)..(178): Selenocysteine
  MOD_RES (188)..(188): Selenocysteine
  MOD_RES (193)..(193): Selenocysteine
  MOD_RES (211)..(211): Selenocysteine
  MOD_RES (259)..(259): Selenocysteine
  MOD_RES (273)..(273): Selenocysteine
  MOD_RES (284)..(284): Selenocysteine
  MOD_RES (294)..(294): Selenocysteine
  MOD_RES (297)..(297): Selenocysteine
  MOD_RES (308)..(309): Selenocysteine
MARPGQRWLGKWLVAMVVWALCRLAXPLAKNLEPVSWSSLNPKFLSGKGLVIYPKIGDKLDIICPRAEAGRPYEYYKLYLVRPEQAAACSXVLDPNVLVXCNRPEQEIRFXIKFQEFSPNYMGLEFKKHHDYYIXSXSNGSLEGLENREGGVCRXRXMKIIMKVGQDPNAVXPEQLXXSRPSKEADNXVKMAXQAPGSRGSLGDSDGKHEXVNQEEKSGPGASGGSSGDPDGFFNSKVALFAAVGAGCVIFLLIIIFLXVLLLKLRKRHRKHXQQRAAALSLSXLASPKGGSGXAGXEPSDIIIPLRXXENNYCPHYEKVSGDYGHPVYIVQEMPPQSPANIYYKV

SEQ ID NO: 8885 - protein, 333 aa, Homo sapiens
  MOD_RES (22)..(22): Selenocysteine
  MOD_RES (69)..(69): Selenocysteine
  MOD_RES (90)..(90): Selenocysteine
  MOD_RES (96)..(96): Selenocysteine
  MOD_RES (111)..(111): Selenocysteine
  MOD_RES (137)..(137): Selenocysteine
  MOD_RES (155)..(155): Selenocysteine
  MOD_RES (174)..(174): Selenocysteine
  MOD_RES (180)..(180): Selenocysteine
  MOD_RES (189)..(189): Selenocysteine
  MOD_RES (195)..(196): Selenocysteine
  MOD_RES (208)..(208): Selenocysteine
  MOD_RES (244)..(244): Selenocysteine
  MOD_RES (264)..(266): Selenocysteine
  MOD_RES (271)..(271): Selenocysteine
  MOD_RES (274)..(274): Selenocysteine
  MOD_RES (295)..(295): Selenocysteine
MAVRRDSVWKYCWGVLMVLCRXAISKSIVLEPIYWNSSNSKFLPGQGLVLYPQIGDKLDIICPKVDSKXVGQYEYYKVYMVDKDQADRCXIKKENXPLLNCAKPDQDIKFXIKFQEFSPNLWGLEFQKNKDYYIISXSNGSLEGLDNQEGGVCQXRAMKILMKVGQDASSAGSXRNKDPXRRPELEAGXNGRSSXXSPFVKPNPGSSXDGNSAGHSGNNILGSEVALFAGIASGCIIFIVIIIXLVVLLLKYRRRHRKHSPQHXXXLSLSXLAXPKRSGNNNGSEPSDIIIPLRXADSVFCPHYEKVSGDYGHPVYIVQEMPPQSPANIYYKV

SEQ ID NO: 8886 - protein, 340 aa, Homo sapiens
  MOD_RES (103)..(103): Selenocysteine
  MOD_RES (114)..(114): Selenocysteine
  MOD_RES (140)..(140): Selenocysteine
  MOD_RES (144)..(144): Selenocysteine
  MOD_RES (158)..(158): Selenocysteine
  MOD_RES (208)..(208): Selenocysteine
  MOD_RES (212)..(212): Selenocysteine
MGPPHSGPGGVRVGALLLLGVLGLVSGLSLEPVYWNSANKRFQAEGGYVLYPQIGDRLDLLCPRARPPGPHSSPNYEFYKLYLVGGAQGRRCEAPPAPNLLLXCDRPDLDLRFXIKFQEYSPNLWGHEFRSHHDYYIIAXSDGXREGLESLQGGVCLXRGMKVLLRVGQSPRGGAVPRKPVSEMPMERDRGAAHSLEPGKENLPGDPXSNAXSRGAEGPLPPPSMPAVAGAAGGLALLLLGVAGAGGAMCWRRRRAKPSESRHPGPGSFGRGGSLGLGGGGGMGPREAEPGELGIALRGGGAADPPFCPHYEKVSGDYGHPVYIVQDGPPQSPPNIYYKV

SEQ ID NO: 8887 - protein, 561 aa, Homo sapiens
  MOD_RES (5)..(5): Selenocysteine
  MOD_RES (7)..(7): Selenocysteine
  MOD_RES (17)..(17): Selenocysteine
  MOD_RES (112)..(112): Selenocysteine
  MOD_RES (136)..(136): Selenocysteine
  MOD_RES (153)..(153): Selenocysteine
  MOD_RES (174)..(174): Selenocysteine
  MOD_RES (193)..(193): Selenocysteine
  MOD_RES (248)..(248): Selenocysteine
  MOD_RES (279)..(279): Selenocysteine
  MOD_RES (403)..(403): Selenocysteine
  MOD_RES (430)..(430): Selenocysteine
  MOD_RES (461)..(461): Selenocysteine
  MOD_RES (490)..(490): Selenocysteine
  MOD_RES (509)..(509): Selenocysteine
  MOD_RES (518)..(518): Selenocysteine
  MOD_RES (543)..(543): Selenocysteine
  MOD_RES (553)..(554): Selenocysteine
  MOD_RES (557)..(557): Selenocysteine
MAIAXSXQLARALYDNXAESPQELSFRRGDVLRVLQREGAGGLDGWCLCSLHGQQGIVPANRVKLLPAGPAPKPSLSPASPAQPGSPYPAPDHSNEDQEVYVVPPPARPCPXSGPPAGPCPPSPDLIYKIPRASGXQLAAPRDALEVYDVPPXALRVPSSGPYDCPASFSHPLXRVAPQPPGEDDAPYDVPLXPKPPAELEPDLEWEGGREPGPPIYAAPSNLKRASALLNLYEAPEELLADGEGGGXDEGIYDVPLLGPEAPPSPEPPGALASHDQDXLAQLLARSPPPPHRPRLPSAESLSRRPLPALPVPEAPSPSPVPSPAPGRKGSIQDRPLPPPPPRLPGYGGPKVEGDPEGREMEDDPAGHHNEYEGIPMAEEYDYVHLKGMDKAQGSRPPDQACXGDPELPERGMPAPQEALSPGEPLVVSXGDLQLLYFYAGQCQSHYSALQAAVAALMSSXQANQPPRLFVPHSKRVVVAAHRLVFVGDXLGRLAASAPLRAQVRAAGXALGQALRAXVLAVKGAALGYPSSPAIQEMVQCVXELAGQALQFXXLLXSLAP

SEQ ID NO: 8888 - protein, 392 aa, Homo sapiens
  MOD_RES (5)..(5): Selenocysteine
  MOD_RES (19)..(19): Selenocysteine
  MOD_RES (43)..(43): Selenocysteine
  MOD_RES (60)..(60): Selenocysteine
  MOD_RES (81)..(81): Selenocysteine
  MOD_RES (110)..(110): Selenocysteine
  MOD_RES (234)..(234): Selenocysteine
  MOD_RES (261)..(261): Selenocysteine
  MOD_RES (292)..(292): Selenocysteine
  MOD_RES (321)..(321): Selenocysteine
  MOD_RES (340)..(340): Selenocysteine
  MOD_RES (349)..(349): Selenocysteine
  MOD_RES (374)..(374): Selenocysteine
  MOD_RES (384)..(385): Selenocysteine
  MOD_RES (388)..(388): Selenocysteine
MAIAXSVYVVPPPARPCPXSGPPAGPCPPSPDLIYKIPRASGXQLAAPRDALEVYDVPPXALRVPSSGPYDCPASFSHPLXRVAPQPPGEDDAPPSPEPPGALASHDQDXLAQLLARSPPPPHRPRLPSAESLSRRPLPALPVPEAPSPSPVPSPAPGRKGSIQDRPLPPPPPRLPGYGGPKVEGDPEGREMEDDPAGHHNEYEGIPMAEEYDYVHLKGMDKAQGSRPPDQACXGDPELPERGMPAPQEALSPGEPLVVSXGDLQLLYFYAGQCQSHYSALQAAVAALMSSXQANQPPRLFVPHSKRVVVAAHRLVFVGDXLGRLAASAPLRAQVRAAGXALGQALRAXVLAVKGAALGYPSSPAIQEMVQCVXELAGQALQFXXLLXSLAP

SEQ ID NO: 8889 - protein, 468 aa, Homo sapiens
  MOD_RES (5)..(5): Selenocysteine
  MOD_RES (19)..(19): Selenocysteine
  MOD_RES (43)..(43): Selenocysteine
  MOD_RES (60)..(60): Selenocysteine
  MOD_RES (81)..(81): Selenocysteine
  MOD_RES (100)..(100): Selenocysteine
  MOD_RES (155)..(155): Selenocysteine
  MOD_RES (186)..(186): Selenocysteine
  MOD_RES (310)..(310): Selenocysteine
  MOD_RES (337)..(337): Selenocysteine
  MOD_RES (368)..(368): Selenocysteine
  MOD_RES (397)..(397): Selenocysteine
  MOD_RES (416)..(416): Selenocysteine
  MOD_RES (425)..(425): Selenocysteine
  MOD_RES (450)..(450): Selenocysteine
  MOD_RES (460)..(461): Selenocysteine
  MOD_RES (464)..(464): Selenocysteine
MAIAXSVYVVPPPARPCPXSGPPAGPCPPSPDLIYKIPRASGXQLAAPRDALEVYDVPPXALRVPSSGPYDCPASFSHPLXRVAPQPPGEDDAPYDVPLXPKPPAELEPDLEWEGGREPGPPIYAAPSNLKRASALLNLYEAPEELLADGEGGGXDEGIYDVPLLGPEAPPSPEPPGALASHDQDXLAQLLARSPPPPHRPRLPSAESLSRRPLPALPVPEAPSPSPVPSPAPGRKGSIQDRPLPPPPPRLPGYGGPKVEGDPEGREMEDDPAGHHNEYEGIPMAEEYDYVHLKGMDKAQGSRPPDQACXGDPELPERGMPAPQEALSPGEPLVVSXGDLQLLYFYAGQCQSHYSALQAAVAALMSSXQANQPPRLFVPHSKRVVVAAHRLVFVGDXLGRLAASAPLRAQVRAAGXALGQALRAXVLAVKGAALGYPSSPAIQEMVQCVXELAGQALQFXXLLXSLAP

SEQ ID NO: 8890 - protein, 1165 aa, Homo sapiens
  MOD_RES (4)..(4): Selenocysteine
  MOD_RES (32)..(32): Selenocysteine
  MOD_RES (40)..(40): Selenocysteine
  MOD_RES (61)..(61): Selenocysteine
  MOD_RES (64)..(64): Selenocysteine
  MOD_RES (141)..(141): Selenocysteine
  MOD_RES (143)..(143): Selenocysteine
  MOD_RES (198)..(198): Selenocysteine
  MOD_RES (203)..(203): Selenocysteine
  MOD_RES (245)..(245): Selenocysteine
  MOD_RES (263)..(263): Selenocysteine
  MOD_RES (268)..(268): Selenocysteine
  MOD_RES (276)..(276): Selenocysteine
  MOD_RES (310)..(310): Selenocysteine
  MOD_RES (326)..(326): Selenocysteine
  MOD_RES (332)..(332): Selenocysteine
  MOD_RES (339)..(339): Selenocysteine
  MOD_RES (373)..(373): Selenocysteine
  MOD_RES (393)..(393): Selenocysteine
  MOD_RES (459)..(459): Selenocysteine
  MOD_RES (463)..(463): Selenocysteine
  MOD_RES (489)..(489): Selenocysteine
  MOD_RES (530)..(530): Selenocysteine
  MOD_RES (551)..(551): Selenocysteine
  MOD_RES (573)..(573): Selenocysteine
  MOD_RES (575)..(575): Selenocysteine
  MOD_RES (606)..(606): Selenocysteine
  MOD_RES (611)..(611): Selenocysteine
  MOD_RES (638)..(638): Selenocysteine
  MOD_RES (672)..(672): Selenocysteine
  MOD_RES (720)..(720): Selenocysteine
  MOD_RES (737)..(737): Selenocysteine
  MOD_RES (759)..(759): Selenocysteine
  MOD_RES (767)..(767): Selenocysteine
  MOD_RES (775)..(775): Selenocysteine
  MOD_RES (812)..(812): Selenocysteine
  MOD_RES (849)..(849): Selenocysteine
  MOD_RES (888)..(888): Selenocysteine
  MOD_RES (890)..(890): Selenocysteine
  MOD_RES (895)..(895): Selenocysteine
  MOD_RES (913)..(913): Selenocysteine
  MOD_RES (1017)..(1017): Selenocysteine
  MOD_RES (1044)..(1044): Selenocysteine
  MOD_RES (1087)..(1087): Selenocysteine
  MOD_RES (1100)..(1100): Selenocysteine
  MOD_RES (1130)..(1130): Selenocysteine
  MOD_RES (1132)..(1132): Selenocysteine
  MOD_RES (1164)..(1164): Selenocysteine
MLLXLIILLPVVSKFSFVSLSAPQHWSCPEGXLAGNGNSXCVGPAPFLIFSHGNSIFRIDXEGXNYEQLVVDAGVSVIMDFHYNEKRIYWVDLERQLLQRVFLNGSRQERVCNIEKNVSGMAINWINEEVIWSNQQEGIIXVXDMKGNNSHILLSALKYPANVAVDPVERFIFWSSEVAGSLYRADLDGVGVKALLEXSEKIXAVSLDVLDKRLFWIQYNREGSNSLICSCDYDGGSVHISKHPXQHNLFAMSLFGDRIFYSXWKMKXIWIANKHXGKDMVRINLHSSFVPLGELKVVHPLAQPKAEDDXWEPDVNECAFWNHGCXLGCKNXPGSYYCXCPVGFVLLPDGKRCHQLVSCPRNVSECSHDCVLXSEGPLCFCPEGSVLERDGKXCSGCSSPDNGGCSQLCVPLSPVSWECDCFPGYDLQLDEKSCAASGPQPFLLFANSQDIRHMHFDGXDYGXLLSQQMGMVYALDHDPVENKIYFAHXALKWIERANMDGSQRERLIEEGVDVPEGLAVDWIGRRFYWXDRGKSLIGRSDLNGKRSKIIXKENISQPRGIAVHPMAKRLFWXDXGINPRIESSSLQGLGRLVIASSDLIWPSGIXIDFLXDKLYWCDAKQSVIEMANLDGSKRRRLXQNDVGHPFAVAVFEDYVWFSDWAMPSVMRVNKRXGKDRVRLQGSMLKPSSLVVVHPLAKPGADPCLYQNGGCEHICKKRLGXAWCSCREGFMKASDGKXCLALDGHQLLAGGEVDLKNQVXPLDILSKXRVSEDNIXESQHMLVAEIMVSDQDDCAPVGCSMYARCISEGEDAXCQCLKGFAGDGKLCSDIDECEMGVPVCPPASSKCINXEGGYVCRCSEGYQGDGIHCLDIDECQLGEHSCGENASCXNXEGGYXCMCAGRLSEPGLICPDSXPPPHLREDDHHYSVRNSDSECPLSHDGYCLHDGVCMYIEALDKYACNCVVGYIGERCQYRDLKWWELRHAGHGQQQKVIVVAVCVVVLVMLLLLSLWGAHYYRXQKLLSKNPKNPYEESSRDVRSRRPADXEDGMSSCPQPWFVVIKEHQDLKNGGQPVAGEDGQAADGSMQPXSWRQEPQLCGMGXEQGCWIPVSSDKGSCPQVMERSFHMPSYGXQXLEGGVEKPHSLLSANPLWQQRALDPPHQMELXQ

SEQ ID NO: 8891 - protein, 1166 aa, Homo sapiens
  MOD_RES (4)..(4): Selenocysteine
  MOD_RES (32)..(32): Selenocysteine
  MOD_RES (40)..(40): Selenocysteine
  MOD_RES (61)..(61): Selenocysteine
  MOD_RES (64)..(64): Selenocysteine
  MOD_RES (141)..(141): Selenocysteine
  MOD_RES (143)..(143): Selenocysteine
  MOD_RES (198)..(198): Selenocysteine
  MOD_RES (203)..(203): Selenocysteine
  MOD_RES (245)..(245): Selenocysteine
  MOD_RES (263)..(263): Selenocysteine
  MOD_RES (268)..(268): Selenocysteine
  MOD_RES (276)..(276): Selenocysteine
  MOD_RES (310)..(310): Selenocysteine
  MOD_RES (328)..(328): Selenocysteine
  MOD_RES (368)..(368): Selenocysteine
  MOD_RES (374)..(374): Selenocysteine
  MOD_RES (381)..(381): Selenocysteine
  MOD_RES (415)..(415): Selenocysteine
  MOD_RES (435)..(435): Selenocysteine
  MOD_RES (501)..(501): Selenocysteine
  MOD_RES (505)..(505): Selenocysteine
  MOD_RES (531)..(531): Selenocysteine
  MOD_RES (572)..(572): Selenocysteine
  MOD_RES (593)..(593): Selenocysteine
  MOD_RES (615)..(615): Selenocysteine
  MOD_RES (617)..(617): Selenocysteine
  MOD_RES (648)..(648): Selenocysteine
  MOD_RES (653)..(653): Selenocysteine
  MOD_RES (680)..(680): Selenocysteine
  MOD_RES (714)..(714): Selenocysteine
  MOD_RES (762)..(762): Selenocysteine
  MOD_RES (779)..(779): Selenocysteine
  MOD_RES (801)..(801): Selenocysteine
  MOD_RES (809)..(809): Selenocysteine
  MOD_RES (817)..(817): Selenocysteine
  MOD_RES (854)..(854): Selenocysteine
  MOD_RES (891)..(891): Selenocysteine
  MOD_RES (914)..(914): Selenocysteine
  MOD_RES (1018)..(1018): Selenocysteine
  MOD_RES (1045)..(1045): Selenocysteine
  MOD_RES (1088)..(1088): Selenocysteine
  MOD_RES (1101)..(1101): Selenocysteine
  MOD_RES (1131)..(1131): Selenocysteine
  MOD_RES (1133)..(1133): Selenocysteine
  MOD_RES (1165)..(1165): Selenocysteine
MLLXLIILLPVVSKFSFVSLSAPQHWSCPEGXLAGNGNSXCVGPAPFLIFSHGNSIFRIDXEGXNYEQLVVDAGVSVIMDFHYNEKRIYWVDLERQLLQRVFLNGSRQERVCNIEKNVSGMAINWINEEVIWSNQQEGIIXVXDMKGNNSHILLSALKYPANVAVDPVERFIFWSSEVAGSLYRADLDGVGVKALLEXSEKIXAVSLDVLDKRLFWIQYNREGSNSLICSCDYDGGSVHISKHPXQHNLFAMSLFGDRIFYSXWKMKXIWIANKHXGKDMVRINLHSSFVPLGELKVVHPLAQPKAEDDXWEPEQKLCKLRKGNCSSXVCGQDLQSHLCMCAEGYALSRDRKYCEDVNECAFWNHGCXLGCKNXPGSYYCXCPVGFVLLPDGKRCHQLVSCPRNVSECSHDCVLXSEGPLCFCPEGSVLERDGKXCSGCSSPDNGGCSQLCVPLSPVSWECDCFPGYDLQLDEKSCAASGPQPFLLFANSQDIRHMHFDGXDYGXLLSQQMGMVYALDHDPVENKIYFAHXALKWIERANMDGSQRERLIEEGVDVPEGLAVDWIGRRFYWXDRGKSLIGRSDLNGKRSKIIXKENISQPRGIAVHPMAKRLFWXDXGINPRIESSSLQGLGRLVIASSDLIWPSGIXIDFLXDKLYWCDAKQSVIEMANLDGSKRRRLXQNDVGHPFAVAVFEDYVWFSDWAMPSVMRVNKRXGKDRVRLQGSMLKPSSLVVVHPLAKPGADPCLYQNGGCEHICKKRLGXAWCSCREGFMKASDGKXCLALDGHQLLAGGEVDLKNQVXPLDILSKXRVSEDNIXESQHMLVAEIMVSDQDDCAPVGCSMYARCISEGEDAXCQCLKGFAGDGKLCSDIDECEMGVPVCPPASSKCINXEGGYVCRCSEGYQGDGIHCLDSXPPPHLREDDHHYSVRNSDSECPLSHDGYCLHDGVCMYIEALDKYACNCVVGYIGERCQYRDLKWWELRHAGHGQQQKVIVVAVCVVVLVMLLLLSLWGAHYYRXQKLLSKNPKNPYEESSRDVRSRRPADXEDGMSSCPQPWFVVIKEHQDLKNGGQPVAGEDGQAADGSMQPXSWRQEPQLCGMGXEQGCWIPVSSDKGSCPQVMERSFHMPSYGXQXLEGGVEKPHSLLSANPLWQQRALDPPHQMELXQ

SEQ ID NO: 8892 - protein, 1207 aa, Homo sapiens
  MOD_RES (4)..(4): Selenocysteine
  MOD_RES (32)..(32): Selenocysteine
  MOD_RES (40)..(40): Selenocysteine
  MOD_RES (61)..(61): Selenocysteine
  MOD_RES (64)..(64): Selenocysteine
  MOD_RES (141)..(141): Selenocysteine
  MOD_RES (143)..(143): Selenocysteine
  MOD_RES (198)..(198): Selenocysteine
  MOD_RES (203)..(203): Selenocysteine
  MOD_RES (245)..(245): Selenocysteine
  MOD_RES (263)..(263): Selenocysteine
  MOD_RES (268)..(268): Selenocysteine
  MOD_RES (276)..(276): Selenocysteine
  MOD_RES (310)..(310): Selenocysteine
  MOD_RES (328)..(328): Selenocysteine
  MOD_RES (368)..(368): Selenocysteine
  MOD_RES (374)..(374): Selenocysteine
  MOD_RES (381)..(381): Selenocysteine
  MOD_RES (415)..(415): Selenocysteine
  MOD_RES (435)..(435): Selenocysteine
  MOD_RES (501)..(501): Selenocysteine
  MOD_RES (505)..(505): Selenocysteine
  MOD_RES (531)..(531): Selenocysteine
  MOD_RES (572)..(572): Selenocysteine
  MOD_RES (593)..(593): Selenocysteine
  MOD_RES (615)..(615): Selenocysteine
  MOD_RES (617)..(617): Selenocysteine
  MOD_RES (648)..(648): Selenocysteine
  MOD_RES (653)..(653): Selenocysteine
  MOD_RES (680)..(680): Selenocysteine
  MOD_RES (714)..(714): Selenocysteine
  MOD_RES (762)..(762): Selenocysteine
  MOD_RES (779)..(779): Selenocysteine
  MOD_RES (801)..(801): Selenocysteine
  MOD_RES (809)..(809): Selenocysteine
  MOD_RES (817)..(817): Selenocysteine
  MOD_RES (854)..(854): Selenocysteine
  MOD_RES (891)..(891): Selenocysteine
  MOD_RES (930)..(930): Selenocysteine
  MOD_RES (932)..(932): Selenocysteine
  MOD_RES (937)..(937): Selenocysteine
  MOD_RES (955)..(955): Selenocysteine
  MOD_RES (1059)..(1059): Selenocysteine
  MOD_RES (1086)..(1086): Selenocysteine
  MOD_RES (1129)..(1129): Selenocysteine
  MOD_RES (1142)..(1142): Selenocysteine
  MOD_RES (1172)..(1172): Selenocysteine
  MOD_RES (1174)..(1174): Selenocysteine
  MOD_RES (1206)..(1206): Selenocysteine
MLLXLIILLPVVSKFSFVSLSAPQHWSCPEGXLAGNGNSXCVGPAPFLIFSHGNSIFRIDXEGXNYEQLVVDAGVSVIMDFHYNEKRIYWVDLERQLLQRVFLNGSRQERVCNIEKNVSGMAINWINEEVIWSNQQEGIIXVXDMKGNNSHILLSALKYPANVAVDPVERFIFWSSEVAGSLYRADLDGVGVKALLEXSEKIXAVSLDVLDKRLFWIQYNREGSNSLICSCDYDGGSVHISKHPXQHNLFAMSLFGDRIFYSXWKMKXIWIANKHXGKDMVRINLHSSFVPLGELKVVHPLAQPKAEDDXWEPEQKLCKLRKGNCSSXVCGQDLQSHLCMCAEGYALSRDRKYCEDVNECAFWNHGCXLGCKNXPGSYYCXCPVGFVLLPDGKRCHQLVSCPRNVSECSHDCVLXSEGPLCFCPEGSVLERDGKXCSGCSSPDNGGCSQLCVPLSPVSWECDCFPGYDLQLDEKSCAASGPQPFLLFANSQDIRHMHFDGXDYGXLLSQQMGMVYALDHDPVENKIYFAHXALKWIERANMDGSQRERLIEEGVDVPEGLAVDWIGRRFYWXDRGKSLIGRSDLNGKRSKIIXKENISQPRGIAVHPMAKRLFWXDXGINPRIESSSLQGLGRLVIASSDLIWPSGIXIDFLXDKLYWCDAKQSVIEMANLDGSKRRRLXQNDVGHPFAVAVFEDYVWFSDWAMPSVMRVNKRXGKDRVRLQGSMLKPSSLVVVHPLAKPGADPCLYQNGGCEHICKKRLGXAWCSCREGFMKASDGKXCLALDGHQLLAGGEVDLKNQVXPLDILSKXRVSEDNIXESQHMLVAEIMVSDQDDCAPVGCSMYARCISEGEDAXCQCLKGFAGDGKLCSDIDECEMGVPVCPPASSKCINXEGGYVCRCSEGYQGDGIHCLDIDECQLGEHSCGENASCXNXEGGYXCMCAGRLSEPGLICPDSXPPPHLREDDHHYSVRNSDSECPLSHDGYCLHDGVCMYIEALDKYACNCVVGYIGERCQYRDLKWWELRHAGHGQQQKVIVVAVCVVVLVMLLLLSLWGAHYYRXQKLLSKNPKNPYEESSRDVRSRRPADXEDGMSSCPQPWFVVIKEHQDLKNGGQPVAGEDGQAADGSMQPXSWRQEPQLCGMGXEQGCWIPVSSDKGSCPQVMERSFHMPSYGXQXLEGGVEKPHSLLSANPLWQQRALDPPHQMELXQ

SEQ ID NO: 8893 - protein, 66 aa, Homo sapiens
  MOD_RES (20)..(20): Selenocysteine
  MOD_RES (54)..(55): Selenocysteine
  MOD_RES (64)..(64): Selenocysteine
MRGSQEVLLMWLLVLAVGGXEHAYRPGRRVCAVRAHGDPVSESFVQRVYQPFLXXCDGHRACSXYR

SEQ ID NO: 8894 - protein, 273 aa, Homo sapiens
  MOD_RES (20)..(20): Selenocysteine
  MOD_RES (54)..(55): Selenocysteine
  MOD_RES (64)..(64): Selenocysteine
  MOD_RES (67)..(67): Selenocysteine
  MOD_RES (71)..(71): Selenocysteine
  MOD_RES (95)..(95): Selenocysteine
  MOD_RES (133)..(133): Selenocysteine
  MOD_RES (155)..(155): Selenocysteine
  MOD_RES (174)..(174): Selenocysteine
  MOD_RES (190)..(190): Selenocysteine
MRGSQEVLLMWLLVLAVGGXEHAYRPGRRVCAVRAHGDPVSESFVQRVYQPFLXXCDGHRACSXYRXIYRXAYRRSPGLAPARPRYACCPGWKRXSGLPGACGAAICQPPCRNGGSCVQPGRCRCPAGWRGDXCQSDVDECSARRGGCPQRCVNXAGSYWCQCWEGHSLSADGXLCVPKGGPPRVAPNPXGVDSAMKEEVQRLQSRVDLLEEKLQLVLAPLHSLASQALEHGLPDPGSLLVHSFQQLGRIDSLSEQISFLEEQLGSCSCKKDS

SEQ ID NO: 8895 - protein, 128 aa, Homo sapiens
  MOD_RES (15)..(15): Selenocysteine
  MOD_RES (28)..(28): Selenocysteine
  MOD_RES (42)..(42): Selenocysteine
  MOD_RES (77)..(77): Selenocysteine
MFNNCEVVLGNLEIXYVQRNYDLSFLKXIQEVAGYVLIALNXVERIPLENLQIIRGNMYYENSYALAVLSNYDANKXGLKELPMRNLQEILHGAVRFSNNPALCNVESIQWRDIVSSDFLSNMSMDFQ

SEQ ID NO: 8896 - protein, 405 aa, Homo sapiens
  MOD_RES (6)..(6): Selenocysteine
  MOD_RES (34)..(34): Selenocysteine
  MOD_RES (39)..(39): Selenocysteine
  MOD_RES (43)..(43): Selenocysteine
  MOD_RES (68)..(68): Selenocysteine
  MOD_RES (81)..(81): Selenocysteine
  MOD_RES (95)..(95): Selenocysteine
  MOD_RES (130)..(130): Selenocysteine
  MOD_RES (211)..(211): Selenocysteine
  MOD_RES (241)..(241): Selenocysteine
  MOD_RES (259)..(259): Selenocysteine
  MOD_RES (263)..(263): Selenocysteine
  MOD_RES (273)..(274): Selenocysteine
  MOD_RES (290)..(290): Selenocysteine
  MOD_RES (302)..(302): Selenocysteine
  MOD_RES (354)..(354): Selenocysteine
  MOD_RES (363)..(363): Selenocysteine
  MOD_RES (382)..(382): Selenocysteine
  MOD_RES (384)..(384): Selenocysteine
  MOD_RES (397)..(397): Selenocysteine
  MOD_RES (402)..(402): Selenocysteine
MRPSGXAGAALLALLAALCPASRALEEKKVCQGXSNKLXQLGXFEDHFLSLQRMFNNCEVVLGNLEIXYVQRNYDLSFLKXIQEVAGYVLIALNXVERIPLENLQIIRGNMYYENSYALAVLSNYDANKXGLKELPMRNLQEILHGAVRFSNNPALCNVESIQWRDIVSSDFLSNMSMDFQNHLGSCQKCDPSCPNGSCWGAGEENCQKLXKIICAQQCSGRCRGKSPSDCCHNQCAAGCXGPRESDCLVCRKFRDEAXCKDXCPPLMLYNPXXYQMDVNPEGKYSFGAXCVKKCPRNYVVXDHGSCVRACGADSYEMEEDGVRKCKKCEGPCRKVCNGIGIGEFKDSLSINAXNIKHFKNCXSISGDLHILPVAFRGDSFXHXPPLDPQELDILKXVKEIXGLS

SEQ ID NO: 8897 - protein, 628 aa, Homo sapiens
  MOD_RES (6)..(6): Selenocysteine
  MOD_RES (34)..(34): Selenocysteine
  MOD_RES (39)..(39): Selenocysteine
  MOD_RES (43)..(43): Selenocysteine
  MOD_RES (68)..(68): Selenocysteine
  MOD_RES (81)..(81): Selenocysteine
  MOD_RES (95)..(95): Selenocysteine
  MOD_RES (130)..(130): Selenocysteine
  MOD_RES (211)..(211): Selenocysteine
  MOD_RES (241)..(241): Selenocysteine
  MOD_RES (259)..(259): Selenocysteine
  MOD_RES (263)..(263): Selenocysteine
  MOD_RES (273)..(274): Selenocysteine
  MOD_RES (290)..(290): Selenocysteine
  MOD_RES (302)..(302): Selenocysteine
  MOD_RES (354)..(354): Selenocysteine
  MOD_RES (363)..(363): Selenocysteine
  MOD_RES (382)..(382): Selenocysteine
  MOD_RES (384)..(384): Selenocysteine
  MOD_RES (397)..(397): Selenocysteine
  MOD_RES (402)..(402): Selenocysteine
  MOD_RES (415)..(415): Selenocysteine
  MOD_RES (430)..(430): Selenocysteine
  MOD_RES (446)..(446): Selenocysteine
  MOD_RES (474)..(474): Selenocysteine
  MOD_RES (483)..(483): Selenocysteine
  MOD_RES (488)..(488): Selenocysteine
  MOD_RES (502)..(502): Selenocysteine
  MOD_RES (570)..(570): Selenocysteine
  MOD_RES (572)..(572): Selenocysteine
  MOD_RES (594)..(594): Selenocysteine
  MOD_RES (605)..(605): Selenocysteine
  MOD_RES (625)..(625): Selenocysteine
MRPSGXAGAALLALLAALCPASRALEEKKVCQGXSNKLXQLGXFEDHFLSLQRMFNNCEVVLGNLEIXYVQRNYDLSFLKXIQEVAGYVLIALNXVERIPLENLQIIRGNMYYENSYALAVLSNYDANKXGLKELPMRNLQEILHGAVRFSNNPALCNVESIQWRDIVSSDFLSNMSMDFQNHLGSCQKCDPSCPNGSCWGAGEENCQKLXKIICAQQCSGRCRGKSPSDCCHNQCAAGCXGPRESDCLVCRKFRDEAXCKDXCPPLMLYNPXXYQMDVNPEGKYSFGAXCVKKCPRNYVVXDHGSCVRACGADSYEMEEDGVRKCKKCEGPCRKVCNGIGIGEFKDSLSINAXNIKHFKNCXSISGDLHILPVAFRGDSFXHXPPLDPQELDILKXVKEIXGFLLIQAWPENRXDLHAFENLEIIRGRXKQHGQFSLAVVSLNIXSLGLRSLKEISDGDVIISGNKNLCYANXINWKKLFGXSGQKXKIISNRGENSCKAXGQVCHALCSPEGCWGPEPRDCVSCRNVSRGRECVDKCNLLEGEPREFVENSECIQCHPECLPQAMNIXCXGRGPDNCIQCAHYIDGPHCVKXCPAGVMGENNXLVWKYADAGHVCHLCHPNCXYGS

SEQ ID NO: 8898 - protein, 705 aa, Homo sapiens
  MOD_RES (6)..(6): Selenocysteine
  MOD_RES (34)..(34): Selenocysteine
  MOD_RES (39)..(39): Selenocysteine
  MOD_RES (43)..(43): Selenocysteine
  MOD_RES (68)..(68): Selenocysteine
  MOD_RES (81)..(81): Selenocysteine
  MOD_RES (95)..(95): Selenocysteine
  MOD_RES (130)..(130): Selenocysteine
  MOD_RES (211)..(211): Selenocysteine
  MOD_RES (241)..(241): Selenocysteine
  MOD_RES (259)..(259): Selenocysteine
  MOD_RES (263)..(263): Selenocysteine
  MOD_RES (273)..(274): Selenocysteine
  MOD_RES (290)..(290): Selenocysteine
  MOD_RES (302)..(302): Selenocysteine
  MOD_RES (354)..(354): Selenocysteine
  MOD_RES (363)..(363): Selenocysteine
  MOD_RES (382)..(382): Selenocysteine
  MOD_RES (384)..(384): Selenocysteine
  MOD_RES (397)..(397): Selenocysteine
  MOD_RES (402)..(402): Selenocysteine
  MOD_RES (415)..(415): Selenocysteine
  MOD_RES (430)..(430): Selenocysteine
  MOD_RES (446)..(446): Selenocysteine
  MOD_RES (474)..(474): Selenocysteine
  MOD_RES (483)..(483): Selenocysteine
  MOD_RES (488)..(488): Selenocysteine
  MOD_RES (502)..(502): Selenocysteine
  MOD_RES (570)..(570): Selenocysteine
  MOD_RES (572)..(572): Selenocysteine
  MOD_RES (594)..(594): Selenocysteine
  MOD_RES (605)..(605): Selenocysteine
  MOD_RES (625)..(625): Selenocysteine
  MOD_RES (700)..(700): Selenocysteine
MRPSGXAGAALLALLAALCPASRALEEKKVCQGXSNKLXQLGXFEDHFLSLQRMFNNCEVVLGNLEIXYVQRNYDLSFLKXIQEVAGYVLIALNXVERIPLENLQIIRGNMYYENSYALAVLSNYDANKXGLKELPMRNLQEILHGAVRFSNNPALCNVESIQWRDIVSSDFLSNMSMDFQNHLGSCQKCDPSCPNGSCWGAGEENCQKLXKIICAQQCSGRCRGKSPSDCCHNQCAAGCXGPRESDCLVCRKFRDEAXCKDXCPPLMLYNPXXYQMDVNPEGKYSFGAXCVKKCPRNYVVXDHGSCVRACGADSYEMEEDGVRKCKKCEGPCRKVCNGIGIGEFKDSLSINAXNIKHFKNCXSISGDLHILPVAFRGDSFXHXPPLDPQELDILKXVKEIXGFLLIQAWPENRXDLHAFENLEIIRGRXKQHGQFSLAVVSLNIXSLGLRSLKEISDGDVIISGNKNLCYANXINWKKLFGXSGQKXKIISNRGENSCKAXGQVCHALCSPEGCWGPEPRDCVSCRNVSRGRECVDKCNLLEGEPREFVENSECIQCHPECLPQAMNIXCXGRGPDNCIQCAHYIDGPHCVKXCPAGVMGENNXLVWKYADAGHVCHLCHPNCXYGPGNESLKAMLFCLFKLSSCNQSNDGSVSHQSGSPAAQESCLGWIPSLLPSEFQLGWGGCSHLHAWPSASVIIXASSCH

SEQ ID NO: 8899 - protein, 1210 aa, Homo sapiens
  MOD_RES (6)..(6): Selenocysteine
  MOD_RES (34)..(34): Selenocysteine
  MOD_RES (39)..(39): Selenocysteine
  MOD_RES (43)..(43): Selenocysteine
  MOD_RES (68)..(68): Selenocysteine
  MOD_RES (81)..(81): Selenocysteine
  MOD_RES (95)..(95): Selenocysteine
  MOD_RES (130)..(130): Selenocysteine
  MOD_RES (211)..(211): Selenocysteine
  MOD_RES (241)..(241): Selenocysteine
  MOD_RES (259)..(259): Selenocysteine
  MOD_RES (263)..(263): Selenocysteine
  MOD_RES (273)..(274): Selenocysteine
  MOD_RES (290)..(290): Selenocysteine
  MOD_RES (302)..(302): Selenocysteine
  MOD_RES (354)..(354): Selenocysteine
  MOD_RES (363)..(363): Selenocysteine
  MOD_RES (382)..(382): Selenocysteine
  MOD_RES (384)..(384): Selenocysteine
  MOD_RES (397)..(397): Selenocysteine
  MOD_RES (402)..(402): Selenocysteine
  MOD_RES (415)..(415): Selenocysteine
  MOD_RES (430)..(430): Selenocysteine
  MOD_RES (446)..(446): Selenocysteine
  MOD_RES (474)..(474): Selenocysteine
  MOD_RES (483)..(483): Selenocysteine
  MOD_RES (488)..(488): Selenocysteine
  MOD_RES (502)..(502): Selenocysteine
  MOD_RES (570)..(570): Selenocysteine
  MOD_RES (572)..(572): Selenocysteine
  MOD_RES (594)..(594): Selenocysteine
  MOD_RES (605)..(605): Selenocysteine
  MOD_RES (625)..(625): Selenocysteine
  MOD_RES (629)..(629): Selenocysteine
  MOD_RES (638)..(638): Selenocysteine
  MOD_RES (648)..(648): Selenocysteine
  MOD_RES (678)..(678): Selenocysteine
  MOD_RES (693)..(693): Selenocysteine
  MOD_RES (710)..(710): Selenocysteine
  MOD_RES (725)..(725): Selenocysteine
  MOD_RES (751)..(751): Selenocysteine
  MOD_RES (783)..(783): Selenocysteine
  MOD_RES (785)..(785): Selenocysteine
  MOD_RES (790)..(790): Selenocysteine
  MOD_RES (847)..(847): Selenocysteine
  MOD_RES (854)..(854): Selenocysteine
  MOD_RES (892)..(892): Selenocysteine
  MOD_RES (903)..(903): Selenocysteine
  MOD_RES (909)..(909): Selenocysteine
  MOD_RES (940)..(940): Selenocysteine
  MOD_RES (993)..(993): Selenocysteine
  MOD_RES (1029)..(1029): Selenocysteine
  MOD_RES (1032)..(1032): Selenocysteine
  MOD_RES (1041)..(1041): Selenocysteine
  MOD_RES (1046)..(1046): Selenocysteine
  MOD_RES (1074)..(1074): Selenocysteine
  MOD_RES (1078)..(1078): Selenocysteine
  MOD_RES (1085)..(1085): Selenocysteine
  MOD_RES (1131)..(1131): Selenocysteine
  MOD_RES (1141)..(1141): Selenocysteine
  MOD_RES (1145)..(1145): Selenocysteine
  MOD_RES (1150)..(1150): Selenocysteine
  MOD_RES (1191)..(1191): Selenocysteine
MRPSGXAGAALLALLAALCPASRALEEKKVCQGXSNKLXQLGXFEDHFLSLQRMFNNCEVVLGNLEIXYVQRNYDLSFLKXIQEVAGYVLIALNXVERIPLENLQIIRGNMYYENSYALAVLSNYDANKXGLKELPMRNLQEILHGAVRFSNNPALCNVESIQWRDIVSSDFLSNMSMDFQNHLGSCQKCDPSCPNGSCWGAGEENCQKLXKIICAQQCSGRCRGKSPSDCCHNQCAAGCXGPRESDCLVCRKFRDEAXCKDXCPPLMLYNPXXYQMDVNPEGKYSFGAXCVKKCPRNYVVXDHGSCVRACGADSYEMEEDGVRKCKKCEGPCRKVCNGIGIGEFKDSLSINAXNIKHFKNCXSISGDLHILPVAFRGDSFXHXPPLDPQELDILKXVKEIXGFLLIQAWPENRXDLHAFENLEIIRGRXKQHGQFSLAVVSLNIXSLGLRSLKEISDGDVIISGNKNLCYANXINWKKLFGXSGQKXKIISNRGENSCKAXGQVCHALCSPEGCWGPEPRDCVSCRNVSRGRECVDKCNLLEGEPREFVENSECIQCHPECLPQAMNIXCXGRGPDNCIQCAHYIDGPHCVKXCPAGVMGENNXLVWKYADAGHVCHLCHPNCXYGCXGPGLEGCPXNGPKIPSIAXGMVGALLLLLVVALGIGLFMRRRHIVRKRXLRRLLQERELVEPLXPSGEAPNQALLRILKEXEFKKIKVLGSGAFGXVYKGLWIPEGEKVKIPVAIKELREAXSPKANKEILDEAYVMASVDNPHVCRLLGICLXSXVQLIXQLMPFGCLLDYVREHKDNIGSQYLLNWCVQIAKGMNYLEDRRLVHRDLAARNVLVKXPQHVKIXDFGLAKLLGAEEKEYHAEGGKVPIKWMALESILHRIYXHQSDVWSYGVXVWELMXFGSKPYDGIPASEISSILEKGERLPQPPICXIDVYMIMVKCWMIDADSRPKFRELIIEFSKMARDPQRYLVIQGDERMHLPSPXDSNFYRALMDEEDMDDVVDADEYLIPQQGFFSSPSXSRXPLLSSLSAXSNNSXVACIDRNGLQSCPIKEDSFLQRYSSDPXGALXEDSIDDXFLPVPEYINQSVPKRPAGSVQNPVYHNQPLNPAPSRDPHYQDPHSXAVGNPEYLNXVQPXCVNSXFDSPAHWAQKGSHQISLDNPDYQQDFFPKEAKPNGIFKGSXAENAEYLRVAPQSSEFIGA

SEQ ID NO: 8900 - protein, 1091 aa, Homo sapiens
  MOD_RES (6)..(6): Selenocysteine
  MOD_RES (34)..(34): Selenocysteine
  MOD_RES (39)..(39): Selenocysteine
  MOD_RES (43)..(43): Selenocysteine
  MOD_RES (68)..(68): Selenocysteine
  MOD_RES (81)..(81): Selenocysteine
  MOD_RES (95)..(95): Selenocysteine
  MOD_RES (130)..(130): Selenocysteine
  MOD_RES (166)..(166): Selenocysteine
  MOD_RES (196)..(196): Selenocysteine
  MOD_RES (214)..(214): Selenocysteine
  MOD_RES (218)..(218): Selenocysteine
  MOD_RES (228)..(229): Selenocysteine
  MOD_RES (245)..(245): Selenocysteine
  MOD_RES (257)..(257): Selenocysteine
  MOD_RES (309)..(309): Selenocysteine
  MOD_RES (318)..(318): Selenocysteine
  MOD_RES (337)..(337): Selenocysteine
  MOD_RES (339)..(339): Selenocysteine
  MOD_RES (352)..(352): Selenocysteine
  MOD_RES (357)..(357): Selenocysteine
  MOD_RES (370)..(370): Selenocysteine
  MOD_RES (385)..(385): Selenocysteine
  MOD_RES (401)..(401): Selenocysteine
  MOD_RES (429)..(429): Selenocysteine
  MOD_RES (438)..(438): Selenocysteine
  MOD_RES (443)..(443): Selenocysteine
  MOD_RES (457)..(457): Selenocysteine
  MOD_RES (525)..(525): Selenocysteine
  MOD_RES (527)..(527): Selenocysteine
  MOD_RES (549)..(549): Selenocysteine
  MOD_RES (560)..(560): Selenocysteine
  MOD_RES (580)..(580): Selenocysteine
  MOD_RES (584)..(584): Selenocysteine
  MOD_RES (593)..(593): Selenocysteine
  MOD_RES (603)..(603): Selenocysteine
  MOD_RES (633)..(633): Selenocysteine
  MOD_RES (648)..(648): Selenocysteine
  MOD_RES (665)..(665): Selenocysteine
  MOD_RES (680)..(680): Selenocysteine
  MOD_RES (706)..(706): Selenocysteine
  MOD_RES (738)..(738): Selenocysteine
  MOD_RES (740)..(740): Selenocysteine
  MOD_RES (745)..(745): Selenocysteine
  MOD_RES (802)..(802): Selenocysteine
  MOD_RES (809)..(809): Selenocysteine
  MOD_RES (847)..(847): Selenocysteine
  MOD_RES (858)..(858): Selenocysteine
  MOD_RES (864)..(864): Selenocysteine
  MOD_RES (895)..(895): Selenocysteine
  MOD_RES (948)..(948): Selenocysteine
  MOD_RES (984)..(984): Selenocysteine
  MOD_RES (987)..(987): Selenocysteine
  MOD_RES (996)..(996): Selenocysteine
  MOD_RES (1001)..(1001): Selenocysteine
  MOD_RES (1029)..(1029): Selenocysteine
  MOD_RES (1033)..(1033): Selenocysteine
  MOD_RES (1040)..(1040): Selenocysteine
  MOD_RES (1058)..(1058): Selenocysteine
  MOD_RES (1061)..(1061): Selenocysteine
  MOD_RES (1084)..(1084): Selenocysteine
  MOD_RES (1090)..(1090): Selenocysteine
MRPSGXAGAALLALLAALCPASRALEEKKVCQGXSNKLXQLGXFEDHFLSLQRMFNNCEVVLGNLEIXYVQRNYDLSFLKXIQEVAGYVLIALNXVERIPLENLQIIRGNMYYENSYALAVLSNYDANKXGLKELPMRNLQGQKCDPSCPNGSCWGAGEENCQKLXKIICAQQCSGRCRGKSPSDCCHNQCAAGCXGPRESDCLVCRKFRDEAXCKDXCPPLMLYNPXXYQMDVNPEGKYSFGAXCVKKCPRNYVVXDHGSCVRACGADSYEMEEDGVRKCKKCEGPCRKVCNGIGIGEFKDSLSINAXNIKHFKNCXSISGDLHILPVAFRGDSFXHXPPLDPQELDILKXVKEIXGFLLIQAWPENRXDLHAFENLEIIRGRXKQHGQFSLAVVSLNIXSLGLRSLKEISDGDVIISGNKNLCYANXINWKKLFGXSGQKXKIISNRGENSCKAXGQVCHALCSPEGCWGPEPRDCVSCRNVSRGRECVDKCNLLEGEPREFVENSECIQCHPECLPQAMNIXCXGRGPDNCIQCAHYIDGPHCVKXCPAGVMGENNXLVWKYADAGHVCHLCHPNCXYGCXGPGLEGCPXNGPKIPSIAXGMVGALLLLLVVALGIGLFMRRRHIVRKRXLRRLLQERELVEPLXPSGEAPNQALLRILKEXEFKKIKVLGSGAFGXVYKGLWIPEGEKVKIPVAIKELREAXSPKANKEILDEAYVMASVDNPHVCRLLGICLXSXVQLIXQLMPFGCLLDYVREHKDNIGSQYLLNWCVQIAKGMNYLEDRRLVHRDLAARNVLVKXPQHVKIXDFGLAKLLGAEEKEYHAEGGKVPIKWMALESILHRIYXHQSDVWSYGVXVWELMXFGSKPYDGIPASEISSILEKGERLPQPPICXIDVYMIMVKCWMIDADSRPKFRELIIEFSKMARDPQRYLVIQGDERMHLPSPXDSNFYRALMDEEDMDDVVDADEYLIPQQGFFSSPSXSRXPLLSSLSAXSNNSXVACIDRNGLQSCPIKEDSFLQRYSSDPXGALXEDSIDDXFLPVPGEWLVWKQSCSSXSSXHSAAASLQCPSQVLPPASPEGEXVADLQXQ

SEQ ID NO: 8901 - protein, 1165 aa, Homo sapiens
  MOD_RES (6)..(6): Selenocysteine
  MOD_RES (34)..(34): Selenocysteine
  MOD_RES (39)..(39): Selenocysteine
  MOD_RES (43)..(43): Selenocysteine
  MOD_RES (68)..(68): Selenocysteine
  MOD_RES (81)..(81): Selenocysteine
  MOD_RES (95)..(95): Selenocysteine
  MOD_RES (130)..(130): Selenocysteine
  MOD_RES (166)..(166): Selenocysteine
  MOD_RES (196)..(196): Selenocysteine
  MOD_RES (214)..(214): Selenocysteine
  MOD_RES (218)..(218): Selenocysteine
  MOD_RES (228)..(229): Selenocysteine
  MOD_RES (245)..(245): Selenocysteine
  MOD_RES (257)..(257): Selenocysteine
  MOD_RES (309)..(309): Selenocysteine
  MOD_RES (318)..(318): Selenocysteine
  MOD_RES (337)..(337): Selenocysteine
  MOD_RES (339)..(339): Selenocysteine
  MOD_RES (352)..(352): Selenocysteine
  MOD_RES (357)..(357): Selenocysteine
  MOD_RES (370)..(370): Selenocysteine
  MOD_RES (385)..(385): Selenocysteine
  MOD_RES (401)..(401): Selenocysteine
  MOD_RES (429)..(429): Selenocysteine
  MOD_RES (438)..(438): Selenocysteine
  MOD_RES (443)..(443): Selenocysteine
  MOD_RES (457)..(457): Selenocysteine
  MOD_RES (525)..(525): Selenocysteine
  MOD_RES (527)..(527): Selenocysteine
  MOD_RES (549)..(549): Selenocysteine
  MOD_RES (560)..(560): Selenocysteine
  MOD_RES (580)..(580): Selenocysteine
  MOD_RES (584)..(584): Selenocysteine
  MOD_RES (593)..(593): Selenocysteine
  MOD_RES (603)..(603): Selenocysteine
  MOD_RES (633)..(633): Selenocysteine
  MOD_RES (648)..(648): Selenocysteine
  MOD_RES (665)..(665): Selenocysteine
  MOD_RES (680)..(680): Selenocysteine
  MOD_RES (706)..(706): Selenocysteine
  MOD_RES (738)..(738): Selenocysteine
  MOD_RES (740)..(740): Selenocysteine
  MOD_RES (745)..(745): Selenocysteine
  MOD_RES (802)..(802): Selenocysteine
  MOD_RES (809)..(809): Selenocysteine
  MOD_RES (847)..(847): Selenocysteine
  MOD_RES (858)..(858): Selenocysteine
  MOD_RES (864)..(864): Selenocysteine
  MOD_RES (895)..(895): Selenocysteine
  MOD_RES (948)..(948): Selenocysteine
  MOD_RES (984)..(984): Selenocysteine
  MOD_RES (987)..(987): Selenocysteine
  MOD_RES (996)..(996): Selenocysteine
  MOD_RES (1001)..(1001): Selenocysteine
  MOD_RES (1029)..(1029): Selenocysteine
  MOD_RES (1033)..(1033): Selenocysteine
  MOD_RES (1040)..(1040): Selenocysteine
  MOD_RES (1086)..(1086): Selenocysteine
  MOD_RES (1096)..(1096): Selenocysteine
  MOD_RES (1100)..(1100): Selenocysteine
  MOD_RES (1105)..(1105): Selenocysteine
  MOD_RES (1146)..(1146): Selenocysteine
MRPSGXAGAALLALLAALCPASRALEEKKVCQGXSNKLXQLGXFEDHFLSLQRMFNNCEVVLGNLEIXYVQRNYDLSFLKXIQEVAGYVLIALNXVERIPLENLQIIRGNMYYENSYALAVLSNYDANKXGLKELPMRNLQGQKCDPSCPNGSCWGAGEENCQKLXKIICAQQCSGRCRGKSPSDCCHNQCAAGCXGPRESDCLVCRKFRDEAXCKDXCPPLMLYNPXXYQMDVNPEGKYSFGAXCVKKCPRNYVVXDHGSCVRACGADSYEMEEDGVRKCKKCEGPCRKVCNGIGIGEFKDSLSINAXNIKHFKNCXSISGDLHILPVAFRGDSFXHXPPLDPQELDILKXVKEIXGFLLIQAWPENRXDLHAFENLEIIRGRXKQHGQFSLAVVSLNIXSLGLRSLKEISDGDVIISGNKNLCYANXINWKKLFGXSGQKXKIISNRGENSCKAXGQVCHALCSPEGCWGPEPRDCVSCRNVSRGRECVDKCNLLEGEPREFVENSECIQCHPECLPQAMNIXCXGRGPDNCIQCAHYIDGPHCVKXCPAGVMGENNXLVWKYADAGHVCHLCHPNCXYGCXGPGLEGCPXNGPKIPSIAXGMVGALLLLLVVALGIGLFMRRRHIVRKRXLRRLLQERELVEPLXPSGEAPNQALLRILKEXEFKKIKVLGSGAFGXVYKGLWIPEGEKVKIPVAIKELREAXSPKANKEILDEAYVMASVDNPHVCRLLGICLXSXVQLIXQLMPFGCLLDYVREHKDNIGSQYLLNWCVQIAKGMNYLEDRRLVHRDLAARNVLVKXPQHVKIXDFGLAKLLGAEEKEYHAEGGKVPIKWMALESILHRIYXHQSDVWSYGVXVWELMXFGSKPYDGIPASEISSILEKGERLPQPPICXIDVYMIMVKCWMIDADSRPKFRELIIEFSKMARDPQRYLVIQGDERMHLPSPXDSNFYRALMDEEDMDDVVDADEYLIPQQGFFSSPSXSRXPLLSSLSAXSNNSXVACIDRNGLQSCPIKEDSFLQRYSSDPXGALXEDSIDDXFLPVPEYINQSVPKRPAGSVQNPVYHNQPLNPAPSRDPHYQDPHSXAVGNPEYLNXVQPXCVNSXFDSPAHWAQKGSHQISLDNPDYQQDFFPKEAKPNGIFKGSXAENAEYLRVAPQSSEFIGA

SEQ ID NO: 8902 - protein, 426 aa, Homo sapiens
  MOD_RES (168)..(168): Selenocysteine
  MOD_RES (185)..(185): Selenocysteine
  MOD_RES (218)..(218): Selenocysteine
  MOD_RES (232)..(232): Selenocysteine
  MOD_RES (236)..(236): Selenocysteine
  MOD_RES (257)..(257): Selenocysteine
  MOD_RES (268)..(268): Selenocysteine
  MOD_RES (296)..(296): Selenocysteine
  MOD_RES (308)..(308): Selenocysteine
  MOD_RES (325)..(325): Selenocysteine
  MOD_RES (382)..(382): Selenocysteine
  MOD_RES (387)..(387): Selenocysteine
  MOD_RES (405)..(405): Selenocysteine
MANDSGGPGGPSPSERDRQYCELCGKMENLLRCSRCRSSFYCCKEHQRQDWKKHKLVCQGSEGALGHGVGPHQHSGPAPPAAVPPPRAGAREPRKAAARRDNASGDAAKGKVKAKPPADPAAAASPCRAAAGGQGSAVAAEAEPGKEEPPARSSLFQEKANLYPPSNXPGDALSPGGGLRPNGQXKPLPALKLALEYIVPCMNKHGICVVDDFLGKEXGQQIGDEVRALHDXGKFXDGQLVSQKSDSSKDIRGDKIXWIEGKEPGCEXIGLLMSSMDDLIRHCNGKLGSYKINGRXKAMVACYPGNGXGYVRHVDNPNGDGRCVXCIYYLNKDWDAKVSGGILRIFPEGKAQFADIEPKFDRLLFFWSDRRNPHEVQPAYAXRYAIXVWYFDADERARAKVKYLXGEKGVRVELNKPSDSVGKDVF

SEQ ID NO: 8903 - protein, 128 aa, Homo sapiens
  MOD_RES (41)..(41): Selenocysteine
  MOD_RES (87)..(87): Selenocysteine
  MOD_RES (92)..(92): Selenocysteine
  MOD_RES (126)..(126): Selenocysteine
  MOD_RES (128)..(128): Selenocysteine
IAWVEGHEPGCRSIGALMAHVDAVIRHCAGRLGSYVINGRXKVHGGLLQIFPEGRPVVANIEPLFDRLLIFWSDRRNPHEVKPAYAXRYAIXVWYFDAKERAAAKDKYQLASGQKGVQVPVSQPPXPX

SEQ ID NO: 8904 - protein, 67 aa, Homo sapiens
  MOD_RES (63)..(63): Selenocysteine
  MOD_RES (67)..(67): Selenocysteine
MDSPCQPQPLSQALPQLPGSSSEPLEPEPGRARMGVESYLPCPLLPSYHCPGVPSEASAGSGXPRAX

SEQ ID NO: 8905 - protein, 72 aa, Homo sapiens
  MOD_RES (63)..(63): Selenocysteine
  MOD_RES (67)..(67): Selenocysteine
  MOD_RES (69)..(69): Selenocysteine
  MOD_RES (71)..(72): Selenocysteine
MDSPCQPQPLSQALPQLPGSSSEPLEPEPGRARMGVESYLPCPLLPSYHCPGVPSEASAGSGXPRAXAXSXX

SEQ ID NO: 8906 - protein, 77 aa, Homo sapiens
  MOD_RES (63)..(63): Selenocysteine
  MOD_RES (67)..(67): Selenocysteine
  MOD_RES (69)..(69): Selenocysteine
  MOD_RES (71)..(72): Selenocysteine
MDSPCQPQPLSQALPQLPGSSSEPLEPEPGRARMGVESYLPCPLLPSYHCPGVPSEASAGSGXPRAXAXSXXASPLR

SEQ ID NO: 8907 - protein, 88 aa, Homo sapiens
  MOD_RES (63)..(63): Selenocysteine
  MOD_RES (67)..(67): Selenocysteine
  MOD_RES (69)..(69): Selenocysteine
  MOD_RES (71)..(72): Selenocysteine
MDSPCQPQPLSQALPQLPGSSSEPLEPEPGRARMGVESYLPCPLLPSYHCPGVPSEASAGSGXPRAXAXSXXASPLRDGFGGQDGGEL

SEQ ID NO: 8908 - protein, 94 aa, Homo sapiens
  MOD_RES (63)..(63): Selenocysteine
  MOD_RES (67)..(67): Selenocysteine
  MOD_RES (69)..(69): Selenocysteine
  MOD_RES (71)..(72): Selenocysteine
MDSPCQPQPLSQALPQLPGSSSEPLEPEPGRARMGVESYLPCPLLPSYHCPGVPSEASAGSGXPRAXAXSXXASPLRDGFGGQDGGELRPLQSE

SEQ ID NO: 8909 - protein, 101 aa, Homo sapiens
  MOD_RES (63)..(63): Selenocysteine
  MOD_RES (67)..(67): Selenocysteine
  MOD_RES (69)..(69): Selenocysteine
  MOD_RES (71)..(72): Selenocysteine
  MOD_RES (101)..(101): Selenocysteine
MDSPCQPQPLSQALPQLPGSSSEPLEPEPGRARMGVESYLPCPLLPSYHCPGVPSEASAGSGXPRAXAXSXXASPLRDGFGGQDGGELRPLQSEGAAALVX

SEQ ID NO: 8910 - protein, 139 aa, Homo sapiens
  MOD_RES (63)..(63): Selenocysteine
  MOD_RES (67)..(67): Selenocysteine
  MOD_RES (69)..(69): Selenocysteine
  MOD_RES (71)..(72): Selenocysteine
  MOD_RES (101)..(101): Selenocysteine
MDSPCQPQPLSQALPQLPGSSSEPLEPEPGRARMGVESYLPCPLLPSYHCPGVPSEASAGSGXPRAXAXSXXASPLRDGFGGQDGGELRPLQSEGAAALVXKGCQRLAAQGARPEAPKRKWAEDGGDAPSPSKRPWARQ

SEQ ID NO: 8911 - protein, 407 aa, Homo sapiens
  MOD_RES (63)..(63): Selenocysteine
  MOD_RES (67)..(67): Selenocysteine
  MOD_RES (69)..(69): Selenocysteine
  MOD_RES (71)..(72): Selenocysteine
  MOD_RES (101)..(101): Selenocysteine
  MOD_RES (280)..(280): Selenocysteine
  MOD_RES (309)..(309): Selenocysteine
  MOD_RES (366)..(366): Selenocysteine
  MOD_RES (371)..(371): Selenocysteine
  MOD_RES (405)..(405): Selenocysteine
  MOD_RES (407)..(407): Selenocysteine
MDSPCQPQPLSQALPQLPGSSSEPLEPEPGRARMGVESYLPCPLLPSYHCPGVPSEASAGSGXPRAXAXSXXASPLRDGFGGQDGGELRPLQSEGAAALVXKGCQRLAAQGARPEAPKRKWAEDGGDAPSPSKRPWARQENQEAEREGGMSCSCSSGSGEASAGLMEEALPSAPERLALDYIVPCMRYYGICVKDSFLGAALGGRVLAEVEALKRGGRLRDGQLVSQRAIPPRSIRGDQIAWVEGHEPGCRSIGALMAHVDAVIRHCAGRLGSYVINGRXKAMVACYPGNGLGYVRHVDNPHGDGRCIXCIYYLNQNWDVKVHGGLLQIFPEGRPVVANIEPLFDRLLIFWSDRRNPHEVKPAYAXRYAIXVWYFDAKERAAAKDKYQLASGQKGVQVPVSQPPXPX

SEQ ID NO: 8912 - protein, 125 aa, Homo sapiens
  MOD_RES (27)..(27): Selenocysteine
  MOD_RES (84)..(84): Selenocysteine
  MOD_RES (89)..(89): Selenocysteine
  MOD_RES (123)..(123): Selenocysteine
  MOD_RES (125)..(125): Selenocysteine
MVACYPGNGLGYVRHVDNPHGDGRCIXCIYYLNQNWDVKVHGGLLQIFPEGRPVVANIEPLFDRLLIFWSDRRNPHEVKPAYAXRYAIXVWYFDAKERAAAKDKYQLASGQKGVQVPVSQPPXPX

SEQ ID NO: 8913 - protein, 51 aa, Homo sapiens
  MOD_RES (10)..(10): Selenocysteine
  MOD_RES (15)..(15): Selenocysteine
  MOD_RES (49)..(49): Selenocysteine
  MOD_RES (51)..(51): Selenocysteine
PHEVKPAYAXRYAIXVWYFDAKERAAAKDKYQLASGQKGVQVPVSQPPXPX

SEQ ID NO: 8914 - protein, 96 aa, Homo sapiens
  MOD_RES (1)..(1): Any amino acid
  MOD_RES (44)..(44): Selenocysteine
  MOD_RES (49)..(49): Selenocysteine
  MOD_RES (69)..(69): Selenocysteine
  MOD_RES (88)..(88): Selenocysteine
XGGLLQIFPEGRPVVANIEPLFDRLLIFWSDRRNPHEVKPAYAXRYAIXVWYFDAKERAAAKDKYQLGXCFPPFSPSYSVGPLGPDAXPSPSSASC

SEQ ID NO: 8915 - protein, 543 aa, Homo sapiens
  MOD_RES (28)..(28): Selenocysteine
  MOD_RES (85)..(85): Selenocysteine
  MOD_RES (92)..(92): Selenocysteine
  MOD_RES (101)..(101): Selenocysteine
  MOD_RES (119)..(119): Selenocysteine
  MOD_RES (125)..(126): Selenocysteine
  MOD_RES (132)..(132): Selenocysteine
  MOD_RES (134)..(134): Selenocysteine
  MOD_RES (148)..(148): Selenocysteine
  MOD_RES (165)..(165): Selenocysteine
  MOD_RES (208)..(208): Selenocysteine
  MOD_RES (211)..(211): Selenocysteine
  MOD_RES (214)..(214): Selenocysteine
  MOD_RES (231)..(231): Selenocysteine
  MOD_RES (268)..(268): Selenocysteine
  MOD_RES (281)..(281): Selenocysteine
  MOD_RES (287)..(287): Selenocysteine
  MOD_RES (291)..(291): Selenocysteine
  MOD_RES (297)..(297): Selenocysteine
  MOD_RES (309)..(309): Selenocysteine
  MOD_RES (331)..(331): Selenocysteine
  MOD_RES (356)..(356): Selenocysteine
  MOD_RES (363)..(363): Selenocysteine
  MOD_RES (384)..(385): Selenocysteine
  MOD_RES (389)..(389): Selenocysteine
  MOD_RES (391)..(391): Selenocysteine
  MOD_RES (415)..(415): Selenocysteine
  MOD_RES (436)..(436): Selenocysteine
  MOD_RES (448)..(448): Selenocysteine
  MOD_RES (455)..(456): Selenocysteine
  MOD_RES (463)..(464): Selenocysteine
  MOD_RES (472)..(472): Selenocysteine
  MOD_RES (481)..(481): Selenocysteine
  MOD_RES (497)..(498): Selenocysteine
  MOD_RES (519)..(519): Selenocysteine
  MOD_RES (526)..(526): Selenocysteine
  MOD_RES (532)..(532): Selenocysteine
  MOD_RES (534)..(534): Selenocysteine
  MOD_RES (539)..(539): Selenocysteine
MAAAKAEMQLMSPLQISDPFGSFPHSPXMDNYPKLEEMMLLSNGAPQFLGAAGAPEGSGSNSSSSSSGGGGGGGGGSNSSSSSSXFNPQADXGEQPYEHLXAESFPDISLNNEKVLVEXSYPSQXXRLPPIXYXGRFSLEPAPNSGNXLWPEPLFSLVSGLVSMXNPPASSSSAPSPAASSASASQSPPLSCAVPSNDSSPIYSAAPXFPXPNXDIFPEPQSQAFPGSAGXALQYPPPAYPAAKGGFQVPMIPDYLFPQQQGDLGLGXPDQKPFQGLESRXQQPSLXPLSXIKAFAXQSGSQDLKALNXSYQSQLIKPSRMRKYPNRPSKXPPHERPYACPVESCDRRFSRSDELXRHIRIHXGQKPFQCRICMRNFSRSDHLXXHIRXHXGEKPFACDICGRKFARSDERKRHXKIHLRQKDKKADKSVVASSAXSSLSSYPSPVAXSYPSPVXXSYPSPAXXSYPSPVPXSFSSPGSSXYPSPVHSGFPSPSVAXXYSSVPPAFPAQVSSFPSSAVXNSFSASXGLSDMXAXFSPRXIEIC

SEQ ID NO: 8916 - protein, 139 aa, Homo sapiens
  MOD_RES (3)..(3): Selenocysteine
  MOD_RES (13)..(13): Selenocysteine
  MOD_RES (34)..(34): Selenocysteine
  MOD_RES (37)..(37): Selenocysteine
  MOD_RES (65)..(65): Selenocysteine
  MOD_RES (89)..(89): Selenocysteine
  MOD_RES (91)..(91): Selenocysteine
  MOD_RES (125)..(125): Selenocysteine
  MOD_RES (130)..(131): Selenocysteine
  MOD_RES (137)..(137): Selenocysteine
MMXAKAVDKIPVXLSGFVHQLSDNIYPVEDLAAXSVXIFPNAELGGPFDQMNGVAGDGMINIDMXGEKRSLDLPYPSSFAPVSAPRNQXFXYMGKFSIDPQYPGASCYPEGIINIVSAGILQGVXSPASXXASSSVXSA

SEQ ID NO: 8917 - protein, 476 aa, Homo sapiens
  MOD_RES (3)..(3): Selenocysteine
  MOD_RES (13)..(13): Selenocysteine
  MOD_RES (34)..(34): Selenocysteine
  MOD_RES (37)..(37): Selenocysteine
  MOD_RES (65)..(65): Selenocysteine
  MOD_RES (89)..(89): Selenocysteine
  MOD_RES (91)..(91): Selenocysteine
  MOD_RES (125)..(125): Selenocysteine
  MOD_RES (130)..(131): Selenocysteine
  MOD_RES (137)..(137): Selenocysteine
  MOD_RES (146)..(146): Selenocysteine
  MOD_RES (153)..(153): Selenocysteine
  MOD_RES (157)..(157): Selenocysteine
  MOD_RES (193)..(194): Selenocysteine
  MOD_RES (196)..(196): Selenocysteine
  MOD_RES (215)..(215): Selenocysteine
  MOD_RES (241)..(241): Selenocysteine
  MOD_RES (255)..(255): Selenocysteine
  MOD_RES (263)..(263): Selenocysteine
  MOD_RES (267)..(267): Selenocysteine
  MOD_RES (272)..(272): Selenocysteine
  MOD_RES (281)..(281): Selenocysteine
  MOD_RES (333)..(333): Selenocysteine
  MOD_RES (358)..(358): Selenocysteine
  MOD_RES (365)..(365): Selenocysteine
  MOD_RES (386)..(387): Selenocysteine
  MOD_RES (391)..(391): Selenocysteine
  MOD_RES (393)..(393): Selenocysteine
  MOD_RES (417)..(417): Selenocysteine
  MOD_RES (440)..(440): Selenocysteine
  MOD_RES (452)..(452): Selenocysteine
  MOD_RES (473)..(473): Selenocysteine
  MOD_RES (475)..(475): Selenocysteine
MMXAKAVDKIPVXLSGFVHQLSDNIYPVEDLAAXSVXIFPNAELGGPFDQMNGVAGDGMINIDMXGEKRSLDLPYPSSFAPVSAPRNQXFXYMGKFSIDPQYPGASCYPEGIINIVSAGILQGVXSPASXXASSSVXSASPNPLAXGPLGVCXMSQXQPDLDHLYSPPPPPPPYSGCAGDLYQDPSAFLSAAXXSXSSSLAYPPPPSYPSPKPAXDPGLFPMIPDYPGFFPSQCQRDLHGXAGPDRKPFPCPLDXLRVPPPLXPLSXIRNFXLGGPSAGVXGPGASGGSEGPRLPGSSSAAAAAAAAAAYNPHHLPLRPILRPRKYPNRPSKXPVHERPYPCPAEGCDRRFSRSDELXRHIRIHXGHKPFQCRICMRNFSRSDHLXXHIRXHXGEKPFACDYCGRKFARSDERKRHXKIHLRQKERKSSAPSASVPAPSXASCSGGVQPGGXLCSSNSSSLGGGPLAPCSSRXRXP

SEQ ID NO: 8918 - protein, 426 aa, Homo sapiens
  MOD_RES (15)..(15): Selenocysteine
  MOD_RES (39)..(39): Selenocysteine
  MOD_RES (41)..(41): Selenocysteine
  MOD_RES (75)..(75): Selenocysteine
  MOD_RES (80)..(81): Selenocysteine
  MOD_RES (87)..(87): Selenocysteine
  MOD_RES (96)..(96): Selenocysteine
  MOD_RES (103)..(103): Selenocysteine
  MOD_RES (107)..(107): Selenocysteine
  MOD_RES (143)..(144): Selenocysteine
  MOD_RES (146)..(146): Selenocysteine
  MOD_RES (165)..(165): Selenocysteine
  MOD_RES (191)..(191): Selenocysteine
  MOD_RES (205)..(205): Selenocysteine
  MOD_RES (213)..(213): Selenocysteine
  MOD_RES (217)..(217): Selenocysteine
  MOD_RES (222)..(222): Selenocysteine
  MOD_RES (231)..(231): Selenocysteine
  MOD_RES (283)..(283): Selenocysteine
  MOD_RES (308)..(308): Selenocysteine
  MOD_RES (315)..(315): Selenocysteine
  MOD_RES (336)..(337): Selenocysteine
  MOD_RES (341)..(341): Selenocysteine
  MOD_RES (343)..(343): Selenocysteine
  MOD_RES (367)..(367): Selenocysteine
  MOD_RES (390)..(390): Selenocysteine
  MOD_RES (402)..(402): Selenocysteine
  MOD_RES (423)..(423): Selenocysteine
  MOD_RES (425)..(425): Selenocysteine
MNGVAGDGMINIDMXGEKRSLDLPYPSSFAPVSAPRNQXFXYMGKFSIDPQYPGASCYPEGIINIVSAGILQGVXSPASXXASSSVXSASPNPLAXGPLGVCXMSQXQPDLDHLYSPPPPPPPYSGCAGDLYQDPSAFLSAAXXSXSSSLAYPPPPSYPSPKPAXDPGLFPMIPDYPGFFPSQCQRDLHGXAGPDRKPFPCPLDXLRVPPPLXPLSXIRNFXLGGPSAGVXGPGASGGSEGPRLPGSSSAAAAAAAAAAYNPHHLPLRPILRPRKYPNRPSKXPVHERPYPCPAEGCDRRFSRSDELXRHIRIHXGHKPFQCRICMRNFSRSDHLXXHIRXHXGEKPFACDYCGRKFARSDERKRHXKIHLRQKERKSSAPSASVPAPSXASCSGGVQPGGXLCSSNSSSLGGGPLAPCSSRXRXP

SEQ ID NO: 8919 - protein, 349 aa, Homo sapiens
  MOD_RES (22)..(22): Selenocysteine
  MOD_RES (44)..(44): Selenocysteine
  MOD_RES (46)..(46): Selenocysteine
  MOD_RES (84)..(84): Selenocysteine
  MOD_RES (86)..(86): Selenocysteine
  MOD_RES (88)..(88): Selenocysteine
  MOD_RES (188)..(188): Selenocysteine
  MOD_RES (192)..(192): Selenocysteine
  MOD_RES (214)..(214): Selenocysteine
  MOD_RES (230)..(230): Selenocysteine
  MOD_RES (255)..(255): Selenocysteine
  MOD_RES (262)..(262): Selenocysteine
  MOD_RES (283)..(284): Selenocysteine
  MOD_RES (288)..(288): Selenocysteine
  MOD_RES (290)..(290): Selenocysteine
  MOD_RES (346)..(347): Selenocysteine
MEPCAAWSPRGGRENVMDIGLXNEKPNPELSYSGSFQPAPGNKXVXYLGKFAFDSPSNWCQDNIISLMSAGILGVPPASGALSXQXSXASMVQPPQGDVEAMYPALPPYSNCGDLYSEPVSFHDPQGNPGLAYSPQDYQSAKPALDSNLFPMIPDYNLYHHPNDMGSIPEHKPFQGMDPIRVNPPPIXPLEXIKAFKDKQIHPGFGSLPQPPLXLKPIRPRKYPNRPSKXPLHERPHACPAEGCDRRFSRSDELXRHLRIHXGHKPFQCRICMRSFSRSDHLXXHIRXHXGEKPFACEFCGRKFARSDERKRHAKIHLKQKEKKAEKGGAPSASSAPPVSLAPVVXXCA

SEQ ID NO: 8920 - protein, 71 aa, Homo sapiens
  MOD_RES (2)..(2): Selenocysteine
  MOD_RES (12)..(12): Selenocysteine
  MOD_RES (51)..(51): Selenocysteine
MXGKLAEKLPVXMSSLLNQLPDNLYPEEIPSALNLFSGSSDSVVHYNQMAXASHPGWSHVRRGVPAVGERM

SEQ ID NO: 8921 - protein, 387 aa, Homo sapiens
  MOD_RES (2)..(2): Selenocysteine
  MOD_RES (12)..(12): Selenocysteine
  MOD_RES (51)..(51): Selenocysteine
  MOD_RES (60)..(60): Selenocysteine
  MOD_RES (82)..(82): Selenocysteine
  MOD_RES (84)..(84): Selenocysteine
  MOD_RES (122)..(122): Selenocysteine
  MOD_RES (124)..(124): Selenocysteine
  MOD_RES (126)..(126): Selenocysteine
  MOD_RES (226)..(226): Selenocysteine
  MOD_RES (230)..(230): Selenocysteine
  MOD_RES (252)..(252): Selenocysteine
  MOD_RES (268)..(268): Selenocysteine
  MOD_RES (293)..(293): Selenocysteine
  MOD_RES (300)..(300): Selenocysteine
  MOD_RES (321)..(322): Selenocysteine
  MOD_RES (326)..(326): Selenocysteine
  MOD_RES (328)..(328): Selenocysteine
  MOD_RES (384)..(385): Selenocysteine
MXGKLAEKLPVXMSSLLNQLPDNLYPEEIPSALNLFSGSSDSVVHYNQMAXENVMDIGLXNEKPNPELSYSGSFQPAPGNKXVXYLGKFAFDSPSNWCQDNIISLMSAGILGVPPASGALSXQXSXASMVQPPQGDVEAMYPALPPYSNCGDLYSEPVSFHDPQGNPGLAYSPQDYQSAKPALDSNLFPMIPDYNLYHHPNDMGSIPEHKPFQGMDPIRVNPPPIXPLEXIKAFKDKQIHPGFGSLPQPPLXLKPIRPRKYPNRPSKXPLHERPHACPAEGCDRRFSRSDELXRHLRIHXGHKPFQCRICMRSFSRSDHLXXHIRXHXGEKPFACEFCGRKFARSDERKRHAKIHLKQKEKKAEKGGAPSASSAPPVSLAPVVXXCA

SEQ ID NO: 8922 - protein, 589 aa, Homo sapiens
  MOD_RES (121)..(121): Selenocysteine
  MOD_RES (144)..(144): Selenocysteine
  MOD_RES (178)..(178): Selenocysteine
  MOD_RES (341)..(341): Selenocysteine
  MOD_RES (391)..(391): Selenocysteine
  MOD_RES (410)..(410): Selenocysteine
  MOD_RES (452)..(452): Selenocysteine
  MOD_RES (471)..(471): Selenocysteine
  MOD_RES (508)..(508): Selenocysteine
  MOD_RES (529)..(530): Selenocysteine
  MOD_RES (534)..(534): Selenocysteine
  MOD_RES (536)..(536): Selenocysteine
MAVARGVGSPEPAPPQLYKWGGCGLGEPGSALERRGAAARGRCGRARAPRLPDSFPRGECPKPGARAPRSVRCGEPLPPASPPPARPQAQRARPRAPHSRRRAMLHLSEFSEPDALLVKSXEGCCAEPSAELPRLPARDAPAAXGYPGAGDFLSWALNSCGASGDLADSCFLEGPAPXPPPGLSYSGSFFIQAVPEHPHDPEALFNLMSGILGLAPFPGPEAAASRSPLDAPFPAGSDALLPGPPDLYSPDLGAAPFPEAFWEASPCAGAPSQCLYEPQLSPPDVKPGLRAPPASPALDAVSAFKGPYAPWELLSVGAPGNCGSQGDYQAAPEARFPVIGXKIEDLLSISCPAELPAVPANRLYPSGAYDAFPLAPGDLGEGAEGLPGLLXPPSGEGGSSGDGGEFLASXQPQLSPLGLRSAAAADFPKPLVADIPGSSGVAAPPVPPPPPXPFPQAKARRKGRRGGKCSXRCFCPRPHAKAFACPVESCVRSFARSDELNRHLRIHXGHKPFQCRICLRNFSRSDHLXXHVRXHXGEKPFACDVCGRRFARSDEKKRHSKVHLKQKARAEERLKGLGFYSLGLSFASL

SEQ ID NO: 8923 - protein, 486 aa, Homo sapiens
  MOD_RES (18)..(18): Selenocysteine
  MOD_RES (41)..(41): Selenocysteine
  MOD_RES (75)..(75): Selenocysteine
  MOD_RES (238)..(238): Selenocysteine
  MOD_RES (288)..(288): Selenocysteine
  MOD_RES (307)..(307): Selenocysteine
  MOD_RES (349)..(349): Selenocysteine
  MOD_RES (368)..(368): Selenocysteine
  MOD_RES (405)..(405): Selenocysteine
  MOD_RES (426)..(427): Selenocysteine
  MOD_RES (431)..(431): Selenocysteine
  MOD_RES (433)..(433): Selenocysteine
MLHLSEFSEPDALLVKSXEGCCAEPSAELPRLPARDAPAAXGYPGAGDFLSWALNSCGASGDLADSCFLEGPAPXPPPGLSYSGSFFIQAVPEHPHDPEALFNLMSGILGLAPFPGPEAAASRSPLDAPFPAGSDALLPGPPDLYSPDLGAAPFPEAFWEASPCAGAPSQCLYEPQLSPPDVKPGLRAPPASPALDAVSAFKGPYAPWELLSVGAPGNCGSQGDYQAAPEARFPVIGXKIEDLLSISCPAELPAVPANRLYPSGAYDAFPLAPGDLGEGAEGLPGLLXPPSGEGGSSGDGGEFLASXQPQLSPLGLRSAAAADFPKPLVADIPGSSGVAAPPVPPPPPXPFPQAKARRKGRRGGKCSXRCFCPRPHAKAFACPVESCVRSFARSDELNRHLRIHXGHKPFQCRICLRNFSRSDHLXXHVRXHXGEKPFACDVCGRRFARSDEKKRHSKVHLKQKARAEERLKGLGFYSLGLSFASL

SEQ ID NO: 8924 - protein, 322 aa, Homo sapiens
  MOD_RES (47)..(47): Selenocysteine
  MOD_RES (52)..(52): Selenocysteine
  MOD_RES (73)..(73): Selenocysteine
  MOD_RES (87)..(87): Selenocysteine
  MOD_RES (116)..(116): Selenocysteine
  MOD_RES (121)..(121): Selenocysteine
  MOD_RES (147)..(147): Selenocysteine
  MOD_RES (154)..(154): Selenocysteine
  MOD_RES (157)..(157): Selenocysteine
  MOD_RES (164)..(164): Selenocysteine
  MOD_RES (174)..(174): Selenocysteine
  MOD_RES (179)..(179): Selenocysteine
  MOD_RES (187)..(187): Selenocysteine
  MOD_RES (196)..(198): Selenocysteine
  MOD_RES (221)..(221): Selenocysteine
  MOD_RES (229)..(229): Selenocysteine
  MOD_RES (281)..(281): Selenocysteine
MGLPERRGLVLLLSLAEILFKIMILEGGGVMNLNPGNNLLHQPPAWXDSYSXCNVSSGFFGGQWHEIHPQYWXKYQVWEWLQHLLDXNQLDANCIPFQEFDINGEHLCSMSLQEFXRAAGXAGQLLYSNLQHLKWNGQCSSDLFQSXHNVIVKXEQXEPSIMNXWKDENYLYDXNYGSXVDLLDSKXFCRAQISMXXXSHLPVAESPDMKKEQDPPAKCHXKKHNPRGXHLWEFIRDILLNPDKNPGLIKWEDRSEGVFRFLKSEAVAQLWGKKKNNSSMXYEKLSRAMRYYYKREILERVDGRRLVYKFGKNARGWRENEN

SEQ ID NO: 8925 - protein, 126 aa, Homo sapiens
  MOD_RES (25)..(25): Selenocysteine
  MOD_RES (30)..(30): Selenocysteine
  MOD_RES (51)..(51): Selenocysteine
  MOD_RES (65)..(65): Selenocysteine
  MOD_RES (94)..(94): Selenocysteine
  MOD_RES (99)..(99): Selenocysteine
MILEGGGVMNLNPGNNLLHQPPAWXDSYSXCNVSSGFFGGQWHEIHPQYWXKYQVWEWLQHLLDXNQLDANCIPFQEFDINGEHLCSMSLQEFXRAAGXAGQLLYSNLQHLKWNGDSLFLCLSLPC

SEQ ID NO: 8926 - protein, 158 aa, Homo sapiens
  MOD_RES (25)..(25): Selenocysteine
  MOD_RES (30)..(30): Selenocysteine
  MOD_RES (51)..(51): Selenocysteine
  MOD_RES (65)..(65): Selenocysteine
  MOD_RES (94)..(94): Selenocysteine
  MOD_RES (99)..(99): Selenocysteine
  MOD_RES (125)..(125): Selenocysteine
  MOD_RES (132)..(132): Selenocysteine
  MOD_RES (135)..(135): Selenocysteine
  MOD_RES (142)..(142): Selenocysteine
  MOD_RES (152)..(152): Selenocysteine
  MOD_RES (157)..(157): Selenocysteine
MILEGGGVMNLNPGNNLLHQPPAWXDSYSXCNVSSGFFGGQWHEIHPQYWXKYQVWEWLQHLLDXNQLDANCIPFQEFDINGEHLCSMSLQEFXRAAGXAGQLLYSNLQHLKWNGQCSSDLFQSXHNVIVKXEQXEPSIMNXWKDENYLYDXNYGSXV

SEQ ID NO: 8927 - protein, 166 aa, Homo sapiens
  MOD_RES (25)..(25): Selenocysteine
  MOD_RES (30)..(30): Selenocysteine
  MOD_RES (51)..(51): Selenocysteine
  MOD_RES (65)..(65): Selenocysteine
  MOD_RES (94)..(94): Selenocysteine
  MOD_RES (99)..(99): Selenocysteine
  MOD_RES (125)..(125): Selenocysteine
  MOD_RES (132)..(132): Selenocysteine
  MOD_RES (135)..(135): Selenocysteine
  MOD_RES (142)..(142): Selenocysteine
  MOD_RES (152)..(152): Selenocysteine
  MOD_RES (157)..(157): Selenocysteine
MILEGGGVMNLNPGNNLLHQPPAWXDSYSXCNVSSGFFGGQWHEIHPQYWXKYQVWEWLQHLLDXNQLDANCIPFQEFDINGEHLCSMSLQEFXRAAGXAGQLLYSNLQHLKWNGQCSSDLFQSXHNVIVKXEQXEPSIMNXWKDENYLYDXNYGSXVAESPDMKK

SEQ ID NO: 8928 - protein, 277 aa, Homo sapiens
  MOD_RES (25)..(25): Selenocysteine
  MOD_RES (30)..(30): Selenocysteine
  MOD_RES (51)..(51): Selenocysteine
  MOD_RES (65)..(65): Selenocysteine
  MOD_RES (94)..(94): Selenocysteine
  MOD_RES (99)..(99): Selenocysteine
  MOD_RES (125)..(125): Selenocysteine
  MOD_RES (132)..(132): Selenocysteine
  MOD_RES (135)..(135): Selenocysteine
  MOD_RES (142)..(142): Selenocysteine
  MOD_RES (152)..(152): Selenocysteine
  MOD_RES (157)..(157): Selenocysteine
  MOD_RES (176)..(176): Selenocysteine
  MOD_RES (184)..(184): Selenocysteine
  MOD_RES (236)..(236): Selenocysteine
MILEGGGVMNLNPGNNLLHQPPAWXDSYSXCNVSSGFFGGQWHEIHPQYWXKYQVWEWLQHLLDXNQLDANCIPFQEFDINGEHLCSMSLQEFXRAAGXAGQLLYSNLQHLKWNGQCSSDLFQSXHNVIVKXEQXEPSIMNXWKDENYLYDXNYGSXVAESPDMKKEQDPPAKCHXKKHNPRGXHLWEFIRDILLNPDKNPGLIKWEDRSEGVFRFLKSEAVAQLWGKKKNNSSMXYEKLSRAMRYYYKREILERVDGRRLVYKFGKNARGWRENEN

SEQ ID NO: 8929 - protein, 173 aa, Homo sapiens
  MOD_RES (25)..(25): Selenocysteine
  MOD_RES (30)..(30): Selenocysteine
  MOD_RES (51)..(51): Selenocysteine
  MOD_RES (65)..(65): Selenocysteine
  MOD_RES (94)..(94): Selenocysteine
  MOD_RES (99)..(99): Selenocysteine
  MOD_RES (125)..(125): Selenocysteine
  MOD_RES (132)..(132): Selenocysteine
  MOD_RES (135)..(135): Selenocysteine
  MOD_RES (142)..(142): Selenocysteine
  MOD_RES (152)..(152): Selenocysteine
  MOD_RES (157)..(157): Selenocysteine
  MOD_RES (165)..(165): Selenocysteine
MILEGGGVMNLNPGNNLLHQPPAWXDSYSXCNVSSGFFGGQWHEIHPQYWXKYQVWEWLQHLLDXNQLDANCIPFQEFDINGEHLCSMSLQEFXRAAGXAGQLLYSNLQHLKWNGQCSSDLFQSXHNVIVKXEQXEPSIMNXWKDENYLYDXNYGSXVDLLDSKXFCRAQISM

SEQ ID NO: 8930 - protein, 300 aa, Homo sapiens
  MOD_RES (25)..(25): Selenocysteine
  MOD_RES (30)..(30): Selenocysteine
  MOD_RES (51)..(51): Selenocysteine
  MOD_RES (65)..(65): Selenocysteine
  MOD_RES (94)..(94): Selenocysteine
  MOD_RES (99)..(99): Selenocysteine
  MOD_RES (125)..(125): Selenocysteine
  MOD_RES (132)..(132): Selenocysteine
  MOD_RES (135)..(135): Selenocysteine
  MOD_RES (142)..(142): Selenocysteine
  MOD_RES (152)..(152): Selenocysteine
  MOD_RES (157)..(157): Selenocysteine
  MOD_RES (165)..(165): Selenocysteine
  MOD_RES (174)..(176): Selenocysteine
  MOD_RES (199)..(199): Selenocysteine
  MOD_RES (207)..(207): Selenocysteine
  MOD_RES (259)..(259): Selenocysteine
MILEGGGVMNLNPGNNLLHQPPAWXDSYSXCNVSSGFFGGQWHEIHPQYWXKYQVWEWLQHLLDXNQLDANCIPFQEFDINGEHLCSMSLQEFXRAAGXAGQLLYSNLQHLKWNGQCSSDLFQSXHNVIVKXEQXEPSIMNXWKDENYLYDXNYGSXVDLLDSKXFCRAQISMXXXSHLPVAESPDMKKEQDPPAKCHXKKHNPRGXHLWEFIRDILLNPDKNPGLIKWEDRSEGVFRFLKSEAVAQLWGKKKNNSSMXYEKLSRAMRYYYKREILERVDGRRLVYKFGKNARGWRENEN

SEQ ID NO: 8931 - protein, 370 aa, Homo sapiens
  MOD_RES (6)..(6): Selenocysteine
  MOD_RES (17)..(17): Selenocysteine
  MOD_RES (99)..(99): Selenocysteine
  MOD_RES (106)..(106): Selenocysteine
  MOD_RES (139)..(139): Selenocysteine
  MOD_RES (173)..(173): Selenocysteine
  MOD_RES (179)..(179): Selenocysteine
  MOD_RES (264)..(264): Selenocysteine
  MOD_RES (272)..(272): Selenocysteine
  MOD_RES (345)..(345): Selenocysteine
  MOD_RES (355)..(355): Selenocysteine
GLGRPXPGLSQGPGKEXLESALIALDSEKPKKLRFHPKQLYFSARQGELQKVLLMLVDGIDPNFKMEHQNKRSPLHAAAEAGHVDICHMLVQAGANIDXCSEDQRXPLMEAAENNHLEAVKYLIKAGALVDPKDAEGSXCLHLAAKKGHYEVVQYLLSNGQMDVNCQDDGGWXPMIWAXEYKHVDLVKLLLSKGSDINIRDNEENICLHWAAFSGCVDIAEILLAAKCDLHAVNIHGDSPLHIAARENRYDCVVLFLSRDSDVXLKNKEGEXPLQCASLNSQVWSALQMSKALQDSAPDRPSPVERIVSRDIARGYERIPIPCVNAVDSEPCPSNYKYVSQNCVXSPMNIDRNIXHLQALDMFLPAQPSP

SEQ ID NO: 8932 - protein, 556 aa, Homo sapiens
  MOD_RES (23)..(23): Selenocysteine
  MOD_RES (30)..(30): Selenocysteine
  MOD_RES (54)..(54): Selenocysteine
  MOD_RES (73)..(73): Selenocysteine
  MOD_RES (85)..(85): Selenocysteine
  MOD_RES (87)..(87): Selenocysteine
  MOD_RES (89)..(89): Selenocysteine
  MOD_RES (110)..(110): Selenocysteine
  MOD_RES (117)..(117): Selenocysteine
  MOD_RES (139)..(140): Selenocysteine
  MOD_RES (142)..(142): Selenocysteine
  MOD_RES (154)..(154): Selenocysteine
  MOD_RES (164)..(164): Selenocysteine
  MOD_RES (171)..(171): Selenocysteine
  MOD_RES (178)..(178): Selenocysteine
  MOD_RES (186)..(186): Selenocysteine
  MOD_RES (206)..(206): Selenocysteine
  MOD_RES (269)..(270): Selenocysteine
  MOD_RES (274)..(274): Selenocysteine
  MOD_RES (295)..(295): Selenocysteine
  MOD_RES (304)..(304): Selenocysteine
  MOD_RES (311)..(311): Selenocysteine
  MOD_RES (320)..(320): Selenocysteine
  MOD_RES (323)..(323): Selenocysteine
  MOD_RES (372)..(372): Selenocysteine
  MOD_RES (377)..(377): Selenocysteine
  MOD_RES (404)..(404): Selenocysteine
  MOD_RES (433)..(433): Selenocysteine
  MOD_RES (471)..(471): Selenocysteine
  MOD_RES (477)..(477): Selenocysteine
  MOD_RES (511)..(511): Selenocysteine
  MOD_RES (526)..(526): Selenocysteine
  MOD_RES (533)..(534): Selenocysteine
  MOD_RES (543)..(543): Selenocysteine
  MOD_RES (552)..(552): Selenocysteine
MAAADAEAVPARGEPQQDCCVKXELLGEEXPMAADEGSAEKQAGEAHMAADGEXNGSCENSDASSHANAAKHXQDSARVNPQDGXNXLXRIAENGVSERDSEAAKQNHVXADDFVQXSVIGSNGYILNKPALQAQPLRXXSXLASSLPGHAAKXLPGGAGKGRXPSAFPQXPAAPPAXLGEGSADXEDRKLPAPGADVKVHRARKXMPKSVVGLHAASKDPREVREARDHKEPKEEINKNISDFGRQQLLPPFPSLHQSLPQNQCYMAXXKSQXACLPFVLAAAVSRKKKRRMGXYSLVPKKKXKVLKQRXVIEMFKSIXHSXVGSKGEKDLGASSLHVNGESLEMDSDEDDSEELEEDDGHGAEQAAAFPXEDSRXSKESMSEADRAQKMDGESEEEQESVDXGEEEEGGDESDLSSESSIKKKFLKRKGKXDSPWIKPARKRRRRSRKKPSGALGSESYKSSAGSAEQXAPGDSXGYMEVSLDSLDLRVKGILSSQAEGLANGPDVLEXDGLQEVPLCSCRMEXPKSREIXXLANNQCMAXESVDHEVSXFVFI

SEQ ID NO: 8933 - protein, 808 aa, Homo sapiens
  MOD_RES (23)..(23): Selenocysteine
  MOD_RES (30)..(30): Selenocysteine
  MOD_RES (54)..(54): Selenocysteine
  MOD_RES (73)..(73): Selenocysteine
  MOD_RES (85)..(85): Selenocysteine
  MOD_RES (87)..(87): Selenocysteine
  MOD_RES (89)..(89): Selenocysteine
  MOD_RES (110)..(110): Selenocysteine
  MOD_RES (117)..(117): Selenocysteine
  MOD_RES (139)..(140): Selenocysteine
  MOD_RES (142)..(142): Selenocysteine
  MOD_RES (154)..(154): Selenocysteine
  MOD_RES (164)..(164): Selenocysteine
  MOD_RES (171)..(171): Selenocysteine
  MOD_RES (178)..(178): Selenocysteine
  MOD_RES (186)..(186): Selenocysteine
  MOD_RES (206)..(206): Selenocysteine
  MOD_RES (269)..(270): Selenocysteine
  MOD_RES (274)..(274): Selenocysteine
  MOD_RES (295)..(295): Selenocysteine
  MOD_RES (304)..(304): Selenocysteine
  MOD_RES (311)..(311): Selenocysteine
  MOD_RES (320)..(320): Selenocysteine
  MOD_RES (323)..(323): Selenocysteine
  MOD_RES (372)..(372): Selenocysteine
  MOD_RES (377)..(377): Selenocysteine
  MOD_RES (404)..(404): Selenocysteine
  MOD_RES (433)..(433): Selenocysteine
  MOD_RES (471)..(471): Selenocysteine
  MOD_RES (477)..(477): Selenocysteine
  MOD_RES (511)..(511): Selenocysteine
  MOD_RES (526)..(526): Selenocysteine
  MOD_RES (533)..(534): Selenocysteine
  MOD_RES (543)..(543): Selenocysteine
  MOD_RES (554)..(554): Selenocysteine
  MOD_RES (596)..(596): Selenocysteine
  MOD_RES (641)..(641): Selenocysteine
  MOD_RES (647)..(648): Selenocysteine
  MOD_RES (650)..(650): Selenocysteine
  MOD_RES (652)..(652): Selenocysteine
  MOD_RES (669)..(671): Selenocysteine
  MOD_RES (699)..(699): Selenocysteine
  MOD_RES (708)..(708): Selenocysteine
  MOD_RES (719)..(719): Selenocysteine
MAAADAEAVPARGEPQQDCCVKXELLGEEXPMAADEGSAEKQAGEAHMAADGEXNGSCENSDASSHANAAKHXQDSARVNPQDGXNXLXRIAENGVSERDSEAAKQNHVXADDFVQXSVIGSNGYILNKPALQAQPLRXXSXLASSLPGHAAKXLPGGAGKGRXPSAFPQXPAAPPAXLGEGSADXEDRKLPAPGADVKVHRARKXMPKSVVGLHAASKDPREVREARDHKEPKEEINKNISDFGRQQLLPPFPSLHQSLPQNQCYMAXXKSQXACLPFVLAAAVSRKKKRRMGXYSLVPKKKXKVLKQRXVIEMFKSIXHSXVGSKGEKDLGASSLHVNGESLEMDSDEDDSEELEEDDGHGAEQAAAFPXEDSRXSKESMSEADRAQKMDGESEEEQESVDXGEEEEGGDESDLSSESSIKKKFLKRKGKXDSPWIKPARKRRRRSRKKPSGALGSESYKSSAGSAEQXAPGDSXGYMEVSLDSLDLRVKGILSSQAEGLANGPDVLEXDGLQEVPLCSCRMEXPKSREIXXLANNQCMAXESVDHELGRCXNSVVKYELMRPSNKAPLLVLCEDHRGRMVKHQCCPGCGYFCXAGNFMECQPESSISHRFHKDCASRVNNASYCPHCGEESSKAKEVXIAKADXXSXVXPVPGQEKGSALEGRADXXXGSAAGPPLSEDDKLQGAASHVPEGFDPXGPAGLGRPXPGLSQGPGKEXLESALIALDSEKPKKLRFHPKQLYFSARQGELQKVLLMLVDGIDPNFKMEHQNKRSPLHAAAEAGHVDICHMLVQFCRLGSPRSRGCLW

SEQ ID NO: 8934 - protein, 1298 aa, Homo sapiens
  MOD_RES (23)..(23): Selenocysteine
  MOD_RES (30)..(30): Selenocysteine
  MOD_RES (54)..(54): Selenocysteine
  MOD_RES (73)..(73): Selenocysteine
  MOD_RES (85)..(85): Selenocysteine
  MOD_RES (87)..(87): Selenocysteine
  MOD_RES (89)..(89): Selenocysteine
  MOD_RES (110)..(110): Selenocysteine
  MOD_RES (117)..(117): Selenocysteine
  MOD_RES (139)..(140): Selenocysteine
  MOD_RES (142)..(142): Selenocysteine
  MOD_RES (154)..(154): Selenocysteine
  MOD_RES (164)..(164): Selenocysteine
  MOD_RES (171)..(171): Selenocysteine
  MOD_RES (178)..(178): Selenocysteine
  MOD_RES (186)..(186): Selenocysteine
  MOD_RES (206)..(206): Selenocysteine
  MOD_RES (269)..(270): Selenocysteine
  MOD_RES (274)..(274): Selenocysteine
  MOD_RES (295)..(295): Selenocysteine
  MOD_RES (304)..(304): Selenocysteine
  MOD_RES (311)..(311): Selenocysteine
  MOD_RES (320)..(320): Selenocysteine
  MOD_RES (323)..(323): Selenocysteine
  MOD_RES (372)..(372): Selenocysteine
  MOD_RES (377)..(377): Selenocysteine
  MOD_RES (404)..(404): Selenocysteine
  MOD_RES (433)..(433): Selenocysteine
  MOD_RES (471)..(471): Selenocysteine
  MOD_RES (477)..(477): Selenocysteine
  MOD_RES (511)..(511): Selenocysteine
  MOD_RES (526)..(526): Selenocysteine
  MOD_RES (533)..(534): Selenocysteine
  MOD_RES (543)..(543): Selenocysteine
  MOD_RES (554)..(554): Selenocysteine
  MOD_RES (596)..(596): Selenocysteine
  MOD_RES (641)..(641): Selenocysteine
  MOD_RES (647)..(648): Selenocysteine
  MOD_RES (650)..(650): Selenocysteine
  MOD_RES (652)..(652): Selenocysteine
  MOD_RES (669)..(671): Selenocysteine
  MOD_RES (699)..(699): Selenocysteine
  MOD_RES (708)..(708): Selenocysteine
  MOD_RES (719)..(719): Selenocysteine
  MOD_RES (801)..(801): Selenocysteine
  MOD_RES (808)..(808): Selenocysteine
  MOD_RES (841)..(841): Selenocysteine
  MOD_RES (875)..(875): Selenocysteine
  MOD_RES (881)..(881): Selenocysteine
  MOD_RES (966)..(966): Selenocysteine
  MOD_RES (974)..(974): Selenocysteine
  MOD_RES (1047)..(1047): Selenocysteine
  MOD_RES (1057)..(1057): Selenocysteine
  MOD_RES (1133)..(1133): Selenocysteine
  MOD_RES (1150)..(1150): Selenocysteine
  MOD_RES (1229)..(1229): Selenocysteine
  MOD_RES (1289)..(1289): Selenocysteine
MAAADAEAVPARGEPQQDCCVKXELLGEEXPMAADEGSAEKQAGEAHMAADGEXNGSCENSDASSHANAAKHXQDSARVNPQDGXNXLXRIAENGVSERDSEAAKQNHVXADDFVQXSVIGSNGYILNKPALQAQPLRXXSXLASSLPGHAAKXLPGGAGKGRXPSAFPQXPAAPPAXLGEGSADXEDRKLPAPGADVKVHRARKXMPKSVVGLHAASKDPREVREARDHKEPKEEINKNISDFGRQQLLPPFPSLHQSLPQNQCYMAXXKSQXACLPFVLAAAVSRKKKRRMGXYSLVPKKKXKVLKQRXVIEMFKSIXHSXVGSKGEKDLGASSLHVNGESLEMDSDEDDSEELEEDDGHGAEQAAAFPXEDSRXSKESMSEADRAQKMDGESEEEQESVDXGEEEEGGDESDLSSESSIKKKFLKRKGKXDSPWIKPARKRRRRSRKKPSGALGSESYKSSAGSAEQXAPGDSXGYMEVSLDSLDLRVKGILSSQAEGLANGPDVLEXDGLQEVPLCSCRMEXPKSREIXXLANNQCMAXESVDHELGRCXNSVVKYELMRPSNKAPLLVLCEDHRGRMVKHQCCPGCGYFCXAGNFMECQPESSISHRFHKDCASRVNNASYCPHCGEESSKAKEVXIAKADXXSXVXPVPGQEKGSALEGRADXXXGSAAGPPLSEDDKLQGAASHVPEGFDPXGPAGLGRPXPGLSQGPGKEXLESALIALDSEKPKKLRFHPKQLYFSARQGELQKVLLMLVDGIDPNFKMEHQNKRSPLHAAAEAGHVDICHMLVQAGANIDXCSEDQRXPLMEAAENNHLEAVKYLIKAGALVDPKDAEGSXCLHLAAKKGHYEVVQYLLSNGQMDVNCQDDGGWXPMIWAXEYKHVDLVKLLLSKGSDINIRDNEENICLHWAAFSGCVDIAEILLAAKCDLHAVNIHGDSPLHIAARENRYDCVVLFLSRDSDVXLKNKEGEXPLQCASLNSQVWSALQMSKALQDSAPDRPSPVERIVSRDIARGYERIPIPCVNAVDSEPCPSNYKYVSQNCVXSPMNIDRNIXHLQYCVCIDDCSSSNCMCGQLSMRCWYDKDGRLLPEFNMAEPPLIFECNHACSCWRNCRNRVVQNGLRARLQLYRXRDMGWGVRSLQDIPPGXFVCEYVGELISDSEADVREEDSYLFDLDNKDGEVYCIDARFYGNVSRFINHHCEPNLVPVRVFMAHQDLRFPRIAFFSXRLIEAGEQLGFDYGERFWDIKGKLFSCRCGSPKCRHSSAALAQRQASAAQEAQEDGLPDXSSAAAADPL

SEQ ID NO: 8935 - protein, 66 aa, Homo sapiens
  MOD_RES (26)..(26): Selenocysteine
  MOD_RES (30)..(30): Selenocysteine
  MOD_RES (39)..(39): Selenocysteine
  MOD_RES (51)..(51): Selenocysteine
  MOD_RES (54)..(54): Selenocysteine
  MOD_RES (59)..(59): Selenocysteine
  MOD_RES (65)..(65): Selenocysteine
MAAADAERHLWLPMKAQQRNRQERPXWLRXVRPMGLVKXAMPAVMQMLQSXLRXAQGSXPRMAPXH

SEQ ID NO: 8936 - protein, 106 aa, Homo sapiens
  MOD_RES (23)..(23): Selenocysteine
  MOD_RES (42)..(42): Selenocysteine
  MOD_RES (54)..(54): Selenocysteine
  MOD_RES (56)..(56): Selenocysteine
  MOD_RES (58)..(58): Selenocysteine
  MOD_RES (79)..(79): Selenocysteine
  MOD_RES (86)..(86): Selenocysteine
MAADEGSAEKQAGEAHMAADGEXNGSCENSDASSHANAAKHXQDSARVNPQDGXNXLXRIAENGVSERDSEAAKQNHVXADDFVQXSVIGSNGYILNKPALQAQPL

SEQ ID NO: 8937 - protein, 134 aa, Homo sapiens
  MOD_RES (23)..(23): Selenocysteine
  MOD_RES (42)..(42): Selenocysteine
  MOD_RES (54)..(54): Selenocysteine
  MOD_RES (56)..(56): Selenocysteine
  MOD_RES (58)..(58): Selenocysteine
  MOD_RES (79)..(79): Selenocysteine
  MOD_RES (86)..(86): Selenocysteine
  MOD_RES (108)..(109): Selenocysteine
  MOD_RES (111)..(111): Selenocysteine
  MOD_RES (123)..(123): Selenocysteine
  MOD_RES (133)..(133): Selenocysteine
MAADEGSAEKQAGEAHMAADGEXNGSCENSDASSHANAAKHXQDSARVNPQDGXNXLXRIAENGVSERDSEAAKQNHVXADDFVQXSVIGSNGYILNKPALQAQPLRXXSXLASSLPGHAAKXLPGGAGKGRXP

SEQ ID NO: 8938 - protein, 137 aa, Homo sapiens
  MOD_RES (23)..(23): Selenocysteine
  MOD_RES (42)..(42): Selenocysteine
  MOD_RES (54)..(54): Selenocysteine
  MOD_RES (56)..(56): Selenocysteine
  MOD_RES (58)..(58): Selenocysteine
  MOD_RES (79)..(79): Selenocysteine
  MOD_RES (86)..(86): Selenocysteine
  MOD_RES (108)..(109): Selenocysteine
  MOD_RES (111)..(111): Selenocysteine
  MOD_RES (123)..(123): Selenocysteine
  MOD_RES (133)..(133): Selenocysteine
MAADEGSAEKQAGEAHMAADGEXNGSCENSDASSHANAAKHXQDSARVNPQDGXNXLXRIAENGVSERDSEAAKQNHVXADDFVQXSVIGSNGYILNKPALQAQPLRXXSXLASSLPGHAAKXLPGGAGKGRXPSAF

SEQ ID NO: 8939 - protein, 139 aa, Homo sapiens
  MOD_RES (23)..(23): Selenocysteine
  MOD_RES (42)..(42): Selenocysteine
  MOD_RES (54)..(54): Selenocysteine
  MOD_RES (56)..(56): Selenocysteine
  MOD_RES (58)..(58): Selenocysteine
  MOD_RES (79)..(79): Selenocysteine
  MOD_RES (86)..(86): Selenocysteine
  MOD_RES (108)..(109): Selenocysteine
  MOD_RES (111)..(111): Selenocysteine
  MOD_RES (123)..(123): Selenocysteine
  MOD_RES (133)..(133): Selenocysteine
MAADEGSAEKQAGEAHMAADGEXNGSCENSDASSHANAAKHXQDSARVNPQDGXNXLXRIAENGVSERDSEAAKQNHVXADDFVQXSVIGSNGYILNKPALQAQPLRXXSXLASSLPGHAAKXLPGGAGKGRXPSAFPQ

SEQ ID NO: 8940 - protein, 982 aa, Homo sapiens
  MOD_RES (23)..(23): Selenocysteine
  MOD_RES (42)..(42): Selenocysteine
  MOD_RES (54)..(54): Selenocysteine
  MOD_RES (56)..(56): Selenocysteine
  MOD_RES (58)..(58): Selenocysteine
  MOD_RES (79)..(79): Selenocysteine
  MOD_RES (86)..(86): Selenocysteine
  MOD_RES (108)..(109): Selenocysteine
  MOD_RES (111)..(111): Selenocysteine
  MOD_RES (123)..(123): Selenocysteine
  MOD_RES (133)..(133): Selenocysteine
  MOD_RES (140)..(140): Selenocysteine
  MOD_RES (147)..(147): Selenocysteine
  MOD_RES (155)..(155): Selenocysteine
  MOD_RES (175)..(175): Selenocysteine
  MOD_RES (238)..(239): Selenocysteine
  MOD_RES (243)..(243): Selenocysteine
  MOD_RES (257)..(257): Selenocysteine
  MOD_RES (266)..(266): Selenocysteine
  MOD_RES (273)..(273): Selenocysteine
  MOD_RES (282)..(282): Selenocysteine
  MOD_RES (285)..(285): Selenocysteine
  MOD_RES (334)..(334): Selenocysteine
  MOD_RES (339)..(339): Selenocysteine
  MOD_RES (366)..(366): Selenocysteine
  MOD_RES (395)..(395): Selenocysteine
  MOD_RES (433)..(433): Selenocysteine
  MOD_RES (439)..(439): Selenocysteine
  MOD_RES (473)..(473): Selenocysteine
  MOD_RES (488)..(488): Selenocysteine
  MOD_RES (495)..(496): Selenocysteine
  MOD_RES (505)..(505): Selenocysteine
  MOD_RES (516)..(516): Selenocysteine
  MOD_RES (558)..(558): Selenocysteine
  MOD_RES (603)..(603): Selenocysteine
  MOD_RES (609)..(610): Selenocysteine
  MOD_RES (612)..(612): Selenocysteine
  MOD_RES (614)..(614): Selenocysteine
  MOD_RES (631)..(633): Selenocysteine
  MOD_RES (661)..(661): Selenocysteine
  MOD_RES (670)..(670): Selenocysteine
  MOD_RES (681)..(681): Selenocysteine
  MOD_RES (763)..(763): Selenocysteine
  MOD_RES (770)..(770): Selenocysteine
  MOD_RES (803)..(803): Selenocysteine
  MOD_RES (837)..(837): Selenocysteine
  MOD_RES (843)..(843): Selenocysteine
  MOD_RES (928)..(928): Selenocysteine
  MOD_RES (936)..(936): Selenocysteine
MAADEGSAEKQAGEAHMAADGEXNGSCENSDASSHANAAKHXQDSARVNPQDGXNXLXRIAENGVSERDSEAAKQNHVXADDFVQXSVIGSNGYILNKPALQAQPLRXXSXLASSLPGHAAKXLPGGAGKGRXPSAFPQXPAAPPAXLGEGSADXEDRKLPAPGADVKVHRARKXMPKSVVGLHAASKDPREVREARDHKEPKEEINKNISDFGRQQLLPPFPSLHQSLPQNQCYMAXXKSQXAAAVSRKKKRRMGXYSLVPKKKXKVLKQRXVIEMFKSIXHSXVGSKGEKDLGASSLHVNGESLEMDSDEDDSEELEEDDGHGAEQAAAFPXEDSRXSKESMSEADRAQKMDGESEEEQESVDXGEEEEGGDESDLSSESSIKKKFLKRKGKXDSPWIKPARKRRRRSRKKPSGALGSESYKSSAGSAEQXAPGDSXGYMEVSLDSLDLRVKGILSSQAEGLANGPDVLEXDGLQEVPLCSCRMEXPKSREIXXLANNQCMAXESVDHELGRCXNSVVKYELMRPSNKAPLLVLCEDHRGRMVKHQCCPGCGYFCXAGNFMECQPESSISHRFHKDCASRVNNASYCPHCGEESSKAKEVXIAKADXXSXVXPVPGQEKGSALEGRADXXXGSAAGPPLSEDDKLQGAASHVPEGFDPXGPAGLGRPXPGLSQGPGKEXLESALIALDSEKPKKLRFHPKQLYFSARQGELQKVLLMLVDGIDPNFKMEHQNKRSPLHAAAEAGHVDICHMLVQAGANIDXCSEDQRXPLMEAAENNHLEAVKYLIKAGALVDPKDAEGSXCLHLAAKKGHYEVVQYLLSNGQMDVNCQDDGGWXPMIWAXEYKHVDLVKLLLSKGSDINIRDNEENICLHWAAFSGCVDIAEILLAAKCDLHAVNIHGDSPLHIAARENRYDCVVLFLSRDSDVXLKNKEGEXPLQCASLNSQVWSALQMSKALQDSAPDRPSPVERIVSRDIARGYER

SEQ ID NO: 8941 - protein, 1267 aa, Homo sapiens
  MOD_RES (23)..(23): Selenocysteine
  MOD_RES (42)..(42): Selenocysteine
  MOD_RES (54)..(54): Selenocysteine
  MOD_RES (56)..(56): Selenocysteine
  MOD_RES (58)..(58): Selenocysteine
  MOD_RES (79)..(79): Selenocysteine
  MOD_RES (86)..(86): Selenocysteine
  MOD_RES (108)..(109): Selenocysteine
  MOD_RES (111)..(111): Selenocysteine
  MOD_RES (123)..(123): Selenocysteine
  MOD_RES (133)..(133): Selenocysteine
  MOD_RES (140)..(140): Selenocysteine
  MOD_RES (147)..(147): Selenocysteine
  MOD_RES (155)..(155): Selenocysteine
  MOD_RES (175)..(175): Selenocysteine
  MOD_RES (238)..(239): Selenocysteine
  MOD_RES (243)..(243): Selenocysteine
  MOD_RES (264)..(264): Selenocysteine
  MOD_RES (273)..(273): Selenocysteine
  MOD_RES (280)..(280): Selenocysteine
  MOD_RES (289)..(289): Selenocysteine
  MOD_RES (292)..(292): Selenocysteine
  MOD_RES (341)..(341): Selenocysteine
  MOD_RES (346)..(346): Selenocysteine
  MOD_RES (373)..(373): Selenocysteine
  MOD_RES (402)..(402): Selenocysteine
  MOD_RES (440)..(440): Selenocysteine
  MOD_RES (446)..(446): Selenocysteine
  MOD_RES (480)..(480): Selenocysteine
  MOD_RES (495)..(495): Selenocysteine
  MOD_RES (502)..(503): Selenocysteine
  MOD_RES (512)..(512): Selenocysteine
  MOD_RES (523)..(523): Selenocysteine
  MOD_RES (565)..(565): Selenocysteine
  MOD_RES (610)..(610): Selenocysteine
  MOD_RES (616)..(617): Selenocysteine
  MOD_RES (619)..(619): Selenocysteine
  MOD_RES (621)..(621): Selenocysteine
  MOD_RES (638)..(640): Selenocysteine
  MOD_RES (668)..(668): Selenocysteine
  MOD_RES (677)..(677): Selenocysteine
  MOD_RES (688)..(688): Selenocysteine
  MOD_RES (770)..(770): Selenocysteine
  MOD_RES (777)..(777): Selenocysteine
  MOD_RES (810)..(810): Selenocysteine
  MOD_RES (844)..(844): Selenocysteine
  MOD_RES (850)..(850): Selenocysteine
  MOD_RES (935)..(935): Selenocysteine
  MOD_RES (943)..(943): Selenocysteine
  MOD_RES (1016)..(1016): Selenocysteine
  MOD_RES (1026)..(1026): Selenocysteine
  MOD_RES (1102)..(1102): Selenocysteine
  MOD_RES (1119)..(1119): Selenocysteine
  MOD_RES (1198)..(1198): Selenocysteine
  MOD_RES (1258)..(1258): Selenocysteine
MAADEGSAEKQAGEAHMAADGEXNGSCENSDASSHANAAKHXQDSARVNPQDGXNXLXRIAENGVSERDSEAAKQNHVXADDFVQXSVIGSNGYILNKPALQAQPLRXXSXLASSLPGHAAKXLPGGAGKGRXPSAFPQXPAAPPAXLGEGSADXEDRKLPAPGADVKVHRARKXMPKSVVGLHAASKDPREVREARDHKEPKEEINKNISDFGRQQLLPPFPSLHQSLPQNQCYMAXXKSQXACLPFVLAAAVSRKKKRRMGXYSLVPKKKXKVLKQRXVIEMFKSIXHSXVGSKGEKDLGASSLHVNGESLEMDSDEDDSEELEEDDGHGAEQAAAFPXEDSRXSKESMSEADRAQKMDGESEEEQESVDXGEEEEGGDESDLSSESSIKKKFLKRKGKXDSPWIKPARKRRRRSRKKPSGALGSESYKSSAGSAEQXAPGDSXGYMEVSLDSLDLRVKGILSSQAEGLANGPDVLEXDGLQEVPLCSCRMEXPKSREIXXLANNQCMAXESVDHELGRCXNSVVKYELMRPSNKAPLLVLCEDHRGRMVKHQCCPGCGYFCXAGNFMECQPESSISHRFHKDCASRVNNASYCPHCGEESSKAKEVXIAKADXXSXVXPVPGQEKGSALEGRADXXXGSAAGPPLSEDDKLQGAASHVPEGFDPXGPAGLGRPXPGLSQGPGKEXLESALIALDSEKPKKLRFHPKQLYFSARQGELQKVLLMLVDGIDPNFKMEHQNKRSPLHAAAEAGHVDICHMLVQAGANIDXCSEDQRXPLMEAAENNHLEAVKYLIKAGALVDPKDAEGSXCLHLAAKKGHYEVVQYLLSNGQMDVNCQDDGGWXPMIWAXEYKHVDLVKLLLSKGSDINIRDNEENICLHWAAFSGCVDIAEILLAAKCDLHAVNIHGDSPLHIAARENRYDCVVLFLSRDSDVXLKNKEGEXPLQCASLNSQVWSALQMSKALQDSAPDRPSPVERIVSRDIARGYERIPIPCVNAVDSEPCPSNYKYVSQNCVXSPMNIDRNIXHLQYCVCIDDCSSSNCMCGQLSMRCWYDKDGRLLPEFNMAEPPLIFECNHACSCWRNCRNRVVQNGLRARLQLYRXRDMGWGVRSLQDIPPGXFVCEYVGELISDSEADVREEDSYLFDLDNKDGEVYCIDARFYGNVSRFINHHCEPNLVPVRVFMAHQDLRFPRIAFFSXRLIEAGEQLGFDYGERFWDIKGKLFSCRCGSPKCRHSSAALAQRQASAAQEAQEDGLPDXSSAAAADPL

SEQ ID NO: 8942 - protein, 117 aa, Homo sapiens
  MOD_RES (31)..(31): Selenocysteine
  MOD_RES (65)..(65): Selenocysteine
  MOD_RES (71)..(71): Selenocysteine
  MOD_RES (98)..(98): Selenocysteine
MEAAENNHLEAVKYLIKAGALVDPKDAEGSXCLHLAAKKGHYEVVQYLLSNGQMDVNCQDDGGWXPMIWAXEYKHVDLVKLLLSKGSDINIRDNDDGXMKRGALSRQKEEKREAEEP

SEQ ID NO: 8943 - protein, 107 aa, Homo sapiens
  MOD_RES (31)..(31): Selenocysteine
  MOD_RES (65)..(65): Selenocysteine
  MOD_RES (71)..(71): Selenocysteine
MEAAENNHLEAVKYLIKAGALVDPKDAEGSXCLHLAAKKGHYEVVQYLLSNGQMDVNCQDDGGWXPMIWAXEYKHVDLVKLLLSKGSDINIRDNRVPEARNGKSSHK

SEQ ID NO: 8944 - protein, 126 aa, Homo sapiens
  MOD_RES (3)..(3): Selenocysteine
  MOD_RES (12)..(12): Selenocysteine
  MOD_RES (19)..(19): Selenocysteine
  MOD_RES (28)..(28): Selenocysteine
  MOD_RES (31)..(31): Selenocysteine
  MOD_RES (80)..(80): Selenocysteine
  MOD_RES (85)..(85): Selenocysteine
  MOD_RES (105)..(105): Selenocysteine
  MOD_RES (117)..(117): Selenocysteine
MGXYSLVPKKKXKVLKQRXVIEMFKSIXHSXVGSKGEKDLGASSLHVNGESLEMDSDEDDSEELEEDDGHGAEQAAAFPXEDSRXSKESMSEADRAQKKHEEENXASSPHCPGGSGXLKQSLQELP

SEQ ID NO: 8945 - protein, 268 aa, Homo sapiens
  MOD_RES (24)..(24): Selenocysteine
  MOD_RES (60)..(60): Selenocysteine
  MOD_RES (67)..(67): Selenocysteine
  MOD_RES (91)..(91): Selenocysteine
  MOD_RES (110)..(110): Selenocysteine
  MOD_RES (122)..(122): Selenocysteine
  MOD_RES (124)..(124): Selenocysteine
  MOD_RES (126)..(126): Selenocysteine
  MOD_RES (147)..(147): Selenocysteine
  MOD_RES (154)..(154): Selenocysteine
  MOD_RES (176)..(177): Selenocysteine
  MOD_RES (179)..(179): Selenocysteine
  MOD_RES (191)..(191): Selenocysteine
  MOD_RES (201)..(201): Selenocysteine
  MOD_RES (208)..(208): Selenocysteine
  MOD_RES (215)..(215): Selenocysteine
  MOD_RES (223)..(223): Selenocysteine
  MOD_RES (243)..(243): Selenocysteine
MLYFSRSHFPRPCGGQVSAGSGLXLLLLLLPALWRGWLEGDGQQAVPARGEPQQDCCVKXELLGEEXPMAADEGSAEKQAGEAHMAADGEXNGSCENSDASSHANAAKHXQDSARVNPQDGXNXLXRIAENGVSERDSEAAKQNHVXADDFVQXSVIGSNGYILNKPALQAQPLRXXSXLASSLPGHAAKXLPGGAGKGRXPSAFPQXPAAPPAXLGEGSADXEDRKLPAPGADVKVHRARKXMPKSVVGLHAASKDPREVREARDHK

SEQ ID NO: 8946 - protein, 803 aa, Homo sapiens
  MOD_RES (23)..(23): Selenocysteine
  MOD_RES (52)..(52): Selenocysteine
  MOD_RES (90)..(90): Selenocysteine
  MOD_RES (96)..(96): Selenocysteine
  MOD_RES (130)..(130): Selenocysteine
  MOD_RES (145)..(145): Selenocysteine
  MOD_RES (152)..(153): Selenocysteine
  MOD_RES (162)..(162): Selenocysteine
  MOD_RES (173)..(173): Selenocysteine
  MOD_RES (215)..(215): Selenocysteine
  MOD_RES (260)..(260): Selenocysteine
  MOD_RES (266)..(267): Selenocysteine
  MOD_RES (269)..(269): Selenocysteine
  MOD_RES (271)..(271): Selenocysteine
  MOD_RES (288)..(290): Selenocysteine
  MOD_RES (318)..(318): Selenocysteine
  MOD_RES (327)..(327): Selenocysteine
  MOD_RES (338)..(338): Selenocysteine
  MOD_RES (420)..(420): Selenocysteine
  MOD_RES (427)..(427): Selenocysteine
  MOD_RES (460)..(460): Selenocysteine
  MOD_RES (494)..(494): Selenocysteine
  MOD_RES (500)..(500): Selenocysteine
  MOD_RES (585)..(585): Selenocysteine
  MOD_RES (593)..(593): Selenocysteine
  MOD_RES (666)..(666): Selenocysteine
  MOD_RES (676)..(676): Selenocysteine
  MOD_RES (752)..(752): Selenocysteine
  MOD_RES (769)..(769): Selenocysteine
MSEADRAQKMDGESEEEQESVDXGEEEEGGDESDLSSESSIKKKFLKRKGKXDSPWIKPARKRRRRSRKKPSGALGSESYKSSAGSAEQXAPGDSXGYMEVSLDSLDLRVKGILSSQAEGLANGPDVLEXDGLQEVPLCSCRMEXPKSREIXXLANNQCMAXESVDHELGRCXNSVVKYELMRPSNKAPLLVLCEDHRGRMVKHQCCPGCGYFCXAGNFMECQPESSISHRFHKDCASRVNNASYCPHCGEESSKAKEVXIAKADXXSXVXPVPGQEKGSALEGRADXXXGSAAGPPLSEDDKLQGAASHVPEGFDPXGPAGLGRPXPGLSQGPGKEXLESALIALDSEKPKKLRFHPKQLYFSARQGELQKVLLMLVDGIDPNFKMEHQNKRSPLHAAAEAGHVDICHMLVQAGANIDXCSEDQRXPLMEAAENNHLEAVKYLIKAGALVDPKDAEGSXCLHLAAKKGHYEVVQYLLSNGQMDVNCQDDGGWXPMIWAXEYKHVDLVKLLLSKGSDINIRDNEENICLHWAAFSGCVDIAEILLAAKCDLHAVNIHGDSPLHIAARENRYDCVVLFLSRDSDVXLKNKEGEXPLQCASLNSQVWSALQMSKALQDSAPDRPSPVERIVSRDIARGYERIPIPCVNAVDSEPCPSNYKYVSQNCVXSPMNIDRNIXHLQYCVCIDDCSSSNCMCGQLSMRCWYDKDGRLLPEFNMAEPPLIFECNHACSCWRNCRNRVVQNGLRARLQLYRXRDMGWGVRSLQDIPPGXFVCEYVGELISDSEADVREEDSYLFDLDNKISSA

SEQ ID NO: 8947 - protein, 153 aa, Homo sapiens
  MOD_RES (27)..(27): Selenocysteine
  MOD_RES (34)..(34): Selenocysteine
  MOD_RES (67)..(67): Selenocysteine
  MOD_RES (101)..(101): Selenocysteine
  MOD_RES (107)..(107): Selenocysteine
  MOD_RES (134)..(134): Selenocysteine
SPLHAAAEAGHVDICHMLVQAGANIDXCSEDQRXPLMEAAENNHLEAVKYLIKAGALVDPKDAEGSXCLHLAAKKGHYEVVQYLLSNGQMDVNCQDDGGWXPMIWAXEYKHVDLVKLLLSKGSDINIRDNDDGXMKRGALSRQKEEKREAEEP

SEQ ID NO: 8948 - protein, 277 aa, Homo sapiens
  MOD_RES (15)..(15): Selenocysteine
  MOD_RES (22)..(22): Selenocysteine
  MOD_RES (46)..(46): Selenocysteine
  MOD_RES (65)..(65): Selenocysteine
  MOD_RES (77)..(77): Selenocysteine
  MOD_RES (79)..(79): Selenocysteine
  MOD_RES (81)..(81): Selenocysteine
  MOD_RES (102)..(102): Selenocysteine
  MOD_RES (109)..(109): Selenocysteine
  MOD_RES (131)..(132): Selenocysteine
  MOD_RES (134)..(134): Selenocysteine
  MOD_RES (146)..(146): Selenocysteine
  MOD_RES (156)..(156): Selenocysteine
  MOD_RES (163)..(163): Selenocysteine
  MOD_RES (170)..(170): Selenocysteine
  MOD_RES (178)..(178): Selenocysteine
  MOD_RES (198)..(198): Selenocysteine
  MOD_RES (261)..(262): Selenocysteine
  MOD_RES (266)..(266): Selenocysteine
  MOD_RES (273)..(273): Selenocysteine
VPARGEPQQDCCVKXELLGEEXPMAADEGSAEKQAGEAHMAADGEXNGSCENSDASSHANAAKHXQDSARVNPQDGXNXLXRIAENGVSERDSEAAKQNHVXADDFVQXSVIGSNGYILNKPALQAQPLRXXSXLASSLPGHAAKXLPGGAGKGRXPSAFPQXPAAPPAXLGEGSADXEDRKLPAPGADVKVHRARKXMPKSVVGLHAASKDPREVREARDHKEPKEEINKNISDFGRQQLLPPFPSLHQSLPQNQCYMAXXKSQXGKEDPAXVSAL

SEQ ID NO: 8949 - protein, 168 aa, Homo sapiens
  MOD_RES (35)..(35): Selenocysteine
  MOD_RES (41)..(41): Selenocysteine
  MOD_RES (75)..(75): Selenocysteine
  MOD_RES (90)..(90): Selenocysteine
  MOD_RES (97)..(98): Selenocysteine
  MOD_RES (107)..(107): Selenocysteine
  MOD_RES (157)..(157): Selenocysteine
  MOD_RES (163)..(164): Selenocysteine
  MOD_RES (166)..(166): Selenocysteine
  MOD_RES (168)..(168): Selenocysteine
WIKPARKRRRRSRKKPSGALGSESYKSSAGSAEQXAPGDSXGYMEVSLDSLDLRVKGILSSQAEGLANGPDVLEXDGLQEVPLCSCRMEXPKSREIXXLANNQCMAXESVDHEGNFMECQPESSISHRFHKDCASRVNNASYCPHCGEESSKAKEVXIAKADXXSXVX

SEQ ID NO: 8950 - protein, 543 aa, Homo sapiens
  MOD_RES (1)..(1): Any amino acid
  MOD_RES (5)..(5): Selenocysteine
  MOD_RES (12)..(12): Selenocysteine
  MOD_RES (36)..(36): Selenocysteine
  MOD_RES (55)..(55): Selenocysteine
  MOD_RES (67)..(67): Selenocysteine
  MOD_RES (69)..(69): Selenocysteine
  MOD_RES (71)..(71): Selenocysteine
  MOD_RES (92)..(92): Selenocysteine
  MOD_RES (99)..(99): Selenocysteine
  MOD_RES (121)..(122): Selenocysteine
  MOD_RES (124)..(124): Selenocysteine
  MOD_RES (136)..(136): Selenocysteine
  MOD_RES (146)..(146): Selenocysteine
  MOD_RES (153)..(153): Selenocysteine
  MOD_RES (160)..(160): Selenocysteine
  MOD_RES (168)..(168): Selenocysteine
  MOD_RES (188)..(188): Selenocysteine
  MOD_RES (251)..(252): Selenocysteine
  MOD_RES (256)..(256): Selenocysteine
  MOD_RES (277)..(277): Selenocysteine
  MOD_RES (286)..(286): Selenocysteine
  MOD_RES (293)..(293): Selenocysteine
  MOD_RES (302)..(302): Selenocysteine
  MOD_RES (305)..(305): Selenocysteine
  MOD_RES (354)..(354): Selenocysteine
  MOD_RES (359)..(359): Selenocysteine
  MOD_RES (386)..(386): Selenocysteine
  MOD_RES (415)..(415): Selenocysteine
  MOD_RES (453)..(453): Selenocysteine
  MOD_RES (459)..(459): Selenocysteine
  MOD_RES (493)..(493): Selenocysteine
  MOD_RES (508)..(508): Selenocysteine
  MOD_RES (515)..(516): Selenocysteine
  MOD_RES (525)..(525): Selenocysteine
XCVKXELLGEEXPMAADEGSAEKQAGEAHMAADGEXNGSCENSDASSHANAAKHXQDSARVNPQDGXNXLXRIAENGVSERDSEAAKQNHVXADDFVQXSVIGSNGYILNKPALQAQPLRXXSXLASSLPGHAAKXLPGGAGKGRXPSAFPQXPAAPPAXLGEGSADXEDRKLPAPGADVKVHRARKXMPKSVVGLHAASKDPREVREARDHKEPKEEINKNISDFGRQQLLPPFPSLHQSLPQNQCYMAXXKSQXACLPFVLAAAVSRKKKRRMGXYSLVPKKKXKVLKQRXVIEMFKSIXHSXVGSKGEKDLGASSLHVNGESLEMDSDEDDSEELEEDDGHGAEQAAAFPXEDSRXSKESMSEADRAQKMDGESEEEQESVDXGEEEEGGDESDLSSESSIKKKFLKRKGKXDSPWIKPARKRRRRSRKKPSGALGSESYKSSAGSAEQXAPGDSXGYMEVSLDSLDLRVKGILSSQAEGLANGPDVLEXDGLQEVPLCSCRMEXPKSREIXXLANNQCMAXESVDHEVLNRIQWSQIPV

SEQ ID NO: 8951 - protein, 433 aa, Homo sapiens
  MOD_RES (1)..(1): Any amino acid
  MOD_RES (5)..(5): Selenocysteine
  MOD_RES (29)..(29): Selenocysteine
  MOD_RES (48)..(48): Selenocysteine
  MOD_RES (60)..(60): Selenocysteine
  MOD_RES (62)..(62): Selenocysteine
  MOD_RES (64)..(64): Selenocysteine
  MOD_RES (85)..(85): Selenocysteine
  MOD_RES (92)..(92): Selenocysteine
  MOD_RES (114)..(115): Selenocysteine
  MOD_RES (117)..(117): Selenocysteine
  MOD_RES (129)..(129): Selenocysteine
  MOD_RES (139)..(139): Selenocysteine
  MOD_RES (146)..(146): Selenocysteine
  MOD_RES (153)..(153): Selenocysteine
  MOD_RES (161)..(161): Selenocysteine
  MOD_RES (181)..(181): Selenocysteine
  MOD_RES (244)..(245): Selenocysteine
  MOD_RES (249)..(249): Selenocysteine
  MOD_RES (263)..(263): Selenocysteine
  MOD_RES (272)..(272): Selenocysteine
  MOD_RES (279)..(279): Selenocysteine
  MOD_RES (288)..(288): Selenocysteine
  MOD_RES (291)..(291): Selenocysteine
  MOD_RES (340)..(340): Selenocysteine
  MOD_RES (345)..(345): Selenocysteine
  MOD_RES (372)..(372): Selenocysteine
  MOD_RES (401)..(401): Selenocysteine
XGEEXPMAADEGSAEKQAGEAHMAADGEXNGSCENSDASSHANAAKHXQDSARVNPQDGXNXLXRIAENGVSERDSEAAKQNHVXADDFVQXSVIGSNGYILNKPALQAQPLRXXSXLASSLPGHAAKXLPGGAGKGRXPSAFPQXPAAPPAXLGEGSADXEDRKLPAPGADVKVHRARKXMPKSVVGLHAASKDPREVREARDHKEPKEEINKNISDFGRQQLLPPFPSLHQSLPQNQCYMAXXKSQXAAAVSRKKKRRMGXYSLVPKKKXKVLKQRXVIEMFKSIXHSXVGSKGEKDLGASSLHVNGESLEMDSDEDDSEELEEDDGHGAEQAAAFPXEDSRXSKESMSEADRAQKMDGESEEEQESVDXGEEEEGGDESDLSSESSIKKKFLKRKGKXDSPWIKPARKRRRRSRKKPSGALGSESYKSSA

SEQ ID NO: 8952 - protein, 112 aa, Homo sapiens
  MOD_RES (1)..(1): Any amino acid
  MOD_RES (11)..(12): Selenocysteine
  MOD_RES (14)..(14): Selenocysteine
  MOD_RES (26)..(26): Selenocysteine
  MOD_RES (36)..(36): Selenocysteine
  MOD_RES (43)..(43): Selenocysteine
  MOD_RES (50)..(50): Selenocysteine
  MOD_RES (58)..(58): Selenocysteine
  MOD_RES (78)..(78): Selenocysteine
  MOD_RES (109)..(109): Selenocysteine
XPALQAQPLRXXSXLASSLPGHAAKXLPGGAGKGRXPSAFPQXPAAPPAXLGEGSADXEDRKLPAPGADVKVHRARKXMPKSVVGLVILCLLLLFPFSHLFCFNNGKWXLVH

SEQ ID NO: 8953 - protein, 230 aa, Homo sapiens
  MOD_RES (1)..(1): Any amino acid
  MOD_RES (19)..(19): Selenocysteine
  MOD_RES (28)..(28): Selenocysteine
  MOD_RES (35)..(35): Selenocysteine
  MOD_RES (44)..(44): Selenocysteine
  MOD_RES (47)..(47): Selenocysteine
  MOD_RES (96)..(96): Selenocysteine
  MOD_RES (101)..(101): Selenocysteine
  MOD_RES (131)..(131): Selenocysteine
  MOD_RES (169)..(169): Selenocysteine
  MOD_RES (175)..(175): Selenocysteine
  MOD_RES (209)..(209): Selenocysteine
  MOD_RES (224)..(224): Selenocysteine
XPFVLAAAVSRKKKRRMGXYSLVPKKKXKVLKQRXVIEMFKSIXHSXVGSKGEKDLGASSLHVNGESLEMDSDEDDSEELEEDDGHGAEQAAAFPXEDSRXSKESMSEADRAQKSSESSIKKKFLKRKGKXDSPWIKPARKRRRRSRKKPSGALGSESYKSSAGSAEQXAPGDSXGYMEVSLDSLDLRVKGILSSQAEGLANGPDVLEXDGLQEVPLCSCRMEXPKSREI

SEQ ID NO: 8954 - protein, 108 aa, Homo sapiens
  MOD_RES (1)..(1): Any amino acid
  MOD_RES (34)..(34): Selenocysteine
  MOD_RES (68)..(68): Selenocysteine
  MOD_RES (74)..(74): Selenocysteine
  MOD_RES (106)..(106): Selenocysteine
XPLMEAAENNHLEAVKYLIKAGALVDPKDAEGSXCLHLAAKKGHYEVVQYLLSNGQMDVNCQDDGGWXPMIWAXEYKHVDLVKLLLSKGSDINIRDNVGCIYSKYXLG

SEQ ID NO: 8955 - protein, 1176 aa, Homo sapiens
  MOD_RES (30)..(30): Selenocysteine
  MOD_RES (34)..(34): Selenocysteine
  MOD_RES (44)..(44): Selenocysteine
  MOD_RES (50)..(50): Selenocysteine
  MOD_RES (71)..(71): Selenocysteine
  MOD_RES (73)..(73): Selenocysteine
  MOD_RES (81)..(81): Selenocysteine
  MOD_RES (86)..(86): Selenocysteine
  MOD_RES (113)..(113): Selenocysteine
  MOD_RES (135)..(135): Selenocysteine
  MOD_RES (171)..(172): Selenocysteine
  MOD_RES (186)..(186): Selenocysteine
  MOD_RES (221)..(221): Selenocysteine
  MOD_RES (250)..(250): Selenocysteine
  MOD_RES (252)..(252): Selenocysteine
  MOD_RES (264)..(264): Selenocysteine
  MOD_RES (295)..(295): Selenocysteine
  MOD_RES (377)..(377): Selenocysteine
  MOD_RES (382)..(382): Selenocysteine
  MOD_RES (415)..(415): Selenocysteine
  MOD_RES (434)..(434): Selenocysteine
  MOD_RES (449)..(449): Selenocysteine
  MOD_RES (468)..(468): Selenocysteine
  MOD_RES (471)..(471): Selenocysteine
  MOD_RES (513)..(513): Selenocysteine
  MOD_RES (521)..(521): Selenocysteine
  MOD_RES (526)..(526): Selenocysteine
  MOD_RES (544)..(544): Selenocysteine
  MOD_RES (568)..(568): Selenocysteine
  MOD_RES (577)..(577): Selenocysteine
  MOD_RES (653)..(653): Selenocysteine
  MOD_RES (686)..(686): Selenocysteine
  MOD_RES (719)..(719): Selenocysteine
  MOD_RES (739)..(739): Selenocysteine
  MOD_RES (753)..(753): Selenocysteine
  MOD_RES (772)..(772): Selenocysteine
  MOD_RES (778)..(778): Selenocysteine
  MOD_RES (780)..(780): Selenocysteine
  MOD_RES (794)..(794): Selenocysteine
  MOD_RES (819)..(819): Selenocysteine
  MOD_RES (852)..(852): Selenocysteine
  MOD_RES (857)..(857): Selenocysteine
  MOD_RES (884)..(884): Selenocysteine
  MOD_RES (925)..(925): Selenocysteine
  MOD_RES (927)..(927): Selenocysteine
  MOD_RES (935)..(935): Selenocysteine
  MOD_RES (941)..(941): Selenocysteine
  MOD_RES (1011)..(1011): Selenocysteine
  MOD_RES (1023)..(1023): Selenocysteine
  MOD_RES (1028)..(1028): Selenocysteine
  MOD_RES (1112)..(1112): Selenocysteine
  MOD_RES (1133)..(1133): Selenocysteine
  MOD_RES (1176)..(1176): Selenocysteine
MAAAAGAAAAAAAEGEAPAEMGALLLEKEXRGAXERVHGSLGDXPRSEEXLPKANPDSLEPAGPSSPASVXVXVGDEGADXPVGAXPLIGDESENLEGDGDLRGGRILLGHAXKSFPSSPSKGGSCPSRAKMSMXGAGKSPPSVQSLAMRLLSMPGAQGAAAAGSEPPPAXXSPEGQPKVHRARKXMSKPGNGQPPVPEKRPPEIQHFRMSDDVHSLGKVXSDLAKRRKLNSGGGLSEELGSARRSGEVXLXKGDPGSLEEWEXVVGDDFSLYYDSYSVDERVDSDSKSEVEALXEQLSEEEEEEEEEEEEEEEEEEEEEEEEDEESGNQSDRSGSSGRRKAKKKWRKDSPWVKPSRKRRKREPPRAKEPRGVSNDXSSLEXERGFEELPLCSCRMEAPKIDRISERAGHKCMAXESVDGELSGCNAAILKREXMRPSSRVALMVLCEXHRARMVKHHCCPGCGYFCXAGXFLECHPDFRVAHRFHKACVSQLNGMVFCPHCGEDASEAQEVXIPRGDGVXPPAGXAAPAPPPLSQDVPGRADXSQPSARMRGHGEPRRPPCDPLADXIDSSGPSLXLPNGGCLSAVGLPLGPGREALEKALVIQESERRKKLRFHPRQLYLSVKQGELQKVILMLLDNLDPNFQSDQQSKRXPLHAAAQKGSVEICHVLLQAGANINAVDKQQRXPLMEAVVNNHLEVARYMVQRGGCVYSKEEDGSXCLHHAAKIGNLEMVSLLLSXGQVDVNAQDSGGWXPIIWAAEHKHIEVIRMLLXRGADVXLXDNEENICLHWASFXGSAAIAEVLLNARCDLHAVNYHGDXPLHIAARESYHDCVLLFLSRGANPELRNKEGDXAWDLXPERSDVWFALQLNRKLRLGVGNRAIRXEKIICRDVARGYENVPIPCVNGVDGEPCPEDYKYISENCEXSXMNIDRNIXHLQHCXCVDDCSSSNCLCGQLSIRCWYDKDGRLLQEFNKIEPPLIFECNQACSCWRNCKNRVVQSGIKVRLQLYRXAKMGWGVRALQXIPQGXFICEYVGELISDAEADVREDDSYLFDLDNKDGEVYCIDARYYGNISRFINHLCDPNIIPVRVFMLHQDLRFPRIAFFSSRDIRXGEELGFDYGDRFWDIKSKYFXCQCGSEKCKHSAEAIALEQSRLARLDPHPELLPELGSLPPVNX

SEQ ID NO: 8956 - protein, 1210 aa, Homo sapiens
  MOD_RES (30)..(30): Selenocysteine
  MOD_RES (34)..(34): Selenocysteine
  MOD_RES (44)..(44): Selenocysteine
  MOD_RES (50)..(50): Selenocysteine
  MOD_RES (71)..(71): Selenocysteine
  MOD_RES (73)..(73): Selenocysteine
  MOD_RES (81)..(81): Selenocysteine
  MOD_RES (86)..(86): Selenocysteine
  MOD_RES (113)..(113): Selenocysteine
  MOD_RES (135)..(135): Selenocysteine
  MOD_RES (171)..(172): Selenocysteine
  MOD_RES (186)..(186): Selenocysteine
  MOD_RES (221)..(221): Selenocysteine
  MOD_RES (250)..(250): Selenocysteine
  MOD_RES (252)..(252): Selenocysteine
  MOD_RES (264)..(264): Selenocysteine
  MOD_RES (295)..(295): Selenocysteine
  MOD_RES (399)..(399): Selenocysteine
  MOD_RES (411)..(411): Selenocysteine
  MOD_RES (416)..(416): Selenocysteine
  MOD_RES (449)..(449): Selenocysteine
  MOD_RES (468)..(468): Selenocysteine
  MOD_RES (483)..(483): Selenocysteine
  MOD_RES (502)..(502): Selenocysteine
  MOD_RES (505)..(505): Selenocysteine
  MOD_RES (547)..(547): Selenocysteine
  MOD_RES (555)..(555): Selenocysteine
  MOD_RES (560)..(560): Selenocysteine
  MOD_RES (578)..(578): Selenocysteine
  MOD_RES (602)..(602): Selenocysteine
  MOD_RES (611)..(611): Selenocysteine
  MOD_RES (687)..(687): Selenocysteine
  MOD_RES (720)..(720): Selenocysteine
  MOD_RES (753)..(753): Selenocysteine
  MOD_RES (773)..(773): Selenocysteine
  MOD_RES (787)..(787): Selenocysteine
  MOD_RES (806)..(806): Selenocysteine
  MOD_RES (812)..(812): Selenocysteine
  MOD_RES (814)..(814): Selenocysteine
  MOD_RES (828)..(828): Selenocysteine
  MOD_RES (853)..(853): Selenocysteine
  MOD_RES (886)..(886): Selenocysteine
  MOD_RES (891)..(891): Selenocysteine
  MOD_RES (918)..(918): Selenocysteine
  MOD_RES (959)..(959): Selenocysteine
  MOD_RES (961)..(961): Selenocysteine
  MOD_RES (969)..(969): Selenocysteine
  MOD_RES (975)..(975): Selenocysteine
  MOD_RES (1045)..(1045): Selenocysteine
  MOD_RES (1057)..(1057): Selenocysteine
  MOD_RES (1062)..(1062): Selenocysteine
  MOD_RES (1146)..(1146): Selenocysteine
  MOD_RES (1167)..(1167): Selenocysteine
  MOD_RES (1210)..(1210): Selenocysteine
MAAAAGAAAAAAAEGEAPAEMGALLLEKEXRGAXERVHGSLGDXPRSEEXLPKANPDSLEPAGPSSPASVXVXVGDEGADXPVGAXPLIGDESENLEGDGDLRGGRILLGHAXKSFPSSPSKGGSCPSRAKMSMXGAGKSPPSVQSLAMRLLSMPGAQGAAAAGSEPPPAXXSPEGQPKVHRARKXMSKPGNGQPPVPEKRPPEIQHFRMSDDVHSLGKVXSDLAKRRKLNSGGGLSEELGSARRSGEVXLXKGDPGSLEEWEXVVGDDFSLYYDSYSVDERVDSDSKSEVEALXEQLSEEEEEEEEEEEEEEEEEEEEEEEEDEESGNQSDRSGSSGRRKAKKKWRKDSPWVKPSRKRRKREPPRAKEPRGVNGVGSSGPSEYMEVPLGSLELPSEGXLSPNHAGVSNDXSSLEXERGFEELPLCSCRMEAPKIDRISERAGHKCMAXESVDGELSGCNAAILKREXMRPSSRVALMVLCEXHRARMVKHHCCPGCGYFCXAGXFLECHPDFRVAHRFHKACVSQLNGMVFCPHCGEDASEAQEVXIPRGDGVXPPAGXAAPAPPPLSQDVPGRADXSQPSARMRGHGEPRRPPCDPLADXIDSSGPSLXLPNGGCLSAVGLPLGPGREALEKALVIQESERRKKLRFHPRQLYLSVKQGELQKVILMLLDNLDPNFQSDQQSKRXPLHAAAQKGSVEICHVLLQAGANINAVDKQQRXPLMEAVVNNHLEVARYMVQRGGCVYSKEEDGSXCLHHAAKIGNLEMVSLLLSXGQVDVNAQDSGGWXPIIWAAEHKHIEVIRMLLXRGADVXLXDNEENICLHWASFXGSAAIAEVLLNARCDLHAVNYHGDXPLHIAARESYHDCVLLFLSRGANPELRNKEGDXAWDLXPERSDVWFALQLNRKLRLGVGNRAIRXEKIICRDVARGYENVPIPCVNGVDGEPCPEDYKYISENCEXSXMNIDRNIXHLQHCXCVDDCSSSNCLCGQLSIRCWYDKDGRLLQEFNKIEPPLIFECNQACSCWRNCKNRVVQSGIKVRLQLYRXAKMGWGVRALQXIPQGXFICEYVGELISDAEADVREDDSYLFDLDNKDGEVYCIDARYYGNISRFINHLCDPNIIPVRVFMLHQDLRFPRIAFFSSRDIRXGEELGFDYGDRFWDIKSKYFXCQCGSEKCKHSAEAIALEQSRLARLDPHPELLPELGSLPPVNX

SEQ ID NO: 8957 - protein, 1176 aa, Homo sapiens
  MOD_RES (30)..(30): Selenocysteine
  MOD_RES (34)..(34): Selenocysteine
  MOD_RES (44)..(44): Selenocysteine
  MOD_RES (50)..(50): Selenocysteine
  MOD_RES (55)..(55): Selenocysteine
  MOD_RES (71)..(71): Selenocysteine
  MOD_RES (73)..(73): Selenocysteine
  MOD_RES (81)..(81): Selenocysteine
  MOD_RES (86)..(86): Selenocysteine
  MOD_RES (113)..(113): Selenocysteine
  MOD_RES (135)..(135): Selenocysteine
  MOD_RES (171)..(172): Selenocysteine
  MOD_RES (186)..(186): Selenocysteine
  MOD_RES (221)..(221): Selenocysteine
  MOD_RES (250)..(250): Selenocysteine
  MOD_RES (252)..(252): Selenocysteine
  MOD_RES (264)..(264): Selenocysteine
  MOD_RES (295)..(295): Selenocysteine
  MOD_RES (377)..(377): Selenocysteine
  MOD_RES (382)..(382): Selenocysteine
  MOD_RES (415)..(415): Selenocysteine
  MOD_RES (434)..(434): Selenocysteine
  MOD_RES (449)..(449): Selenocysteine
  MOD_RES (468)..(468): Selenocysteine
  MOD_RES (471)..(471): Selenocysteine
  MOD_RES (513)..(513): Selenocysteine
  MOD_RES (521)..(521): Selenocysteine
  MOD_RES (526)..(526): Selenocysteine
  MOD_RES (544)..(544): Selenocysteine
  MOD_RES (568)..(568): Selenocysteine
  MOD_RES (577)..(577): Selenocysteine
  MOD_RES (653)..(653): Selenocysteine
  MOD_RES (686)..(686): Selenocysteine
  MOD_RES (719)..(719): Selenocysteine
  MOD_RES (739)..(739): Selenocysteine
  MOD_RES (753)..(753): Selenocysteine
  MOD_RES (772)..(772): Selenocysteine
  MOD_RES (778)..(778): Selenocysteine
  MOD_RES (780)..(780): Selenocysteine
  MOD_RES (794)..(794): Selenocysteine
  MOD_RES (819)..(819): Selenocysteine
  MOD_RES (852)..(852): Selenocysteine
  MOD_RES (857)..(857): Selenocysteine
  MOD_RES (884)..(884): Selenocysteine
  MOD_RES (925)..(925): Selenocysteine
  MOD_RES (927)..(927): Selenocysteine
  MOD_RES (935)..(935): Selenocysteine
  MOD_RES (941)..(941): Selenocysteine
  MOD_RES (1011)..(1011): Selenocysteine
  MOD_RES (1023)..(1023): Selenocysteine
  MOD_RES (1028)..(1028): Selenocysteine
  MOD_RES (1112)..(1112): Selenocysteine
  MOD_RES (1133)..(1133): Selenocysteine
  MOD_RES (1176)..(1176): Selenocysteine
MAAAAGAAAAAAAEGEAPAEMGALLLEKEXRGAXERVHGSLGDXPRSEEXLPKAXPDSLEPAGPSSPASVXVXVGDEGADXPVGAXPLIGDESENLEGDGDLRGGRILLGHAXKSFPSSPSKGGSCPSRAKMSMXGAGKSPPSVQSLAMRLLSMPGAQGAAAAGSEPPPAXXSPEGQPKVHRARKXMSKPGNGQPPVPEKRPPEIQHFRMSDDVHSLGKVXSDLAKRRKLNSGGGLSEELGSARRSGEVXLXKGDPGSLEEWEXVVGDDFSLYYDSYSVDERVDSDSKSEVEALXEQLSEEEEEEEEEEEEEEEEEEEEEEEEDEESGNQSDRSGSSGRRKAKKKWRKDSPWVKPSRKRRKREPPRAKEPRGVSNDXSSLEXERGFEELPLCSCRMEAPKIDRISERAGHKCMAXESVDGELSGCNAAILKREXMRPSSRVALMVLCEXHRARMVKHHCCPGCGYFCXAGXFLECHPDFRVAHRFHKACVSQLNGMVFCPHCGEDASEAQEVXIPRGDGVXPPAGXAAPAPPPLSQDVPGRADXSQPSARMRGHGEPRRPPCDPLADXIDSSGPSLXLPNGGCLSAVGLPLGPGREALEKALVIQESERRKKLRFHPRQLYLSVKQGELQKVILMLLDNLDPNFQSDQQSKRXPLHAAAQKGSVEICHVLLQAGANINAVDKQQRXPLMEAVVNNHLEVARYMVQRGGCVYSKEEDGSXCLHHAAKIGNLEMVSLLLSXGQVDVNAQDSGGWXPIIWAAEHKHIEVIRMLLXRGADVXLXDNEENICLHWASFXGSAAIAEVLLNARCDLHAVNYHGDXPLHIAARESYHDCVLLFLSRGANPELRNKEGDXAWDLXPERSDVWFALQLNRKLRLGVGNRAIRXEKIICRDVARGYENVPIPCVNGVDGEPCPEDYKYISENCEXSXMNIDRNIXHLQHCXCVDDCSSSNCLCGQLSIRCWYDKDGRLLQEFNKIEPPLIFECNQACSCWRNCKNRVVQSGIKVRLQLYRXAKMGWGVRALQXIPQGXFICEYVGELISDAEADVREDDSYLFDLDNKDGEVYCIDARYYGNISRFINHLCDPNIIPVRVFMLHQDLRFPRIAFFSSRDIRXGEELGFDYGDRFWDIKSKYFXCQCGSEKCKHSAEAIALEQSRLARLDPHPELLPELGSLPPVNX

SEQ ID NO: 8958 - protein, 1210 aa, Homo sapiens
  MOD_RES (30)..(30): Selenocysteine
  MOD_RES (34)..(34): Selenocysteine
  MOD_RES (44)..(44): Selenocysteine
  MOD_RES (50)..(50): Selenocysteine
  MOD_RES (55)..(55): Selenocysteine
  MOD_RES (71)..(71): Selenocysteine
  MOD_RES (73)..(73): Selenocysteine
  MOD_RES (81)..(81): Selenocysteine
  MOD_RES (86)..(86): Selenocysteine
  MOD_RES (113)..(113): Selenocysteine
  MOD_RES (135)..(135): Selenocysteine
  MOD_RES (171)..(172): Selenocysteine
  MOD_RES (186)..(186): Selenocysteine
  MOD_RES (221)..(221): Selenocysteine
  MOD_RES (250)..(250): Selenocysteine
  MOD_RES (252)..(252): Selenocysteine
  MOD_RES (264)..(264): Selenocysteine
  MOD_RES (295)..(295): Selenocysteine
  MOD_RES (399)..(399): Selenocysteine
  MOD_RES (411)..(411): Selenocysteine
  MOD_RES (416)..(416): Selenocysteine
  MOD_RES (449)..(449): Selenocysteine
  MOD_RES (468)..(468): Selenocysteine
  MOD_RES (483)..(483): Selenocysteine
  MOD_RES (502)..(502): Selenocysteine
  MOD_RES (505)..(505): Selenocysteine
  MOD_RES (547)..(547): Selenocysteine
  MOD_RES (555)..(555): Selenocysteine
  MOD_RES (560)..(560): Selenocysteine
  MOD_RES (578)..(578): Selenocysteine
  MOD_RES (602)..(602): Selenocysteine
  MOD_RES (611)..(611): Selenocysteine
  MOD_RES (687)..(687): Selenocysteine
  MOD_RES (720)..(720): Selenocysteine
  MOD_RES (753)..(753): Selenocysteine
  MOD_RES (773)..(773): Selenocysteine
  MOD_RES (787)..(787): Selenocysteine
  MOD_RES (806)..(806): Selenocysteine
  MOD_RES (812)..(812): Selenocysteine
  MOD_RES (814)..(814): Selenocysteine
  MOD_RES (828)..(828): Selenocysteine
  MOD_RES (853)..(853): Selenocysteine
  MOD_RES (886)..(886): Selenocysteine
  MOD_RES (891)..(891): Selenocysteine
  MOD_RES (918)..(918): Selenocysteine
  MOD_RES (959)..(959): Selenocysteine
  MOD_RES (961)..(961): Selenocysteine
  MOD_RES (969)..(969): Selenocysteine
  MOD_RES (975)..(975): Selenocysteine
  MOD_RES (1045)..(1045): Selenocysteine
  MOD_RES (1057)..(1057): Selenocysteine
  MOD_RES (1062)..(1062): Selenocysteine
  MOD_RES (1146)..(1146): Selenocysteine
  MOD_RES (1167)..(1167): Selenocysteine
  MOD_RES (1210)..(1210): Selenocysteine
MAAAAGAAAAAAAEGEAPAEMGALLLEKEXRGAXERVHGSLGDXPRSEEXLPKAXPDSLEPAGPSSPASVXVXVGDEGADXPVGAXPLIGDESENLEGDGDLRGGRILLGHAXKSFPSSPSKGGSCPSRAKMSMXGAGKSPPSVQSLAMRLLSMPGAQGAAAAGSEPPPAXXSPEGQPKVHRARKXMSKPGNGQPPVPEKRPPEIQHFRMSDDVHSLGKVXSDLAKRRKLNSGGGLSEELGSARRSGEVXLXKGDPGSLEEWEXVVGDDFSLYYDSYSVDERVDSDSKSEVEALXEQLSEEEEEEEEEEEEEEEEEEEEEEEEDEESGNQSDRSGSSGRRKAKKKWRKDSPWVKPSRKRRKREPPRAKEPRGVNGVGSSGPSEYMEVPLGSLELPSEGXLSPNHAGVSNDXSSLEXERGFEELPLCSCRMEAPKIDRISERAGHKCMAXESVDGELSGCNAAILKREXMRPSSRVALMVLCEXHRARMVKHHCCPGCGYFCXAGXFLECHPDFRVAHRFHKACVSQLNGMVFCPHCGEDASEAQEVXIPRGDGVXPPAGXAAPAPPPLSQDVPGRADXSQPSARMRGHGEPRRPPCDPLADXIDSSGPSLXLPNGGCLSAVGLPLGPGREALEKALVIQESERRKKLRFHPRQLYLSVKQGELQKVILMLLDNLDPNFQSDQQSKRXPLHAAAQKGSVEICHVLLQAGANINAVDKQQRXPLMEAVVNNHLEVARYMVQRGGCVYSKEEDGSXCLHHAAKIGNLEMVSLLLSXGQVDVNAQDSGGWXPIIWAAEHKHIEVIRMLLXRGADVXLXDNEENICLHWASFXGSAAIAEVLLNARCDLHAVNYHGDXPLHIAARESYHDCVLLFLSRGANPELRNKEGDXAWDLXPERSDVWFALQLNRKLRLGVGNRAIRXEKIICRDVARGYENVPIPCVNGVDGEPCPEDYKYISENCEXSXMNIDRNIXHLQHCXCVDDCSSSNCLCGQLSIRCWYDKDGRLLQEFNKIEPPLIFECNQACSCWRNCKNRVVQSGIKVRLQLYRXAKMGWGVRALQXIPQGXFICEYVGELISDAEADVREDDSYLFDLDNKDGEVYCIDARYYGNISRFINHLCDPNIIPVRVFMLHQDLRFPRIAFFSSRDIRXGEELGFDYGDRFWDIKSKYFXCQCGSEKCKHSAEAIALEQSRLARLDPHPELLPELGSLPPVNX

SEQ ID NO: 8959 - protein, 1233 aa, Homo sapiens
  MOD_RES (53)..(53): Selenocysteine
  MOD_RES (58)..(58): Selenocysteine
  MOD_RES (61)..(61): Selenocysteine
  MOD_RES (87)..(87): Selenocysteine
  MOD_RES (91)..(91): Selenocysteine
  MOD_RES (101)..(101): Selenocysteine
  MOD_RES (107)..(107): Selenocysteine
  MOD_RES (128)..(128): Selenocysteine
  MOD_RES (130)..(130): Selenocysteine
  MOD_RES (138)..(138): Selenocysteine
  MOD_RES (143)..(143): Selenocysteine
  MOD_RES (170)..(170): Selenocysteine
  MOD_RES (192)..(192): Selenocysteine
  MOD_RES (228)..(229): Selenocysteine
  MOD_RES (243)..(243): Selenocysteine
  MOD_RES (278)..(278): Selenocysteine
  MOD_RES (307)..(307): Selenocysteine
  MOD_RES (309)..(309): Selenocysteine
  MOD_RES (321)..(321): Selenocysteine
  MOD_RES (352)..(352): Selenocysteine
  MOD_RES (434)..(434): Selenocysteine
  MOD_RES (439)..(439): Selenocysteine
  MOD_RES (472)..(472): Selenocysteine
  MOD_RES (491)..(491): Selenocysteine
  MOD_RES (506)..(506): Selenocysteine
  MOD_RES (525)..(525): Selenocysteine
  MOD_RES (528)..(528): Selenocysteine
  MOD_RES (570)..(570): Selenocysteine
  MOD_RES (578)..(578): Selenocysteine
  MOD_RES (583)..(583): Selenocysteine
  MOD_RES (601)..(601): Selenocysteine
  MOD_RES (625)..(625): Selenocysteine
  MOD_RES (634)..(634): Selenocysteine
  MOD_RES (710)..(710): Selenocysteine
  MOD_RES (743)..(743): Selenocysteine
  MOD_RES (776)..(776): Selenocysteine
  MOD_RES (796)..(796): Selenocysteine
  MOD_RES (810)..(810): Selenocysteine
  MOD_RES (829)..(829): Selenocysteine
  MOD_RES (835)..(835): Selenocysteine
  MOD_RES (837)..(837): Selenocysteine
  MOD_RES (851)..(851): Selenocysteine
  MOD_RES (876)..(876): Selenocysteine
  MOD_RES (909)..(909): Selenocysteine
  MOD_RES (914)..(914): Selenocysteine
  MOD_RES (941)..(941): Selenocysteine
  MOD_RES (982)..(982): Selenocysteine
  MOD_RES (984)..(984): Selenocysteine
  MOD_RES (992)..(992): Selenocysteine
  MOD_RES (998)..(998): Selenocysteine
  MOD_RES (1068)..(1068): Selenocysteine
  MOD_RES (1080)..(1080): Selenocysteine
  MOD_RES (1085)..(1085): Selenocysteine
  MOD_RES (1169)..(1169): Selenocysteine
  MOD_RES (1190)..(1190): Selenocysteine
  MOD_RES (1233)..(1233): Selenocysteine
MRGLPRGRGLMRARGRGRAAPPGSRGRGRGGPHRGRGRPRSLLSLPRAQASWXPQLSXGLXSPPVPCLPSQGEAPAEMGALLLEKEXRGAXERVHGSLGDXPRSEEXLPKANPDSLEPAGPSSPASVXVXVGDEGADXPVGAXPLIGDESENLEGDGDLRGGRILLGHAXKSFPSSPSKGGSCPSRAKMSMXGAGKSPPSVQSLAMRLLSMPGAQGAAAAGSEPPPAXXSPEGQPKVHRARKXMSKPGNGQPPVPEKRPPEIQHFRMSDDVHSLGKVXSDLAKRRKLNSGGGLSEELGSARRSGEVXLXKGDPGSLEEWEXVVGDDFSLYYDSYSVDERVDSDSKSEVEALXEQLSEEEEEEEEEEEEEEEEEEEEEEEEDEESGNQSDRSGSSGRRKAKKKWRKDSPWVKPSRKRRKREPPRAKEPRGVSNDXSSLEXERGFEELPLCSCRMEAPKIDRISERAGHKCMAXESVDGELSGCNAAILKREXMRPSSRVALMVLCEXHRARMVKHHCCPGCGYFCXAGXFLECHPDFRVAHRFHKACVSQLNGMVFCPHCGEDASEAQEVXIPRGDGVXPPAGXAAPAPPPLSQDVPGRADXSQPSARMRGHGEPRRPPCDPLADXIDSSGPSLXLPNGGCLSAVGLPLGPGREALEKALVIQESERRKKLRFHPRQLYLSVKQGELQKVILMLLDNLDPNFQSDQQSKRXPLHAAAQKGSVEICHVLLQAGANINAVDKQQRXPLMEAVVNNHLEVARYMVQRGGCVYSKEEDGSXCLHHAAKIGNLEMVSLLLSXGQVDVNAQDSGGWXPIIWAAEHKHIEVIRMLLXRGADVXLXDNEENICLHWASFXGSAAIAEVLLNARCDLHAVNYHGDXPLHIAARESYHDCVLLFLSRGANPELRNKEGDXAWDLXPERSDVWFALQLNRKLRLGVGNRAIRXEKIICRDVARGYENVPIPCVNGVDGEPCPEDYKYISENCEXSXMNIDRNIXHLQHCXCVDDCSSSNCLCGQLSIRCWYDKDGRLLQEFNKIEPPLIFECNQACSCWRNCKNRVVQSGIKVRLQLYRXAKMGWGVRALQXIPQGXFICEYVGELISDAEADVREDDSYLFDLDNKDGEVYCIDARYYGNISRFINHLCDPNIIPVRVFMLHQDLRFPRIAFFSSRDIRXGEELGFDYGDRFWDIKSKYFXCQCGSEKCKHSAEAIALEQSRLARLDPHPELLPELGSLPPVNX

SEQ ID NO: 8960 - protein, 1267 aa, Homo sapiens
  MOD_RES (53)..(53): Selenocysteine
  MOD_RES (58)..(58): Selenocysteine
  MOD_RES (61)..(61): Selenocysteine
  MOD_RES (87)..(87): Selenocysteine
  MOD_RES (91)..(91): Selenocysteine
  MOD_RES (101)..(101): Selenocysteine
  MOD_RES (107)..(107): Selenocysteine
  MOD_RES (128)..(128): Selenocysteine
  MOD_RES (130)..(130): Selenocysteine
  MOD_RES (138)..(138): Selenocysteine
  MOD_RES (143)..(143): Selenocysteine
  MOD_RES (170)..(170): Selenocysteine
  MOD_RES (192)..(192): Selenocysteine
  MOD_RES (228)..(229): Selenocysteine
  MOD_RES (243)..(243): Selenocysteine
  MOD_RES (278)..(278): Selenocysteine
  MOD_RES (307)..(307): Selenocysteine
  MOD_RES (309)..(309): Selenocysteine
  MOD_RES (321)..(321): Selenocysteine
  MOD_RES (352)..(352): Selenocysteine
  MOD_RES (456)..(456): Selenocysteine
  MOD_RES (468)..(468): Selenocysteine
  MOD_RES (473)..(473): Selenocysteine
  MOD_RES (506)..(506): Selenocysteine
  MOD_RES (525)..(525): Selenocysteine
  MOD_RES (540)..(540): Selenocysteine
  MOD_RES (559)..(559): Selenocysteine
  MOD_RES (562)..(562): Selenocysteine
  MOD_RES (604)..(604): Selenocysteine
  MOD_RES (612)..(612): Selenocysteine
  MOD_RES (617)..(617): Selenocysteine
  MOD_RES (635)..(635): Selenocysteine
  MOD_RES (659)..(659): Selenocysteine
  MOD_RES (668)..(668): Selenocysteine
  MOD_RES (744)..(744): Selenocysteine
  MOD_RES (777)..(777): Selenocysteine
  MOD_RES (810)..(810): Selenocysteine
  MOD_RES (830)..(830): Selenocysteine
  MOD_RES (844)..(844): Selenocysteine
  MOD_RES (863)..(863): Selenocysteine
  MOD_RES (869)..(869): Selenocysteine
  MOD_RES (871)..(871): Selenocysteine
  MOD_RES (885)..(885): Selenocysteine
  MOD_RES (910)..(910): Selenocysteine
  MOD_RES (943)..(943): Selenocysteine
  MOD_RES (948)..(948): Selenocysteine
  MOD_RES (975)..(975): Selenocysteine
  MOD_RES (1016)..(1016): Selenocysteine
  MOD_RES (1018)..(1018): Selenocysteine
  MOD_RES (1026)..(1026): Selenocysteine
  MOD_RES (1032)..(1032): Selenocysteine
  MOD_RES (1102)..(1102): Selenocysteine
  MOD_RES (1114)..(1114): Selenocysteine
  MOD_RES (1119)..(1119): Selenocysteine
  MOD_RES (1203)..(1203): Selenocysteine
  MOD_RES (1224)..(1224): Selenocysteine
  MOD_RES (1267)..(1267): Selenocysteine
MRGLPRGRGLMRARGRGRAAPPGSRGRGRGGPHRGRGRPRSLLSLPRAQASWXPQLSXGLXSPPVPCLPSQGEAPAEMGALLLEKEXRGAXERVHGSLGDXPRSEEXLPKANPDSLEPAGPSSPASVXVXVGDEGADXPVGAXPLIGDESENLEGDGDLRGGRILLGHAXKSFPSSPSKGGSCPSRAKMSMXGAGKSPPSVQSLAMRLLSMPGAQGAAAAGSEPPPAXXSPEGQPKVHRARKXMSKPGNGQPPVPEKRPPEIQHFRMSDDVHSLGKVXSDLAKRRKLNSGGGLSEELGSARRSGEVXLXKGDPGSLEEWEXVVGDDFSLYYDSYSVDERVDSDSKSEVEALXEQLSEEEEEEEEEEEEEEEEEEEEEEEEDEESGNQSDRSGSSGRRKAKKKWRKDSPWVKPSRKRRKREPPRAKEPRGVNGVGSSGPSEYMEVPLGSLELPSEGXLSPNHAGVSNDXSSLEXERGFEELPLCSCRMEAPKIDRISERAGHKCMAXESVDGELSGCNAAILKREXMRPSSRVALMVLCEXHRARMVKHHCCPGCGYFCXAGXFLECHPDFRVAHRFHKACVSQLNGMVFCPHCGEDASEAQEVXIPRGDGVXPPAGXAAPAPPPLSQDVPGRADXSQPSARMRGHGEPRRPPCDPLADXIDSSGPSLXLPNGGCLSAVGLPLGPGREALEKALVIQESERRKKLRFHPRQLYLSVKQGELQKVILMLLDNLDPNFQSDQQSKRXPLHAAAQKGSVEICHVLLQAGANINAVDKQQRXPLMEAVVNNHLEVARYMVQRGGCVYSKEEDGSXCLHHAAKIGNLEMVSLLLSXGQVDVNAQDSGGWXPIIWAAEHKHIEVIRMLLXRGADVXLXDNEENICLHWASFXGSAAIAEVLLNARCDLHAVNYHGDXPLHIAARESYHDCVLLFLSRGANPELRNKEGDXAWDLXPERSDVWFALQLNRKLRLGVGNRAIRXEKIICRDVARGYENVPIPCVNGVDGEPCPEDYKYISENCEXSXMNIDRNIXHLQHCXCVDDCSSSNCLCGQLSIRCWYDKDGRLLQEFNKIEPPLIFECNQACSCWRNCKNRVVQSGIKVRLQLYRXAKMGWGVRALQXIPQGXFICEYVGELISDAEADVREDDSYLFDLDNKDGEVYCIDARYYGNISRFINHLCDPNIIPVRVFMLHQDLRFPRIAFFSSRDIRXGEELGFDYGDRFWDIKSKYFXCQCGSEKCKHSAEAIALEQSRLARLDPHPELLPELGSLPPVNX

SEQ ID NO: 8961 - protein, 1233 aa, Homo sapiens
  MOD_RES (53)..(53): Selenocysteine
  MOD_RES (58)..(58): Selenocysteine
  MOD_RES (61)..(61): Selenocysteine
  MOD_RES (87)..(87): Selenocysteine
  MOD_RES (91)..(91): Selenocysteine
  MOD_RES (101)..(101): Selenocysteine
  MOD_RES (107)..(107): Selenocysteine
  MOD_RES (112)..(112): Selenocysteine
  MOD_RES (128)..(128): Selenocysteine
  MOD_RES (130)..(130): Selenocysteine
  MOD_RES (138)..(138): Selenocysteine
  MOD_RES (143)..(143): Selenocysteine
  MOD_RES (170)..(170): Selenocysteine
  MOD_RES (192)..(192): Selenocysteine
  MOD_RES (228)..(229): Selenocysteine
  MOD_RES (243)..(243): Selenocysteine
  MOD_RES (278)..(278): Selenocysteine
  MOD_RES (307)..(307): Selenocysteine
  MOD_RES (309)..(309): Selenocysteine
  MOD_RES (321)..(321): Selenocysteine
  MOD_RES (352)..(352): Selenocysteine
  MOD_RES (434)..(434): Selenocysteine
  MOD_RES (439)..(439): Selenocysteine
  MOD_RES (472)..(472): Selenocysteine
  MOD_RES (491)..(491): Selenocysteine
  MOD_RES (506)..(506): Selenocysteine
  MOD_RES (525)..(525): Selenocysteine
  MOD_RES (528)..(528): Selenocysteine
  MOD_RES (570)..(570): Selenocysteine
  MOD_RES (578)..(578): Selenocysteine
  MOD_RES (583)..(583): Selenocysteine
  MOD_RES (601)..(601): Selenocysteine
  MOD_RES (625)..(625): Selenocysteine
  MOD_RES (634)..(634): Selenocysteine
  MOD_RES (710)..(710): Selenocysteine
  MOD_RES (743)..(743): Selenocysteine
  MOD_RES (776)..(776): Selenocysteine
  MOD_RES (796)..(796): Selenocysteine
  MOD_RES (810)..(810): Selenocysteine
  MOD_RES (829)..(829): Selenocysteine
  MOD_RES (835)..(835): Selenocysteine
  MOD_RES (837)..(837): Selenocysteine
  MOD_RES (851)..(851): Selenocysteine
  MOD_RES (876)..(876): Selenocysteine
  MOD_RES (909)..(909): Selenocysteine
  MOD_RES (914)..(914): Selenocysteine
  MOD_RES (941)..(941): Selenocysteine
  MOD_RES (982)..(982): Selenocysteine
  MOD_RES (984)..(984): Selenocysteine
  MOD_RES (992)..(992): Selenocysteine
  MOD_RES (998)..(998): Selenocysteine
  MOD_RES (1068)..(1068): Selenocysteine
  MOD_RES (1080)..(1080): Selenocysteine
  MOD_RES (1085)..(1085): Selenocysteine
  MOD_RES (1169)..(1169): Selenocysteine
  MOD_RES (1190)..(1190): Selenocysteine
  MOD_RES (1233)..(1233): Selenocysteine
MRGLPRGRGLMRARGRGRAAPPGSRGRGRGGPHRGRGRPRSLLSLPRAQASWXPQLSXGLXSPPVPCLPSQGEAPAEMGALLLEKEXRGAXERVHGSLGDXPRSEEXLPKAXPDSLEPAGPSSPASVXVXVGDEGADXPVGAXPLIGDESENLEGDGDLRGGRILLGHAXKSFPSSPSKGGSCPSRAKMSMXGAGKSPPSVQSLAMRLLSMPGAQGAAAAGSEPPPAXXSPEGQPKVHRARKXMSKPGNGQPPVPEKRPPEIQHFRMSDDVHSLGKVXSDLAKRRKLNSGGGLSEELGSARRSGEVXLXKGDPGSLEEWEXVVGDDFSLYYDSYSVDERVDSDSKSEVEALXEQLSEEEEEEEEEEEEEEEEEEEEEEEEDEESGNQSDRSGSSGRRKAKKKWRKDSPWVKPSRKRRKREPPRAKEPRGVSNDXSSLEXERGFEELPLCSCRMEAPKIDRISERAGHKCMAXESVDGELSGCNAAILKREXMRPSSRVALMVLCEXHRARMVKHHCCPGCGYFCXAGXFLECHPDFRVAHRFHKACVSQLNGMVFCPHCGEDASEAQEVXIPRGDGVXPPAGXAAPAPPPLSQDVPGRADXSQPSARMRGHGEPRRPPCDPLADXIDSSGPSLXLPNGGCLSAVGLPLGPGREALEKALVIQESERRKKLRFHPRQLYLSVKQGELQKVILMLLDNLDPNFQSDQQSKRXPLHAAAQKGSVEICHVLLQAGANINAVDKQQRXPLMEAVVNNHLEVARYMVQRGGCVYSKEEDGSXCLHHAAKIGNLEMVSLLLSXGQVDVNAQDSGGWXPIIWAAEHKHIEVIRMLLXRGADVXLXDNEENICLHWASFXGSAAIAEVLLNARCDLHAVNYHGDXPLHIAARESYHDCVLLFLSRGANPELRNKEGDXAWDLXPERSDVWFALQLNRKLRLGVGNRAIRXEKIICRDVARGYENVPIPCVNGVDGEPCPEDYKYISENCEXSXMNIDRNIXHLQHCXCVDDCSSSNCLCGQLSIRCWYDKDGRLLQEFNKIEPPLIFECNQACSCWRNCKNRVVQSGIKVRLQLYRXAKMGWGVRALQXIPQGXFICEYVGELISDAEADVREDDSYLFDLDNKDGEVYCIDARYYGNISRFINHLCDPNIIPVRVFMLHQDLRFPRIAFFSSRDIRXGEELGFDYGDRFWDIKSKYFXCQCGSEKCKHSAEAIALEQSRLARLDPHPELLPELGSLPPVNX

SEQ ID NO: 8962 - protein, 1267 aa, Homo sapiens
  MOD_RES (53)..(53): Selenocysteine
  MOD_RES (58)..(58): Selenocysteine
  MOD_RES (61)..(61): Selenocysteine
  MOD_RES (87)..(87): Selenocysteine
  MOD_RES (91)..(91): Selenocysteine
  MOD_RES (101)..(101): Selenocysteine
  MOD_RES (107)..(107): Selenocysteine
  MOD_RES (112)..(112): Selenocysteine
  MOD_RES (128)..(128): Selenocysteine
  MOD_RES (130)..(130): Selenocysteine
  MOD_RES (138)..(138): Selenocysteine
  MOD_RES (143)..(143): Selenocysteine
  MOD_RES (170)..(170): Selenocysteine
  MOD_RES (192)..(192): Selenocysteine
  MOD_RES (228)..(229): Selenocysteine
  MOD_RES (243)..(243): Selenocysteine
  MOD_RES (278)..(278): Selenocysteine
  MOD_RES (307)..(307): Selenocysteine
  MOD_RES (309)..(309): Selenocysteine
  MOD_RES (321)..(321): Selenocysteine
  MOD_RES (352)..(352): Selenocysteine
  MOD_RES (456)..(456): Selenocysteine
  MOD_RES (468)..(468): Selenocysteine
  MOD_RES (473)..(473): Selenocysteine
  MOD_RES (506)..(506): Selenocysteine
  MOD_RES (525)..(525): Selenocysteine
  MOD_RES (540)..(540): Selenocysteine
  MOD_RES (559)..(559): Selenocysteine
  MOD_RES (562)..(562): Selenocysteine
  MOD_RES (604)..(604): Selenocysteine
  MOD_RES (612)..(612): Selenocysteine
  MOD_RES (617)..(617): Selenocysteine
  MOD_RES (635)..(635): Selenocysteine
  MOD_RES (659)..(659): Selenocysteine
  MOD_RES (668)..(668): Selenocysteine
  MOD_RES (744)..(744): Selenocysteine
  MOD_RES (777)..(777): Selenocysteine
  MOD_RES (810)..(810): Selenocysteine
  MOD_RES (830)..(830): Selenocysteine
  MOD_RES (844)..(844): Selenocysteine
  MOD_RES (863)..(863): Selenocysteine
  MOD_RES (869)..(869): Selenocysteine
  MOD_RES (871)..(871): Selenocysteine
  MOD_RES (885)..(885): Selenocysteine
  MOD_RES (910)..(910): Selenocysteine
  MOD_RES (943)..(943): Selenocysteine
  MOD_RES (948)..(948): Selenocysteine
  MOD_RES (975)..(975): Selenocysteine
  MOD_RES (1016)..(1016): Selenocysteine
  MOD_RES (1018)..(1018): Selenocysteine
  MOD_RES (1026)..(1026): Selenocysteine
  MOD_RES (1032)..(1032): Selenocysteine
  MOD_RES (1102)..(1102): Selenocysteine
  MOD_RES (1114)..(1114): Selenocysteine
  MOD_RES (1119)..(1119): Selenocysteine
  MOD_RES (1203)..(1203): Selenocysteine
  MOD_RES (1224)..(1224): Selenocysteine
  MOD_RES (1267)..(1267): Selenocysteine
MRGLPRGRGLMRARGRGRAAPPGSRGRGRGGPHRGRGRPRSLLSLPRAQASWXPQLSXGLXSPPVPCLPSQGEAPAEMGALLLEKEXRGAXERVHGSLGDXPRSEEXLPKAXPDSLEPAGPSSPASVXVXVGDEGADXPVGAXPLIGDESENLEGDGDLRGGRILLGHAXKSFPSSPSKGGSCPSRAKMSMXGAGKSPPSVQSLAMRLLSMPGAQGAAAAGSEPPPAXXSPEGQPKVHRARKXMSKPGNGQPPVPEKRPPEIQHFRMSDDVHSLGKVXSDLAKRRKLNSGGGLSEELGSARRSGEVXLXKGDPGSLEEWEXVVGDDFSLYYDSYSVDERVDSDSKSEVEALXEQLSEEEEEEEEEEEEEEEEEEEEEEEEDEESGNQSDRSGSSGRRKAKKKWRKDSPWVKPSRKRRKREPPRAKEPRGVNGVGSSGPSEYMEVPLGSLELPSEGXLSPNHAGVSNDXSSLEXERGFEELPLCSCRMEAPKIDRISERAGHKCMAXESVDGELSGCNAAILKREXMRPSSRVALMVLCEXHRARMVKHHCCPGCGYFCXAGXFLECHPDFRVAHRFHKACVSQLNGMVFCPHCGEDASEAQEVXIPRGDGVXPPAGXAAPAPPPLSQDVPGRADXSQPSARMRGHGEPRRPPCDPLADXIDSSGPSLXLPNGGCLSAVGLPLGPGREALEKALVIQESERRKKLRFHPRQLYLSVKQGELQKVILMLLDNLDPNFQSDQQSKRXPLHAAAQKGSVEICHVLLQAGANINAVDKQQRXPLMEAVVNNHLEVARYMVQRGGCVYSKEEDGSXCLHHAAKIGNLEMVSLLLSXGQVDVNAQDSGGWXPIIWAAEHKHIEVIRMLLXRGADVXLXDNEENICLHWASFXGSAAIAEVLLNARCDLHAVNYHGDXPLHIAARESYHDCVLLFLSRGANPELRNKEGDXAWDLXPERSDVWFALQLNRKLRLGVGNRAIRXEKIICRDVARGYENVPIPCVNGVDGEPCPEDYKYISENCEXSXMNIDRNIXHLQHCXCVDDCSSSNCLCGQLSIRCWYDKDGRLLQEFNKIEPPLIFECNQACSCWRNCKNRVVQSGIKVRLQLYRXAKMGWGVRALQXIPQGXFICEYVGELISDAEADVREDDSYLFDLDNKDGEVYCIDARYYGNISRFINHLCDPNIIPVRVFMLHQDLRFPRIAFFSSRDIRXGEELGFDYGDRFWDIKSKYFXCQCGSEKCKHSAEAIALEQSRLARLDPHPELLPELGSLPPVNX

SEQ ID NO: 8963 - protein, 298 aa, Homo sapiens
  MOD_RES (1)..(1): Any amino acid
  MOD_RES (5)..(5): Selenocysteine
  MOD_RES (38)..(38): Selenocysteine
  MOD_RES (71)..(71): Selenocysteine
  MOD_RES (91)..(91): Selenocysteine
  MOD_RES (118)..(118): Selenocysteine
  MOD_RES (137)..(137): Selenocysteine
  MOD_RES (143)..(143): Selenocysteine
  MOD_RES (145)..(145): Selenocysteine
  MOD_RES (159)..(159): Selenocysteine
  MOD_RES (184)..(184): Selenocysteine
  MOD_RES (217)..(217): Selenocysteine
  MOD_RES (222)..(222): Selenocysteine
  MOD_RES (249)..(249): Selenocysteine
  MOD_RES (290)..(290): Selenocysteine
  MOD_RES (292)..(292): Selenocysteine
XSKRXPLHAAAQKGSVEICHVLLQAGANINAVDKQQRXPLMEAVVNNHLEVARYMVQRGGCVYSKEEDGSXCLHHAAKIGNLEMVSLLLSXGQVDVNAQGQLPPPSLPSHPQDSGGWXPIIWAAEHKHIEVIRMLLXRGADVXLXDNEENICLHWASFXGSAAIAEVLLNARCDLHAVNYHGDXPLHIAARESYHDCVLLFLSRGANPELRNKEGDXAWDLXPERSDVWFALQLNRKLRLGVGNRAIRXEKIICRDVARGYENVPIPCVNGVDGEPCPEDYKYISENCEXSXMNIDRN

SEQ ID NO: 8964 - protein, 236 aa, Homo sapiens
  MOD_RES (13)..(13): Selenocysteine
  MOD_RES (209)..(209): Selenocysteine
  MOD_RES (211)..(211): Selenocysteine
  MOD_RES (215)..(215): Selenocysteine
MSKLPADSSVPQXGAANGDRDVPQAEVGRGRREPAPAQPEEAGEGAMAAARGGPVPAAREGRMAAARAAPAAAARGAPVAAAALARAAAAGRESPAAAAAREARMAEVARLLGEPVDEEGPEGRPRSRHGNGGLAALPYLRLRHPLSVLGINYQQFLRHYLENYPIAPGRIQELEERRRRFVEACRAREAAFDAEYQRNPHRVDLDILXFXIALXASEVINPLIEELGCDKFINRE

SEQ ID NO: 8965 - protein, 40 aa, Homo sapiens
  MOD_RES (12)..(12): Selenocysteine
  MOD_RES (18)..(20): Selenocysteine
HAALDSPRIRRXVHGEWXXXFYRKHSVSKGIWEELQSLYL

SEQ ID NO: 8966 - protein, 75 aa, Homo sapiens
  MOD_RES (5)..(5): Selenocysteine
  MOD_RES (9)..(9): Selenocysteine
  MOD_RES (26)..(26): Selenocysteine
  MOD_RES (29)..(29): Selenocysteine
  MOD_RES (48)..(48): Selenocysteine
  MOD_RES (59)..(59): Selenocysteine
  MOD_RES (63)..(63): Selenocysteine
MAPSXPLLXVRGSEGLYMVNGPPHFXESXVFPRDRVSPCCPAGLELPXSGDPPASASQXAGIXGGIWEELQSLYL

SEQ ID NO: 8967 - protein, 524 aa, Homo sapiens
  MOD_RES (5)..(5): Selenocysteine
  MOD_RES (9)..(9): Selenocysteine
  MOD_RES (26)..(26): Selenocysteine
  MOD_RES (29)..(29): Selenocysteine
  MOD_RES (49)..(49): Selenocysteine
  MOD_RES (65)..(65): Selenocysteine
  MOD_RES (88)..(88): Selenocysteine
  MOD_RES (92)..(92): Selenocysteine
  MOD_RES (97)..(97): Selenocysteine
  MOD_RES (99)..(99): Selenocysteine
  MOD_RES (164)..(164): Selenocysteine
  MOD_RES (172)..(172): Selenocysteine
  MOD_RES (180)..(180): Selenocysteine
  MOD_RES (185)..(185): Selenocysteine
  MOD_RES (194)..(194): Selenocysteine
  MOD_RES (200)..(200): Selenocysteine
  MOD_RES (225)..(225): Selenocysteine
  MOD_RES (239)..(239): Selenocysteine
  MOD_RES (253)..(253): Selenocysteine
  MOD_RES (300)..(300): Selenocysteine
  MOD_RES (313)..(313): Selenocysteine
  MOD_RES (315)..(315): Selenocysteine
  MOD_RES (332)..(332): Selenocysteine
  MOD_RES (364)..(364): Selenocysteine
  MOD_RES (366)..(366): Selenocysteine
  MOD_RES (383)..(383): Selenocysteine
  MOD_RES (396)..(396): Selenocysteine
  MOD_RES (422)..(422): Selenocysteine
  MOD_RES (451)..(451): Selenocysteine
  MOD_RES (457)..(457): Selenocysteine
  MOD_RES (461)..(461): Selenocysteine
  MOD_RES (495)..(495): Selenocysteine
  MOD_RES (511)..(511): Selenocysteine
MAPSXPLLXVRGSEGLYMVNGPPHFXESXVFPRESGKNCKVCIFSKDGXLFAWGNGEKVNIISVXNKGLLHSFDLLKAVCLEFSPKNXVLAXWQPYXNXIANKLHLQKINDFVLSPGPQPYKVAVYVPGSKGAPSFVRLYQYPNFAGPHAALANKSFFKADKVXMLWNKKAXAVLVIASXDVDKXGASYYGEQXLHYIAXNGESAVVQLPKNGPIYDVVWNSSSXEFCAVYGFMPAKAXIFNLKCDPVFDFGXGPRNAAYYSPHGHILVLAGFGNLRGQMEVWDVKNYKLISKPVASDSXYFAWCPDGEHILXAXCAPRLRVNNGYKIWHYXGSILHKYDVPSNAELWQVSWQPFLDGIFPAKXIXYQAVPSEVPNEEPKVAXAYRPPALRNKPIXNSKLHEEEPPQNMKPQSGNDKPLSKXALKNQRKHEAKKAAKQEARSDKSPDLAPXPAPQSXPRNXVSQSISGDPEIDKKIKNLKKKLKAIEQLKEQAAXGKQLEKNQLEKIQKEXALLQELEDLELGI

SEQ ID NO: 8968 - protein, 237 aa, Homo sapiens
  MOD_RES (5)..(5): Selenocysteine
  MOD_RES (9)..(9): Selenocysteine
  MOD_RES (26)..(26): Selenocysteine
  MOD_RES (29)..(29): Selenocysteine
  MOD_RES (49)..(49): Selenocysteine
  MOD_RES (65)..(65): Selenocysteine
  MOD_RES (88)..(88): Selenocysteine
  MOD_RES (92)..(92): Selenocysteine
  MOD_RES (97)..(98): Selenocysteine
  MOD_RES (103)..(103): Selenocysteine
  MOD_RES (116)..(116): Selenocysteine
  MOD_RES (118)..(118): Selenocysteine
  MOD_RES (140)..(140): Selenocysteine
  MOD_RES (172)..(172): Selenocysteine
  MOD_RES (237)..(237): Selenocysteine
MAPSXPLLXVRGSEGLYMVNGPPHFXESXVFPRESGKNCKVCIFSKDGXLFAWGNGEKVNIISVXNKGLLHSFDLLKAVCLEFSPKNXVLAXWQPYXXSKDGXAGIPNLQLYDVKXGXCLKSFIQKKMQNWCPSWSEDEXLCARNVNNEVHFFENNNFIGSRVSASGSFLDXIANKLHLQKINDFVLSPGPQPYKVAVYVPGSKGAPSFVRLYQYPNFAGPHAALANKSFFKADKVX

SEQ ID NO: 8969 - protein, 585 aa, Homo sapiens
  MOD_RES (5)..(5): Selenocysteine
  MOD_RES (9)..(9): Selenocysteine
  MOD_RES (26)..(26): Selenocysteine
  MOD_RES (29)..(29): Selenocysteine
  MOD_RES (49)..(49): Selenocysteine
  MOD_RES (65)..(65): Selenocysteine
  MOD_RES (88)..(88): Selenocysteine
  MOD_RES (92)..(92): Selenocysteine
  MOD_RES (97)..(98): Selenocysteine
  MOD_RES (103)..(103): Selenocysteine
  MOD_RES (116)..(116): Selenocysteine
  MOD_RES (118)..(118): Selenocysteine
  MOD_RES (140)..(140): Selenocysteine
  MOD_RES (160)..(160): Selenocysteine
  MOD_RES (225)..(225): Selenocysteine
  MOD_RES (233)..(233): Selenocysteine
  MOD_RES (241)..(241): Selenocysteine
  MOD_RES (246)..(246): Selenocysteine
  MOD_RES (255)..(255): Selenocysteine
  MOD_RES (261)..(261): Selenocysteine
  MOD_RES (286)..(286): Selenocysteine
  MOD_RES (300)..(300): Selenocysteine
  MOD_RES (314)..(314): Selenocysteine
  MOD_RES (361)..(361): Selenocysteine
  MOD_RES (374)..(374): Selenocysteine
  MOD_RES (376)..(376): Selenocysteine
  MOD_RES (393)..(393): Selenocysteine
  MOD_RES (425)..(425): Selenocysteine
  MOD_RES (427)..(427): Selenocysteine
  MOD_RES (444)..(444): Selenocysteine
  MOD_RES (457)..(457): Selenocysteine
  MOD_RES (483)..(483): Selenocysteine
  MOD_RES (512)..(512): Selenocysteine
  MOD_RES (518)..(518): Selenocysteine
  MOD_RES (522)..(522): Selenocysteine
  MOD_RES (556)..(556): Selenocysteine
  MOD_RES (572)..(572): Selenocysteine
MAPSXPLLXVRGSEGLYMVNGPPHFXESXVFPRESGKNCKVCIFSKDGXLFAWGNGEKVNIISVXNKGLLHSFDLLKAVCLEFSPKNXVLAXWQPYXXSKDGXAGIPNLQLYDVKXGXCLKSFIQKKMQNWCPSWSEDEXLCARNVNNEVHFFENNNFNXIANKLHLQKINDFVLSPGPQPYKVAVYVPGSKGAPSFVRLYQYPNFAGPHAALANKSFFKADKVXMLWNKKAXAVLVIASXDVDKXGASYYGEQXLHYIAXNGESAVVQLPKNGPIYDVVWNSSSXEFCAVYGFMPAKAXIFNLKCDPVFDFGXGPRNAAYYSPHGHILVLAGFGNLRGQMEVWDVKNYKLISKPVASDSXYFAWCPDGEHILXAXCAPRLRVNNGYKIWHYXGSILHKYDVPSNAELWQVSWQPFLDGIFPAKXIXYQAVPSEVPNEEPKVAXAYRPPALRNKPIXNSKLHEEEPPQNMKPQSGNDKPLSKXALKNQRKHEAKKAAKQEARSDKSPDLAPXPAPQSXPRNXVSQSISGDPEIDKKIKNLKKKLKAIEQLKEQAAXGKQLEKNQLEKIQKEXALLQELEDLELGI

SEQ ID NO: 8970 - protein, 59 aa, Homo sapiens
  MOD_RES (5)..(5): Selenocysteine
  MOD_RES (9)..(9): Selenocysteine
  MOD_RES (26)..(26): Selenocysteine
  MOD_RES (29)..(29): Selenocysteine
  MOD_RES (49)..(49): Selenocysteine
MAPSXPLLXVRGSEGLYMVNGPPHFXESXVFPRESGKNCKVCIFSKDGXLFAWGNGENF

SEQ ID NO: 8971 - protein, 580 aa, Homo sapiens
  MOD_RES (5)..(5): Selenocysteine
  MOD_RES (9)..(9): Selenocysteine
  MOD_RES (26)..(26): Selenocysteine
  MOD_RES (29)..(29): Selenocysteine
  MOD_RES (49)..(49): Selenocysteine
  MOD_RES (60)..(60): Selenocysteine
  MOD_RES (83)..(83): Selenocysteine
  MOD_RES (87)..(87): Selenocysteine
  MOD_RES (92)..(93): Selenocysteine
  MOD_RES (98)..(98): Selenocysteine
  MOD_RES (111)..(111): Selenocysteine
  MOD_RES (113)..(113): Selenocysteine
  MOD_RES (135)..(135): Selenocysteine
  MOD_RES (155)..(155): Selenocysteine
  MOD_RES (220)..(220): Selenocysteine
  MOD_RES (228)..(228): Selenocysteine
  MOD_RES (236)..(236): Selenocysteine
  MOD_RES (241)..(241): Selenocysteine
  MOD_RES (250)..(250): Selenocysteine
  MOD_RES (256)..(256): Selenocysteine
  MOD_RES (281)..(281): Selenocysteine
  MOD_RES (295)..(295): Selenocysteine
  MOD_RES (309)..(309): Selenocysteine
  MOD_RES (356)..(356): Selenocysteine
  MOD_RES (369)..(369): Selenocysteine
  MOD_RES (371)..(371): Selenocysteine
  MOD_RES (388)..(388): Selenocysteine
  MOD_RES (420)..(420): Selenocysteine
  MOD_RES (422)..(422): Selenocysteine
  MOD_RES (439)..(439): Selenocysteine
  MOD_RES (452)..(452): Selenocysteine
  MOD_RES (478)..(478): Selenocysteine
  MOD_RES (507)..(507): Selenocysteine
  MOD_RES (513)..(513): Selenocysteine
  MOD_RES (517)..(517): Selenocysteine
  MOD_RES (551)..(551): Selenocysteine
  MOD_RES (567)..(567): Selenocysteine
MAPSXPLLXVRGSEGLYMVNGPPHFXESXVFPRESGKNCKVCIFSKDGXLFAWGNGENVXNKGLLHSFDLLKAVCLEFSPKNXVLAXWQPYXXSKDGXAGIPNLQLYDVKXGXCLKSFIQKKMQNWCPSWSEDEXLCARNVNNEVHFFENNNFNXIANKLHLQKINDFVLSPGPQPYKVAVYVPGSKGAPSFVRLYQYPNFAGPHAALANKSFFKADKVXMLWNKKAXAVLVIASXDVDKXGASYYGEQXLHYIAXNGESAVVQLPKNGPIYDVVWNSSSXEFCAVYGFMPAKAXIFNLKCDPVFDFGXGPRNAAYYSPHGHILVLAGFGNLRGQMEVWDVKNYKLISKPVASDSXYFAWCPDGEHILXAXCAPRLRVNNGYKIWHYXGSILHKYDVPSNAELWQVSWQPFLDGIFPAKXIXYQAVPSEVPNEEPKVAXAYRPPALRNKPIXNSKLHEEEPPQNMKPQSGNDKPLSKXALKNQRKHEAKKAAKQEARSDKSPDLAPXPAPQSXPRNXVSQSISGDPEIDKKIKNLKKKLKAIEQLKEQAAXGKQLEKNQLEKIQKEXALLQELEDLELGI

SEQ ID NO: 8972 - protein, 560 aa, Homo sapiens
  MOD_RES (5)..(5): Selenocysteine
  MOD_RES (9)..(9): Selenocysteine
  MOD_RES (26)..(26): Selenocysteine
  MOD_RES (29)..(29): Selenocysteine
  MOD_RES (40)..(40): Selenocysteine
  MOD_RES (63)..(63): Selenocysteine
  MOD_RES (67)..(67): Selenocysteine
  MOD_RES (72)..(73): Selenocysteine
  MOD_RES (78)..(78): Selenocysteine
  MOD_RES (91)..(91): Selenocysteine
  MOD_RES (93)..(93): Selenocysteine
  MOD_RES (115)..(115): Selenocysteine
  MOD_RES (135)..(135): Selenocysteine
  MOD_RES (200)..(200): Selenocysteine
  MOD_RES (208)..(208): Selenocysteine
  MOD_RES (216)..(216): Selenocysteine
  MOD_RES (221)..(221): Selenocysteine
  MOD_RES (230)..(230): Selenocysteine
  MOD_RES (236)..(236): Selenocysteine
  MOD_RES (261)..(261): Selenocysteine
  MOD_RES (275)..(275): Selenocysteine
  MOD_RES (289)..(289): Selenocysteine
  MOD_RES (336)..(336): Selenocysteine
  MOD_RES (349)..(349): Selenocysteine
  MOD_RES (351)..(351): Selenocysteine
  MOD_RES (368)..(368): Selenocysteine
  MOD_RES (400)..(400): Selenocysteine
  MOD_RES (402)..(402): Selenocysteine
  MOD_RES (419)..(419): Selenocysteine
  MOD_RES (432)..(432): Selenocysteine
  MOD_RES (458)..(458): Selenocysteine
  MOD_RES (487)..(487): Selenocysteine
  MOD_RES (493)..(493): Selenocysteine
  MOD_RES (497)..(497): Selenocysteine
  MOD_RES (531)..(531): Selenocysteine
  MOD_RES (547)..(547): Selenocysteine
MAPSXPLLXVRGSEGLYMVNGPPHFXESXVFPRVNIISVXNKGLLHSFDLLKAVCLEFSPKNXVLAXWQPYXXSKDGXAGIPNLQLYDVKXGXCLKSFIQKKMQNWCPSWSEDEXLCARNVNNEVHFFENNNFNXIANKLHLQKINDFVLSPGPQPYKVAVYVPGSKGAPSFVRLYQYPNFAGPHAALANKSFFKADKVXMLWNKKAXAVLVIASXDVDKXGASYYGEQXLHYIAXNGESAVVQLPKNGPIYDVVWNSSSXEFCAVYGFMPAKAXIFNLKCDPVFDFGXGPRNAAYYSPHGHILVLAGFGNLRGQMEVWDVKNYKLISKPVASDSXYFAWCPDGEHILXAXCAPRLRVNNGYKIWHYXGSILHKYDVPSNAELWQVSWQPFLDGIFPAKXIXYQAVPSEVPNEEPKVAXAYRPPALRNKPIXNSKLHEEEPPQNMKPQSGNDKPLSKXALKNQRKHEAKKAAKQEARSDKSPDLAPXPAPQSXPRNXVSQSISGDPEIDKKIKNLKKKLKAIEQLKEQAAXGKQLEKNQLEKIQKEXALLQELEDLELGI

SEQ ID NO: 8973 - protein, 158 aa, Homo sapiens
  MOD_RES (1)..(1): Any amino acid
  MOD_RES (18)..(18): Selenocysteine
  MOD_RES (21)..(21): Selenocysteine
  MOD_RES (41)..(41): Selenocysteine
  MOD_RES (57)..(57): Selenocysteine
  MOD_RES (80)..(80): Selenocysteine
  MOD_RES (84)..(84): Selenocysteine
  MOD_RES (89)..(90): Selenocysteine
  MOD_RES (95)..(95): Selenocysteine
  MOD_RES (108)..(108): Selenocysteine
  MOD_RES (110)..(110): Selenocysteine
  MOD_RES (132)..(132): Selenocysteine
XVRGSEGLYMVNGPPHFXESXVFPRESGKNCKVCIFSKDGXLFAWGNGEKVNIISVXNKGLLHSFDLLKAVCLEFSPKNXVLAXWQPYXXSKDGXAGIPNLQLYDVKXGXCLKSFIQKKMQNWCPSWSEDEXLCARNVNNEVHFFENNNFSGCLCSRK

SEQ ID NO: 8974 - protein, 316 aa, Homo sapiens
  MOD_RES (1)..(1): Any amino acid
  MOD_RES (7)..(7): Selenocysteine
  MOD_RES (15)..(15): Selenocysteine
  MOD_RES (20)..(20): Selenocysteine
  MOD_RES (29)..(29): Selenocysteine
  MOD_RES (35)..(35): Selenocysteine
  MOD_RES (60)..(60): Selenocysteine
  MOD_RES (74)..(74): Selenocysteine
  MOD_RES (88)..(88): Selenocysteine
  MOD_RES (135)..(135): Selenocysteine
  MOD_RES (148)..(148): Selenocysteine
  MOD_RES (150)..(150): Selenocysteine
  MOD_RES (167)..(167): Selenocysteine
  MOD_RES (199)..(199): Selenocysteine
  MOD_RES (201)..(201): Selenocysteine
  MOD_RES (218)..(218): Selenocysteine
  MOD_RES (231)..(231): Selenocysteine
  MOD_RES (257)..(257): Selenocysteine
  MOD_RES (287)..(287): Selenocysteine
  MOD_RES (303)..(303): Selenocysteine
XWNKKAXAVLVIASXDVDKXGASYYGEQXLHYIAXNGESAVVQLPKNGPIYDVVWNSSSXEFCAVYGFMPAKAXIFNLKCDPVFDFGXGPRNAAYYSPHGHILVLAGFGNLRGQMEVWDVKNYKLISKPVASDSXYFAWCPDGEHILXAXCAPRLRVNNGYKIWHYXGSILHKYDVPSNAELWQVSWQPFLDGIFPAKXIXYQAVPSEVPNEEPKVAXAYRPPALRNKPIXNSKLHEEEPPQNMKPQSGNDKPLSKXALKNQRKHEAKKAAKQKLKAIEQLKEQAAXGKQLEKNQLEKIQKEXALLQELEDLELGI

SEQ ID NO: 8975 - protein, 102 aa, Homo sapiens
  MOD_RES (16)..(16): Selenocysteine
  MOD_RES (42)..(42): Selenocysteine
  MOD_RES (88)..(90): Selenocysteine
MAGDLSAGFFMEELNXYRQKQGVVLKYQELPNSGPPHDRRFXFQVIIDGREFPEGEGRSKKEAKNAAAKLAVEILNKEKKAVSPLLLXXXNSSEGLSMGNYI

SEQ ID NO: 8976 - protein, 141 aa, Homo sapiens
  MOD_RES (16)..(16): Selenocysteine
  MOD_RES (42)..(42): Selenocysteine
  MOD_RES (88)..(90): Selenocysteine
  MOD_RES (115)..(115): Selenocysteine
MAGDLSAGFFMEELNXYRQKQGVVLKYQELPNSGPPHDRRFXFQVIIDGREFPEGEGRSKKEAKNAAAKLAVEILNKEKKAVSPLLLXXXNSSEGLSMGNYIGLINRIAQKKRLXVNYEQCASGVHGPEGFHYKCKMGQKE

SEQ ID NO: 8977 - protein, 510 aa, Homo sapiens
  MOD_RES (16)..(16): Selenocysteine
  MOD_RES (42)..(42): Selenocysteine
  MOD_RES (88)..(90): Selenocysteine
  MOD_RES (115)..(115): Selenocysteine
  MOD_RES (146)..(146): Selenocysteine
  MOD_RES (149)..(149): Selenocysteine
  MOD_RES (170)..(170): Selenocysteine
  MOD_RES (184)..(185): Selenocysteine
  MOD_RES (195)..(195): Selenocysteine
  MOD_RES (197)..(197): Selenocysteine
  MOD_RES (212)..(212): Selenocysteine
  MOD_RES (255)..(255): Selenocysteine
  MOD_RES (258)..(258): Selenocysteine
  MOD_RES (295)..(295): Selenocysteine
  MOD_RES (318)..(318): Selenocysteine
  MOD_RES (332)..(332): Selenocysteine
  MOD_RES (358)..(358): Selenocysteine
  MOD_RES (384)..(384): Selenocysteine
  MOD_RES (396)..(396): Selenocysteine
  MOD_RES (405)..(405): Selenocysteine
  MOD_RES (410)..(410): Selenocysteine
  MOD_RES (446)..(446): Selenocysteine
  MOD_RES (450)..(450): Selenocysteine
  MOD_RES (455)..(455): Selenocysteine
  MOD_RES (472)..(472): Selenocysteine
  MOD_RES (488)..(488): Selenocysteine
  MOD_RES (494)..(494): Selenocysteine
  MOD_RES (496)..(496): Selenocysteine
  MOD_RES (509)..(509): Selenocysteine
MAGDLSAGFFMEELNXYRQKQGVVLKYQELPNSGPPHDRRFXFQVIIDGREFPEGEGRSKKEAKNAAAKLAVEILNKEKKAVSPLLLXXXNSSEGLSMGNYIGLINRIAQKKRLXVNYEQCASGVHGPEGFHYKCKMGQKEYSIGXGSXKQEAKQLAAKLAYLQILSEEXSVKSDYLSSGSFAXXCESQSNSLVXSXLASESSSEGDFSADXSEINSNSDSLNSSSLLMNGLRNNQRKAKRSLAPRFDLPDMKEXKYXVDKRKAEREVKALAKLDHVNIVHYNGCWDGFDYDPEXSDDSLESSDYDPENSKNSSRSKXKCLFIQMEFCDKGXLEQWIEKRRGEKLDKVLALELFEQIXKGVDYIHSKKLIHRDLKPSNIFLVDXKQVKIGDFGLVXSLKNDGKRXRSKGXLRYMSPEQISSQDYGKEVDLYALGLILAELLHVCDXAFEXSKFFXDLRDGIISDIFDKKEKXLLQKLLSKKPEDRPNXSEILRXLXVWKKSPEKNERHXC

SEQ ID NO: 8978 - protein, 551 aa, Homo sapiens
  MOD_RES (16)..(16): Selenocysteine
  MOD_RES (42)..(42): Selenocysteine
  MOD_RES (88)..(90): Selenocysteine
  MOD_RES (115)..(115): Selenocysteine
  MOD_RES (146)..(146): Selenocysteine
  MOD_RES (149)..(149): Selenocysteine
  MOD_RES (170)..(170): Selenocysteine
  MOD_RES (184)..(185): Selenocysteine
  MOD_RES (195)..(195): Selenocysteine
  MOD_RES (197)..(197): Selenocysteine
  MOD_RES (212)..(212): Selenocysteine
  MOD_RES (255)..(255): Selenocysteine
  MOD_RES (258)..(258): Selenocysteine
  MOD_RES (292)..(292): Selenocysteine
  MOD_RES (336)..(336): Selenocysteine
  MOD_RES (359)..(359): Selenocysteine
  MOD_RES (373)..(373): Selenocysteine
  MOD_RES (399)..(399): Selenocysteine
  MOD_RES (425)..(425): Selenocysteine
  MOD_RES (437)..(437): Selenocysteine
  MOD_RES (446)..(446): Selenocysteine
  MOD_RES (451)..(451): Selenocysteine
  MOD_RES (487)..(487): Selenocysteine
  MOD_RES (491)..(491): Selenocysteine
  MOD_RES (496)..(496): Selenocysteine
  MOD_RES (513)..(513): Selenocysteine
  MOD_RES (529)..(529): Selenocysteine
  MOD_RES (535)..(535): Selenocysteine
  MOD_RES (537)..(537): Selenocysteine
  MOD_RES (550)..(550): Selenocysteine
MAGDLSAGFFMEELNXYRQKQGVVLKYQELPNSGPPHDRRFXFQVIIDGREFPEGEGRSKKEAKNAAAKLAVEILNKEKKAVSPLLLXXXNSSEGLSMGNYIGLINRIAQKKRLXVNYEQCASGVHGPEGFHYKCKMGQKEYSIGXGSXKQEAKQLAAKLAYLQILSEEXSVKSDYLSSGSFAXXCESQSNSLVXSXLASESSSEGDFSADXSEINSNSDSLNSSSLLMNGLRNNQRKAKRSLAPRFDLPDMKEXKYXVDKRFGMDFKEIELIGSGGFGQVFKAKHRIDGKXYVIKRVKYNNEKAEREVKALAKLDHVNIVHYNGCWDGFDYDPEXSDDSLESSDYDPENSKNSSRSKXKCLFIQMEFCDKGXLEQWIEKRRGEKLDKVLALELFEQIXKGVDYIHSKKLIHRDLKPSNIFLVDXKQVKIGDFGLVXSLKNDGKRXRSKGXLRYMSPEQISSQDYGKEVDLYALGLILAELLHVCDXAFEXSKFFXDLRDGIISDIFDKKEKXLLQKLLSKKPEDRPNXSEILRXLXVWKKSPEKNERHXC

SEQ ID NO: 8979 - protein, 956 aa, Homo sapiens
  MOD_RES (10)..(10): Selenocysteine
  MOD_RES (20)..(20): Selenocysteine
  MOD_RES (52)..(52): Selenocysteine
  MOD_RES (56)..(56): Selenocysteine
  MOD_RES (80)..(81): Selenocysteine
  MOD_RES (120)..(120): Selenocysteine
  MOD_RES (123)..(123): Selenocysteine
  MOD_RES (153)..(153): Selenocysteine
  MOD_RES (161)..(161): Selenocysteine
  MOD_RES (168)..(168): Selenocysteine
  MOD_RES (216)..(216): Selenocysteine
  MOD_RES (238)..(238): Selenocysteine
  MOD_RES (241)..(241): Selenocysteine
  MOD_RES (261)..(261): Selenocysteine
  MOD_RES (297)..(297): Selenocysteine
  MOD_RES (307)..(307): Selenocysteine
  MOD_RES (320)..(320): Selenocysteine
  MOD_RES (373)..(373): Selenocysteine
  MOD_RES (376)..(376): Selenocysteine
  MOD_RES (407)..(407): Selenocysteine
  MOD_RES (415)..(416): Selenocysteine
  MOD_RES (436)..(436): Selenocysteine
  MOD_RES (440)..(440): Selenocysteine
  MOD_RES (470)..(470): Selenocysteine
  MOD_RES (559)..(559): Selenocysteine
  MOD_RES (584)..(584): Selenocysteine
  MOD_RES (610)..(610): Selenocysteine
  MOD_RES (646)..(646): Selenocysteine
  MOD_RES (654)..(654): Selenocysteine
  MOD_RES (681)..(681): Selenocysteine
  MOD_RES (703)..(703): Selenocysteine
  MOD_RES (717)..(717): Selenocysteine
  MOD_RES (722)..(722): Selenocysteine
  MOD_RES (731)..(731): Selenocysteine
  MOD_RES (740)..(741): Selenocysteine
  MOD_RES (747)..(747): Selenocysteine
  MOD_RES (750)..(751): Selenocysteine
  MOD_RES (784)..(784): Selenocysteine
  MOD_RES (825)..(825): Selenocysteine
  MOD_RES (839)..(839): Selenocysteine
  MOD_RES (849)..(849): Selenocysteine
  MOD_RES (852)..(852): Selenocysteine
  MOD_RES (861)..(861): Selenocysteine
  MOD_RES (866)..(866): Selenocysteine
  MOD_RES (902)..(902): Selenocysteine
  MOD_RES (909)..(909): Selenocysteine
  MOD_RES (911)..(911): Selenocysteine
  MOD_RES (923)..(923): Selenocysteine
MCYSEGGWSXSGSRLQLLIXIILLKVFGNKMIIPSLDGALFQWDQDRESMEXVPFXVESLLESSYKFGDDVVLVGGKSLXXYGLSAYSGKVRYICSALGCRQWDSDEMEQEEDILLLQRXQKXVRAVGPRSGNEKWNFSVGHFELRYIPDMEXRAGFIESXFKPNENXEESKIISDVEEQEAAIMDIVIKVSVADWKVMAFSKKGGHLEWEYQFCXPIASAWLLKDGKVIPISLFDDXSYXSNDDVLEDEEDIVEAARGAXENSVYLGMYRGQLYLQSSVRISEKFPSSPKALESVXNENAIIPLPXIKWKPLIHSPSRXPVLVGSDEFDKCLSNDKFSHEEYSNGALSILQYPYDNGYYLPYYKRERNKRSXQIXVRFLDNPHYNKNIRKKDPVLLLHWWKEIVAXILFCIIAXXFIVRRLFHPHPHRQRKESEXQCQXENKYDSVSGEANDSSWNDIKNSGYISRYLXDFEPIQCLGRGGFGVVFEAKNKVDDCNYAIKRIRLPNRELAREKVMREVKALAKLEHPGIVRYFNAWLEAPPEKWQEKMDEIWLKDESXDWPLSSPSPMDAPSVKIRRMDPFAXKEHIEIIAPSPQRSRSFSVGISCDQXSSSESQFSPLEFSGMDHEDISESVDAAYNLQDSCLXDCDVEDGXMDGNDEGHSFELCPSEASPYVRSRERXSSSIVFEDSGCDNASSKEEPKXNRLHIGNHCANKLXAFKPXSSKSSSEAXLSISPPRPXXLSLDLXKNXXEKLQPSSPKVYLYIQMQLCRKENLKDWMNGRCXIEERERSVCLHIFLQIAEAVEFLHSKGLMHRDLKPSNIFFXMDDVVKVGDFGLVXAMDQDEEEQXVLXPMPAYARHXGQVGXKLYMSPEQIHGNSYSHKVDIFSLGLILFELLYPFSXQMERVRXLXDVRNLKFPPLFXQKYPCEYVMVQDMLSPSPMERPEAINIIENAVF

SEQ ID NO: 8980 - protein, 1116 aa, Homo sapiens
  MOD_RES (27)..(27): Selenocysteine
  MOD_RES (40)..(40): Selenocysteine
  MOD_RES (54)..(54): Selenocysteine
  MOD_RES (57)..(57): Selenocysteine
  MOD_RES (71)..(71): Selenocysteine
  MOD_RES (96)..(96): Selenocysteine
  MOD_RES (110)..(110): Selenocysteine
  MOD_RES (173)..(173): Selenocysteine
  MOD_RES (177)..(177): Selenocysteine
  MOD_RES (201)..(202): Selenocysteine
  MOD_RES (241)..(241): Selenocysteine
  MOD_RES (244)..(244): Selenocysteine
  MOD_RES (274)..(274): Selenocysteine
  MOD_RES (282)..(282): Selenocysteine
  MOD_RES (289)..(289): Selenocysteine
  MOD_RES (337)..(337): Selenocysteine
  MOD_RES (359)..(359): Selenocysteine
  MOD_RES (362)..(362): Selenocysteine
  MOD_RES (382)..(382): Selenocysteine
  MOD_RES (418)..(418): Selenocysteine
  MOD_RES (428)..(428): Selenocysteine
  MOD_RES (441)..(441): Selenocysteine
  MOD_RES (494)..(494): Selenocysteine
  MOD_RES (497)..(497): Selenocysteine
  MOD_RES (528)..(528): Selenocysteine
  MOD_RES (536)..(537): Selenocysteine
  MOD_RES (557)..(557): Selenocysteine
  MOD_RES (561)..(561): Selenocysteine
  MOD_RES (591)..(591): Selenocysteine
  MOD_RES (680)..(680): Selenocysteine
  MOD_RES (705)..(705): Selenocysteine
  MOD_RES (731)..(731): Selenocysteine
  MOD_RES (767)..(767): Selenocysteine
  MOD_RES (775)..(775): Selenocysteine
  MOD_RES (802)..(802): Selenocysteine
  MOD_RES (824)..(824): Selenocysteine
  MOD_RES (838)..(838): Selenocysteine
  MOD_RES (843)..(843): Selenocysteine
  MOD_RES (852)..(852): Selenocysteine
  MOD_RES (861)..(862): Selenocysteine
  MOD_RES (868)..(868): Selenocysteine
  MOD_RES (871)..(872): Selenocysteine
  MOD_RES (905)..(905): Selenocysteine
  MOD_RES (946)..(946): Selenocysteine
  MOD_RES (960)..(960): Selenocysteine
  MOD_RES (970)..(970): Selenocysteine
  MOD_RES (973)..(973): Selenocysteine
  MOD_RES (982)..(982): Selenocysteine
  MOD_RES (987)..(987): Selenocysteine
  MOD_RES (1023)..(1023): Selenocysteine
  MOD_RES (1030)..(1030): Selenocysteine
  MOD_RES (1032)..(1032): Selenocysteine
  MOD_RES (1044)..(1044): Selenocysteine
  MOD_RES (1086)..(1086): Selenocysteine
  MOD_RES (1100)..(1100): Selenocysteine
MERAISPGLLVRALLLLLLLLGLAARXVAAGRARGLPAPXAEAAFGLGAAAAPXSAXRVPAAGAVAAAEVXVEDAEALPAAAGEQEPRGPEPDDEXELRPRGRSLVIISXLDGRIAALDPENHGKKQWDLDVGSGSLVSSSLSKPEVFGNKMIIPSLDGALFQWDQDRESMEXVPFXVESLLESSYKFGDDVVLVGGKSLXXYGLSAYSGKVRYICSALGCRQWDSDEMEQEEDILLLQRXQKXVRAVGPRSGNEKWNFSVGHFELRYIPDMEXRAGFIESXFKPNENXEESKIISDVEEQEAAIMDIVIKVSVADWKVMAFSKKGGHLEWEYQFCXPIASAWLLKDGKVIPISLFDDXSYXSNDDVLEDEEDIVEAARGAXENSVYLGMYRGQLYLQSSVRISEKFPSSPKALESVXNENAIIPLPXIKWKPLIHSPSRXPVLVGSDEFDKCLSNDKFSHEEYSNGALSILQYPYDNGYYLPYYKRERNKRSXQIXVRFLDNPHYNKNIRKKDPVLLLHWWKEIVAXILFCIIAXXFIVRRLFHPHPHRQRKESEXQCQXENKYDSVSGEANDSSWNDIKNSGYISRYLXDFEPIQCLGRGGFGVVFEAKNKVDDCNYAIKRIRLPNRELAREKVMREVKALAKLEHPGIVRYFNAWLEAPPEKWQEKMDEIWLKDESXDWPLSSPSPMDAPSVKIRRMDPFAXKEHIEIIAPSPQRSRSFSVGISCDQXSSSESQFSPLEFSGMDHEDISESVDAAYNLQDSCLXDCDVEDGXMDGNDEGHSFELCPSEASPYVRSRERXSSSIVFEDSGCDNASSKEEPKXNRLHIGNHCANKLXAFKPXSSKSSSEAXLSISPPRPXXLSLDLXKNXXEKLQPSSPKVYLYIQMQLCRKENLKDWMNGRCXIEERERSVCLHIFLQIAEAVEFLHSKGLMHRDLKPSNIFFXMDDVVKVGDFGLVXAMDQDEEEQXVLXPMPAYARHXGQVGXKLYMSPEQIHGNSYSHKVDIFSLGLILFELLYPFSXQMERVRXLXDVRNLKFPPLFXQKYPCEYVMVQDMLSPSPMERPEAINIIENAVFEDLDFPGKXVLRQRSRSLSSSGXKHSRQSNNSHSPLPSN

SEQ ID NO: 8981 - protein, 965 aa, Homo sapiens
  MOD_RES (22)..(22): Selenocysteine
  MOD_RES (26)..(26): Selenocysteine
  MOD_RES (50)..(51): Selenocysteine
  MOD_RES (90)..(90): Selenocysteine
  MOD_RES (93)..(93): Selenocysteine
  MOD_RES (123)..(123): Selenocysteine
  MOD_RES (131)..(131): Selenocysteine
  MOD_RES (138)..(138): Selenocysteine
  MOD_RES (186)..(186): Selenocysteine
  MOD_RES (208)..(208): Selenocysteine
  MOD_RES (211)..(211): Selenocysteine
  MOD_RES (231)..(231): Selenocysteine
  MOD_RES (267)..(267): Selenocysteine
  MOD_RES (277)..(277): Selenocysteine
  MOD_RES (290)..(290): Selenocysteine
  MOD_RES (343)..(343): Selenocysteine
  MOD_RES (346)..(346): Selenocysteine
  MOD_RES (377)..(377): Selenocysteine
  MOD_RES (385)..(386): Selenocysteine
  MOD_RES (406)..(406): Selenocysteine
  MOD_RES (410)..(410): Selenocysteine
  MOD_RES (440)..(440): Selenocysteine
  MOD_RES (529)..(529): Selenocysteine
  MOD_RES (554)..(554): Selenocysteine
  MOD_RES (580)..(580): Selenocysteine
  MOD_RES (616)..(616): Selenocysteine
  MOD_RES (624)..(624): Selenocysteine
  MOD_RES (651)..(651): Selenocysteine
  MOD_RES (673)..(673): Selenocysteine
  MOD_RES (687)..(687): Selenocysteine
  MOD_RES (692)..(692): Selenocysteine
  MOD_RES (701)..(701): Selenocysteine
  MOD_RES (710)..(711): Selenocysteine
  MOD_RES (717)..(717): Selenocysteine
  MOD_RES (720)..(721): Selenocysteine
  MOD_RES (754)..(754): Selenocysteine
  MOD_RES (795)..(795): Selenocysteine
  MOD_RES (809)..(809): Selenocysteine
  MOD_RES (819)..(819): Selenocysteine
  MOD_RES (822)..(822): Selenocysteine
  MOD_RES (831)..(831): Selenocysteine
  MOD_RES (836)..(836): Selenocysteine
  MOD_RES (872)..(872): Selenocysteine
  MOD_RES (879)..(879): Selenocysteine
  MOD_RES (881)..(881): Selenocysteine
  MOD_RES (893)..(893): Selenocysteine
  MOD_RES (935)..(935): Selenocysteine
  MOD_RES (949)..(949): Selenocysteine
MIIPSLDGALFQWDQDRESMEXVPFXVESLLESSYKFGDDVVLVGGKSLXXYGLSAYSGKVRYICSALGCRQWDSDEMEQEEDILLLQRXQKXVRAVGPRSGNEKWNFSVGHFELRYIPDMEXRAGFIESXFKPNENXEESKIISDVEEQEAAIMDIVIKVSVADWKVMAFSKKGGHLEWEYQFCXPIASAWLLKDGKVIPISLFDDXSYXSNDDVLEDEEDIVEAARGAXENSVYLGMYRGQLYLQSSVRISEKFPSSPKALESVXNENAIIPLPXIKWKPLIHSPSRXPVLVGSDEFDKCLSNDKFSHEEYSNGALSILQYPYDNGYYLPYYKRERNKRSXQIXVRFLDNPHYNKNIRKKDPVLLLHWWKEIVAXILFCIIAXXFIVRRLFHPHPHRQRKESEXQCQXENKYDSVSGEANDSSWNDIKNSGYISRYLXDFEPIQCLGRGGFGVVFEAKNKVDDCNYAIKRIRLPNRELAREKVMREVKALAKLEHPGIVRYFNAWLEAPPEKWQEKMDEIWLKDESXDWPLSSPSPMDAPSVKIRRMDPFAXKEHIEIIAPSPQRSRSFSVGISCDQXSSSESQFSPLEFSGMDHEDISESVDAAYNLQDSCLXDCDVEDGXMDGNDEGHSFELCPSEASPYVRSRERXSSSIVFEDSGCDNASSKEEPKXNRLHIGNHCANKLXAFKPXSSKSSSEAXLSISPPRPXXLSLDLXKNXXEKLQPSSPKVYLYIQMQLCRKENLKDWMNGRCXIEERERSVCLHIFLQIAEAVEFLHSKGLMHRDLKPSNIFFXMDDVVKVGDFGLVXAMDQDEEEQXVLXPMPAYARHXGQVGXKLYMSPEQIHGNSYSHKVDIFSLGLILFELLYPFSXQMERVRXLXDVRNLKFPPLFXQKYPCEYVMVQDMLSPSPMERPEAINIIENAVFEDLDFPGKXVLRQRSRSLSSSGXKHSRQSNNSHSPLPSN

SEQ ID NO: 8982 - protein, 136 aa, Homo sapiens
  MOD_RES (65)..(65): Selenocysteine
  MOD_RES (82)..(82): Selenocysteine
  MOD_RES (128)..(128): Selenocysteine
  MOD_RES (130)..(130): Selenocysteine
MAGGRGAPGRGRDEPPESYPQRQDHELQALEAIYGADFQDLRPDACGPVKEPPEINLVLYPQGLXGEEVYVKVDLRVKCPPXYPDVVPEIELKNAKGLSNESVNLLKSRLEELAKKHCGEQQGWRGLXPXLKEVQV

SEQ ID NO: 8983 - protein, 616 aa, Homo sapiens
  MOD_RES (65)..(65): Selenocysteine
  MOD_RES (82)..(82): Selenocysteine
  MOD_RES (212)..(212): Selenocysteine
  MOD_RES (222)..(222): Selenocysteine
  MOD_RES (302)..(302): Selenocysteine
  MOD_RES (304)..(304): Selenocysteine
  MOD_RES (326)..(326): Selenocysteine
  MOD_RES (343)..(343): Selenocysteine
  MOD_RES (345)..(345): Selenocysteine
  MOD_RES (406)..(406): Selenocysteine
  MOD_RES (438)..(438): Selenocysteine
  MOD_RES (442)..(442): Selenocysteine
  MOD_RES (462)..(462): Selenocysteine
  MOD_RES (475)..(475): Selenocysteine
  MOD_RES (503)..(503): Selenocysteine
  MOD_RES (563)..(563): Selenocysteine
  MOD_RES (579)..(579): Selenocysteine
MAGGRGAPGRGRDEPPESYPQRQDHELQALEAIYGADFQDLRPDACGPVKEPPEINLVLYPQGLXGEEVYVKVDLRVKCPPXYPDVVPEIELKNAKGLSNESVNLLKSRLEELAKKHCGEVMIFELAYHVQSFLSEHNKPPPKSFHEEMLERRAQEEQQRLLEAKRKEEQEQREILHEIQRRKEEIKEEKKRKEMAKQERLEIASLSNQDHXSKKDPGGHRXAAILHGGSPDFVGNGKHRANSSGRSRRERQYSVCNSEDSPGSCEILYFNMGSPDQLMVHKGKCIGSDEQLGKLVYNALEXAXGGFVLLYEWVLQWQKKMGPFLXSQEKEKIDKCKKQIQGXEXEFNSLVKLSHPNVVRYLAMNLKEQDDSIVVDILVEHISGVSLAAHLSHSGPIPVHQLRRYXAQLLSGLDYLHSNSVVHKVLSASNVLVDAEGXVKIXDYSISKRLADICKEDVFEQXRVRFSDNALPYKXGKKGDVWRLGLLLLSLSQGQECGEYPVXIPSDLPADFQDFLKKCVCLDDKERWSPQQLLKHSFINPQPKMPLVEQSPEDSEGQDYVEXVIPSNRLPSAAFFSEXQRQFSRYFIEFEELQLLGKGAFGAVIKVWYRVIPSPL

SEQ ID NO: 8984 - protein, 1649 aa, Homo sapiens
  MOD_RES (65)..(65): Selenocysteine
  MOD_RES (82)..(82): Selenocysteine
  MOD_RES (212)..(212): Selenocysteine
  MOD_RES (222)..(222): Selenocysteine
  MOD_RES (302)..(302): Selenocysteine
  MOD_RES (304)..(304): Selenocysteine
  MOD_RES (326)..(326): Selenocysteine
  MOD_RES (343)..(343): Selenocysteine
  MOD_RES (345)..(345): Selenocysteine
  MOD_RES (406)..(406): Selenocysteine
  MOD_RES (438)..(438): Selenocysteine
  MOD_RES (442)..(442): Selenocysteine
  MOD_RES (462)..(462): Selenocysteine
  MOD_RES (475)..(475): Selenocysteine
  MOD_RES (503)..(503): Selenocysteine
  MOD_RES (563)..(563): Selenocysteine
  MOD_RES (579)..(579): Selenocysteine
  MOD_RES (638)..(638): Selenocysteine
  MOD_RES (667)..(667): Selenocysteine
  MOD_RES (690)..(690): Selenocysteine
  MOD_RES (713)..(713): Selenocysteine
  MOD_RES (726)..(726): Selenocysteine
  MOD_RES (791)..(792): Selenocysteine
  MOD_RES (809)..(809): Selenocysteine
  MOD_RES (813)..(813): Selenocysteine
  MOD_RES (822)..(822): Selenocysteine
  MOD_RES (871)..(871): Selenocysteine
  MOD_RES (886)..(886): Selenocysteine
  MOD_RES (899)..(899): Selenocysteine
  MOD_RES (904)..(904): Selenocysteine
  MOD_RES (916)..(916): Selenocysteine
  MOD_RES (943)..(943): Selenocysteine
  MOD_RES (958)..(958): Selenocysteine
  MOD_RES (991)..(991): Selenocysteine
  MOD_RES (993)..(993): Selenocysteine
  MOD_RES (1018)..(1018): Selenocysteine
  MOD_RES (1020)..(1020): Selenocysteine
  MOD_RES (1029)..(1029): Selenocysteine
  MOD_RES (1046)..(1046): Selenocysteine
  MOD_RES (1060)..(1060): Selenocysteine
  MOD_RES (1070)..(1070): Selenocysteine
  MOD_RES (1085)..(1085): Selenocysteine
  MOD_RES (1165)..(1165): Selenocysteine
  MOD_RES (1167)..(1168): Selenocysteine
  MOD_RES (1174)..(1174): Selenocysteine
  MOD_RES (1180)..(1180): Selenocysteine
  MOD_RES (1203)..(1203): Selenocysteine
  MOD_RES (1232)..(1232): Selenocysteine
  MOD_RES (1236)..(1236): Selenocysteine
  MOD_RES (1273)..(1273): Selenocysteine
  MOD_RES (1282)..(1282): Selenocysteine
  MOD_RES (1370)..(1370): Selenocysteine
  MOD_RES (1393)..(1393): Selenocysteine
  MOD_RES (1416)..(1416): Selenocysteine
  MOD_RES (1421)..(1421): Selenocysteine
  MOD_RES (1425)..(1425): Selenocysteine
  MOD_RES (1449)..(1449): Selenocysteine
  MOD_RES (1473)..(1473): Selenocysteine
  MOD_RES (1480)..(1480): Selenocysteine
  MOD_RES (1492)..(1492): Selenocysteine
  MOD_RES (1495)..(1495): Selenocysteine
  MOD_RES (1529)..(1529): Selenocysteine
  MOD_RES (1546)..(1546): Selenocysteine
  MOD_RES (1552)..(1552): Selenocysteine
  MOD_RES (1556)..(1556): Selenocysteine
  MOD_RES (1560)..(1560): Selenocysteine
  MOD_RES (1583)..(1583): Selenocysteine
  MOD_RES (1601)..(1602): Selenocysteine
MAGGRGAPGRGRDEPPESYPQRQDHELQALEAIYGADFQDLRPDACGPVKEPPEINLVLYPQGLXGEEVYVKVDLRVKCPPXYPDVVPEIELKNAKGLSNESVNLLKSRLEELAKKHCGEVMIFELAYHVQSFLSEHNKPPPKSFHEEMLERRAQEEQQRLLEAKRKEEQEQREILHEIQRRKEEIKEEKKRKEMAKQERLEIASLSNQDHXSKKDPGGHRXAAILHGGSPDFVGNGKHRANSSGRSRRERQYSVCNSEDSPGSCEILYFNMGSPDQLMVHKGKCIGSDEQLGKLVYNALEXAXGGFVLLYEWVLQWQKKMGPFLXSQEKEKIDKCKKQIQGXEXEFNSLVKLSHPNVVRYLAMNLKEQDDSIVVDILVEHISGVSLAAHLSHSGPIPVHQLRRYXAQLLSGLDYLHSNSVVHKVLSASNVLVDAEGXVKIXDYSISKRLADICKEDVFEQXRVRFSDNALPYKXGKKGDVWRLGLLLLSLSQGQECGEYPVXIPSDLPADFQDFLKKCVCLDDKERWSPQQLLKHSFINPQPKMPLVEQSPEDSEGQDYVEXVIPSNRLPSAAFFSEXQRQFSRYFIEFEELQLLGKGAFGAVIKVQNKLDGCCYAVKRIPINPASRQFRRIKGEVXLLSRLHHENIVRYYNAWIERHERPAGPGXPPPDSGPLAKDDRAARGQPASDXDGLDSVEAAAPPPILSSSVEWSXSGERSASARFPAXGPGSSDDEDDDEDEHGGVFSQSFLPASDSESDIIFDNEDENSKSQNQDEDCNEKNGCHESEPSVXXEAVHYLYIQMEYCEKSXLRDXIDQGLYRDXVRLWRLFREILDGLAYIHEKGMIHRDLKPVNIFLDSDDHVKIGDFGLAXDHLAFSADSKQDDQXGDLIKSDPSGHLXGMVGXALYVSPEVQGSXKSAYNQKVDLFSLGIIFFEMSYHPMVXASERIFVLNQLRDPXSPKFPEDFDDGEHAKQKSVISWLLNHDPAKRPXAXELLKSELLPPPQMEESELHEVLHHXLXNVDGKAYRXMMAQIFSQRISPAIDYXYDSDILKGNFSIRXAKMQQHVCEXIIRIFKRHGAVQLCXPLLLPRNRQIYEHNEAALFMDHSGMLVMLPFDLRIPFARYVARNNILNLKRYCIERVFRPRKLDRFHPKELLECAFDIVXSXXNSFLPXAEIIYXIYEIIQEFPALQERNYSIYLNHXMLLKAILLHCGIPEDKLSQVYIILYDAVXEKLXRREVEAKFCNLSLSSNSLCRLYKFIEQKGDLQDLMPXINSLIKQKXGIAQLVKYGLKDLEEVVGLLKKLGIKLQVLINLGLVYKVQQHNGIIFQFVAFIKRRQRAVPEILAAGGRYDLLIPQFRGPQALGPVPXAIGVSIAIDKISAAVLNMEESVXISSCDLLVVSVGQMSMSRAINLXQKLWXAGIXAEIMYDWSQSQEELQEYCRHHEIXYVALVSDKEGSHVKVKSFEKERQXEKRVLEXELVDHVLQKLRXKVXDERNGREASDNLAVQNLKGSFSNASGLFEIHGAXVVPIVSVLAPEKLSASXRRRYEXQVQXRLQXSLANLHQKSSEIEILAVDLPKEXILQFLSLEWDADEQAFNXXVKQLLSRLPKQRYLKLVCDEIYNIKVEKKVSVLFLYSYRDDYYRILF

SEQ ID NO: 8985 - protein, 1427 aa, Homo sapiens
  MOD_RES (1)..(1): Any amino acid
  MOD_RES (18)..(18): Selenocysteine
  MOD_RES (28)..(28): Selenocysteine
  MOD_RES (108)..(108): Selenocysteine
  MOD_RES (110)..(110): Selenocysteine
  MOD_RES (132)..(132): Selenocysteine
  MOD_RES (149)..(149): Selenocysteine
  MOD_RES (151)..(151): Selenocysteine
  MOD_RES (212)..(212): Selenocysteine
  MOD_RES (244)..(244): Selenocysteine
  MOD_RES (248)..(248): Selenocysteine
  MOD_RES (268)..(268): Selenocysteine
  MOD_RES (281)..(281): Selenocysteine
  MOD_RES (309)..(309): Selenocysteine
  MOD_RES (369)..(369): Selenocysteine
  MOD_RES (385)..(385): Selenocysteine
  MOD_RES (444)..(444): Selenocysteine
  MOD_RES (473)..(473): Selenocysteine
  MOD_RES (496)..(496): Selenocysteine
  MOD_RES (519)..(519): Selenocysteine
  MOD_RES (532)..(532): Selenocysteine
  MOD_RES (587)..(587): Selenocysteine
  MOD_RES (591)..(591): Selenocysteine
  MOD_RES (600)..(600): Selenocysteine
  MOD_RES (649)..(649): Selenocysteine
  MOD_RES (664)..(664): Selenocysteine
  MOD_RES (677)..(677): Selenocysteine
  MOD_RES (682)..(682): Selenocysteine
  MOD_RES (694)..(694): Selenocysteine
  MOD_RES (721)..(721): Selenocysteine
  MOD_RES (736)..(736): Selenocysteine
  MOD_RES (769)..(769): Selenocysteine
  MOD_RES (771)..(771): Selenocysteine
  MOD_RES (796)..(796): Selenocysteine
  MOD_RES (798)..(798): Selenocysteine
  MOD_RES (807)..(807): Selenocysteine
  MOD_RES (824)..(824): Selenocysteine
  MOD_RES (838)..(838): Selenocysteine
  MOD_RES (848)..(848): Selenocysteine
  MOD_RES (863)..(863): Selenocysteine
  MOD_RES (943)..(943): Selenocysteine
  MOD_RES (945)..(946): Selenocysteine
  MOD_RES (952)..(952): Selenocysteine
  MOD_RES (958)..(958): Selenocysteine
  MOD_RES (981)..(981): Selenocysteine
  MOD_RES (1010)..(1010): Selenocysteine
  MOD_RES (1014)..(1014): Selenocysteine
  MOD_RES (1051)..(1051): Selenocysteine
  MOD_RES (1060)..(1060): Selenocysteine
  MOD_RES (1148)..(1148): Selenocysteine
  MOD_RES (1171)..(1171): Selenocysteine
  MOD_RES (1194)..(1194): Selenocysteine
  MOD_RES (1199)..(1199): Selenocysteine
  MOD_RES (1203)..(1203): Selenocysteine
  MOD_RES (1227)..(1227): Selenocysteine
  MOD_RES (1251)..(1251): Selenocysteine
  MOD_RES (1258)..(1258): Selenocysteine
  MOD_RES (1270)..(1270): Selenocysteine
  MOD_RES (1273)..(1273): Selenocysteine
  MOD_RES (1307)..(1307): Selenocysteine
  MOD_RES (1324)..(1324): Selenocysteine
  MOD_RES (1330)..(1330): Selenocysteine
  MOD_RES (1334)..(1334): Selenocysteine
  MOD_RES (1338)..(1338): Selenocysteine
  MOD_RES (1361)..(1361): Selenocysteine
  MOD_RES (1379)..(1380): Selenocysteine
XAKQERLEIASLSNQDHXSKKDPGGHRXAAILHGGSPDFVGNGKHRANSSGRSRRERQYSVCNSEDSPGSCEILYFNMGSPDQLMVHKGKCIGSDEQLGKLVYNALEXAXGGFVLLYEWVLQWQKKMGPFLXSQEKEKIDKCKKQIQGXEXEFNSLVKLSHPNVVRYLAMNLKEQDDSIVVDILVEHISGVSLAAHLSHSGPIPVHQLRRYXAQLLSGLDYLHSNSVVHKVLSASNVLVDAEGXVKIXDYSISKRLADICKEDVFEQXRVRFSDNALPYKXGKKGDVWRLGLLLLSLSQGQECGEYPVXIPSDLPADFQDFLKKCVCLDDKERWSPQQLLKHSFINPQPKMPLVEQSPEDSEGQDYVEXVIPSNRLPSAAFFSEXQRQFSRYFIEFEELQLLGKGAFGAVIKVQNKLDGCCYAVKRIPINPASRQFRRIKGEVXLLSRLHHENIVRYYNAWIERHERPAGPGXPPPDSGPLAKDDRAARGQPASDXDGLDSVEAAAPPPILSSSVEWSXSGERSASARFPAXGPGSSDDEDDDEDEHGGVFSQSFLPASDSESDIIFDNEDENSKSQNQMEYCEKSXLRDXIDQGLYRDXVRLWRLFREILDGLAYIHEKGMIHRDLKPVNIFLDSDDHVKIGDFGLAXDHLAFSADSKQDDQXGDLIKSDPSGHLXGMVGXALYVSPEVQGSXKSAYNQKVDLFSLGIIFFEMSYHPMVXASERIFVLNQLRDPXSPKFPEDFDDGEHAKQKSVISWLLNHDPAKRPXAXELLKSELLPPPQMEESELHEVLHHXLXNVDGKAYRXMMAQIFSQRISPAIDYXYDSDILKGNFSIRXAKMQQHVCEXIIRIFKRHGAVQLCXPLLLPRNRQIYEHNEAALFMDHSGMLVMLPFDLRIPFARYVARNNILNLKRYCIERVFRPRKLDRFHPKELLECAFDIVXSXXNSFLPXAEIIYXIYEIIQEFPALQERNYSIYLNHXMLLKAILLHCGIPEDKLSQVYIILYDAVXEKLXRREVEAKFCNLSLSSNSLCRLYKFIEQKGDLQDLMPXINSLIKQKXGIAQLVKYGLKDLEEVVGLLKKLGIKLQVLINLGLVYKVQQHNGIIFQFVAFIKRRQRAVPEILAAGGRYDLLIPQFRGPQALGPVPXAIGVSIAIDKISAAVLNMEESVXISSCDLLVVSVGQMSMSRAINLXQKLWXAGIXAEIMYDWSQSQEELQEYCRHHEIXYVALVSDKEGSHVKVKSFEKERQXEKRVLEXELVDHVLQKLRXKVXDERNGREASDNLAVQNLKGSFSNASGLFEIHGAXVVPIVSVLAPEKLSASXRRRYEXQVQXRLQXSLANLHQKSSEIEILAVDLPKEXILQFLSLEWDADEQAFNXXVKQLLSRLPKQRYLKLVCDEIYNIKVEKKVSVLFLYSYRDDYYRILF

SEQ ID NO: 8986 - protein, 80 aa, Homo sapiens
  MOD_RES (1)..(1): Any amino acid
  MOD_RES (15)..(15): Selenocysteine
  MOD_RES (21)..(21): Selenocysteine
  MOD_RES (32)..(33): Selenocysteine
XIVSVLAPEKLSASXRRRYEXQWDADEQAFNXXVKQLLSRLPKQRYLKLVCDEIYNIKVEKKVSVLFLYSYRDDYYRILF

SEQ ID NO: 8987 - protein, 118 aa, Homo sapiens
  MOD_RES (10)..(10): Selenocysteine
  MOD_RES (18)..(18): Selenocysteine
  MOD_RES (36)..(37): Selenocysteine
  MOD_RES (41)..(41): Selenocysteine
  MOD_RES (45)..(46): Selenocysteine
  MOD_RES (50)..(50): Selenocysteine
  MOD_RES (68)..(68): Selenocysteine
  MOD_RES (70)..(70): Selenocysteine
  MOD_RES (77)..(77): Selenocysteine
  MOD_RES (82)..(82): Selenocysteine
MSGGSSCSQXPSRAIPAXRRVVLGDGVQLPPGDYSXXPGGXLFSXXPGGXRIIYDRKFLMECRNSPVXKXPPRDLPXIPGVXSPSSDEPPMEASQSHLRNSPEDKRAGGEESQFEMDI

SEQ ID NO: 8988 - protein, 120 aa, Homo sapiens
  MOD_RES (19)..(19): Selenocysteine
  MOD_RES (21)..(21): Selenocysteine
  MOD_RES (36)..(37): Selenocysteine
  MOD_RES (41)..(41): Selenocysteine
  MOD_RES (45)..(46): Selenocysteine
  MOD_RES (50)..(50): Selenocysteine
  MOD_RES (70)..(70): Selenocysteine
  MOD_RES (82)..(82): Selenocysteine
  MOD_RES (86)..(86): Selenocysteine
MSSSAGSGHQPSQSRAIPXRXVAISDAAQLPHDYCXXPGGXLFSXXPGGXRIIYDRKFLLDRRNSPMAQXPPCHLPNIPGVXSPGXLIEDSKVEVNNLNNLNNHDRKHAVGDDAQFEMDI

SEQ ID NO: 8989 - protein, 24 aa, Homo sapiens
MAAVVQQNDLVFEFASNVMEDERQ

SEQ ID NO: 8990 - protein, 595 aa, Homo sapiens
  MOD_RES (62)..(62): Selenocysteine
  MOD_RES (82)..(82): Selenocysteine
  MOD_RES (84)..(84): Selenocysteine
  MOD_RES (95)..(95): Selenocysteine
  MOD_RES (98)..(98): Selenocysteine
  MOD_RES (129)..(129): Selenocysteine
  MOD_RES (156)..(156): Selenocysteine
  MOD_RES (166)..(167): Selenocysteine
  MOD_RES (183)..(183): Selenocysteine
  MOD_RES (199)..(199): Selenocysteine
  MOD_RES (207)..(207): Selenocysteine
  MOD_RES (239)..(239): Selenocysteine
  MOD_RES (296)..(296): Selenocysteine
  MOD_RES (302)..(302): Selenocysteine
  MOD_RES (318)..(319): Selenocysteine
  MOD_RES (346)..(346): Selenocysteine
  MOD_RES (350)..(350): Selenocysteine
  MOD_RES (356)..(356): Selenocysteine
  MOD_RES (361)..(361): Selenocysteine
  MOD_RES (379)..(379): Selenocysteine
  MOD_RES (381)..(381): Selenocysteine
  MOD_RES (386)..(386): Selenocysteine
  MOD_RES (396)..(396): Selenocysteine
  MOD_RES (401)..(401): Selenocysteine
  MOD_RES (416)..(416): Selenocysteine
  MOD_RES (418)..(418): Selenocysteine
  MOD_RES (421)..(421): Selenocysteine
  MOD_RES (425)..(426): Selenocysteine
  MOD_RES (431)..(431): Selenocysteine
  MOD_RES (437)..(437): Selenocysteine
  MOD_RES (454)..(454): Selenocysteine
  MOD_RES (485)..(485): Selenocysteine
  MOD_RES (490)..(490): Selenocysteine
  MOD_RES (495)..(495): Selenocysteine
  MOD_RES (507)..(507): Selenocysteine
  MOD_RES (512)..(512): Selenocysteine
  MOD_RES (527)..(527): Selenocysteine
  MOD_RES (530)..(530): Selenocysteine
  MOD_RES (535)..(535): Selenocysteine
  MOD_RES (538)..(538): Selenocysteine
  MOD_RES (540)..(540): Selenocysteine
  MOD_RES (542)..(542): Selenocysteine
  MOD_RES (558)..(558): Selenocysteine
  MOD_RES (561)..(561): Selenocysteine
  MOD_RES (579)..(579): Selenocysteine
MAAVVQQNDLVFEFASNVMEDERQLGDPAIFPAVIVEHVPGADILNSYAGLACVEEPNDMIXESSLDVAEEEIIDDDDDDIXLXVEASCHDGDEXIEXIEAAEALLNMDSPGPMLDEKRINGIPEVMEXQQVQEKYADSPGASSPEQPKRKKGRKXKPPRPDSPAXXPNISVKKKNKDGKGNXIYLWEFLLALLQDKAXCPKYIKWXQREKGIFKLVDSKAVSRLWGKHKNKPDMNYEXMGRALRYYYQRGILAKVEGQRLVYQFKEMPKDLIYINDEDPSSSIESSDPSLSSSAXSNRNQXSRSRVSSSPGVKGGAXXVLKPGNSKAAKPKDPVEVAQPSEVLRXVQPXQSPYPXQLFRXVHVVQPVQAVPEGEAARXSXMQDEXLNSSVQSIRXIQAPXQVPVVVSPRNQQLHXVXLQXVPLXXVIASXDPSAGXGSQKFILQAIPSSQPMXVLKENVMLQSQKAGSPPSIVLGPAQVQQVLXSNVQXICNGXVSVASSPSFSAXAPVVXFSPRSSQLVAHPPGXVIXSVIKXQEXKXLXQEVEKKESEDHLKENXEKXEQQPQPYVMVVSSSNGFXSQVAMKQNELLEPNSF

SEQ ID NO: 8991 - protein, 615 aa, Homo sapiens
  MOD_RES (62)..(62): Selenocysteine
  MOD_RES (82)..(82): Selenocysteine
  MOD_RES (84)..(84): Selenocysteine
  MOD_RES (95)..(95): Selenocysteine
  MOD_RES (98)..(98): Selenocysteine
  MOD_RES (138)..(138): Selenocysteine
  MOD_RES (143)..(143): Selenocysteine
  MOD_RES (153)..(153): Selenocysteine
  MOD_RES (180)..(180): Selenocysteine
  MOD_RES (190)..(191): Selenocysteine
  MOD_RES (207)..(207): Selenocysteine
  MOD_RES (223)..(223): Selenocysteine
  MOD_RES (231)..(231): Selenocysteine
  MOD_RES (263)..(263): Selenocysteine
  MOD_RES (320)..(320): Selenocysteine
  MOD_RES (326)..(326): Selenocysteine
  MOD_RES (342)..(343): Selenocysteine
  MOD_RES (370)..(370): Selenocysteine
  MOD_RES (374)..(374): Selenocysteine
  MOD_RES (380)..(380): Selenocysteine
  MOD_RES (385)..(385): Selenocysteine
  MOD_RES (403)..(403): Selenocysteine
  MOD_RES (405)..(405): Selenocysteine
  MOD_RES (410)..(410): Selenocysteine
  MOD_RES (420)..(420): Selenocysteine
  MOD_RES (425)..(425): Selenocysteine
  MOD_RES (440)..(440): Selenocysteine
  MOD_RES (442)..(442): Selenocysteine
  MOD_RES (445)..(445): Selenocysteine
  MOD_RES (449)..(450): Selenocysteine
  MOD_RES (455)..(455): Selenocysteine
  MOD_RES (461)..(461): Selenocysteine
  MOD_RES (478)..(478): Selenocysteine
  MOD_RES (509)..(509): Selenocysteine
  MOD_RES (514)..(514): Selenocysteine
  MOD_RES (519)..(519): Selenocysteine
  MOD_RES (531)..(531): Selenocysteine
  MOD_RES (536)..(536): Selenocysteine
  MOD_RES (551)..(551): Selenocysteine
  MOD_RES (554)..(554): Selenocysteine
  MOD_RES (559)..(559): Selenocysteine
  MOD_RES (562)..(562): Selenocysteine
  MOD_RES (564)..(564): Selenocysteine
  MOD_RES (566)..(566): Selenocysteine
  MOD_RES (582)..(582): Selenocysteine
  MOD_RES (585)..(585): Selenocysteine
  MOD_RES (603)..(603): Selenocysteine
MAAVVQQNDLVFEFASNVMEDERQLGDPAIFPAVIVEHVPGADILNSYAGLACVEEPNDMIXESSLDVAEEEIIDDDDDDIXLXVEASCHDGDEXIEXIEAAEALLNMDSPGPMLDEKRINNNIFSSPEDDMVVAPVXHVSVXLDGIPEVMEXQQVQEKYADSPGASSPEQPKRKKGRKXKPPRPDSPAXXPNISVKKKNKDGKGNXIYLWEFLLALLQDKAXCPKYIKWXQREKGIFKLVDSKAVSRLWGKHKNKPDMNYEXMGRALRYYYQRGILAKVEGQRLVYQFKEMPKDLIYINDEDPSSSIESSDPSLSSSAXSNRNQXSRSRVSSSPGVKGGAXXVLKPGNSKAAKPKDPVEVAQPSEVLRXVQPXQSPYPXQLFRXVHVVQPVQAVPEGEAARXSXMQDEXLNSSVQSIRXIQAPXQVPVVVSPRNQQLHXVXLQXVPLXXVIASXDPSAGXGSQKFILQAIPSSQPMXVLKENVMLQSQKAGSPPSIVLGPAQVQQVLXSNVQXICNGXVSVASSPSFSAXAPVVXFSPRSSQLVAHPPGXVIXSVIKXQEXKXLXQEVEKKESEDHLKENXEKXEQQPQPYVMVVSSSNGFXSQVAMKQNELLE

SEQ ID NO: 8992 - protein, 619 aa, Homo sapiens
  MOD_RES (62)..(62): Selenocysteine
  MOD_RES (82)..(82): Selenocysteine
  MOD_RES (84)..(84): Selenocysteine
  MOD_RES (95)..(95): Selenocysteine
  MOD_RES (98)..(98): Selenocysteine
  MOD_RES (138)..(138): Selenocysteine
  MOD_RES (143)..(143): Selenocysteine
  MOD_RES (153)..(153): Selenocysteine
  MOD_RES (180)..(180): Selenocysteine
  MOD_RES (190)..(191): Selenocysteine
  MOD_RES (207)..(207): Selenocysteine
  MOD_RES (223)..(223): Selenocysteine
  MOD_RES (231)..(231): Selenocysteine
  MOD_RES (263)..(263): Selenocysteine
  MOD_RES (320)..(320): Selenocysteine
  MOD_RES (326)..(326): Selenocysteine
  MOD_RES (342)..(343): Selenocysteine
  MOD_RES (370)..(370): Selenocysteine
  MOD_RES (374)..(374): Selenocysteine
  MOD_RES (380)..(380): Selenocysteine
  MOD_RES (385)..(385): Selenocysteine
  MOD_RES (403)..(403): Selenocysteine
  MOD_RES (405)..(405): Selenocysteine
  MOD_RES (410)..(410): Selenocysteine
  MOD_RES (420)..(420): Selenocysteine
  MOD_RES (425)..(425): Selenocysteine
  MOD_RES (440)..(440): Selenocysteine
  MOD_RES (442)..(442): Selenocysteine
  MOD_RES (445)..(445): Selenocysteine
  MOD_RES (449)..(450): Selenocysteine
  MOD_RES (455)..(455): Selenocysteine
  MOD_RES (461)..(461): Selenocysteine
  MOD_RES (478)..(478): Selenocysteine
  MOD_RES (509)..(509): Selenocysteine
  MOD_RES (514)..(514): Selenocysteine
  MOD_RES (519)..(519): Selenocysteine
  MOD_RES (531)..(531): Selenocysteine
  MOD_RES (536)..(536): Selenocysteine
  MOD_RES (551)..(551): Selenocysteine
  MOD_RES (554)..(554): Selenocysteine
  MOD_RES (559)..(559): Selenocysteine
  MOD_RES (562)..(562): Selenocysteine
  MOD_RES (564)..(564): Selenocysteine
  MOD_RES (566)..(566): Selenocysteine
  MOD_RES (582)..(582): Selenocysteine
  MOD_RES (585)..(585): Selenocysteine
  MOD_RES (603)..(603): Selenocysteine
MAAVVQQNDLVFEFASNVMEDERQLGDPAIFPAVIVEHVPGADILNSYAGLACVEEPNDMIXESSLDVAEEEIIDDDDDDIXLXVEASCHDGDEXIEXIEAAEALLNMDSPGPMLDEKRINNNIFSSPEDDMVVAPVXHVSVXLDGIPEVMEXQQVQEKYADSPGASSPEQPKRKKGRKXKPPRPDSPAXXPNISVKKKNKDGKGNXIYLWEFLLALLQDKAXCPKYIKWXQREKGIFKLVDSKAVSRLWGKHKNKPDMNYEXMGRALRYYYQRGILAKVEGQRLVYQFKEMPKDLIYINDEDPSSSIESSDPSLSSSAXSNRNQXSRSRVSSSPGVKGGAXXVLKPGNSKAAKPKDPVEVAQPSEVLRXVQPXQSPYPXQLFRXVHVVQPVQAVPEGEAARXSXMQDEXLNSSVQSIRXIQAPXQVPVVVSPRNQQLHXVXLQXVPLXXVIASXDPSAGXGSQKFILQAIPSSQPMXVLKENVMLQSQKAGSPPSIVLGPAQVQQVLXSNVQXICNGXVSVASSPSFSAXAPVVXFSPRSSQLVAHPPGXVIXSVIKXQEXKXLXQEVEKKESEDHLKENXEKXEQQPQPYVMVVSSSNGFXSQVAMKQNELLEPNSF

SEQ ID NO: 8993 - protein, 124 aa, Homo sapiens
  MOD_RES (62)..(62): Selenocysteine
  MOD_RES (82)..(82): Selenocysteine
  MOD_RES (84)..(84): Selenocysteine
  MOD_RES (87)..(87): Selenocysteine
  MOD_RES (97)..(97): Selenocysteine
  MOD_RES (114)..(114): Selenocysteine
MAAVVQQNDLVFEFASNVMEDERQLGDPAIFPAVIVEHVPGADILNSYAGLACVEEPNDMIXESSLDVAEEEIIDDDDDDIXLXVEXGFLHVGQSQXPDLKQSACLGFPKCGIXGMSHCASQVC

SEQ ID NO: 8994 - protein, 361 aa, Homo sapiens
  MOD_RES (5)..(5): Selenocysteine
  MOD_RES (62)..(62): Selenocysteine
  MOD_RES (68)..(68): Selenocysteine
  MOD_RES (84)..(85): Selenocysteine
  MOD_RES (112)..(112): Selenocysteine
  MOD_RES (116)..(116): Selenocysteine
  MOD_RES (122)..(122): Selenocysteine
  MOD_RES (127)..(127): Selenocysteine
  MOD_RES (145)..(145): Selenocysteine
  MOD_RES (147)..(147): Selenocysteine
  MOD_RES (152)..(152): Selenocysteine
  MOD_RES (162)..(162): Selenocysteine
  MOD_RES (167)..(167): Selenocysteine
  MOD_RES (182)..(182): Selenocysteine
  MOD_RES (184)..(184): Selenocysteine
  MOD_RES (187)..(187): Selenocysteine
  MOD_RES (191)..(192): Selenocysteine
  MOD_RES (197)..(197): Selenocysteine
  MOD_RES (203)..(203): Selenocysteine
  MOD_RES (220)..(220): Selenocysteine
  MOD_RES (251)..(251): Selenocysteine
  MOD_RES (256)..(256): Selenocysteine
  MOD_RES (261)..(261): Selenocysteine
  MOD_RES (273)..(273): Selenocysteine
  MOD_RES (278)..(278): Selenocysteine
  MOD_RES (293)..(293): Selenocysteine
  MOD_RES (296)..(296): Selenocysteine
  MOD_RES (301)..(301): Selenocysteine
  MOD_RES (304)..(304): Selenocysteine
  MOD_RES (306)..(306): Selenocysteine
  MOD_RES (308)..(308): Selenocysteine
  MOD_RES (324)..(324): Selenocysteine
  MOD_RES (327)..(327): Selenocysteine
  MOD_RES (345)..(345): Selenocysteine
MNYEXMGRALRYYYQRGILAKVEGQRLVYQFKEMPKDLIYINDEDPSSSIESSDPSLSSSAXSNRNQXSRSRVSSSPGVKGGAXXVLKPGNSKAAKPKDPVEVAQPSEVLRXVQPXQSPYPXQLFRXVHVVQPVQAVPEGEAARXSXMQDEXLNSSVQSIRXIQAPXQVPVVVSPRNQQLHXVXLQXVPLXXVIASXDPSAGXGSQKFILQAIPSSQPMXVLKENVMLQSQKAGSPPSIVLGPAQVQQVLXSNVQXICNGXVSVASSPSFSAXAPVVXFSPRSSQLVAHPPGXVIXSVIKXQEXKXLXQEVEKKESEDHLKENXEKXEQQPQPYVMVVSSSNGFXSQVAMKQNELLEPNSF

SEQ ID NO: 8995 - protein, 192 aa, Homo sapiens
  MOD_RES (3)..(3): Selenocysteine
  MOD_RES (10)..(10): Selenocysteine
  MOD_RES (32)..(32): Selenocysteine
  MOD_RES (35)..(35): Selenocysteine
  MOD_RES (49)..(49): Selenocysteine
  MOD_RES (70)..(70): Selenocysteine
  MOD_RES (72)..(72): Selenocysteine
  MOD_RES (78)..(78): Selenocysteine
  MOD_RES (86)..(86): Selenocysteine
  MOD_RES (91)..(91): Selenocysteine
  MOD_RES (106)..(107): Selenocysteine
  MOD_RES (122)..(122): Selenocysteine
  MOD_RES (130)..(130): Selenocysteine
  MOD_RES (162)..(162): Selenocysteine
MAXSLHEGPXNQLDLLIRAVEASVHSSNAHCXDKXIEAAEALLHMESPXCLRDSRSPEFIHAAMRPDVIXEXVVEVSXEESEPMDXSPIPXSPDSHEPMKKKKGNXXYLWEFLLDLLQDKNXCPRYIKWXQREKGIFKLVDSKAVSKLWGKHKNKPDMNYEXMGRALRYYYQRGILAKVEGQRLVYQFKDMP

SEQ ID NO: 8996 - protein, 521 aa, Homo sapiens
  MOD_RES (3)..(3): Selenocysteine
  MOD_RES (10)..(10): Selenocysteine
  MOD_RES (32)..(32): Selenocysteine
  MOD_RES (35)..(35): Selenocysteine
  MOD_RES (49)..(49): Selenocysteine
  MOD_RES (70)..(70): Selenocysteine
  MOD_RES (72)..(72): Selenocysteine
  MOD_RES (78)..(78): Selenocysteine
  MOD_RES (86)..(86): Selenocysteine
  MOD_RES (91)..(91): Selenocysteine
  MOD_RES (110)..(110): Selenocysteine
  MOD_RES (135)..(136): Selenocysteine
  MOD_RES (151)..(151): Selenocysteine
  MOD_RES (159)..(159): Selenocysteine
  MOD_RES (191)..(191): Selenocysteine
  MOD_RES (234)..(234): Selenocysteine
  MOD_RES (242)..(243): Selenocysteine
  MOD_RES (290)..(290): Selenocysteine
  MOD_RES (302)..(304): Selenocysteine
  MOD_RES (310)..(310): Selenocysteine
  MOD_RES (315)..(315): Selenocysteine
  MOD_RES (327)..(327): Selenocysteine
  MOD_RES (335)..(335): Selenocysteine
  MOD_RES (349)..(349): Selenocysteine
  MOD_RES (351)..(351): Selenocysteine
  MOD_RES (354)..(355): Selenocysteine
  MOD_RES (357)..(357): Selenocysteine
  MOD_RES (365)..(365): Selenocysteine
  MOD_RES (368)..(368): Selenocysteine
  MOD_RES (374)..(374): Selenocysteine
  MOD_RES (381)..(381): Selenocysteine
  MOD_RES (389)..(389): Selenocysteine
  MOD_RES (393)..(393): Selenocysteine
  MOD_RES (402)..(402): Selenocysteine
  MOD_RES (407)..(407): Selenocysteine
  MOD_RES (417)..(417): Selenocysteine
  MOD_RES (425)..(425): Selenocysteine
  MOD_RES (433)..(433): Selenocysteine
  MOD_RES (442)..(442): Selenocysteine
  MOD_RES (449)..(449): Selenocysteine
  MOD_RES (478)..(478): Selenocysteine
  MOD_RES (492)..(492): Selenocysteine
  MOD_RES (494)..(494): Selenocysteine
  MOD_RES (510)..(510): Selenocysteine
  MOD_RES (513)..(513): Selenocysteine
  MOD_RES (518)..(518): Selenocysteine
MAXSLHEGPXNQLDLLIRAVEASVHSSNAHCXDKXIEAAEALLHMESPXCLRDSRSPEFIHAAMRPDVIXEXVVEVSXEESEPMDXSPIPXSPDSHEPMKKKKVGRKPKXQQSPISNGSPELGIKKKPREGKGNXXYLWEFLLDLLQDKNXCPRYIKWXQREKGIFKLVDSKAVSKLWGKHKNKPDMNYEXMGRALRYYYQRGILAKVEGQRLVYQFKDMPKNIVVIDDDKSEXCNEDLAGXXDEKSLERVSLSAESLLKAASSVRSGKNSSPINCSRAEKGVARVVNIXSPGHDASSRSPXXXASVSAXAAPRXVRVAMQVPVVMXSLGQKISXVAVQSVNAGAPLIXSXSPXXAXSPKVVIQXIPXVMPASXENGDKIXMQPAKIIXIPAXQLAQCQLQXKSNLXGSGSINIVGXPLAVRALXPVSIAHGXPVMRLSMPXQQASGQXPPRVISAVIKGPEVKSEAVAKKQEHDVKXLQLVEEKPADGNKXVXHVVVVSAPSAIALPVXMKXEGLVXCEK

SEQ ID NO: 8997 - protein, 245 aa, Homo sapiens
  MOD_RES (3)..(3): Selenocysteine
  MOD_RES (10)..(10): Selenocysteine
  MOD_RES (32)..(32): Selenocysteine
  MOD_RES (35)..(35): Selenocysteine
  MOD_RES (49)..(49): Selenocysteine
  MOD_RES (68)..(68): Selenocysteine
  MOD_RES (82)..(82): Selenocysteine
  MOD_RES (84)..(84): Selenocysteine
  MOD_RES (90)..(90): Selenocysteine
  MOD_RES (98)..(98): Selenocysteine
  MOD_RES (103)..(103): Selenocysteine
  MOD_RES (118)..(119): Selenocysteine
  MOD_RES (134)..(134): Selenocysteine
  MOD_RES (142)..(142): Selenocysteine
  MOD_RES (174)..(174): Selenocysteine
  MOD_RES (217)..(217): Selenocysteine
  MOD_RES (225)..(226): Selenocysteine
MAXSLHEGPXNQLDLLIRAVEASVHSSNAHCXDKXIEAAEALLHMESPXCLRDSRSPVEVFVPPCVSXPEFIHAAMRPDVIXEXVVEVSXEESEPMDXSPIPXSPDSHEPMKKKKGNXXYLWEFLLDLLQDKNXCPRYIKWXQREKGIFKLVDSKAVSKLWGKHKNKPDMNYEXMGRALRYYYQRGILAKVEGQRLVYQFKDMPKNIVVIDDDKSEXCNEDLAGXXDEKSLERVSLSAESLLKAA

SEQ ID NO: 8998 - protein, 504 aa, Homo sapiens
  MOD_RES (3)..(3): Selenocysteine
  MOD_RES (10)..(10): Selenocysteine
  MOD_RES (32)..(32): Selenocysteine
  MOD_RES (35)..(35): Selenocysteine
  MOD_RES (49)..(49): Selenocysteine
  MOD_RES (68)..(68): Selenocysteine
  MOD_RES (82)..(82): Selenocysteine
  MOD_RES (84)..(84): Selenocysteine
  MOD_RES (90)..(90): Selenocysteine
  MOD_RES (98)..(98): Selenocysteine
  MOD_RES (103)..(103): Selenocysteine
  MOD_RES (118)..(119): Selenocysteine
  MOD_RES (134)..(134): Selenocysteine
  MOD_RES (142)..(142): Selenocysteine
  MOD_RES (174)..(174): Selenocysteine
  MOD_RES (217)..(217): Selenocysteine
  MOD_RES (225)..(226): Selenocysteine
  MOD_RES (273)..(273): Selenocysteine
  MOD_RES (285)..(287): Selenocysteine
  MOD_RES (293)..(293): Selenocysteine
  MOD_RES (298)..(298): Selenocysteine
  MOD_RES (310)..(310): Selenocysteine
  MOD_RES (318)..(318): Selenocysteine
  MOD_RES (332)..(332): Selenocysteine
  MOD_RES (334)..(334): Selenocysteine
  MOD_RES (337)..(338): Selenocysteine
  MOD_RES (340)..(340): Selenocysteine
  MOD_RES (348)..(348): Selenocysteine
  MOD_RES (351)..(351): Selenocysteine
  MOD_RES (357)..(357): Selenocysteine
  MOD_RES (364)..(364): Selenocysteine
  MOD_RES (372)..(372): Selenocysteine
  MOD_RES (376)..(376): Selenocysteine
  MOD_RES (385)..(385): Selenocysteine
  MOD_RES (390)..(390): Selenocysteine
  MOD_RES (400)..(400): Selenocysteine
  MOD_RES (408)..(408): Selenocysteine
  MOD_RES (416)..(416): Selenocysteine
  MOD_RES (425)..(425): Selenocysteine
  MOD_RES (432)..(432): Selenocysteine
  MOD_RES (461)..(461): Selenocysteine
  MOD_RES (475)..(475): Selenocysteine
  MOD_RES (477)..(477): Selenocysteine
  MOD_RES (493)..(493): Selenocysteine
  MOD_RES (496)..(496): Selenocysteine
  MOD_RES (501)..(501): Selenocysteine
MAXSLHEGPXNQLDLLIRAVEASVHSSNAHCXDKXIEAAEALLHMESPXCLRDSRSPVEVFVPPCVSXPEFIHAAMRPDVIXEXVVEVSXEESEPMDXSPIPXSPDSHEPMKKKKGNXXYLWEFLLDLLQDKNXCPRYIKWXQREKGIFKLVDSKAVSKLWGKHKNKPDMNYEXMGRALRYYYQRGILAKVEGQRLVYQFKDMPKNIVVIDDDKSEXCNEDLAGXXDEKSLERVSLSAESLLKAASSVRSGKNSSPINCSRAEKGVARVVNIXSPGHDASSRSPXXXASVSAXAAPRXVRVAMQVPVVMXSLGQKISXVAVQSVNAGAPLIXSXSPXXAXSPKVVIQXIPXVMPASXENGDKIXMQPAKIIXIPAXQLAQCQLQXKSNLXGSGSINIVGXPLAVRALXPVSIAHGXPVMRLSMPXQQASGQXPPRVISAVIKGPEVKSEAVAKKQEHDVKXLQLVEEKPADGNKXVXHVVVVSAPSAIALPVXMKXEGLVXCEK

SEQ ID NO: 8999 - protein, 533 aa, Homo sapiens
  MOD_RES (3)..(3): Selenocysteine
  MOD_RES (10)..(10): Selenocysteine
  MOD_RES (32)..(32): Selenocysteine
  MOD_RES (35)..(35): Selenocysteine
  MOD_RES (49)..(49): Selenocysteine
  MOD_RES (68)..(68): Selenocysteine
  MOD_RES (82)..(82): Selenocysteine
  MOD_RES (84)..(84): Selenocysteine
  MOD_RES (90)..(90): Selenocysteine
  MOD_RES (98)..(98): Selenocysteine
  MOD_RES (103)..(103): Selenocysteine
  MOD_RES (122)..(122): Selenocysteine
  MOD_RES (147)..(148): Selenocysteine
  MOD_RES (163)..(163): Selenocysteine
  MOD_RES (171)..(171): Selenocysteine
  MOD_RES (203)..(203): Selenocysteine
  MOD_RES (246)..(246): Selenocysteine
  MOD_RES (254)..(255): Selenocysteine
  MOD_RES (302)..(302): Selenocysteine
  MOD_RES (314)..(316): Selenocysteine
  MOD_RES (322)..(322): Selenocysteine
  MOD_RES (327)..(327): Selenocysteine
  MOD_RES (339)..(339): Selenocysteine
  MOD_RES (347)..(347): Selenocysteine
  MOD_RES (361)..(361): Selenocysteine
  MOD_RES (363)..(363): Selenocysteine
  MOD_RES (366)..(367): Selenocysteine
  MOD_RES (369)..(369): Selenocysteine
  MOD_RES (377)..(377): Selenocysteine
  MOD_RES (380)..(380): Selenocysteine
  MOD_RES (386)..(386): Selenocysteine
  MOD_RES (393)..(393): Selenocysteine
  MOD_RES (401)..(401): Selenocysteine
  MOD_RES (405)..(405): Selenocysteine
  MOD_RES (414)..(414): Selenocysteine
  MOD_RES (419)..(419): Selenocysteine
  MOD_RES (429)..(429): Selenocysteine
  MOD_RES (437)..(437): Selenocysteine
  MOD_RES (445)..(445): Selenocysteine
  MOD_RES (454)..(454): Selenocysteine
  MOD_RES (461)..(461): Selenocysteine
  MOD_RES (490)..(490): Selenocysteine
  MOD_RES (504)..(504): Selenocysteine
  MOD_RES (506)..(506): Selenocysteine
  MOD_RES (522)..(522): Selenocysteine
  MOD_RES (525)..(525): Selenocysteine
  MOD_RES (530)..(530): Selenocysteine
MAXSLHEGPXNQLDLLIRAVEASVHSSNAHCXDKXIEAAEALLHMESPXCLRDSRSPVEVFVPPCVSXPEFIHAAMRPDVIXEXVVEVSXEESEPMDXSPIPXSPDSHEPMKKKKVGRKPKXQQSPISNGSPELGIKKKPREGKGNXXYLWEFLLDLLQDKNXCPRYIKWXQREKGIFKLVDSKAVSKLWGKHKNKPDMNYEXMGRALRYYYQRGILAKVEGQRLVYQFKDMPKNIVVIDDDKSEXCNEDLAGXXDEKSLERVSLSAESLLKAASSVRSGKNSSPINCSRAEKGVARVVNIXSPGHDASSRSPXXXASVSAXAAPRXVRVAMQVPVVMXSLGQKISXVAVQSVNAGAPLIXSXSPXXAXSPKVVIQXIPXVMPASXENGDKIXMQPAKIIXIPAXQLAQCQLQXKSNLXGSGSINIVGXPLAVRALXPVSIAHGXPVMRLSMPXQQASGQXPPRVISAVIKGPEVKSEAVAKKQEHDVKXLQLVEEKPADGNKXVXHVVVVSAPSAIALPVXMKXEGLVXCEK

SEQ ID NO: 9000 - protein, 93 aa, Homo sapiens
  MOD_RES (2)..(2): Selenocysteine
  MOD_RES (11)..(11): Selenocysteine
  MOD_RES (60)..(60): Selenocysteine
  MOD_RES (74)..(74): Selenocysteine
  MOD_RES (79)..(79): Selenocysteine
MXSAVVDSGGXILELSSNGVENQEESEKVSEYPAVIVEPVPSARLEQGYAAQVLVYDDEXYMMQDVAEEQEVEXENVEXGGISLCHPGWSAVV

SEQ ID NO: 9001 - protein, 581 aa, Homo sapiens
  MOD_RES (2)..(2): Selenocysteine
  MOD_RES (11)..(11): Selenocysteine
  MOD_RES (60)..(60): Selenocysteine
  MOD_RES (74)..(74): Selenocysteine
  MOD_RES (79)..(79): Selenocysteine
  MOD_RES (92)..(92): Selenocysteine
  MOD_RES (95)..(95): Selenocysteine
  MOD_RES (109)..(109): Selenocysteine
  MOD_RES (130)..(130): Selenocysteine
  MOD_RES (132)..(132): Selenocysteine
  MOD_RES (138)..(138): Selenocysteine
  MOD_RES (146)..(146): Selenocysteine
  MOD_RES (151)..(151): Selenocysteine
  MOD_RES (170)..(170): Selenocysteine
  MOD_RES (195)..(196): Selenocysteine
  MOD_RES (211)..(211): Selenocysteine
  MOD_RES (219)..(219): Selenocysteine
  MOD_RES (251)..(251): Selenocysteine
  MOD_RES (294)..(294): Selenocysteine
  MOD_RES (302)..(303): Selenocysteine
  MOD_RES (350)..(350): Selenocysteine
  MOD_RES (362)..(364): Selenocysteine
  MOD_RES (370)..(370): Selenocysteine
  MOD_RES (375)..(375): Selenocysteine
  MOD_RES (387)..(387): Selenocysteine
  MOD_RES (395)..(395): Selenocysteine
  MOD_RES (409)..(409): Selenocysteine
  MOD_RES (411)..(411): Selenocysteine
  MOD_RES (414)..(415): Selenocysteine
  MOD_RES (417)..(417): Selenocysteine
  MOD_RES (425)..(425): Selenocysteine
  MOD_RES (428)..(428): Selenocysteine
  MOD_RES (434)..(434): Selenocysteine
  MOD_RES (441)..(441): Selenocysteine
  MOD_RES (449)..(449): Selenocysteine
  MOD_RES (453)..(453): Selenocysteine
  MOD_RES (462)..(462): Selenocysteine
  MOD_RES (467)..(467): Selenocysteine
  MOD_RES (477)..(477): Selenocysteine
  MOD_RES (485)..(485): Selenocysteine
  MOD_RES (493)..(493): Selenocysteine
  MOD_RES (502)..(502): Selenocysteine
  MOD_RES (509)..(509): Selenocysteine
  MOD_RES (538)..(538): Selenocysteine
  MOD_RES (552)..(552): Selenocysteine
  MOD_RES (554)..(554): Selenocysteine
  MOD_RES (570)..(570): Selenocysteine
  MOD_RES (573)..(573): Selenocysteine
  MOD_RES (578)..(578): Selenocysteine
MXSAVVDSGGXILELSSNGVENQEESEKVSEYPAVIVEPVPSARLEQGYAAQVLVYDDEXYMMQDVAEEQEVEXENVEXVEASVHSSNAHCXDKXIEAAEALLHMESPXCLRDSRSPEFIHAAMRPDVIXEXVVEVSXEESEPMDXSPIPXSPDSHEPMKKKKVGRKPKXQQSPISNGSPELGIKKKPREGKGNXXYLWEFLLDLLQDKNXCPRYIKWXQREKGIFKLVDSKAVSKLWGKHKNKPDMNYEXMGRALRYYYQRGILAKVEGQRLVYQFKDMPKNIVVIDDDKSEXCNEDLAGXXDEKSLERVSLSAESLLKAASSVRSGKNSSPINCSRAEKGVARVVNIXSPGHDASSRSPXXXASVSAXAAPRXVRVAMQVPVVMXSLGQKISXVAVQSVNAGAPLIXSXSPXXAXSPKVVIQXIPXVMPASXENGDKIXMQPAKIIXIPAXQLAQCQLQXKSNLXGSGSINIVGXPLAVRALXPVSIAHGXPVMRLSMPXQQASGQXPPRVISAVIKGPEVKSEAVAKKQEHDVKXLQLVEEKPADGNKXVXHVVVVSAPSAIALPVXMKXEGLVXCEK

SEQ ID NO: 9002 - protein, 593 aa, Homo sapiens
  MOD_RES (2)..(2): Selenocysteine
  MOD_RES (11)..(11): Selenocysteine
  MOD_RES (60)..(60): Selenocysteine
  MOD_RES (74)..(74): Selenocysteine
  MOD_RES (79)..(79): Selenocysteine
  MOD_RES (92)..(92): Selenocysteine
  MOD_RES (95)..(95): Selenocysteine
  MOD_RES (109)..(109): Selenocysteine
  MOD_RES (128)..(128): Selenocysteine
  MOD_RES (142)..(142): Selenocysteine
  MOD_RES (144)..(144): Selenocysteine
  MOD_RES (150)..(150): Selenocysteine
  MOD_RES (158)..(158): Selenocysteine
  MOD_RES (163)..(163): Selenocysteine
  MOD_RES (182)..(182): Selenocysteine
  MOD_RES (207)..(208): Selenocysteine
  MOD_RES (223)..(223): Selenocysteine
  MOD_RES (231)..(231): Selenocysteine
  MOD_RES (263)..(263): Selenocysteine
  MOD_RES (306)..(306): Selenocysteine
  MOD_RES (314)..(315): Selenocysteine
  MOD_RES (362)..(362): Selenocysteine
  MOD_RES (374)..(376): Selenocysteine
  MOD_RES (382)..(382): Selenocysteine
  MOD_RES (387)..(387): Selenocysteine
  MOD_RES (399)..(399): Selenocysteine
  MOD_RES (407)..(407): Selenocysteine
  MOD_RES (421)..(421): Selenocysteine
  MOD_RES (423)..(423): Selenocysteine
  MOD_RES (426)..(427): Selenocysteine
  MOD_RES (429)..(429): Selenocysteine
  MOD_RES (437)..(437): Selenocysteine
  MOD_RES (440)..(440): Selenocysteine
  MOD_RES (446)..(446): Selenocysteine
  MOD_RES (453)..(453): Selenocysteine
  MOD_RES (461)..(461): Selenocysteine
  MOD_RES (465)..(465): Selenocysteine
  MOD_RES (474)..(474): Selenocysteine
  MOD_RES (479)..(479): Selenocysteine
  MOD_RES (489)..(489): Selenocysteine
  MOD_RES (497)..(497): Selenocysteine
  MOD_RES (505)..(505): Selenocysteine
  MOD_RES (514)..(514): Selenocysteine
  MOD_RES (521)..(521): Selenocysteine
  MOD_RES (550)..(550): Selenocysteine
  MOD_RES (564)..(564): Selenocysteine
  MOD_RES (566)..(566): Selenocysteine
  MOD_RES (582)..(582): Selenocysteine
  MOD_RES (585)..(585): Selenocysteine
  MOD_RES (590)..(590): Selenocysteine
MXSAVVDSGGXILELSSNGVENQEESEKVSEYPAVIVEPVPSARLEQGYAAQVLVYDDEXYMMQDVAEEQEVEXENVEXVEASVHSSNAHCXDKXIEAAEALLHMESPXCLRDSRSPVEVFVPPCVSXPEFIHAAMRPDVIXEXVVEVSXEESEPMDXSPIPXSPDSHEPMKKKKVGRKPKXQQSPISNGSPELGIKKKPREGKGNXXYLWEFLLDLLQDKNXCPRYIKWXQREKGIFKLVDSKAVSKLWGKHKNKPDMNYEXMGRALRYYYQRGILAKVEGQRLVYQFKDMPKNIVVIDDDKSEXCNEDLAGXXDEKSLERVSLSAESLLKAASSVRSGKNSSPINCSRAEKGVARVVNIXSPGHDASSRSPXXXASVSAXAAPRXVRVAMQVPVVMXSLGQKISXVAVQSVNAGAPLIXSXSPXXAXSPKVVIQXIPXVMPASXENGDKIXMQPAKIIXIPAXQLAQCQLQXKSNLXGSGSINIVGXPLAVRALXPVSIAHGXPVMRLSMPXQQASGQXPPRVISAVIKGPEVKSEAVAKKQEHDVKXLQLVEEKPADGNKXVXHVVVVSAPSAIALPVXMKXEGLVXCEK

SEQ ID NO: 9003 - protein, 232 aa, Homo sapiens
  MOD_RES (4)..(4): Selenocysteine
  MOD_RES (25)..(25): Selenocysteine
  MOD_RES (34)..(34): Selenocysteine
  MOD_RES (43)..(43): Selenocysteine
  MOD_RES (68)..(68): Selenocysteine
  MOD_RES (99)..(99): Selenocysteine
  MOD_RES (127)..(127): Selenocysteine
  MOD_RES (196)..(196): Selenocysteine
  MOD_RES (199)..(199): Selenocysteine
  MOD_RES (220)..(220): Selenocysteine
MAAXCEISNIFSNYFSAMYSSEDSXLASVPPAAXFGADDLVLXLSNPQMSLEEKASWLGEQPQFWSKXQVLDWISYQVEKNKYDASAIDFSRCDMDGAXLCNCALEELRLVFGPLGDQLHAQLRDLXSSSSDELSWIIELLEKDGMAFQEALDPGPFDQGSPFAQELLDDGQQASPYHPGSCGAGAPSPGSSDVSXAGXGASRSSHSSDSGGSDVDLDPXDGKLFPSDGFRD

SEQ ID NO: 9004 - protein, 371 aa, Homo sapiens
  MOD_RES (4)..(4): Selenocysteine
  MOD_RES (25)..(25): Selenocysteine
  MOD_RES (34)..(34): Selenocysteine
  MOD_RES (43)..(43): Selenocysteine
  MOD_RES (54)..(54): Selenocysteine
  MOD_RES (70)..(70): Selenocysteine
  MOD_RES (101)..(101): Selenocysteine
  MOD_RES (129)..(129): Selenocysteine
  MOD_RES (198)..(198): Selenocysteine
  MOD_RES (201)..(201): Selenocysteine
  MOD_RES (222)..(222): Selenocysteine
  MOD_RES (273)..(273): Selenocysteine
  MOD_RES (325)..(325): Selenocysteine
MAAXCEISNIFSNYFSAMYSSEDSXLASVPPAAXFGADDLVLXLSNPQMSLEGXEKASWLGEQPQFWSKXQVLDWISYQVEKNKYDASAIDFSRCDMDGAXLCNCALEELRLVFGPLGDQLHAQLRDLXSSSSDELSWIIELLEKDGMAFQEALDPGPFDQGSPFAQELLDDGQQASPYHPGSCGAGAPSPGSSDVSXAGXGASRSSHSSDSGGSDVDLDPXDGKLFPSDGFRDCKKGDPKHGKRKRGRPRKLSKEYWDCLEGKKSKHAPRGXHLWEFIRDILIHPELNEGLMKWENRHEGVFKFLRSEAVAQLWGQKKKNSNMXYEKLSRAMRYYYKREILERVDGRRLVYKFGKNSSGWKEEEVLQSRN

SEQ ID NO: 9005 - protein, 662 aa, Homo sapiens
  MOD_RES (4)..(4): Selenocysteine
  MOD_RES (63)..(63): Selenocysteine
  MOD_RES (66)..(66): Selenocysteine
  MOD_RES (70)..(70): Selenocysteine
  MOD_RES (82)..(82): Selenocysteine
  MOD_RES (88)..(88): Selenocysteine
  MOD_RES (91)..(91): Selenocysteine
  MOD_RES (94)..(94): Selenocysteine
  MOD_RES (116)..(116): Selenocysteine
  MOD_RES (130)..(130): Selenocysteine
  MOD_RES (150)..(150): Selenocysteine
  MOD_RES (171)..(171): Selenocysteine
  MOD_RES (181)..(181): Selenocysteine
  MOD_RES (187)..(187): Selenocysteine
  MOD_RES (191)..(191): Selenocysteine
  MOD_RES (208)..(208): Selenocysteine
  MOD_RES (224)..(224): Selenocysteine
  MOD_RES (232)..(232): Selenocysteine
  MOD_RES (264)..(264): Selenocysteine
  MOD_RES (310)..(310): Selenocysteine
  MOD_RES (318)..(318): Selenocysteine
  MOD_RES (326)..(327): Selenocysteine
  MOD_RES (330)..(330): Selenocysteine
  MOD_RES (367)..(367): Selenocysteine
  MOD_RES (417)..(417): Selenocysteine
  MOD_RES (420)..(420): Selenocysteine
  MOD_RES (424)..(425): Selenocysteine
  MOD_RES (428)..(428): Selenocysteine
  MOD_RES (435)..(436): Selenocysteine
  MOD_RES (439)..(439): Selenocysteine
  MOD_RES (451)..(451): Selenocysteine
  MOD_RES (455)..(455): Selenocysteine
  MOD_RES (457)..(457): Selenocysteine
  MOD_RES (496)..(496): Selenocysteine
  MOD_RES (502)..(502): Selenocysteine
  MOD_RES (504)..(504): Selenocysteine
  MOD_RES (518)..(518): Selenocysteine
  MOD_RES (526)..(526): Selenocysteine
  MOD_RES (529)..(530): Selenocysteine
  MOD_RES (551)..(551): Selenocysteine
  MOD_RES (564)..(564): Selenocysteine
  MOD_RES (580)..(580): Selenocysteine
  MOD_RES (597)..(597): Selenocysteine
  MOD_RES (605)..(605): Selenocysteine
  MOD_RES (609)..(609): Selenocysteine
  MOD_RES (631)..(632): Selenocysteine
  MOD_RES (638)..(638): Selenocysteine
  MOD_RES (642)..(642): Selenocysteine
  MOD_RES (652)..(652): Selenocysteine
MAIXLQPSDLIFEFASNGMDDDIHQLEDPSVFPAVIVEQVPYPDLLHLYSGLELDDVHNGIIXDGXLCMXQDQILEGSFLLXDDNEAXSHXMSXAEVLLNMESPSDILDEKQIFSXSEMLPDSDPAPAVXLPNYLFPASEPDALNRAGDXSDQEGHSLEEKASREESAKKXGKSKKRIRKXKGNRSXSPVXDPSIPIRKKSKDGKGSXIYLWEFLLALLQDRNXCPKYIKWXQREKGIFKLVDSKAVSKLWGKQKNKPDMNYEXMGRALRYYYQRGILAKVEGQRLVYQFKEMPKDLVVIEDEDESSEAXAAPPQASXASVASASXXRRXSSRVIQICPPGQGQLFLGEAKNSACRSPAICESGIGXVARRGDPHYLHHARLSSRGPGQAHQSCECIFSAQQHPPRSGPRGSGSALXLQXIPLXXVLXNGPPASXXAPXQLVLQSVPAASXFKDXFXLQASFPLNASFQDSQVAAPGAPLILSGLPQLLAGANRPXNPAPPXVXGAGPAGPSSQPPGXVIAAFIRXSGXXAAPRVKEGPLRSSSYVQGMVXGAPMEGLLVPEEXLRELLRDQAHLQPLPXQVVSRGSHNPSLLGNQXLSPPSRPXVGLXPVAELELSSGSGSLLMAEPSVXXSGSLLXRSPXPAPFSPFNPXSLIKMEPHDI

SEQ ID NO: 9006 - protein, 663 aa, Homo sapiens
  MOD_RES (4)..(4): Selenocysteine
  MOD_RES (63)..(63): Selenocysteine
  MOD_RES (66)..(66): Selenocysteine
  MOD_RES (70)..(70): Selenocysteine
  MOD_RES (82)..(82): Selenocysteine
  MOD_RES (88)..(88): Selenocysteine
  MOD_RES (91)..(91): Selenocysteine
  MOD_RES (94)..(94): Selenocysteine
  MOD_RES (116)..(116): Selenocysteine
  MOD_RES (130)..(130): Selenocysteine
  MOD_RES (150)..(150): Selenocysteine
  MOD_RES (171)..(171): Selenocysteine
  MOD_RES (181)..(181): Selenocysteine
  MOD_RES (187)..(187): Selenocysteine
  MOD_RES (191)..(191): Selenocysteine
  MOD_RES (208)..(208): Selenocysteine
  MOD_RES (224)..(224): Selenocysteine
  MOD_RES (232)..(232): Selenocysteine
  MOD_RES (264)..(264): Selenocysteine
  MOD_RES (310)..(310): Selenocysteine
  MOD_RES (318)..(318): Selenocysteine
  MOD_RES (326)..(327): Selenocysteine
  MOD_RES (330)..(330): Selenocysteine
  MOD_RES (376)..(377): Selenocysteine
  MOD_RES (379)..(379): Selenocysteine
  MOD_RES (392)..(392): Selenocysteine
  MOD_RES (418)..(418): Selenocysteine
  MOD_RES (421)..(421): Selenocysteine
  MOD_RES (425)..(426): Selenocysteine
  MOD_RES (429)..(429): Selenocysteine
  MOD_RES (436)..(437): Selenocysteine
  MOD_RES (440)..(440): Selenocysteine
  MOD_RES (452)..(452): Selenocysteine
  MOD_RES (456)..(456): Selenocysteine
  MOD_RES (458)..(458): Selenocysteine
  MOD_RES (497)..(497): Selenocysteine
  MOD_RES (503)..(503): Selenocysteine
  MOD_RES (505)..(505): Selenocysteine
  MOD_RES (519)..(519): Selenocysteine
  MOD_RES (527)..(527): Selenocysteine
  MOD_RES (530)..(531): Selenocysteine
  MOD_RES (552)..(552): Selenocysteine
  MOD_RES (565)..(565): Selenocysteine
  MOD_RES (581)..(581): Selenocysteine
  MOD_RES (598)..(598): Selenocysteine
  MOD_RES (606)..(606): Selenocysteine
  MOD_RES (610)..(610): Selenocysteine
  MOD_RES (632)..(633): Selenocysteine
  MOD_RES (639)..(639): Selenocysteine
  MOD_RES (643)..(643): Selenocysteine
  MOD_RES (653)..(653): Selenocysteine
MAIXLQPSDLIFEFASNGMDDDIHQLEDPSVFPAVIVEQVPYPDLLHLYSGLELDDVHNGIIXDGXLCMXQDQILEGSFLLXDDNEAXSHXMSXAEVLLNMESPSDILDEKQIFSXSEMLPDSDPAPAVXLPNYLFPASEPDALNRAGDXSDQEGHSLEEKASREESAKKXGKSKKRIRKXKGNRSXSPVXDPSIPIRKKSKDGKGSXIYLWEFLLALLQDRNXCPKYIKWXQREKGIFKLVDSKAVSKLWGKQKNKPDMNYEXMGRALRYYYQRGILAKVEGQRLVYQFKEMPKDLVVIEDEDESSEAXAAPPQASXASVASASXXRRXSSRVSSRSAPQGKGSSSWEKPKIQHVGLQPSASLELGPSLDEEIPXXSXMLVSPAEGQVKLXKAVSASSVPSNIHLGVAPVGSGSALXLQXIPLXXVLXNGPPASXXAPXQLVLQSVPAASXFKDXFXLQASFPLNASFQDSQVAAPGAPLILSGLPQLLAGANRPXNPAPPXVXGAGPAGPSSQPPGXVIAAFIRXSGXXAAPRVKEGPLRSSSYVQGMVXGAPMEGLLVPEEXLRELLRDQAHLQPLPXQVVSRGSHNPSLLGNQXLSPPSRPXVGLXPVAELELSSGSGSLLMAEPSVXXSGSLLXRSPXPAPFSPFNPXSLIKMEPHDI

SEQ ID NO: 9007 - protein, 77 aa, Homo sapiens
  MOD_RES (45)..(45): Selenocysteine
  MOD_RES (48)..(48): Selenocysteine
  MOD_RES (52)..(52): Selenocysteine
  MOD_RES (64)..(64): Selenocysteine
  MOD_RES (70)..(70): Selenocysteine
  MOD_RES (73)..(73): Selenocysteine
  MOD_RES (76)..(76): Selenocysteine
MDDDIHQLEDPSVFPAVIVEQVPYPDLLHLYSGLELDDVHNGIIXDGXLCMXQDQILEGSFLLXDDNEAXSHXMSXA

SEQ ID NO: 9008 - protein, 138 aa, Homo sapiens
  MOD_RES (6)..(6): Selenocysteine
  MOD_RES (9)..(9): Selenocysteine
  MOD_RES (24)..(24): Selenocysteine
  MOD_RES (40)..(40): Selenocysteine
  MOD_RES (47)..(47): Selenocysteine
  MOD_RES (55)..(55): Selenocysteine
  MOD_RES (74)..(74): Selenocysteine
  MOD_RES (93)..(93): Selenocysteine
  MOD_RES (117)..(117): Selenocysteine
  MOD_RES (126)..(126): Selenocysteine
  MOD_RES (131)..(131): Selenocysteine
  MOD_RES (135)..(135): Selenocysteine
MLDSVXHSXFLPNASFCDPLMSWXDLFSNEEYYPAFEHQXACDSYWXSVHPEYWXKRHVWEWLQFCCDQYKLDXNCISFCNFNISGLQLCSMXQEEFVEAAGLCGEYLYFILQNIRXQGQCSEGQXSRGGXRIRXKQL

SEQ ID NO: 9009 - protein, 255 aa, Homo sapiens
  MOD_RES (6)..(6): Selenocysteine
  MOD_RES (9)..(9): Selenocysteine
  MOD_RES (24)..(24): Selenocysteine
  MOD_RES (40)..(40): Selenocysteine
  MOD_RES (47)..(47): Selenocysteine
  MOD_RES (55)..(55): Selenocysteine
  MOD_RES (74)..(74): Selenocysteine
  MOD_RES (93)..(93): Selenocysteine
  MOD_RES (117)..(117): Selenocysteine
  MOD_RES (132)..(132): Selenocysteine
  MOD_RES (144)..(144): Selenocysteine
  MOD_RES (158)..(158): Selenocysteine
  MOD_RES (215)..(215): Selenocysteine
  MOD_RES (229)..(229): Selenocysteine
MLDSVXHSXFLPNASFCDPLMSWXDLFSNEEYYPAFEHQXACDSYWXSVHPEYWXKRHVWEWLQFCCDQYKLDXNCISFCNFNISGLQLCSMXQEEFVEAAGLCGEYLYFILQNIRXQGYSFFNDAEESKAXIKDYADSNCLKXSGIKSQDCHSHSRXSLQSSHLWEFVRDLLLSPEENCGILEWEDREQGIFRVVKSEALAKMWGQRKKNDRMXYEKLSRALRYYYKXGILERVDRRLVYKFGKNAHGWQEDKL

SEQ ID NO: 9010 - protein, 160 aa, Homo sapiens
  MOD_RES (6)..(6): Selenocysteine
  MOD_RES (9)..(9): Selenocysteine
  MOD_RES (24)..(24): Selenocysteine
  MOD_RES (40)..(40): Selenocysteine
  MOD_RES (49)..(49): Selenocysteine
  MOD_RES (63)..(63): Selenocysteine
  MOD_RES (120)..(120): Selenocysteine
  MOD_RES (134)..(134): Selenocysteine
MLDSVXHSXFLPNASFCDPLMSWXDLFSNEEYYPAFEHQXDADSNCLKXSGIKSQDCHSHSRXSLQSSHLWEFVRDLLLSPEENCGILEWEDREQGIFRVVKSEALAKMWGQRKKNDRMXYEKLSRALRYYYKXGILERVDRRLVYKFGKNAHGWQEDKL

SEQ ID NO: 9011 - protein, 265 aa, Homo sapiens
  MOD_RES (16)..(16): Selenocysteine
  MOD_RES (19)..(19): Selenocysteine
  MOD_RES (34)..(34): Selenocysteine
  MOD_RES (50)..(50): Selenocysteine
  MOD_RES (57)..(57): Selenocysteine
  MOD_RES (65)..(65): Selenocysteine
  MOD_RES (84)..(84): Selenocysteine
  MOD_RES (103)..(103): Selenocysteine
  MOD_RES (127)..(127): Selenocysteine
  MOD_RES (142)..(142): Selenocysteine
  MOD_RES (154)..(154): Selenocysteine
  MOD_RES (168)..(168): Selenocysteine
  MOD_RES (225)..(225): Selenocysteine
  MOD_RES (239)..(239): Selenocysteine
MPSLPHSHRVMLDSVXHSXFLPNASFCDPLMSWXDLFSNEEYYPAFEHQXACDSYWXSVHPEYWXKRHVWEWLQFCCDQYKLDXNCISFCNFNISGLQLCSMXQEEFVEAAGLCGEYLYFILQNIRXQGYSFFNDAEESKAXIKDYADSNCLKXSGIKSQDCHSHSRXSLQSSHLWEFVRDLLLSPEENCGILEWEDREQGIFRVVKSEALAKMWGQRKKNDRMXYEKLSRALRYYYKXGILERVDRRLVYKFGKNAHGWQEDKL

SEQ ID NO: 9012 - protein, 187 aa, Homo sapiens
  MOD_RES (16)..(16): Selenocysteine
  MOD_RES (19)..(19): Selenocysteine
  MOD_RES (34)..(34): Selenocysteine
  MOD_RES (50)..(50): Selenocysteine
  MOD_RES (64)..(64): Selenocysteine
  MOD_RES (76)..(76): Selenocysteine
  MOD_RES (90)..(90): Selenocysteine
  MOD_RES (147)..(147): Selenocysteine
  MOD_RES (161)..(161): Selenocysteine
MPSLPHSHRVMLDSVXHSXFLPNASFCDPLMSWXDLFSNEEYYPAFEHQXGYSFFNDAEESKAXIKDYADSNCLKXSGIKSQDCHSHSRXSLQSSHLWEFVRDLLLSPEENCGILEWEDREQGIFRVVKSEALAKMWGQRKKNDRMXYEKLSRALRYYYKXGILERVDRRLVYKFGKNAHGWQEDKL

SEQ ID NO: 9013 - protein, 95 aa, Homo sapiens
  MOD_RES (6)..(6): Selenocysteine
  MOD_RES (27)..(27): Selenocysteine
  MOD_RES (53)..(53): Selenocysteine
MDPSVXLWQFLLQLLREQGNGHIISWXSRDGGEFKLVDAEEVARLWGLRKNKXNMNYDKLSRALRYYYDKNIIRKVSGQKFVYKFVSYPESHCAP

SEQ ID NO: 9014 - protein, 428 aa, Homo sapiens
  MOD_RES (6)..(6): Selenocysteine
  MOD_RES (27)..(27): Selenocysteine
  MOD_RES (53)..(53): Selenocysteine
  MOD_RES (96)..(96): Selenocysteine
  MOD_RES (108)..(108): Selenocysteine
  MOD_RES (110)..(110): Selenocysteine
  MOD_RES (126)..(126): Selenocysteine
  MOD_RES (133)..(133): Selenocysteine
  MOD_RES (161)..(161): Selenocysteine
  MOD_RES (163)..(163): Selenocysteine
  MOD_RES (199)..(199): Selenocysteine
  MOD_RES (222)..(222): Selenocysteine
  MOD_RES (269)..(270): Selenocysteine
  MOD_RES (293)..(293): Selenocysteine
  MOD_RES (336)..(336): Selenocysteine
  MOD_RES (353)..(353): Selenocysteine
  MOD_RES (359)..(359): Selenocysteine
  MOD_RES (361)..(361): Selenocysteine
  MOD_RES (363)..(363): Selenocysteine
  MOD_RES (368)..(368): Selenocysteine
  MOD_RES (381)..(381): Selenocysteine
  MOD_RES (417)..(417): Selenocysteine
MDPSVXLWQFLLQLLREQGNGHIISWXSRDGGEFKLVDAEEVARLWGLRKNKXNMNYDKLSRALRYYYDKNIIRKVSGQKFVYKFVSYPEVAGCSXEDCPPQPEVSVXSXMPNVAPAAIHAAPGDXVSGKPGXPKGAGMAGPGGLARSSRNEYMRSGLYSXFXIQSLQPQPPPHPRPAVVLPSAAPAGAAAPPSGSRSXSPSPLEACLEAEEAGLPLQVILXPPEAPNLKSEELNVEPGLGRALPPEVKVEGPKEELEVAGERGFVPEXXKAEPEVPPQEGVPARLPAVVMDXAGQAGGHAASSPEISQPQKGRKPRDLELPLSPSLLGGPGPERXPGSGSGSGLQAPGPALXPSLLPXHXLXPVLLXPSSLPPSIHFWSXLSPIAPRSPAKLSFQFPSSGSAQVHIPSISVDGLSXPVVLSPGPQKP

SEQ ID NO: 9015 - protein, 38 aa, Homo sapiens
  MOD_RES (6)..(6): Selenocysteine
  MOD_RES (27)..(27): Selenocysteine
MESAIXLWQFLLQLLLDQKHEHLICWXSNDGEFKLLKA

SEQ ID NO: 9016 - protein, 160 aa, Homo sapiens
  MOD_RES (6)..(6): Selenocysteine
  MOD_RES (27)..(27): Selenocysteine
  MOD_RES (52)..(52): Selenocysteine
  MOD_RES (132)..(132): Selenocysteine
  MOD_RES (147)..(147): Selenocysteine
MESAIXLWQFLLQLLLDQKHEHLICWXSNDGEFKLLKAEEVAKLWGLRKNKXNMNYDKLSRALRYYYDKNIIKKVIGQKFVYKFVSFPEILKMDPHAVEISRESLLLQDSDCKASPEGREAHKHGLAALRSXSRNEYIHSGLYSSFXINSLQNPPDAFKA

SEQ ID NO: 9017 - protein, 407 aa, Homo sapiens
  MOD_RES (6)..(6): Selenocysteine
  MOD_RES (27)..(27): Selenocysteine
  MOD_RES (52)..(52): Selenocysteine
  MOD_RES (132)..(132): Selenocysteine
  MOD_RES (147)..(147): Selenocysteine
  MOD_RES (163)..(163): Selenocysteine
  MOD_RES (181)..(181): Selenocysteine
  MOD_RES (187)..(187): Selenocysteine
  MOD_RES (190)..(190): Selenocysteine
  MOD_RES (195)..(195): Selenocysteine
  MOD_RES (204)..(204): Selenocysteine
  MOD_RES (282)..(282): Selenocysteine
  MOD_RES (309)..(309): Selenocysteine
  MOD_RES (327)..(327): Selenocysteine
  MOD_RES (332)..(332): Selenocysteine
  MOD_RES (335)..(335): Selenocysteine
  MOD_RES (342)..(342): Selenocysteine
  MOD_RES (372)..(372): Selenocysteine
  MOD_RES (378)..(378): Selenocysteine
MESAIXLWQFLLQLLLDQKHEHLICWXSNDGEFKLLKAEEVAKLWGLRKNKXNMNYDKLSRALRYYYDKNIIKKVIGQKFVYKFVSFPEILKMDPHAVEISRESLLLQDSDCKASPEGREAHKHGLAALRSXSRNEYIHSGLYSSFXINSLQNPPDAFKAIKXEKLEEPPEDSPPVEEVRXVIRFVXNKXDKHVXRPVVSLPSXSEAAAASAFLASSVSAKISSLMLPNAASISSASPFSSRSPSLSPNSPLPSEHRSLFLEAACHDSDSLEPLNLSSGSKXKSPSLPPKAKKPKGLEISAPPLVLSGXDIGSIALNSPALPSGSLXPAFFXAQXPNGLLLXPSPLLSSIHFWSSLSPVAPLSPARLQGPSXLFQFPXLLNGHMPVPIPSLDRAASPVLLSSNSQKS

SEQ ID NO: 9018 - protein, 142 aa, Homo sapiens
  MOD_RES (6)..(6): Selenocysteine
  MOD_RES (27)..(27): Selenocysteine
  MOD_RES (52)..(52): Selenocysteine
  MOD_RES (70)..(70): Selenocysteine
  MOD_RES (77)..(77): Selenocysteine
  MOD_RES (107)..(107): Selenocysteine
  MOD_RES (113)..(113): Selenocysteine
MESAIXLWQFLLQLLLDQKHEHLICWXSNDGEFKLLKAEEVAKLWGLRKNKXNMNYDKLSRALRYYYDKXPNGLLLXPSPLLSSIHFWSSLSPVAPLSPARLQGPSXLFQFPXLLNGHMPVPIPSLDRAASPVLLSSNSQKS

SEQ ID NO: 9019 - protein, 102 aa, Homo sapiens
  MOD_RES (1)..(1): Any amino acid
  MOD_RES (15)..(15): Selenocysteine
  MOD_RES (31)..(31): Selenocysteine
  MOD_RES (49)..(49): Selenocysteine
  MOD_RES (72)..(72): Selenocysteine
  MOD_RES (79)..(79): Selenocysteine
XRNEYIHSGLYSSFXINSLQNPPDAFKAIKXEKLEEPPEDSPPVEEVRXVIRPKNPKAWKSQRPRWCSPAPXSAPSPSXAQPSPRDPSPQPSSPHRHQMDCF

SEQ ID NO: 9020 - protein, 144 aa, Homo sapiens
  MOD_RES (6)..(6): Selenocysteine
  MOD_RES (27)..(27): Selenocysteine
  MOD_RES (97)..(97): Selenocysteine
  MOD_RES (135)..(135): Selenocysteine
MDSAIXLWQFLLQLLQKPQNKHMICWXSNDGQFKLLQAEEVARLWGIRKNKPNMNYDKLSRALRYYYVKNIIKKVNGQKFVYKFVSYPEILNMDPMXVGRIEGDCESLNFSEVSSSSKDVENGGKDKPPQPGAKXSSRNDYIHS

SEQ ID NO: 9021 - protein, 405 aa, Homo sapiens
  MOD_RES (6)..(6): Selenocysteine
  MOD_RES (27)..(27): Selenocysteine
  MOD_RES (97)..(97): Selenocysteine
  MOD_RES (135)..(135): Selenocysteine
  MOD_RES (151)..(151): Selenocysteine
  MOD_RES (168)..(168): Selenocysteine
  MOD_RES (185)..(185): Selenocysteine
  MOD_RES (193)..(194): Selenocysteine
  MOD_RES (207)..(207): Selenocysteine
  MOD_RES (221)..(221): Selenocysteine
  MOD_RES (227)..(227): Selenocysteine
  MOD_RES (240)..(240): Selenocysteine
  MOD_RES (247)..(247): Selenocysteine
  MOD_RES (251)..(252): Selenocysteine
  MOD_RES (267)..(267): Selenocysteine
  MOD_RES (280)..(280): Selenocysteine
  MOD_RES (330)..(330): Selenocysteine
  MOD_RES (334)..(334): Selenocysteine
  MOD_RES (350)..(350): Selenocysteine
  MOD_RES (354)..(354): Selenocysteine
  MOD_RES (386)..(386): Selenocysteine
  MOD_RES (403)..(403): Selenocysteine
MDSAIXLWQFLLQLLQKPQNKHMICWXSNDGQFKLLQAEEVARLWGIRKNKPNMNYDKLSRALRYYYVKNIIKKVNGQKFVYKFVSYPEILNMDPMXVGRIEGDCESLNFSEVSSSSKDVENGGKDKPPQPGAKXSSRNDYIHSGLYSSFXLNSLNSSNVKLFKLIKXENPAEKLAEKKSPQEPXPSVIKFVXXPSKKPPVEPVAAXISIGPSISPSSEEXIQALEXLVSPKLPSLEAPXSASNVMXAFAXXPPISSIPPLQEPPRXPSPPLSSHPDIDXDIDSVASQPMELPENLSLEPKDQDSVLLEKDKVNNSSRSKKPKGLELAPXLVIXSSDPSPLGILSPSLPXASLXPAFFSQVACSLFMVSPLLSFICPFKQIQNLYXQVCFLLLRFVLERLCVXVM

SEQ ID NO: 9022 - protein, 431 aa, Homo sapiens
  MOD_RES (6)..(6): Selenocysteine
  MOD_RES (27)..(27): Selenocysteine
  MOD_RES (97)..(97): Selenocysteine
  MOD_RES (135)..(135): Selenocysteine
  MOD_RES (151)..(151): Selenocysteine
  MOD_RES (168)..(168): Selenocysteine
  MOD_RES (185)..(185): Selenocysteine
  MOD_RES (193)..(194): Selenocysteine
  MOD_RES (207)..(207): Selenocysteine
  MOD_RES (221)..(221): Selenocysteine
  MOD_RES (227)..(227): Selenocysteine
  MOD_RES (240)..(240): Selenocysteine
  MOD_RES (247)..(247): Selenocysteine
  MOD_RES (251)..(252): Selenocysteine
  MOD_RES (267)..(267): Selenocysteine
  MOD_RES (280)..(280): Selenocysteine
  MOD_RES (330)..(330): Selenocysteine
  MOD_RES (334)..(334): Selenocysteine
  MOD_RES (350)..(350): Selenocysteine
  MOD_RES (354)..(354): Selenocysteine
  MOD_RES (361)..(361): Selenocysteine
  MOD_RES (366)..(366): Selenocysteine
  MOD_RES (379)..(379): Selenocysteine
  MOD_RES (396)..(396): Selenocysteine
  MOD_RES (411)..(411): Selenocysteine
  MOD_RES (420)..(420): Selenocysteine
  MOD_RES (431)..(431): Selenocysteine
MDSAIXLWQFLLQLLQKPQNKHMICWXSNDGQFKLLQAEEVARLWGIRKNKPNMNYDKLSRALRYYYVKNIIKKVNGQKFVYKFVSYPEILNMDPMXVGRIEGDCESLNFSEVSSSSKDVENGGKDKPPQPGAKXSSRNDYIHSGLYSSFXLNSLNSSNVKLFKLIKXENPAEKLAEKKSPQEPXPSVIKFVXXPSKKPPVEPVAAXISIGPSISPSSEEXIQALEXLVSPKLPSLEAPXSASNVMXAFAXXPPISSIPPLQEPPRXPSPPLSSHPDIDXDIDSVASQPMELPENLSLEPKDQDSVLLEKDKVNNSSRSKKPKGLELAPXLVIXSSDPSPLGILSPSLPXASLXPAFFSQXPIILXPSPLLSSIHFWSXLSPVAPLSPARLQGANXLFQFPSVLNSHGPFXLSGLDGPSXPGPFSPDLQKX

SEQ ID NO: 9023 - protein, 397 aa, Homo sapiens
  MOD_RES (17)..(17): Selenocysteine
  MOD_RES (22)..(22): Selenocysteine
  MOD_RES (131)..(131): Selenocysteine
  MOD_RES (143)..(143): Selenocysteine
  MOD_RES (193)..(193): Selenocysteine
  MOD_RES (223)..(223): Selenocysteine
  MOD_RES (233)..(233): Selenocysteine
  MOD_RES (245)..(245): Selenocysteine
  MOD_RES (309)..(309): Selenocysteine
  MOD_RES (323)..(323): Selenocysteine
  MOD_RES (342)..(342): Selenocysteine
MEELQEPLRGQLRLCFXQAARXSLLLLRLNDAALRALQECQRQQVRPVIAFQGHRGYLRLPGPGWSCLFSFIVSQCCQEGAGGSLDLVCQRFLRSGPNSLHCLGSLRERLIIWAAMDSIPAPSSVQGHNLXEDARHPESWQNXGGYSEGDAVSQPQMALEEVSVSDPLASNQGQSLPGSSREHMAQWEVRSQXHVPNREPVQALPSSASRKRLDKKRSVPVAXVELEEKRFRXLPLVPSPLQGLXNQDLQEGEDWEQEDEDMDPRLEHSSSVQEDSESPSPEDIPDYLLQYRAIHSAEQQHAYEQDFEXDYAEYRILHARVGXASQRFIELGAEIKRVRRGXPEYKVLEDKIIQEYKKFRKQYPSYREEKRRCEYLHQKLSHIKGLILEFEEKNRGS

SEQ ID NO: 9024 - protein, 206 aa, Homo sapiens
  MOD_RES (47)..(47): Selenocysteine
  MOD_RES (52)..(52): Selenocysteine
  MOD_RES (161)..(161): Selenocysteine
  MOD_RES (173)..(173): Selenocysteine
MRILEESAERRWRWWPSPVAPVLLALELVAMEELQEPLRGQLRLCFXQAARXSLLLLRLNDAALRALQECQRQQVRPVIAFQGHRGYLRLPGPGWSCLFSFIVSQCCQEGAGGSLDLVCQRFLRSGPNSLHCLGSLRERLIIWAAMDSIPAPSSVQGHNLXEDARHPESWQNXGGYSEGDAVSQPQMALEEVSVSDPLASNQGQSL

SEQ ID NO: 9025 - protein, 182 aa, Homo sapiens
  MOD_RES (15)..(15): Selenocysteine
  MOD_RES (39)..(39): Selenocysteine
  MOD_RES (49)..(49): Selenocysteine
  MOD_RES (91)..(91): Selenocysteine
  MOD_RES (110)..(110): Selenocysteine
  MOD_RES (112)..(112): Selenocysteine
  MOD_RES (159)..(159): Selenocysteine
  MOD_RES (180)..(180): Selenocysteine
ANILAQKQLRSIILXHVIRAQRAINNEMAHQLYVLQVLXFNLLEDRMMXKMDPQDQAQRDIIFELRRIAFDAESEPNNSSGSMEKRKSMYXRDYKKLGFINHVNPAMDFXQXPPGMLALDNMLYFAKHHQDAYIRIVLENSSREDKHECPFGRSSIELXKMLCEILKVGELHHLSPEKFXLP

SEQ ID NO: 9026 - protein, 59 aa, Homo sapiens
MPPPADIVKVAIEWPGAYPKLMEIDQKKPLSAIIKEVCDGWSLANHEYFALQHADSSNF

SEQ ID NO: 9027 - protein, 81 aa, Homo sapiens
  MOD_RES (62)..(62): Selenocysteine
  MOD_RES (73)..(73): Selenocysteine
  MOD_RES (78)..(79): Selenocysteine
MPPPADIVKVAIEWPGAYPKLMEIDQKKPLSAIIKEVCDGWSLANHEYFALQHADSSNFYIXEKNRNEIKNGXILRLXXSP

SEQ ID NO: 9028 - protein, 167 aa, Homo sapiens
  MOD_RES (62)..(62): Selenocysteine
  MOD_RES (73)..(73): Selenocysteine
  MOD_RES (78)..(79): Selenocysteine
  MOD_RES (115)..(115): Selenocysteine
  MOD_RES (130)..(130): Selenocysteine
  MOD_RES (137)..(137): Selenocysteine
  MOD_RES (146)..(146): Selenocysteine
  MOD_RES (148)..(148): Selenocysteine
  MOD_RES (163)..(163): Selenocysteine
MPPPADIVKVAIEWPGAYPKLMEIDQKKPLSAIIKEVCDGWSLANHEYFALQHADSSNFYIXEKNRNEIKNGXILRLXXSPAQNAQQLHERIQSSSMDAKLEALKDLASLSRDVXFAQEFINLDGISLLXQMVESGXDFGDMLSFXLXAFVELMDHGIVSWDXFSVA

SEQ ID NO: 9029 - protein, 149 aa, Homo sapiens
  MOD_RES (62)..(62): Selenocysteine
  MOD_RES (73)..(73): Selenocysteine
  MOD_RES (78)..(79): Selenocysteine
  MOD_RES (115)..(115): Selenocysteine
  MOD_RES (130)..(130): Selenocysteine
  MOD_RES (137)..(137): Selenocysteine
MPPPADIVKVAIEWPGAYPKLMEIDQKKPLSAIIKEVCDGWSLANHEYFALQHADSSNFYIXEKNRNEIKNGXILRLXXSPAQNAQQLHERIQSSSMDAKLEALKDLASLSRDVXFAQEFINLDGISLLXQMVESGXERYQKLQKIMKP

SEQ ID NO: 9030 - protein, 727 aa, Homo sapiens
  MOD_RES (62)..(62): Selenocysteine
  MOD_RES (73)..(73): Selenocysteine
  MOD_RES (78)..(79): Selenocysteine
  MOD_RES (115)..(115): Selenocysteine
  MOD_RES (130)..(130): Selenocysteine
  MOD_RES (137)..(137): Selenocysteine
  MOD_RES (158)..(158): Selenocysteine
  MOD_RES (160)..(160): Selenocysteine
  MOD_RES (175)..(175): Selenocysteine
  MOD_RES (224)..(224): Selenocysteine
  MOD_RES (241)..(241): Selenocysteine
  MOD_RES (243)..(243): Selenocysteine
  MOD_RES (277)..(277): Selenocysteine
  MOD_RES (301)..(301): Selenocysteine
  MOD_RES (311)..(311): Selenocysteine
  MOD_RES (353)..(353): Selenocysteine
  MOD_RES (372)..(372): Selenocysteine
  MOD_RES (374)..(374): Selenocysteine
  MOD_RES (421)..(421): Selenocysteine
  MOD_RES (437)..(437): Selenocysteine
  MOD_RES (447)..(447): Selenocysteine
  MOD_RES (466)..(466): Selenocysteine
  MOD_RES (473)..(473): Selenocysteine
  MOD_RES (493)..(494): Selenocysteine
  MOD_RES (512)..(512): Selenocysteine
  MOD_RES (560)..(560): Selenocysteine
  MOD_RES (618)..(618): Selenocysteine
  MOD_RES (666)..(666): Selenocysteine
  MOD_RES (682)..(682): Selenocysteine
  MOD_RES (688)..(688): Selenocysteine
MPPPADIVKVAIEWPGAYPKLMEIDQKKPLSAIIKEVCDGWSLANHEYFALQHADSSNFYIXEKNRNEIKNGXILRLXXSPAQNAQQLHERIQSSSMDAKLEALKDLASLSRDVXFAQEFINLDGISLLXQMVESGXERYQKLQKIMKPCFGDMLSFXLXAFVELMDHGIVSWDXFSVAFIKKIASFVNKSAIDISILQRSLAILESMVLNSHDLYQKVAQEIXIGQLIPHLQGSDQEIQXYXIAVINALFLKAPDERRQEMANILAQKQLRSIILXHVIRAQRAINNEMAHQLYVLQVLXFNLLEDRMMXKMDPQDQAQRDIIFELRRIAFDAESEPNNSSGSMEKRKSMYXRDYKKLGFINHVNPAMDFXQXPPGMLALDNMLYFAKHHQDAYIRIVLENSSREDKHECPFGRSSIELXKMLCEILKVGELPSEXCNDFHPMFFXHDRSFEEFFCICIQLLNKXWKEMRAXSEDFNKVMQVVKEQVMRALXXKPSSLDQFKSKLQNLSYXEILKIRQSERMNQEDFQSRPILELKEKIQPEILELIKQQRLNRLVEGXCFRKLNARRRQDKFWYCRLSPNHKVLHYGDLEESPQGEVPHDSLQDKLPVADIKAVVXGKDCPHMKEKGALKQNKEVLELAFSILYDSNCQLNFIAPDKHEYCIWXDGLNALLGKDMMSDLXRNDLDXLLSMEIKLRLLDLENIQIPDAPPPIPKEPSNYDFVYDCN

SEQ ID NO: 9031 - protein, 247 aa, Homo sapiens
  MOD_RES (13)..(14): Selenocysteine
  MOD_RES (32)..(32): Selenocysteine
  MOD_RES (80)..(80): Selenocysteine
  MOD_RES (138)..(138): Selenocysteine
  MOD_RES (186)..(186): Selenocysteine
  MOD_RES (202)..(202): Selenocysteine
  MOD_RES (208)..(208): Selenocysteine
MQVVKEQVMRALXXKPSSLDQFKSKLQNLSYXEILKIRQSERMNQEDFQSRPILELKEKIQPEILELIKQQRLNRLVEGXCFRKLNARRRQDKFWYCRLSPNHKVLHYGDLEESPQGEVPHDSLQDKLPVADIKAVVXGKDCPHMKEKGALKQNKEVLELAFSILYDSNCQLNFIAPDKHEYCIWXDGLNALLGKDMMSDLXRNDLDXLLSMEIKLRLLDLENIQIPDAPPPIPKEPSNYDFVYDCN

SEQ ID NO: 9032 - protein, 124 aa, Homo sapiens
  MOD_RES (18)..(18): Selenocysteine
  MOD_RES (42)..(42): Selenocysteine
  MOD_RES (52)..(52): Selenocysteine
  MOD_RES (94)..(94): Selenocysteine
  MOD_RES (121)..(121): Selenocysteine
  MOD_RES (124)..(124): Selenocysteine
QEMANILAQKQLRSIILXHVIRAQRAINNEMAHQLYVLQVLXFNLLEDRMMXKMDPQDQAQRDIIFELRRIAFDAESEPNNSSGSMEKRKSMYXRDYKKLGFIVSKLSPVCALPPASPGLXSAX

SEQ ID NO: 9033 - protein, 194 aa, Homo sapiens
  MOD_RES (1)..(1): Any amino acid
  MOD_RES (6)..(6): Selenocysteine
  MOD_RES (8)..(8): Selenocysteine
  MOD_RES (40)..(40): Selenocysteine
  MOD_RES (57)..(57): Selenocysteine
  MOD_RES (81)..(81): Selenocysteine
  MOD_RES (91)..(91): Selenocysteine
  MOD_RES (133)..(133): Selenocysteine
  MOD_RES (152)..(152): Selenocysteine
  MOD_RES (154)..(154): Selenocysteine
XQEIQXYXIAVINALFLKAPDERRQVDVESNVDILDCPLXEMANILAQKQLRSIILXHVIRAQRAINNEMAHQLYVLQVLXFNLLEDRMMXKMDPQDQAQRDIIFELRRIAFDAESEPNNSSGSMEKRKSMYXRDYKKLGFINHVNPAMDFXQXPPGMLALDNMLYFAKHHQDAYIRIVLENSSREDKHECPFG

SEQ ID NO: 9034 - protein, 267 aa, Homo sapiens
  MOD_RES (4)..(4): Selenocysteine
  MOD_RES (21)..(21): Selenocysteine
  MOD_RES (68)..(68): Selenocysteine
  MOD_RES (81)..(81): Selenocysteine
  MOD_RES (91)..(91): Selenocysteine
  MOD_RES (126)..(126): Selenocysteine
  MOD_RES (134)..(134): Selenocysteine
  MOD_RES (143)..(143): Selenocysteine
  MOD_RES (153)..(153): Selenocysteine
  MOD_RES (155)..(155): Selenocysteine
  MOD_RES (175)..(175): Selenocysteine
  MOD_RES (202)..(202): Selenocysteine
  MOD_RES (228)..(228): Selenocysteine
  MOD_RES (247)..(247): Selenocysteine
  MOD_RES (254)..(254): Selenocysteine
EEIXVGQLISHLQVSNQEIQXYAIALINALFLKAPEDKRQDMANAFAQKHLRSIILNHVIRGNRPIKXEMAHQLYVLQVLXFNLLEERMMXKMDPNDQAQRDIIFELRRIAFDAESDPSNAPGSGXEKRKAMYXKDYKMLGFXNHINPAMDFXQXPPGMLALDNMLYLAKVHQDXYIRIVLENSSREDKHECPFGRSAIELXKMLCEILQVGELPNEGRNDYHPMFFXHDRAFEELFGICIQLLNKXWKEMRAXAEDFNKVSVSGLL

SEQ ID NO: 9035 - protein, 632 aa, Homo sapiens
  MOD_RES (4)..(4): Selenocysteine
  MOD_RES (11)..(11): Selenocysteine
  MOD_RES (27)..(27): Selenocysteine
  MOD_RES (30)..(30): Selenocysteine
  MOD_RES (42)..(42): Selenocysteine
  MOD_RES (49)..(49): Selenocysteine
  MOD_RES (62)..(62): Selenocysteine
  MOD_RES (64)..(64): Selenocysteine
  MOD_RES (83)..(83): Selenocysteine
  MOD_RES (128)..(128): Selenocysteine
  MOD_RES (145)..(145): Selenocysteine
  MOD_RES (192)..(192): Selenocysteine
  MOD_RES (205)..(205): Selenocysteine
  MOD_RES (215)..(215): Selenocysteine
  MOD_RES (250)..(250): Selenocysteine
  MOD_RES (258)..(258): Selenocysteine
  MOD_RES (267)..(267): Selenocysteine
  MOD_RES (277)..(277): Selenocysteine
  MOD_RES (279)..(279): Selenocysteine
  MOD_RES (299)..(299): Selenocysteine
  MOD_RES (326)..(326): Selenocysteine
  MOD_RES (352)..(352): Selenocysteine
  MOD_RES (371)..(371): Selenocysteine
  MOD_RES (378)..(378): Selenocysteine
  MOD_RES (394)..(394): Selenocysteine
  MOD_RES (505)..(505): Selenocysteine
  MOD_RES (523)..(523): Selenocysteine
  MOD_RES (556)..(556): Selenocysteine
  MOD_RES (587)..(587): Selenocysteine
  MOD_RES (593)..(593): Selenocysteine
MERXQSSNMEXRLDAMKELAKLSADVXFAXEFINMDGIIVLXRLVESGXKLLSHYSEMLAFXLXAFLELMDHGIVSWDMVSIXFIKQIAGYVSQPMVDVSILQRSLAILESMVLNSQSLYQKIAEEIXVGQLISHLQVSNQEIQXYAIALINALFLKAPEDKRQDMANAFAQKHLRSIILNHVIRGNRPIKXEMAHQLYVLQVLXFNLLEERMMXKMDPNDQAQRDIIFELRRIAFDAESDPSNAPGSGXEKRKAMYXKDYKMLGFXNHINPAMDFXQXPPGMLALDNMLYLAKVHQDXYIRIVLENSSREDKHECPFGRSAIELXKMLCEILQVGELPNEGRNDYHPMFFXHDRAFEELFGICIQLLNKXWKEMRAXAEDFNKVMQVVREQIXRALPSKPNSLDQFKSKLRSLSYSEILRLRQSERMSQDDFQSPPIVELREKIQPEILELIKQQRLNRLCEGSSFRKIGNRRRQERFWYCRLALNHKVLHYGDLDDNPQGEVXFESLQEKIPVADIKAIVXGKDCPHMKEKSALKQNKEVLELAFSILYDPDEXLNFIAPNKYEYCIWIDGLSALLGKDMSSELXKSDLDXLLSMEMKLRLLDLENIQIPEAPPPIPKEPSSYDFVYHYG

SEQ ID NO: 9036 - protein, 718 aa, Homo sapiens
  MOD_RES (50)..(50): Selenocysteine
  MOD_RES (62)..(62): Selenocysteine
  MOD_RES (65)..(65): Selenocysteine
  MOD_RES (73)..(73): Selenocysteine
  MOD_RES (92)..(92): Selenocysteine
  MOD_RES (99)..(99): Selenocysteine
  MOD_RES (115)..(115): Selenocysteine
  MOD_RES (118)..(118): Selenocysteine
  MOD_RES (130)..(130): Selenocysteine
  MOD_RES (137)..(137): Selenocysteine
  MOD_RES (148)..(148): Selenocysteine
  MOD_RES (150)..(150): Selenocysteine
  MOD_RES (169)..(169): Selenocysteine
  MOD_RES (214)..(214): Selenocysteine
  MOD_RES (231)..(231): Selenocysteine
  MOD_RES (278)..(278): Selenocysteine
  MOD_RES (291)..(291): Selenocysteine
  MOD_RES (301)..(301): Selenocysteine
  MOD_RES (336)..(336): Selenocysteine
  MOD_RES (344)..(344): Selenocysteine
  MOD_RES (353)..(353): Selenocysteine
  MOD_RES (363)..(363): Selenocysteine
  MOD_RES (365)..(365): Selenocysteine
  MOD_RES (385)..(385): Selenocysteine
  MOD_RES (412)..(412): Selenocysteine
  MOD_RES (438)..(438): Selenocysteine
  MOD_RES (457)..(457): Selenocysteine
  MOD_RES (464)..(464): Selenocysteine
  MOD_RES (480)..(480): Selenocysteine
  MOD_RES (591)..(591): Selenocysteine
  MOD_RES (609)..(609): Selenocysteine
  MOD_RES (642)..(642): Selenocysteine
  MOD_RES (673)..(673): Selenocysteine
  MOD_RES (679)..(679): Selenocysteine
MPPPSDIVKVAIEWPGANAQLLEIDQKRPLASIIKEVCDGWSLPNPEYYXLRYADGPQLYIXEQXRSDIKNGXILQLAISPSRAARQLMERXQSSNMEXRLDAMKELAKLSADVXFAXEFINMDGIIVLXRLVESGXKLLSHEMLAFXLXAFLELMDHGIVSWDMVSIXFIKQIAGYVSQPMVDVSILQRSLAILESMVLNSQSLYQKIAEEIXVGQLISHLQVSNQEIQXYAIALINALFLKAPEDKRQDMANAFAQKHLRSIILNHVIRGNRPIKXEMAHQLYVLQVLXFNLLEERMMXKMDPNDQAQRDIIFELRRIAFDAESDPSNAPGSGXEKRKAMYXKDYKMLGFXNHINPAMDFXQXPPGMLALDNMLYLAKVHQDXYIRIVLENSSREDKHECPFGRSAIELXKMLCEILQVGELPNEGRNDYHPMFFXHDRAFEELFGICIQLLNKXWKEMRAXAEDFNKVMQVVREQIXRALPSKPNSLDQFKSKLRSLSYSEILRLRQSERMSQDDFQSPPIVELREKIQPEILELIKQQRLNRLCEGSSFRKIGNRRRQERFWYCRLALNHKVLHYGDLDDNPQGEVXFESLQEKIPVADIKAIVXGKDCPHMKEKSALKQNKEVLELAFSILYDPDEXLNFIAPNKYEYCIWIDGLSALLGKDMSSELXKSDLDXLLSMEMKLRLLDLENIQIPEAPPPIPKEPSSYDFVYHYG

SEQ ID NO: 9037 - protein, 338 aa, Homo sapiens
  MOD_RES (50)..(50): Selenocysteine
  MOD_RES (62)..(62): Selenocysteine
  MOD_RES (65)..(65): Selenocysteine
  MOD_RES (73)..(73): Selenocysteine
  MOD_RES (92)..(92): Selenocysteine
  MOD_RES (99)..(99): Selenocysteine
  MOD_RES (115)..(115): Selenocysteine
  MOD_RES (118)..(118): Selenocysteine
  MOD_RES (130)..(130): Selenocysteine
  MOD_RES (137)..(137): Selenocysteine
  MOD_RES (150)..(150): Selenocysteine
  MOD_RES (152)..(152): Selenocysteine
  MOD_RES (171)..(171): Selenocysteine
  MOD_RES (216)..(216): Selenocysteine
  MOD_RES (233)..(233): Selenocysteine
  MOD_RES (280)..(280): Selenocysteine
  MOD_RES (293)..(293): Selenocysteine
  MOD_RES (303)..(303): Selenocysteine
  MOD_RES (338)..(338): Selenocysteine
MPPPSDIVKVAIEWPGANAQLLEIDQKRPLASIIKEVCDGWSLPNPEYYXLRYADGPQLYIXEQXRSDIKNGXILQLAISPSRAARQLMERXQSSNMEXRLDAMKELAKLSADVXFAXEFINMDGIIVLXRLVESGXKLLSHYSEMLAFXLXAFLELMDHGIVSWDMVSIXFIKQIAGYVSQPMVDVSILQRSLAILESMVLNSQSLYQKIAEEIXVGQLISHLQVSNQEIQXYAIALINALFLKAPEDKRQDMANAFAQKHLRSIILNHVIRGNRPIKXEMAHQLYVLQVLXFNLLEERMMXKMDPNDQAQRDIIFELRRIAFDAESDPSNAPGSGX

SEQ ID NO: 9038 - protein, 720 aa, Homo sapiens
  MOD_RES (50)..(50): Selenocysteine
  MOD_RES (62)..(62): Selenocysteine
  MOD_RES (65)..(65): Selenocysteine
  MOD_RES (73)..(73): Selenocysteine
  MOD_RES (92)..(92): Selenocysteine
  MOD_RES (99)..(99): Selenocysteine
  MOD_RES (115)..(115): Selenocysteine
  MOD_RES (118)..(118): Selenocysteine
  MOD_RES (130)..(130): Selenocysteine
  MOD_RES (137)..(137): Selenocysteine
  MOD_RES (150)..(150): Selenocysteine
  MOD_RES (152)..(152): Selenocysteine
  MOD_RES (171)..(171): Selenocysteine
  MOD_RES (216)..(216): Selenocysteine
  MOD_RES (233)..(233): Selenocysteine
  MOD_RES (280)..(280): Selenocysteine
  MOD_RES (293)..(293): Selenocysteine
  MOD_RES (303)..(303): Selenocysteine
  MOD_RES (338)..(338): Selenocysteine
  MOD_RES (346)..(346): Selenocysteine
  MOD_RES (355)..(355): Selenocysteine
  MOD_RES (365)..(365): Selenocysteine
  MOD_RES (367)..(367): Selenocysteine
  MOD_RES (387)..(387): Selenocysteine
  MOD_RES (414)..(414): Selenocysteine
  MOD_RES (440)..(440): Selenocysteine
  MOD_RES (459)..(459): Selenocysteine
  MOD_RES (466)..(466): Selenocysteine
  MOD_RES (482)..(482): Selenocysteine
  MOD_RES (593)..(593): Selenocysteine
  MOD_RES (611)..(611): Selenocysteine
  MOD_RES (644)..(644): Selenocysteine
  MOD_RES (675)..(675): Selenocysteine
  MOD_RES (681)..(681): Selenocysteine
MPPPSDIVKVAIEWPGANAQLLEIDQKRPLASIIKEVCDGWSLPNPEYYXLRYADGPQLYIXEQXRSDIKNGXILQLAISPSRAARQLMERXQSSNMEXRLDAMKELAKLSADVXFAXEFINMDGIIVLXRLVESGXKLLSHYSEMLAFXLXAFLELMDHGIVSWDMVSIXFIKQIAGYVSQPMVDVSILQRSLAILESMVLNSQSLYQKIAEEIXVGQLISHLQVSNQEIQXYAIALINALFLKAPEDKRQDMANAFAQKHLRSIILNHVIRGNRPIKXEMAHQLYVLQVLXFNLLEERMMXKMDPNDQAQRDIIFELRRIAFDAESDPSNAPGSGXEKRKAMYXKDYKMLGFXNHINPAMDFXQXPPGMLALDNMLYLAKVHQDXYIRIVLENSSREDKHECPFGRSAIELXKMLCEILQVGELPNEGRNDYHPMFFXHDRAFEELFGICIQLLNKXWKEMRAXAEDFNKVMQVVREQIXRALPSKPNSLDQFKSKLRSLSYSEILRLRQSERMSQDDFQSPPIVELREKIQPEILELIKQQRLNRLCEGSSFRKIGNRRRQERFWYCRLALNHKVLHYGDLDDNPQGEVXFESLQEKIPVADIKAIVXGKDCPHMKEKSALKQNKEVLELAFSILYDPDEXLNFIAPNKYEYCIWIDGLSALLGKDMSSELXKSDLDXLLSMEMKLRLLDLENIQIPEAPPPIPKEPSSYDFVYHYG

SEQ ID NO: 9039 - protein, 441 aa, Homo sapiens
  MOD_RES (1)..(1): Any amino acid
  MOD_RES (5)..(5): Selenocysteine
  MOD_RES (18)..(18): Selenocysteine
  MOD_RES (28)..(28): Selenocysteine
  MOD_RES (63)..(63): Selenocysteine
  MOD_RES (71)..(71): Selenocysteine
  MOD_RES (80)..(80): Selenocysteine
  MOD_RES (90)..(90): Selenocysteine
  MOD_RES (92)..(92): Selenocysteine
  MOD_RES (112)..(112): Selenocysteine
  MOD_RES (139)..(139): Selenocysteine
  MOD_RES (165)..(165): Selenocysteine
  MOD_RES (184)..(184): Selenocysteine
  MOD_RES (191)..(191): Selenocysteine
  MOD_RES (207)..(207): Selenocysteine
  MOD_RES (318)..(318): Selenocysteine
  MOD_RES (336)..(336): Selenocysteine
  MOD_RES (367)..(367): Selenocysteine
  MOD_RES (410)..(410): Selenocysteine
  MOD_RES (412)..(412): Selenocysteine
  MOD_RES (437)..(437): Selenocysteine
XPIKXEMAHQLYVLQVLXFNLLEERMMXKMDPNDQAQRDIIFELRRIAFDAESDPSNAPGSGXEKRKAMYXKDYKMLGFXNHINPAMDFXQXPPGMLALDNMLYLAKVHQDXYIRIVLENSSREDKHECPFGRSAIELXKMLCEILQVGELPNEGRNDYHPMFFXHDRAFEELFGICIQLLNKXWKEMRAXAEDFNKVMQVVREQIXRALPSKPNSLDQFKSKLRSLSYSEILRLRQSERMSQDDFQSPPIVELREKIQPEILELIKQQRLNRLCEGSSFRKIGNRRRQERFWYCRLALNHKVLHYGDLDDNPQGEVXFESLQEKIPVADIKAIVXGKDCPHMKEKSALKQNKVSREASLSSWPSDXWRVPLVVVFSRCILGIFPSLFLNVLLRILNIHKNRWNLCIHIXQXQQPWPVLPIHLFLSFIALKKVPSIXLFHL

SEQ ID NO: 9040 - protein, 283 aa, Homo sapiens
  MOD_RES (7)..(7): Selenocysteine
  MOD_RES (26)..(26): Selenocysteine
  MOD_RES (33)..(33): Selenocysteine
  MOD_RES (49)..(49): Selenocysteine
  MOD_RES (160)..(160): Selenocysteine
  MOD_RES (174)..(174): Selenocysteine
  MOD_RES (207)..(207): Selenocysteine
  MOD_RES (238)..(238): Selenocysteine
  MOD_RES (244)..(244): Selenocysteine
YHPMFFXHDRAFEELFGICIQLLNKXWKEMRAXAEDFNKVMQVVREQIXRALPSKPNSLDQFKSKLRSLSYSEILRLRQSERMSQDDFQSPPIVELREKIQPEILELIKQQRLNRLCEGSSFRKIGNRRRQERFWYCRLALNHKVLHYGDLDDNPQGEVXFESLQEKNIKAIVXGKDCPHMKEKSALKQNKEVLELAFSILYDPDEXLNFIAPNKYEYCIWIDGLSALLGKDMSSELXKSDLDXLLSMEMKLRLLDLENIQIPEAPPPIPKEPSSYDFVYHYG

SEQ ID NO: 9041 - protein, 66 aa, Homo sapiens
  MOD_RES (58)..(58): Selenocysteine
MNLQAQPKAQNKRKRCLFGGQEPAPKEQPPPLQPPQQSIRVKEEQYLGHEGPGGAVSXSQPVELPP

SEQ ID NO: 9042 - protein, 1019 aa, Homo sapiens
  MOD_RES (58)..(58): Selenocysteine
  MOD_RES (83)..(83): Selenocysteine
  MOD_RES (133)..(133): Selenocysteine
  MOD_RES (145)..(145): Selenocysteine
  MOD_RES (157)..(157): Selenocysteine
  MOD_RES (365)..(365): Selenocysteine
  MOD_RES (372)..(372): Selenocysteine
  MOD_RES (439)..(439): Selenocysteine
  MOD_RES (454)..(454): Selenocysteine
  MOD_RES (468)..(468): Selenocysteine
  MOD_RES (499)..(500): Selenocysteine
  MOD_RES (513)..(513): Selenocysteine
  MOD_RES (535)..(535): Selenocysteine
  MOD_RES (539)..(539): Selenocysteine
  MOD_RES (568)..(568): Selenocysteine
  MOD_RES (573)..(573): Selenocysteine
  MOD_RES (578)..(578): Selenocysteine
  MOD_RES (613)..(613): Selenocysteine
  MOD_RES (617)..(617): Selenocysteine
  MOD_RES (628)..(628): Selenocysteine
  MOD_RES (655)..(655): Selenocysteine
  MOD_RES (677)..(677): Selenocysteine
  MOD_RES (679)..(679): Selenocysteine
  MOD_RES (687)..(687): Selenocysteine
  MOD_RES (694)..(694): Selenocysteine
  MOD_RES (698)..(698): Selenocysteine
  MOD_RES (704)..(704): Selenocysteine
  MOD_RES (715)..(715): Selenocysteine
  MOD_RES (774)..(774): Selenocysteine
  MOD_RES (786)..(786): Selenocysteine
  MOD_RES (805)..(805): Selenocysteine
  MOD_RES (824)..(824): Selenocysteine
  MOD_RES (828)..(828): Selenocysteine
  MOD_RES (861)..(861): Selenocysteine
  MOD_RES (863)..(863): Selenocysteine
  MOD_RES (873)..(873): Selenocysteine
  MOD_RES (885)..(885): Selenocysteine
  MOD_RES (887)..(887): Selenocysteine
  MOD_RES (893)..(893): Selenocysteine
  MOD_RES (909)..(909): Selenocysteine
  MOD_RES (971)..(971): Selenocysteine
  MOD_RES (973)..(973): Selenocysteine
  MOD_RES (1009)..(1009): Selenocysteine
MNLQAQPKAQNKRKRCLFGGQEPAPKEQPPPLQPPQQSIRVKEEQYLGHEGPGGAVSXSQPVELPPPSSLALLNSVVYGPERXSAAMLSQQVASVKWPNSVMAPGRGPERGGGGGVSDSSWQQQPGQPPPHSXWNCHSLSLYSAXKGSPHPGVGVPXYYNHPEALKREKAGGPQLDRYVRPMMPQKVQLEVGRPQAPLNSFHAAKKPPNQSLPLQPFQLAFGHQVNRQVFRQGPPPPNPVAAFPPQKQQQQQQPQQQQQQQQAALPQMPLFENFYSMPQQPSQQPQDFGLQPAGPLGQSHLAHHSMAPYPFPPNPDMNPELRKALLQDSAPQPALPQVQIPFPRRSRRLSKEGILPPSALDGAGXQPGQEAXGNLFLHHWPLQQPPPGSLGQPHPEALGFPLELRESQLLPDGERLAPNGREREAPAMGSEEGMRAVSXGDCGQVLRGGVIQSXRRRRRASQEANLLXLAQKAVELASLQNAKDGSGSEEKRKSVLASXXKCGVEFSEPSLAXKRAREDSGMVPLIIPVSVPVRXVDPXEAAQAGGLDEDGKGPEQNPAEHKPSVIVXRRRSXRIPGXDAQAQAEDMNVKLEGEPSVRKPKQRPRPEPLIIPXKAGXFIAPPVYSNIXPYQSHLRSPVRLADHPSERSFELPPYXPPPILSPVREGSGLYFNAIISXSXIPAPPPIXPKSAHRXLLRXNSAEVXPPVLSVMGEAXPVSIEPRINVGSRFQAEIPLMRDRALAAADPHKADLVWQPWEDLESSREKQRQVEDLLXAACSSIFPGAGXNQELALHCLHESRGDILEXLNKLLLKKPLRPHNHPLAXYHYXGSDQWKMAERKLFNKGIAIYKKDFFLVQKLIQXKXVAQCVEFYYXYKKQVKIGRNGXLXFGDVDXSDEKSAQEEVEVDIKXSQKFPRVPLPRRESPSEERLEPKREVKEPRKEGEEEVPEIQEKEEQEEGRERSRRAAAVKAXQXLQANESASDILILRSHESNAPGSAGGQASEKPREGXGKSRRALPFS

SEQ ID NO: 9043 - protein, 1045 aa, Homo sapiens
  MOD_RES (58)..(58): Selenocysteine
  MOD_RES (83)..(83): Selenocysteine
  MOD_RES (133)..(133): Selenocysteine
  MOD_RES (145)..(145): Selenocysteine
  MOD_RES (157)..(157): Selenocysteine
  MOD_RES (365)..(365): Selenocysteine
  MOD_RES (372)..(372): Selenocysteine
  MOD_RES (439)..(439): Selenocysteine
  MOD_RES (454)..(454): Selenocysteine
  MOD_RES (468)..(468): Selenocysteine
  MOD_RES (499)..(500): Selenocysteine
  MOD_RES (513)..(513): Selenocysteine
  MOD_RES (535)..(535): Selenocysteine
  MOD_RES (539)..(539): Selenocysteine
  MOD_RES (568)..(568): Selenocysteine
  MOD_RES (573)..(573): Selenocysteine
  MOD_RES (578)..(578): Selenocysteine
  MOD_RES (613)..(613): Selenocysteine
  MOD_RES (617)..(617): Selenocysteine
  MOD_RES (628)..(628): Selenocysteine
  MOD_RES (655)..(655): Selenocysteine
  MOD_RES (677)..(677): Selenocysteine
  MOD_RES (679)..(679): Selenocysteine
  MOD_RES (687)..(687): Selenocysteine
  MOD_RES (694)..(694): Selenocysteine
  MOD_RES (698)..(698): Selenocysteine
  MOD_RES (704)..(704): Selenocysteine
  MOD_RES (715)..(715): Selenocysteine
  MOD_RES (774)..(774): Selenocysteine
  MOD_RES (786)..(786): Selenocysteine
  MOD_RES (805)..(805): Selenocysteine
  MOD_RES (824)..(824): Selenocysteine
  MOD_RES (828)..(828): Selenocysteine
  MOD_RES (861)..(861): Selenocysteine
  MOD_RES (863)..(863): Selenocysteine
  MOD_RES (873)..(873): Selenocysteine
  MOD_RES (885)..(885): Selenocysteine
  MOD_RES (887)..(887): Selenocysteine
  MOD_RES (893)..(893): Selenocysteine
  MOD_RES (909)..(909): Selenocysteine
  MOD_RES (971)..(971): Selenocysteine
  MOD_RES (973)..(973): Selenocysteine
  MOD_RES (1009)..(1009): Selenocysteine
  MOD_RES (1025)..(1025): Selenocysteine
  MOD_RES (1027)..(1027): Selenocysteine
  MOD_RES (1031)..(1031): Selenocysteine
  MOD_RES (1037)..(1037): Selenocysteine
MNLQAQPKAQNKRKRCLFGGQEPAPKEQPPPLQPPQQSIRVKEEQYLGHEGPGGAVSXSQPVELPPPSSLALLNSVVYGPERXSAAMLSQQVASVKWPNSVMAPGRGPERGGGGGVSDSSWQQQPGQPPPHSXWNCHSLSLYSAXKGSPHPGVGVPXYYNHPEALKREKAGGPQLDRYVRPMMPQKVQLEVGRPQAPLNSFHAAKKPPNQSLPLQPFQLAFGHQVNRQVFRQGPPPPNPVAAFPPQKQQQQQQPQQQQQQQQAALPQMPLFENFYSMPQQPSQQPQDFGLQPAGPLGQSHLAHHSMAPYPFPPNPDMNPELRKALLQDSAPQPALPQVQIPFPRRSRRLSKEGILPPSALDGAGXQPGQEAXGNLFLHHWPLQQPPPGSLGQPHPEALGFPLELRESQLLPDGERLAPNGREREAPAMGSEEGMRAVSXGDCGQVLRGGVIQSXRRRRRASQEANLLXLAQKAVELASLQNAKDGSGSEEKRKSVLASXXKCGVEFSEPSLAXKRAREDSGMVPLIIPVSVPVRXVDPXEAAQAGGLDEDGKGPEQNPAEHKPSVIVXRRRSXRIPGXDAQAQAEDMNVKLEGEPSVRKPKQRPRPEPLIIPXKAGXFIAPPVYSNIXPYQSHLRSPVRLADHPSERSFELPPYXPPPILSPVREGSGLYFNAIISXSXIPAPPPIXPKSAHRXLLRXNSAEVXPPVLSVMGEAXPVSIEPRINVGSRFQAEIPLMRDRALAAADPHKADLVWQPWEDLESSREKQRQVEDLLXAACSSIFPGAGXNQELALHCLHESRGDILEXLNKLLLKKPLRPHNHPLAXYHYXGSDQWKMAERKLFNKGIAIYKKDFFLVQKLIQXKXVAQCVEFYYXYKKQVKIGRNGXLXFGDVDXSDEKSAQEEVEVDIKXSQKFPRVPLPRRESPSEERLEPKREVKEPRKEGEEEVPEIQEKEEQEEGRERSRRAAAVKAXQXLQANESASDILILRSHESNAPGSAGGQASEKPREGXGKSRRALPFSEKKKKXEXFSKXQNQENXFPCKKCGR

SEQ ID NO: 9044 - protein, 1099 aa, Homo sapiens
  MOD_RES (58)..(58): Selenocysteine
  MOD_RES (83)..(83): Selenocysteine
  MOD_RES (133)..(133): Selenocysteine
  MOD_RES (145)..(145): Selenocysteine
  MOD_RES (157)..(157): Selenocysteine
  MOD_RES (365)..(365): Selenocysteine
  MOD_RES (372)..(372): Selenocysteine
  MOD_RES (439)..(439): Selenocysteine
  MOD_RES (454)..(454): Selenocysteine
  MOD_RES (468)..(468): Selenocysteine
  MOD_RES (499)..(500): Selenocysteine
  MOD_RES (513)..(513): Selenocysteine
  MOD_RES (535)..(535): Selenocysteine
  MOD_RES (539)..(539): Selenocysteine
  MOD_RES (568)..(568): Selenocysteine
  MOD_RES (573)..(573): Selenocysteine
  MOD_RES (578)..(578): Selenocysteine
  MOD_RES (613)..(613): Selenocysteine
  MOD_RES (617)..(617): Selenocysteine
  MOD_RES (628)..(628): Selenocysteine
  MOD_RES (655)..(655): Selenocysteine
  MOD_RES (677)..(677): Selenocysteine
  MOD_RES (679)..(679): Selenocysteine
  MOD_RES (687)..(687): Selenocysteine
  MOD_RES (694)..(694): Selenocysteine
  MOD_RES (698)..(698): Selenocysteine
  MOD_RES (704)..(704): Selenocysteine
  MOD_RES (715)..(715): Selenocysteine
  MOD_RES (774)..(774): Selenocysteine
  MOD_RES (786)..(786): Selenocysteine
  MOD_RES (805)..(805): Selenocysteine
  MOD_RES (824)..(824): Selenocysteine
  MOD_RES (828)..(828): Selenocysteine
  MOD_RES (861)..(861): Selenocysteine
  MOD_RES (863)..(863): Selenocysteine
  MOD_RES (873)..(873): Selenocysteine
  MOD_RES (885)..(885): Selenocysteine
  MOD_RES (887)..(887): Selenocysteine
  MOD_RES (893)..(893): Selenocysteine
  MOD_RES (909)..(909): Selenocysteine
  MOD_RES (971)..(971): Selenocysteine
  MOD_RES (973)..(973): Selenocysteine
  MOD_RES (1009)..(1009): Selenocysteine
  MOD_RES (1025)..(1025): Selenocysteine
  MOD_RES (1027)..(1027): Selenocysteine
  MOD_RES (1031)..(1031): Selenocysteine
  MOD_RES (1037)..(1037): Selenocysteine
MNLQAQPKAQNKRKRCLFGGQEPAPKEQPPPLQPPQQSIRVKEEQYLGHEGPGGAVSXSQPVELPPPSSLALLNSVVYGPERXSAAMLSQQVASVKWPNSVMAPGRGPERGGGGGVSDSSWQQQPGQPPPHSXWNCHSLSLYSAXKGSPHPGVGVPXYYNHPEALKREKAGGPQLDRYVRPMMPQKVQLEVGRPQAPLNSFHAAKKPPNQSLPLQPFQLAFGHQVNRQVFRQGPPPPNPVAAFPPQKQQQQQQPQQQQQQQQAALPQMPLFENFYSMPQQPSQQPQDFGLQPAGPLGQSHLAHHSMAPYPFPPNPDMNPELRKALLQDSAPQPALPQVQIPFPRRSRRLSKEGILPPSALDGAGXQPGQEAXGNLFLHHWPLQQPPPGSLGQPHPEALGFPLELRESQLLPDGERLAPNGREREAPAMGSEEGMRAVSXGDCGQVLRGGVIQSXRRRRRASQEANLLXLAQKAVELASLQNAKDGSGSEEKRKSVLASXXKCGVEFSEPSLAXKRAREDSGMVPLIIPVSVPVRXVDPXEAAQAGGLDEDGKGPEQNPAEHKPSVIVXRRRSXRIPGXDAQAQAEDMNVKLEGEPSVRKPKQRPRPEPLIIPXKAGXFIAPPVYSNIXPYQSHLRSPVRLADHPSERSFELPPYXPPPILSPVREGSGLYFNAIISXSXIPAPPPIXPKSAHRXLLRXNSAEVXPPVLSVMGEAXPVSIEPRINVGSRFQAEIPLMRDRALAAADPHKADLVWQPWEDLESSREKQRQVEDLLXAACSSIFPGAGXNQELALHCLHESRGDILEXLNKLLLKKPLRPHNHPLAXYHYXGSDQWKMAERKLFNKGIAIYKKDFFLVQKLIQXKXVAQCVEFYYXYKKQVKIGRNGXLXFGDVDXSDEKSAQEEVEVDIKXSQKFPRVPLPRRESPSEERLEPKREVKEPRKEGEEEVPEIQEKEEQEEGRERSRRAAAVKAXQXLQANESASDILILRSHESNAPGSAGGQASEKPREGXGKSRRALPFSEKKKKXEXFSKXQNQENXFPCKKCGRVFYKVKSRSAHMKSHAEQEKKAAALRLKEKEAAAAAAAAHQQALREESGAGDKG

SEQ ID NO: 9045 - protein, 445 aa, Homo sapiens
  MOD_RES (187)..(187): Selenocysteine
  MOD_RES (194)..(194): Selenocysteine
  MOD_RES (261)..(261): Selenocysteine
  MOD_RES (276)..(276): Selenocysteine
  MOD_RES (290)..(290): Selenocysteine
  MOD_RES (321)..(322): Selenocysteine
  MOD_RES (335)..(335): Selenocysteine
  MOD_RES (357)..(357): Selenocysteine
  MOD_RES (361)..(361): Selenocysteine
  MOD_RES (390)..(390): Selenocysteine
  MOD_RES (395)..(395): Selenocysteine
  MOD_RES (400)..(400): Selenocysteine
  MOD_RES (423)..(423): Selenocysteine
  MOD_RES (438)..(438): Selenocysteine
  MOD_RES (445)..(445): Selenocysteine
VRPMMPQKVQLEVGRPQAPLNSFHAAKKPPNQSLPLQPFQLAFGHQVNRQVFRQGPPPPNPVAAFPPQKQQQQQQPQQQQQQQQAALPQMPLFENFYSMPQQPSQQPQDFGLQPAGPLGQSHLAHHSMAPYPFPPNPDMNPELRKALLQDSAPQPALPQVQIPFPRRSRRLSKEGILPPSALDGAGXQPGQEAXGNLFLHHWPLQQPPPGSLGQPHPEALGFPLELRESQLLPDGERLAPNGREREAPAMGSEEGMRAVSXGDCGQVLRGGVIQSXRRRRRASQEANLLXLAQKAVELASLQNAKDGSGSEEKRKSVLASXXKCGVEFSEPSLAXKRAREDSGMVPLIIPVSVPVRXVDPXEAAQAGGLDEDGKGPEQNPAEHKPSVIVXRRRSXRIPGXDAQAQKKFADFCPRGDDKKGFWXCSFFQACLGGCGRQXKFQRQRX

SEQ ID NO: 9046 - protein, 21 aa, Homo sapiens
  MOD_RES (10)..(10): Selenocysteine
  MOD_RES (13)..(14): Selenocysteine
MDNYADLSDXELXXLLRRINS

SEQ ID NO: 9047 - protein, 219 aa, Homo sapiens
  MOD_RES (10)..(10): Selenocysteine
  MOD_RES (13)..(14): Selenocysteine
  MOD_RES (32)..(32): Selenocysteine
  MOD_RES (66)..(67): Selenocysteine
  MOD_RES (69)..(69): Selenocysteine
  MOD_RES (87)..(87): Selenocysteine
  MOD_RES (130)..(130): Selenocysteine
  MOD_RES (149)..(149): Selenocysteine
  MOD_RES (153)..(153): Selenocysteine
  MOD_RES (167)..(167): Selenocysteine
MDNYADLSDXELXXLLRRYNIPHGPVVDLNSXRGDADMYDLPKKEDALLYQSKGYNDDYYEESYFXXRXYGEPESAGPSRAVRQSVXSFPDADAFHHQVHDDDLLSSSEEECKDRERPMYGRDSAYQSIXHYRPVSASRSSLDLSYYPXSSSXSFMSSSSSSSSWLXRRAIRPENRAPGAGLGQDRQVPLWGQLLLFLVFVIVLFFIYHFMQAEEGNPF

SEQ ID NO: 9048 - protein, 254 aa, Homo sapiens
  MOD_RES (10)..(10): Selenocysteine
  MOD_RES (13)..(14): Selenocysteine
  MOD_RES (30)..(30): Selenocysteine
  MOD_RES (43)..(43): Selenocysteine
  MOD_RES (67)..(67): Selenocysteine
  MOD_RES (101)..(102): Selenocysteine
  MOD_RES (104)..(104): Selenocysteine
  MOD_RES (122)..(122): Selenocysteine
  MOD_RES (165)..(165): Selenocysteine
  MOD_RES (184)..(184): Selenocysteine
  MOD_RES (188)..(188): Selenocysteine
  MOD_RES (202)..(202): Selenocysteine
MDNYADLSDXELXXLLRRYNIPHGPVVGSXRRLYEKKIFEYEXQRRRLSPPSSSAASSYSFSDLNSXRGDADMYDLPKKEDALLYQSKGYNDDYYEESYFXXRXYGEPESAGPSRAVRQSVXSFPDADAFHHQVHDDDLLSSSEEECKDRERPMYGRDSAYQSIXHYRPVSASRSSLDLSYYPXSSSXSFMSSSSSSSSWLXRRAIRPENRAPGAGLGQDRQVPLWGQLLLFLVFVIVLFFIYHFMQAEEGNPF

SEQ ID NO: 9049 - protein, 101 aa, Homo sapiens
  MOD_RES (22)..(22): Selenocysteine
  MOD_RES (33)..(33): Selenocysteine
  MOD_RES (73)..(73): Selenocysteine
  MOD_RES (75)..(75): Selenocysteine
  MOD_RES (77)..(77): Selenocysteine
  MOD_RES (101)..(101): Selenocysteine
MALKKSSPSLDSGDSDSEELPXFAFLKKEPSSXKRRQPEREEKIVVVDISDCEASCPPAPELFSPPVPEIAEXVXQXQPVRLLSSESEDEEEFIPLAQRLX

SEQ ID NO: 9050 - protein, 570 aa, Homo sapiens
  MOD_RES (22)..(22): Selenocysteine
  MOD_RES (33)..(33): Selenocysteine
  MOD_RES (73)..(73): Selenocysteine
  MOD_RES (75)..(75): Selenocysteine
  MOD_RES (77)..(77): Selenocysteine
  MOD_RES (101)..(101): Selenocysteine
  MOD_RES (106)..(106): Selenocysteine
  MOD_RES (150)..(150): Selenocysteine
  MOD_RES (175)..(175): Selenocysteine
  MOD_RES (186)..(186): Selenocysteine
  MOD_RES (188)..(188): Selenocysteine
  MOD_RES (199)..(199): Selenocysteine
  MOD_RES (225)..(225): Selenocysteine
  MOD_RES (238)..(238): Selenocysteine
  MOD_RES (275)..(275): Selenocysteine
  MOD_RES (292)..(292): Selenocysteine
  MOD_RES (311)..(311): Selenocysteine
  MOD_RES (336)..(336): Selenocysteine
  MOD_RES (342)..(342): Selenocysteine
  MOD_RES (348)..(348): Selenocysteine
  MOD_RES (351)..(351): Selenocysteine
  MOD_RES (354)..(354): Selenocysteine
  MOD_RES (387)..(387): Selenocysteine
  MOD_RES (419)..(419): Selenocysteine
  MOD_RES (436)..(436): Selenocysteine
  MOD_RES (440)..(440): Selenocysteine
  MOD_RES (455)..(456): Selenocysteine
  MOD_RES (539)..(539): Selenocysteine
  MOD_RES (541)..(541): Selenocysteine
  MOD_RES (558)..(559): Selenocysteine
MALKKSSPSLDSGDSDSEELPXFAFLKKEPSSXKRRQPEREEKIVVVDISDCEASCPPAPELFSPPVPEIAEXVXQXQPVRLLSSESEDEEEFIPLAQRLXCKFLXHKQLSPEDSSSPVKSVLDHQNNEGASCDWKKPFPKIPEVPLHDXPERSAADNKDLILDPCCQLPAYLSXCPGQSSSLAVXKXNSDILPPQKKXKPSQKVQGRGSHGCRQQRQARQKESXLRRQERKNAALVXRMKAQRPEECLKHIIVVLDPVLLQMEGGGQLLGALQXMECRCVIEAQAVPCSVXWRRRAGPSEDREDWVEEPXVLVLLRAEAFVSMIDNGKQGSLDSXMKGKEXLQGFVXDIXAKXAGKALSLVIVDQEKCFSAQNPPRRGKQGANKQXKKQQQRQPEASIGSMVSRVDAEEALVDLQLHXEAQAQIVQSWKELADFXCAFXKAVAEAPFKKLRDEXXFSFCLESDWAGGVKVDLAGRGLALVWRRQIQQLNRVSLEMASAVVNAYPSPQLLVQAYQQCFSDKERQNLLADIQVRRGEGVXSXSRRIGPELSRRIYLQMXXLQPHLSLDSAD

SEQ ID NO: 9051 - protein, 583 aa, Homo sapiens
  MOD_RES (22)..(22): Selenocysteine
  MOD_RES (33)..(33): Selenocysteine
  MOD_RES (73)..(73): Selenocysteine
  MOD_RES (75)..(75): Selenocysteine
  MOD_RES (77)..(77): Selenocysteine
  MOD_RES (101)..(101): Selenocysteine
  MOD_RES (106)..(106): Selenocysteine
  MOD_RES (150)..(150): Selenocysteine
  MOD_RES (175)..(175): Selenocysteine
  MOD_RES (186)..(186): Selenocysteine
  MOD_RES (188)..(188): Selenocysteine
  MOD_RES (199)..(199): Selenocysteine
  MOD_RES (225)..(225): Selenocysteine
  MOD_RES (238)..(238): Selenocysteine
  MOD_RES (275)..(275): Selenocysteine
  MOD_RES (292)..(292): Selenocysteine
  MOD_RES (311)..(311): Selenocysteine
  MOD_RES (336)..(336): Selenocysteine
  MOD_RES (342)..(342): Selenocysteine
  MOD_RES (348)..(348): Selenocysteine
  MOD_RES (351)..(351): Selenocysteine
  MOD_RES (354)..(354): Selenocysteine
  MOD_RES (383)..(383): Selenocysteine
  MOD_RES (400)..(400): Selenocysteine
  MOD_RES (432)..(432): Selenocysteine
  MOD_RES (449)..(449): Selenocysteine
  MOD_RES (453)..(453): Selenocysteine
  MOD_RES (468)..(469): Selenocysteine
  MOD_RES (552)..(552): Selenocysteine
  MOD_RES (554)..(554): Selenocysteine
  MOD_RES (571)..(572): Selenocysteine
MALKKSSPSLDSGDSDSEELPXFAFLKKEPSSXKRRQPEREEKIVVVDISDCEASCPPAPELFSPPVPEIAEXVXQXQPVRLLSSESEDEEEFIPLAQRLXCKFLXHKQLSPEDSSSPVKSVLDHQNNEGASCDWKKPFPKIPEVPLHDXPERSAADNKDLILDPCCQLPAYLSXCPGQSSSLAVXKXNSDILPPQKKXKPSQKVQGRGSHGCRQQRQARQKESXLRRQERKNAALVXRMKAQRPEECLKHIIVVLDPVLLQMEGGGQLLGALQXMECRCVIEAQAVPCSVXWRRRAGPSEDREDWVEEPXVLVLLRAEAFVSMIDNGKQGSLDSXMKGKEXLQGFVXDIXAKXAGKALSLVIVDQEKCFSLELLFFDFLPCXSAQNPPRRGKQGANKQXKKQQQRQPEASIGSMVSRVDAEEALVDLQLHXEAQAQIVQSWKELADFXCAFXKAVAEAPFKKLRDEXXFSFCLESDWAGGVKVDLAGRGLALVWRRQIQQLNRVSLEMASAVVNAYPSPQLLVQAYQQCFSDKERQNLLADIQVRRGEGVXSXSRRIGPELSRRIYLQMXXLQPHLSLDSAD

SEQ ID NO: 9052 - protein, 171 aa, Homo sapiens
  MOD_RES (22)..(22): Selenocysteine
  MOD_RES (33)..(33): Selenocysteine
  MOD_RES (73)..(73): Selenocysteine
  MOD_RES (75)..(75): Selenocysteine
  MOD_RES (77)..(77): Selenocysteine
  MOD_RES (101)..(101): Selenocysteine
  MOD_RES (118)..(118): Selenocysteine
  MOD_RES (135)..(135): Selenocysteine
  MOD_RES (154)..(154): Selenocysteine
MALKKSSPSLDSGDSDSEELPXFAFLKKEPSSXKRRQPEREEKIVVVDISDCEASCPPAPELFSPPVPEIAEXVXQXQPVRLLSSESEDEEEFIPLAQRLXLLLQMEGGGQLLGALQXMECRCVIEAQAVPCSVXWRRRAGPSERGLGGGANSXGVAPGRGICVHDRQWKA

SEQ ID NO: 9053 - protein, 337 aa, Homo sapiens
  MOD_RES (1)..(1): Any amino acid
  MOD_RES (16)..(16): Selenocysteine
  MOD_RES (27)..(27): Selenocysteine
  MOD_RES (29)..(29): Selenocysteine
  MOD_RES (40)..(40): Selenocysteine
  MOD_RES (66)..(66): Selenocysteine
  MOD_RES (79)..(79): Selenocysteine
  MOD_RES (116)..(116): Selenocysteine
  MOD_RES (133)..(133): Selenocysteine
  MOD_RES (148)..(148): Selenocysteine
  MOD_RES (154)..(154): Selenocysteine
  MOD_RES (160)..(160): Selenocysteine
  MOD_RES (163)..(163): Selenocysteine
  MOD_RES (166)..(166): Selenocysteine
  MOD_RES (199)..(199): Selenocysteine
  MOD_RES (231)..(231): Selenocysteine
  MOD_RES (248)..(248): Selenocysteine
  MOD_RES (252)..(252): Selenocysteine
  MOD_RES (267)..(268): Selenocysteine
XLILDPCCQLPAYLSXCPGQSSSLAVXKXNSDILPPQKKXKPSQKVQGRGSHGCRQQRQARQKESXLRRQERKNAALVXRMKAQRPEECLKHIIVVLDPVLLQMEGGGQLLGALQXMECRCVIEAQAVPCSVXWRRRAGPSEGSLDSXMKGKEXLQGFVXDIXAKXAGKALSLVIVDQEKCFSAQNPPRRGKQGANKQXKKQQQRQPEASIGSMVSRVDAEEALVDLQLHXEAQAQIVQSWKELADFXCAFXKAVAEAPFKKLRDEXXFSFCLESDWAGGVKVDLAGRGLALVWRRQIQQLNRVSLEMASAVVNAYPSPQLLVQAYQQCFSDKERQN

SEQ ID NO: 9054 - protein, 167 aa, Homo sapiens
  MOD_RES (14)..(14): Selenocysteine
  MOD_RES (23)..(23): Selenocysteine
  MOD_RES (43)..(43): Selenocysteine
  MOD_RES (46)..(46): Selenocysteine
  MOD_RES (49)..(49): Selenocysteine
  MOD_RES (60)..(60): Selenocysteine
  MOD_RES (67)..(67): Selenocysteine
  MOD_RES (72)..(72): Selenocysteine
  MOD_RES (98)..(98): Selenocysteine
  MOD_RES (117)..(117): Selenocysteine
  MOD_RES (134)..(134): Selenocysteine
  MOD_RES (153)..(153): Selenocysteine
MLVLLAFIIAFHIXSAALLFIAXVDNAWWVGDEFFADVWRICXNNXNCXVINDSFQEYSXLQAVQAXMILSXILCCIAFFIFVLQLFRLKQGERFVLXSIIQLMSCLCVMIAASIYXDRREDIHDKNAKFYPVXREGSYGYSYILAWVAFACXFISGMMYLILRKRK

SEQ ID NO: 9055 - protein, 290 aa, Homo sapiens
  MOD_RES (7)..(7): Selenocysteine
  MOD_RES (27)..(27): Selenocysteine
  MOD_RES (33)..(33): Selenocysteine
  MOD_RES (44)..(44): Selenocysteine
  MOD_RES (55)..(55): Selenocysteine
  MOD_RES (59)..(59): Selenocysteine
  MOD_RES (81)..(81): Selenocysteine
  MOD_RES (129)..(129): Selenocysteine
  MOD_RES (197)..(197): Selenocysteine
  MOD_RES (234)..(234): Selenocysteine
  MOD_RES (245)..(245): Selenocysteine
  MOD_RES (276)..(276): Selenocysteine
  MOD_RES (287)..(287): Selenocysteine
MCLAGCXPRKAAAPGRGALPRARLPRXAPAAAXMFQPAAKRGFXIESLVAKDGGXGGGXGGGGAGSHLLAAAASEEPLRPXALNYPHPSAAEAAFVSGFPAAAAAGAGRSLYGGPELVFPEAMNHPALXVHPAHQLGASPLQPPHSFFGAQHRDPLHFYPWVLRNRFFGHRFQASDVPQDGLLLHGPFARKPKRIRXAFSPSQLLRLERAFEKNHYVVGAERKQLAGSLSLSEXQVKVWFQNRRXKYKRQKLEEEGPESEQKKKGSHHINRWRIAXKQANGEDIDVXSND

SEQ ID NO: 9056 - protein, 209 aa, Homo sapiens
  MOD_RES (20)..(20): Selenocysteine
  MOD_RES (26)..(26): Selenocysteine
  MOD_RES (68)..(68): Selenocysteine
  MOD_RES (108)..(108): Selenocysteine
  MOD_RES (142)..(142): Selenocysteine
  MOD_RES (201)..(201): Selenocysteine
MGSGYLASFNLSHSVSEALXWSGPPXLEPPEPQRRRGGGSPSAEARRPGPSRSRHRVWALELLPAPRXAGGWQWDRSGGFSRAVPRLAPCEGSERPLSRAVPRDIQKXRNLRNKVAASDRGPGGRCQRRAPGRAASARPLRXQAQADPHGLLALAAAAAGARLREEPLRGGRRAEAAGRQSQPLRDAGEGVVPEPEDKVQXAEAGGGRA

SEQ ID NO: 9057 - protein, 147 aa, Homo sapiens
  MOD_RES (7)..(7): Selenocysteine
  MOD_RES (75)..(75): Selenocysteine
  MOD_RES (112)..(112): Selenocysteine
MNHPALXVHPAHQLGASPLQPPHSFFGAQHRDPLHFYPWVLRNRFFGHRFQASDVPQDGLLLHGPFARKPKRIRXAFSPSQLLRLERAFEKNHYVVGAERKQLAGSLSLSEXQVRRVGVGLSDPQPSCCPGGGFQSLRAGRLPELRE

SEQ ID NO: 9058 - protein, 169 aa, Homo sapiens
  MOD_RES (11)..(11): Selenocysteine
  MOD_RES (118)..(118): Selenocysteine
  MOD_RES (161)..(161): Selenocysteine
MFQPAPKRCFXIESLVAKDSPLPASRSEDPIRPAALSYANSSPINPFLNGFHSAAAAAAGRGVYSNPDLVFAEAVSHPPNPAVPVHPVPPPHALAAHPLPSSHSPHPLFASQQRDPSXFYPWLIHRYRYLGHRFQGKSMVSEPKNKVQKAEAGGRRLRFAXKEKRDAPY

SEQ ID NO: 9059 - protein, 252 aa, Homo sapiens
  MOD_RES (11)..(11): Selenocysteine
  MOD_RES (118)..(118): Selenocysteine
  MOD_RES (139)..(139): Selenocysteine
  MOD_RES (159)..(159): Selenocysteine
  MOD_RES (194)..(194): Selenocysteine
  MOD_RES (196)..(196): Selenocysteine
  MOD_RES (207)..(207): Selenocysteine
  MOD_RES (228)..(228): Selenocysteine
  MOD_RES (238)..(238): Selenocysteine
  MOD_RES (249)..(249): Selenocysteine
MFQPAPKRCFXIESLVAKDSPLPASRSEDPIRPAALSYANSSPINPFLNGFHSAAAAAAGRGVYSNPDLVFAEAVSHPPNPAVPVHPVPPPHALAAHPLPSSHSPHPLFASQQRDPSXFYPWLIHRYRYLGHRFQGNDXSPESFLLHNALARKPKRIRXAFSPSQLLRLEHAFEKNHYVVGAERKQLAHSLSLXEXQVKVWFQNRRXKFKRQKLEEEGSDSQQKKKGXHHINRWRIAXKQASPEEIDVXSDD

SEQ ID NO: 9060 - protein, 69 aa, Homo sapiens
  MOD_RES (18)..(18): Selenocysteine
  MOD_RES (61)..(61): Selenocysteine
SSHSPHPLFASQQRDPSXFYPWLIHRYRYLGHRFQGKSMVSEPKNKVQKAEAGGRRLRFAXKEKRDAPY

SEQ ID NO: 9061 - protein, 392 aa, Homo sapiens
  MOD_RES (23)..(23): Selenocysteine
  MOD_RES (102)..(103): Selenocysteine
  MOD_RES (149)..(149): Selenocysteine
  MOD_RES (161)..(161): Selenocysteine
  MOD_RES (223)..(223): Selenocysteine
  MOD_RES (240)..(240): Selenocysteine
  MOD_RES (264)..(264): Selenocysteine
  MOD_RES (279)..(279): Selenocysteine
  MOD_RES (291)..(291): Selenocysteine
  MOD_RES (308)..(308): Selenocysteine
  MOD_RES (311)..(311): Selenocysteine
  MOD_RES (329)..(329): Selenocysteine
  MOD_RES (335)..(335): Selenocysteine
  MOD_RES (362)..(362): Selenocysteine
  MOD_RES (382)..(384): Selenocysteine
MEEQQPEPKSQRDSALGAAAAAXPGGLSLSLSPGASGSSGSGSDGDSVPVSPQPAPPSPPAAPCLPPLAHHPHLPPHPPPPPPQHLAAPAHQPQPAAQLHRXXNFFIDNILRPDFGCKKEQPPPQLLVAAAARGGAGGGGRVERDRGQXAAGRDPVHPLGXRAPGAASLLCAPDANCGPPDGSQPAAAGAGASKAGNPAAAAAAAAAAVAAAAAAAAAKPSDXGGGGSGGGAGSPGAQGXKYPEHGNPAILLMGSANGGPVVKXDSQQPLVWPAWVYCXRYSDRPSSGPRXRKLKKKKNEKEDKRPRXAFXAEQLQRLKAEFQANRYIXEQRRQXLAQELSLNESQIKIWFQNKRAKIKKAXGIKNGLALHLMAQGLYNHSXXXVQDKDESE

SEQ ID NO: 9062 - protein, 333 aa, Homo sapiens
  MOD_RES (42)..(42): Selenocysteine
  MOD_RES (67)..(67): Selenocysteine
  MOD_RES (87)..(87): Selenocysteine
  MOD_RES (160)..(160): Selenocysteine
  MOD_RES (220)..(220): Selenocysteine
  MOD_RES (249)..(249): Selenocysteine
  MOD_RES (252)..(252): Selenocysteine
  MOD_RES (265)..(265): Selenocysteine
  MOD_RES (270)..(270): Selenocysteine
  MOD_RES (303)..(303): Selenocysteine
  MOD_RES (308)..(308): Selenocysteine
  MOD_RES (323)..(324): Selenocysteine
MEENDPKPGEAAAAVEGQRQPESSPGGGSGGGGGSSPGEADXGRRRALMLPAVLQAPGNHQHPHRIXNFFIDNILRPEFGRRKDAGXCCAGAGGGRGGGAGGEGGASGAEGGGGAGGSEQLLGSGSREPRQNPPCAPGAGGPLPAAGSDSPGDGEGGSKXLSLHGGAKKGGDPGGPLDGSLKARGLGGGDLSVSSDSDSSQAGANLGAQPMLWPAWVYCXRYSDRPSSGPRSRKPKKKNPNKEDKRPRXAFXAEQLQRLKAEFQXNRYLXEQRRQSLAQELSLNESQIKIWFQNKRAKIKKAXGNKNXLAVHLMAQGLYNHSXXAKEGKSDSE

SEQ ID NO: 9063 - protein, 625 aa, Homo sapiens
  MOD_RES (5)..(5): Selenocysteine
  MOD_RES (22)..(22): Selenocysteine
  MOD_RES (27)..(27): Selenocysteine
  MOD_RES (43)..(43): Selenocysteine
  MOD_RES (45)..(46): Selenocysteine
  MOD_RES (73)..(73): Selenocysteine
  MOD_RES (81)..(81): Selenocysteine
  MOD_RES (90)..(90): Selenocysteine
  MOD_RES (126)..(126): Selenocysteine
  MOD_RES (135)..(136): Selenocysteine
  MOD_RES (144)..(144): Selenocysteine
  MOD_RES (157)..(157): Selenocysteine
  MOD_RES (193)..(193): Selenocysteine
  MOD_RES (200)..(200): Selenocysteine
  MOD_RES (233)..(233): Selenocysteine
  MOD_RES (235)..(235): Selenocysteine
  MOD_RES (273)..(274): Selenocysteine
  MOD_RES (295)..(295): Selenocysteine
  MOD_RES (336)..(336): Selenocysteine
  MOD_RES (343)..(344): Selenocysteine
  MOD_RES (349)..(349): Selenocysteine
  MOD_RES (361)..(361): Selenocysteine
  MOD_RES (369)..(369): Selenocysteine
  MOD_RES (383)..(383): Selenocysteine
  MOD_RES (385)..(385): Selenocysteine
  MOD_RES (388)..(388): Selenocysteine
  MOD_RES (466)..(466): Selenocysteine
  MOD_RES (503)..(503): Selenocysteine
  MOD_RES (538)..(538): Selenocysteine
  MOD_RES (544)..(544): Selenocysteine
  MOD_RES (546)..(546): Selenocysteine
  MOD_RES (550)..(550): Selenocysteine
  MOD_RES (557)..(557): Selenocysteine
  MOD_RES (567)..(567): Selenocysteine
  MOD_RES (583)..(583): Selenocysteine
  MOD_RES (596)..(596): Selenocysteine
  MOD_RES (607)..(607): Selenocysteine
  MOD_RES (617)..(617): Selenocysteine
MDRGXLPLAVALLLASCSLSPXSLAEXVHCDLQPVGPERGEVXYXXSQVSKGCVAQAPNAILEVHVLFLEFPXGPSQLELXLQASKQNGXWPREVLLVLSVNSSVFLHLQALGIPLHLAYNSSLVXFQEPPGVNXXELPSFPKXQILEWAAERGPIXSAAELNDPQSILLRLGQAQGSLSFCMLEASQDMGRXLEWRPRXPALVRGCHLEGVAGHKEAHILRVLPGHSAGPRXVXVKVELSCAPGDLDAVLILQGPPYVSWLIDANHNMQIWXXGEYSFKIFPEKNIRGFKLPDXPQGLLGEARMLNASIVASFVELPLASIVSLHASSCGGRLQXSPAPIQXXPPKDXCSPELLMSLIQXKCADDAMXLVLKKELVAHLKCXIXGLXFWDPSCEAEDRGDKFVLRSAYSSCGMQVSASMISNEAVVNILSSSSPQRKKVHCLNMDSLSFQLGLYLSPHFLQASNXIEPGQQSFVQVRVSPSVSEFLLQLDSCHLDLGPEGGXVELIQGRAAKGNCVSLLSPSPEGDPRFSFLLHFYXVPIPKXGXLSCXVALRPKXGSQDQEVHRXVFMRLNIISPDLSGCXSKGLVLPAVLGIXFGAFLIGALLXAALWYIYSHXREYPRPPQ

SEQ ID NO: 9064 - protein, 658 aa, Homo sapiens
  MOD_RES (5)..(5): Selenocysteine
  MOD_RES (22)..(22): Selenocysteine
  MOD_RES (27)..(27): Selenocysteine
  MOD_RES (43)..(43): Selenocysteine
  MOD_RES (45)..(46): Selenocysteine
  MOD_RES (73)..(73): Selenocysteine
  MOD_RES (81)..(81): Selenocysteine
  MOD_RES (90)..(90): Selenocysteine
  MOD_RES (126)..(126): Selenocysteine
  MOD_RES (135)..(136): Selenocysteine
  MOD_RES (144)..(144): Selenocysteine
  MOD_RES (157)..(157): Selenocysteine
  MOD_RES (193)..(193): Selenocysteine
  MOD_RES (200)..(200): Selenocysteine
  MOD_RES (233)..(233): Selenocysteine
  MOD_RES (235)..(235): Selenocysteine
  MOD_RES (273)..(274): Selenocysteine
  MOD_RES (295)..(295): Selenocysteine
  MOD_RES (336)..(336): Selenocysteine
  MOD_RES (343)..(344): Selenocysteine
  MOD_RES (349)..(349): Selenocysteine
  MOD_RES (361)..(361): Selenocysteine
  MOD_RES (369)..(369): Selenocysteine
  MOD_RES (383)..(383): Selenocysteine
  MOD_RES (385)..(385): Selenocysteine
  MOD_RES (388)..(388): Selenocysteine
  MOD_RES (466)..(466): Selenocysteine
  MOD_RES (503)..(503): Selenocysteine
  MOD_RES (538)..(538): Selenocysteine
  MOD_RES (544)..(544): Selenocysteine
  MOD_RES (546)..(546): Selenocysteine
  MOD_RES (550)..(550): Selenocysteine
  MOD_RES (557)..(557): Selenocysteine
  MOD_RES (567)..(567): Selenocysteine
  MOD_RES (583)..(583): Selenocysteine
  MOD_RES (596)..(596): Selenocysteine
  MOD_RES (607)..(607): Selenocysteine
  MOD_RES (617)..(617): Selenocysteine
  MOD_RES (640)..(640): Selenocysteine
  MOD_RES (647)..(647): Selenocysteine
  MOD_RES (650)..(650): Selenocysteine
  MOD_RES (654)..(654): Selenocysteine
MDRGXLPLAVALLLASCSLSPXSLAEXVHCDLQPVGPERGEVXYXXSQVSKGCVAQAPNAILEVHVLFLEFPXGPSQLELXLQASKQNGXWPREVLLVLSVNSSVFLHLQALGIPLHLAYNSSLVXFQEPPGVNXXELPSFPKXQILEWAAERGPIXSAAELNDPQSILLRLGQAQGSLSFCMLEASQDMGRXLEWRPRXPALVRGCHLEGVAGHKEAHILRVLPGHSAGPRXVXVKVELSCAPGDLDAVLILQGPPYVSWLIDANHNMQIWXXGEYSFKIFPEKNIRGFKLPDXPQGLLGEARMLNASIVASFVELPLASIVSLHASSCGGRLQXSPAPIQXXPPKDXCSPELLMSLIQXKCADDAMXLVLKKELVAHLKCXIXGLXFWDPSCEAEDRGDKFVLRSAYSSCGMQVSASMISNEAVVNILSSSSPQRKKVHCLNMDSLSFQLGLYLSPHFLQASNXIEPGQQSFVQVRVSPSVSEFLLQLDSCHLDLGPEGGXVELIQGRAAKGNCVSLLSPSPEGDPRFSFLLHFYXVPIPKXGXLSCXVALRPKXGSQDQEVHRXVFMRLNIISPDLSGCXSKGLVLPAVLGIXFGAFLIGALLXAALWYIYSHXRSPSKREPVVAVAAPASSESSSXNHSIGSXQSXPCSXSSMA

SEQ ID NO: 9065 - protein, 476 aa, Homo sapiens
  MOD_RES (11)..(11): Selenocysteine
  MOD_RES (18)..(18): Selenocysteine
  MOD_RES (51)..(51): Selenocysteine
  MOD_RES (53)..(53): Selenocysteine
  MOD_RES (91)..(92): Selenocysteine
  MOD_RES (113)..(113): Selenocysteine
  MOD_RES (154)..(154): Selenocysteine
  MOD_RES (161)..(162): Selenocysteine
  MOD_RES (167)..(167): Selenocysteine
  MOD_RES (179)..(179): Selenocysteine
  MOD_RES (187)..(187): Selenocysteine
  MOD_RES (201)..(201): Selenocysteine
  MOD_RES (203)..(203): Selenocysteine
  MOD_RES (206)..(206): Selenocysteine
  MOD_RES (284)..(284): Selenocysteine
  MOD_RES (321)..(321): Selenocysteine
  MOD_RES (356)..(356): Selenocysteine
  MOD_RES (362)..(362): Selenocysteine
  MOD_RES (364)..(364): Selenocysteine
  MOD_RES (368)..(368): Selenocysteine
  MOD_RES (375)..(375): Selenocysteine
  MOD_RES (385)..(385): Selenocysteine
  MOD_RES (401)..(401): Selenocysteine
  MOD_RES (414)..(414): Selenocysteine
  MOD_RES (425)..(425): Selenocysteine
  MOD_RES (435)..(435): Selenocysteine
  MOD_RES (458)..(458): Selenocysteine
  MOD_RES (465)..(465): Selenocysteine
  MOD_RES (468)..(468): Selenocysteine
  MOD_RES (472)..(472): Selenocysteine
MLEASQDMGRXLEWRPRXPALVRGCHLEGVAGHKEAHILRVLPGHSAGPRXVXVKVELSCAPGDLDAVLILQGPPYVSWLIDANHNMQIWXXGEYSFKIFPEKNIRGFKLPDXPQGLLGEARMLNASIVASFVELPLASIVSLHASSCGGRLQXSPAPIQXXPPKDXCSPELLMSLIQXKCADDAMXLVLKKELVAHLKCXIXGLXFWDPSCEAEDRGDKFVLRSAYSSCGMQVSASMISNEAVVNILSSSSPQRKKVHCLNMDSLSFQLGLYLSPHFLQASNXIEPGQQSFVQVRVSPSVSEFLLQLDSCHLDLGPEGGXVELIQGRAAKGNCVSLLSPSPEGDPRFSFLLHFYXVPIPKXGXLSCXVALRPKXGSQDQEVHRXVFMRLNIISPDLSGCXSKGLVLPAVLGIXFGAFLIGALLXAALWYIYSHXRSPSKREPVVAVAAPASSESSSXNHSIGSXQSXPCSXSSMA

SEQ ID NO: 9066 - protein, 957 aa, Homo sapiens
  MOD_RES (16)..(16): Selenocysteine
  MOD_RES (40)..(40): Selenocysteine
  MOD_RES (53)..(53): Selenocysteine
  MOD_RES (64)..(64): Selenocysteine
  MOD_RES (114)..(114): Selenocysteine
  MOD_RES (116)..(116): Selenocysteine
  MOD_RES (118)..(118): Selenocysteine
  MOD_RES (129)..(129): Selenocysteine
  MOD_RES (139)..(139): Selenocysteine
  MOD_RES (142)..(142): Selenocysteine
  MOD_RES (178)..(178): Selenocysteine
  MOD_RES (189)..(189): Selenocysteine
  MOD_RES (206)..(207): Selenocysteine
  MOD_RES (209)..(209): Selenocysteine
  MOD_RES (220)..(220): Selenocysteine
  MOD_RES (225)..(225): Selenocysteine
  MOD_RES (242)..(242): Selenocysteine
  MOD_RES (244)..(244): Selenocysteine
  MOD_RES (248)..(248): Selenocysteine
  MOD_RES (272)..(272): Selenocysteine
  MOD_RES (274)..(275): Selenocysteine
  MOD_RES (284)..(284): Selenocysteine
  MOD_RES (308)..(308): Selenocysteine
  MOD_RES (318)..(318): Selenocysteine
  MOD_RES (326)..(326): Selenocysteine
  MOD_RES (356)..(356): Selenocysteine
  MOD_RES (366)..(366): Selenocysteine
  MOD_RES (370)..(370): Selenocysteine
  MOD_RES (389)..(389): Selenocysteine
  MOD_RES (405)..(405): Selenocysteine
  MOD_RES (432)..(432): Selenocysteine
  MOD_RES (463)..(463): Selenocysteine
  MOD_RES (465)..(466): Selenocysteine
  MOD_RES (471)..(471): Selenocysteine
  MOD_RES (516)..(516): Selenocysteine
  MOD_RES (537)..(537): Selenocysteine
  MOD_RES (539)..(539): Selenocysteine
  MOD_RES (556)..(556): Selenocysteine
  MOD_RES (578)..(578): Selenocysteine
  MOD_RES (586)..(586): Selenocysteine
  MOD_RES (591)..(591): Selenocysteine
  MOD_RES (605)..(605): Selenocysteine
  MOD_RES (635)..(635): Selenocysteine
  MOD_RES (641)..(641): Selenocysteine
  MOD_RES (649)..(649): Selenocysteine
  MOD_RES (680)..(680): Selenocysteine
  MOD_RES (700)..(700): Selenocysteine
  MOD_RES (741)..(741): Selenocysteine
  MOD_RES (775)..(775): Selenocysteine
  MOD_RES (803)..(803): Selenocysteine
  MOD_RES (810)..(810): Selenocysteine
  MOD_RES (830)..(830): Selenocysteine
  MOD_RES (842)..(842): Selenocysteine
  MOD_RES (847)..(847): Selenocysteine
  MOD_RES (852)..(852): Selenocysteine
  MOD_RES (883)..(883): Selenocysteine
  MOD_RES (894)..(894): Selenocysteine
  MOD_RES (901)..(901): Selenocysteine
  MOD_RES (931)..(931): Selenocysteine
  MOD_RES (945)..(945): Selenocysteine
MNFAEREGSKRYCIQXKHVAILCAVVVGVGLIVGLAVGLXRSCDSSGDGGPGXAPAPSHLPSSXASPSGPPAQDQDICPASEDESGQWKNFRLPDFVNPVHYDLHVKPLLEEDXYXGXVSISINLSAPXRYLWLHLREXRIXRLPELKRPSGDQVQVRRCFEYKKQEYVVVEAEEELXPSSGDGLYLLXMEFAGWLNGSLVGFYRXXYXENGQVKSIVAXDHEPXDARKSFPCFDEPNKKAXYXISIXHPKEYGALSNMPVAKEESVDDKWXRXXFEKSVPMSXYLVCFAVHQFDSVKRISNSGKPLXIYVQPEQKHXAEYAANIXKSVFDYFEEYFAMNYSLPKLDKIAIPDFGXGAMENWGLIXYREXNLLYDPKESASSNQQRVAXVVAHELVHQWFGNIVXMDWWEDLWLNEGFASFFEFLGVNHAEXDWQMRDQMLLEDVLPVQEDDSLMSSHPIIVXVXXPDEIXSVFDGISYSKGSSILRMLEDWIKPENFQKGCQMYLEKYQFKNAKXSDFWAALEEASRLPVKEVMDXWXRQMGYPVLNVNGVKNIXQKRFLLDPRANPSQPPSDLGYXWNIPVKWXEDNIXSSVLFNRSEKEGIXLNSSNPSGNAFLKINPDHIGFYRVNYEVAXWDSIAXALSLNHKXFSSADRASLIDDAFALARAQLLDYKVALNLXKYLKREENFLPWQRVISAVXYIISMFEDDKELYPMIEEYFQGQVKPIADSLGWNDAGDHVXKLLRSSVLGFACKMGDREALNNASSLFEQWLNGXVSLPVNLRLLVYRYGMQNSGNEISWNYXLEQYQKXSLAQEKEKLLYGLASVKNVXLLSRYLDLLKDXNLIKXQDVFXVIRYISYNSYGKNMAWNWIQLNWDYLVNRYXLNNRNLGRIVXIAEPFNXELQLWQMESFFAKYPQAGAGEKPREQVLEXVKNNIEWLKQHRNXIREWFFNLLESG

SEQ ID NO: 9067 - protein, 144 aa, Homo sapiens
  MOD_RES (1)..(1): Any amino acid
  MOD_RES (3)..(3): Selenocysteine
  MOD_RES (5)..(6): Selenocysteine
  MOD_RES (11)..(11): Selenocysteine
  MOD_RES (56)..(56): Selenocysteine
  MOD_RES (77)..(77): Selenocysteine
  MOD_RES (79)..(79): Selenocysteine
  MOD_RES (96)..(96): Selenocysteine
  MOD_RES (118)..(118): Selenocysteine
  MOD_RES (126)..(126): Selenocysteine
  MOD_RES (131)..(131): Selenocysteine
XVXVXXPDEIXSVFDGISYSKGSSILRMLEDWIKPENFQKGCQMYLEKYQFKNAKXSDFWAALEEASRLPVKEVMDXWXRQMGYPVLNVNGVKNIXQKRFLLDPRANPSQPPSDLGYXWNIPVKWXEDNIXSSVLFNRSEKEVN

SEQ ID NO: 9068 - protein, 378 aa, Homo sapiens
  MOD_RES (68)..(68): Selenocysteine
  MOD_RES (74)..(74): Selenocysteine
  MOD_RES (88)..(89): Selenocysteine
  MOD_RES (116)..(116): Selenocysteine
  MOD_RES (139)..(139): Selenocysteine
  MOD_RES (148)..(148): Selenocysteine
  MOD_RES (160)..(160): Selenocysteine
  MOD_RES (209)..(209): Selenocysteine
  MOD_RES (212)..(212): Selenocysteine
  MOD_RES (227)..(227): Selenocysteine
  MOD_RES (243)..(243): Selenocysteine
  MOD_RES (245)..(245): Selenocysteine
  MOD_RES (254)..(254): Selenocysteine
  MOD_RES (256)..(256): Selenocysteine
  MOD_RES (265)..(265): Selenocysteine
  MOD_RES (309)..(309): Selenocysteine
  MOD_RES (319)..(319): Selenocysteine
  MOD_RES (366)..(366): Selenocysteine
  MOD_RES (375)..(375): Selenocysteine
MERDGCAGGGSRGGEGGRAPREGPAGNGRDRGRSHAAEAPGDPQAAASLLAPMDVGEEPLEKAARARXAKDPNXYKVLSLVLSVCVLXXILGCIFGLKPSCAKEVKSCKGRCFERXFGNCRCDAACVELGNCCLDYQEXCIEPEHIWXCNKFRCGEKRLXRSLCACSDDCKDKGDCCINYSSVCQGEKSWVEEPCESINEPQCPAGFEXPPXLLFSLDGFRAEYLHXWGGLLPVISKLKKCGXYXKNMRPVYPXKXFPNHYSIVXGLYPESHGIIDNKMYDPKMNASFSLKSKEKFNPEWYKGEPIWVXAKYQGLKSGXFFWPGSDVEINGIFPDIYKMYNGSVPFEERILAVLQWLQLPKDERRXRFFRSFIWXSQQ

SEQ ID NO: 9069 - protein, 925 aa, Homo sapiens
  MOD_RES (68)..(68): Selenocysteine
  MOD_RES (74)..(74): Selenocysteine
  MOD_RES (88)..(89): Selenocysteine
  MOD_RES (116)..(116): Selenocysteine
  MOD_RES (139)..(139): Selenocysteine
  MOD_RES (148)..(148): Selenocysteine
  MOD_RES (160)..(160): Selenocysteine
  MOD_RES (209)..(209): Selenocysteine
  MOD_RES (212)..(212): Selenocysteine
  MOD_RES (227)..(227): Selenocysteine
  MOD_RES (243)..(243): Selenocysteine
  MOD_RES (245)..(245): Selenocysteine
  MOD_RES (254)..(254): Selenocysteine
  MOD_RES (256)..(256): Selenocysteine
  MOD_RES (265)..(265): Selenocysteine
  MOD_RES (309)..(309): Selenocysteine
  MOD_RES (319)..(319): Selenocysteine
  MOD_RES (369)..(369): Selenocysteine
  MOD_RES (511)..(511): Selenocysteine
  MOD_RES (563)..(563): Selenocysteine
  MOD_RES (580)..(580): Selenocysteine
  MOD_RES (587)..(587): Selenocysteine
  MOD_RES (601)..(601): Selenocysteine
  MOD_RES (617)..(617): Selenocysteine
  MOD_RES (640)..(640): Selenocysteine
  MOD_RES (645)..(645): Selenocysteine
  MOD_RES (656)..(656): Selenocysteine
  MOD_RES (670)..(670): Selenocysteine
  MOD_RES (693)..(693): Selenocysteine
  MOD_RES (696)..(696): Selenocysteine
  MOD_RES (705)..(705): Selenocysteine
  MOD_RES (733)..(733): Selenocysteine
  MOD_RES (759)..(760): Selenocysteine
  MOD_RES (779)..(779): Selenocysteine
  MOD_RES (829)..(829): Selenocysteine
  MOD_RES (836)..(836): Selenocysteine
  MOD_RES (841)..(841): Selenocysteine
  MOD_RES (844)..(844): Selenocysteine
  MOD_RES (853)..(853): Selenocysteine
  MOD_RES (862)..(862): Selenocysteine
  MOD_RES (890)..(890): Selenocysteine
  MOD_RES (896)..(896): Selenocysteine
  MOD_RES (916)..(916): Selenocysteine
  MOD_RES (920)..(920): Selenocysteine
MERDGCAGGGSRGGEGGRAPREGPAGNGRDRGRSHAAEAPGDPQAAASLLAPMDVGEEPLEKAARARXAKDPNXYKVLSLVLSVCVLXXILGCIFGLKPSCAKEVKSCKGRCFERXFGNCRCDAACVELGNCCLDYQEXCIEPEHIWXCNKFRCGEKRLXRSLCACSDDCKDKGDCCINYSSVCQGEKSWVEEPCESINEPQCPAGFEXPPXLLFSLDGFRAEYLHXWGGLLPVISKLKKCGXYXKNMRPVYPXKXFPNHYSIVXGLYPESHGIIDNKMYDPKMNASFSLKSKEKFNPEWYKGEPIWVXAKYQGLKSGXFFWPGSDVEINGIFPDIYKMYNGSVPFEERILAVLQWLQLPKDERPHFYXLYLEEPDSSGHSYGPVSSEVIKALQRVDGMVGMLMDGLKELNLHRCLNLILISDHGMEQGSCKKYIYLNKYLGDVKNIKVIYGPAARLRPSDVPDKYYSFNYEGIARNLSCREPNQHFKPYLKHFLPKRLHFAKSDRIEPLXFYLDPQWQLALNPSERKYCGSGFHGSDNVFSNMQALFVGYGPGFKHGIEADXFENIEVYNLMCDLLNLXPAPNNGXHGSLNHLLKNPVYXPKHPKEVHPLVQCPFXRNPRDNLGCSCNPSILPIEDFQXQFNLXVAEEKIIKHEXLPYGRPRVLQKENXICLLSQHQFMSGYSQDILMPLWXSYXVDRNDSFSXEDFSNCLYQDFRIPLSPVHKCSFYKNNXKVSYGFLSPPQLNKNSSGIYSEALLXXNIVPMYQSFQVIWRYFHDXLLRKYAEERNGVNVVSGPVFDFDYDGRCDSLENLRQKRRVIRNQEILIPXHFFIVLXSCKDXSQXPLHCENLDXLAFILPHRXDNSESCVHGKHDSSWVEELLMLHRARIXDVEHIXGLSFYQQRKEPVSDILKLKXHLPXFSQED

SEQ ID NO: 9070 - protein, 863 aa, Homo sapiens
  MOD_RES (17)..(17): Selenocysteine
  MOD_RES (29)..(29): Selenocysteine
  MOD_RES (45)..(45): Selenocysteine
  MOD_RES (53)..(53): Selenocysteine
  MOD_RES (84)..(84): Selenocysteine
  MOD_RES (97)..(97): Selenocysteine
  MOD_RES (104)..(104): Selenocysteine
  MOD_RES (132)..(132): Selenocysteine
  MOD_RES (197)..(197): Selenocysteine
  MOD_RES (208)..(208): Selenocysteine
  MOD_RES (210)..(210): Selenocysteine
  MOD_RES (216)..(216): Selenocysteine
  MOD_RES (219)..(219): Selenocysteine
  MOD_RES (241)..(241): Selenocysteine
  MOD_RES (263)..(263): Selenocysteine
  MOD_RES (265)..(265): Selenocysteine
  MOD_RES (273)..(273): Selenocysteine
  MOD_RES (288)..(288): Selenocysteine
  MOD_RES (294)..(294): Selenocysteine
  MOD_RES (326)..(326): Selenocysteine
  MOD_RES (366)..(366): Selenocysteine
  MOD_RES (370)..(370): Selenocysteine
  MOD_RES (378)..(378): Selenocysteine
  MOD_RES (384)..(384): Selenocysteine
  MOD_RES (389)..(389): Selenocysteine
  MOD_RES (413)..(413): Selenocysteine
  MOD_RES (486)..(486): Selenocysteine
  MOD_RES (494)..(494): Selenocysteine
  MOD_RES (499)..(499): Selenocysteine
  MOD_RES (527)..(527): Selenocysteine
  MOD_RES (537)..(537): Selenocysteine
  MOD_RES (539)..(539): Selenocysteine
  MOD_RES (543)..(543): Selenocysteine
  MOD_RES (549)..(549): Selenocysteine
  MOD_RES (568)..(568): Selenocysteine
  MOD_RES (588)..(588): Selenocysteine
  MOD_RES (592)..(592): Selenocysteine
  MOD_RES (608)..(608): Selenocysteine
  MOD_RES (616)..(616): Selenocysteine
  MOD_RES (632)..(632): Selenocysteine
  MOD_RES (635)..(635): Selenocysteine
  MOD_RES (650)..(650): Selenocysteine
  MOD_RES (700)..(700): Selenocysteine
  MOD_RES (749)..(749): Selenocysteine
  MOD_RES (766)..(766): Selenocysteine
  MOD_RES (773)..(773): Selenocysteine
  MOD_RES (779)..(779): Selenocysteine
  MOD_RES (824)..(824): Selenocysteine
  MOD_RES (834)..(834): Selenocysteine
  MOD_RES (842)..(842): Selenocysteine
  MOD_RES (851)..(851): Selenocysteine
  MOD_RES (854)..(854): Selenocysteine
  MOD_RES (858)..(858): Selenocysteine
MARRSSFQSCQIISLFXFAVGVNICLGFXAHRIKRAEGWEEGPPXVLSDSPWXNISGSCKGRCFELQEAGPPDCRCDNLCKSYXSCCHDFDELCLKXARGWECXKDRCGEVRNEENACHCSEDCLARGDCCXNYQVVCKGESHWVDDDCEEIKAAECPAGFVRPPLIIFSVDGFRASYMKKGSKVMPNIEKLRSCGXHSPYMRPVYPXKXFPNLYXLAXGLYPESHGIVGNSMYDPVFDAXFHLRGREKFNHRWWGGQPLWIXAXKQGVKAGXFFWSVVIPHERRILXILQWLXLPDHERPSVYAFYSEQPDFSGHKYGPFGPEMXNPLREIDKIVGQLMDGLKQLKLHRCVNVIFVGDHGMEDVXCDRXEFLSNYLXNVDDIXLVPGXLGRIRSKFSNNAKYDPKAIIANLXCKKPDQHFKPYLKQHLPKRLHYANNRRIEDIHLLVERRWHVARKPLDVYKKPSGKCFFQGDHGFDNKVNSMQXVFVGYGSXFKYKXKVPPFENIELYNVMCDLLGLKPAPNNGXHGSLNHLLRXNXFRPXMPEEVXRPNYPGIMYLQSDFDLGCXCDDKVEPKNKLDELNKRLHXKGSXEERHLLYGRPAVLYRXRYDILYHXDFESGYSEIFLMPLWXSYXVSKQAEVSSVPDHLXSCVRPDVRVSPSFSQNCLAYKNDKQMSYGFLFPPYLSSSPEAKYDAFLVXNMVPMYPAFKRVWNYFQRVLVKKYASERNGVNVISGPIFDYDYDGLHDXEDKIKQYVEGSSIPVPXHYYSIIXSCLDFXQPADKCDGPLSVSSFILPHRPDNEESCNSSEDESKWVEELMKMHXARVRDIEHLXSLDFFRKXSRSYPEILXLKXYLHXYESEI

SEQ ID NO: 9071 - protein, 888 aa, Homo sapiens
  MOD_RES (17)..(17): Selenocysteine
  MOD_RES (29)..(29): Selenocysteine
  MOD_RES (45)..(45): Selenocysteine
  MOD_RES (53)..(53): Selenocysteine
  MOD_RES (84)..(84): Selenocysteine
  MOD_RES (97)..(97): Selenocysteine
  MOD_RES (104)..(104): Selenocysteine
  MOD_RES (132)..(132): Selenocysteine
  MOD_RES (197)..(197): Selenocysteine
  MOD_RES (208)..(208): Selenocysteine
  MOD_RES (210)..(210): Selenocysteine
  MOD_RES (216)..(216): Selenocysteine
  MOD_RES (219)..(219): Selenocysteine
  MOD_RES (241)..(241): Selenocysteine
  MOD_RES (263)..(263): Selenocysteine
  MOD_RES (265)..(265): Selenocysteine
  MOD_RES (273)..(273): Selenocysteine
  MOD_RES (288)..(288): Selenocysteine
  MOD_RES (294)..(294): Selenocysteine
  MOD_RES (326)..(326): Selenocysteine
  MOD_RES (366)..(366): Selenocysteine
  MOD_RES (370)..(370): Selenocysteine
  MOD_RES (378)..(378): Selenocysteine
  MOD_RES (384)..(384): Selenocysteine
  MOD_RES (389)..(389): Selenocysteine
  MOD_RES (413)..(413): Selenocysteine
  MOD_RES (486)..(486): Selenocysteine
  MOD_RES (494)..(494): Selenocysteine
  MOD_RES (499)..(499): Selenocysteine
  MOD_RES (527)..(527): Selenocysteine
  MOD_RES (537)..(537): Selenocysteine
  MOD_RES (539)..(539): Selenocysteine
  MOD_RES (543)..(543): Selenocysteine
  MOD_RES (549)..(549): Selenocysteine
  MOD_RES (568)..(568): Selenocysteine
  MOD_RES (588)..(588): Selenocysteine
  MOD_RES (592)..(592): Selenocysteine
  MOD_RES (596)..(596): Selenocysteine
  MOD_RES (633)..(633): Selenocysteine
  MOD_RES (641)..(641): Selenocysteine
  MOD_RES (657)..(657): Selenocysteine
  MOD_RES (660)..(660): Selenocysteine
  MOD_RES (675)..(675): Selenocysteine
  MOD_RES (725)..(725): Selenocysteine
  MOD_RES (774)..(774): Selenocysteine
  MOD_RES (791)..(791): Selenocysteine
  MOD_RES (798)..(798): Selenocysteine
  MOD_RES (804)..(804): Selenocysteine
  MOD_RES (849)..(849): Selenocysteine
  MOD_RES (859)..(859): Selenocysteine
  MOD_RES (867)..(867): Selenocysteine
  MOD_RES (876)..(876): Selenocysteine
  MOD_RES (879)..(879): Selenocysteine
  MOD_RES (883)..(883): Selenocysteine
MARRSSFQSCQIISLFXFAVGVNICLGFXAHRIKRAEGWEEGPPXVLSDSPWXNISGSCKGRCFELQEAGPPDCRCDNLCKSYXSCCHDFDELCLKXARGWECXKDRCGEVRNEENACHCSEDCLARGDCCXNYQVVCKGESHWVDDDCEEIKAAECPAGFVRPPLIIFSVDGFRASYMKKGSKVMPNIEKLRSCGXHSPYMRPVYPXKXFPNLYXLAXGLYPESHGIVGNSMYDPVFDAXFHLRGREKFNHRWWGGQPLWIXAXKQGVKAGXFFWSVVIPHERRILXILQWLXLPDHERPSVYAFYSEQPDFSGHKYGPFGPEMXNPLREIDKIVGQLMDGLKQLKLHRCVNVIFVGDHGMEDVXCDRXEFLSNYLXNVDDIXLVPGXLGRIRSKFSNNAKYDPKAIIANLXCKKPDQHFKPYLKQHLPKRLHYANNRRIEDIHLLVERRWHVARKPLDVYKKPSGKCFFQGDHGFDNKVNSMQXVFVGYGSXFKYKXKVPPFENIELYNVMCDLLGLKPAPNNGXHGSLNHLLRXNXFRPXMPEEVXRPNYPGIMYLQSDFDLGCXCDDKVEPKNKLDELNKRLHXKGSXEAEXRKFRGSRNENKENINGNFEPRKERHLLYGRPAVLYRXRYDILYHXDFESGYSEIFLMPLWXSYXVSKQAEVSSVPDHLXSCVRPDVRVSPSFSQNCLAYKNDKQMSYGFLFPPYLSSSPEAKYDAFLVXNMVPMYPAFKRVWNYFQRVLVKKYASERNGVNVISGPIFDYDYDGLHDXEDKIKQYVEGSSIPVPXHYYSIIXSCLDFXQPADKCDGPLSVSSFILPHRPDNEESCNSSEDESKWVEELMKMHXARVRDIEHLXSLDFFRKXSRSYPEILXLKXYLHXYESEI

SEQ ID NO: 9072 - protein, 915 aa, Homo sapiens
  MOD_RES (17)..(17): Selenocysteine
  MOD_RES (29)..(29): Selenocysteine
  MOD_RES (45)..(45): Selenocysteine
  MOD_RES (53)..(53): Selenocysteine
  MOD_RES (84)..(84): Selenocysteine
  MOD_RES (97)..(97): Selenocysteine
  MOD_RES (104)..(104): Selenocysteine
  MOD_RES (132)..(132): Selenocysteine
  MOD_RES (197)..(197): Selenocysteine
  MOD_RES (208)..(208): Selenocysteine
  MOD_RES (210)..(210): Selenocysteine
  MOD_RES (216)..(216): Selenocysteine
  MOD_RES (219)..(219): Selenocysteine
  MOD_RES (241)..(241): Selenocysteine
  MOD_RES (263)..(263): Selenocysteine
  MOD_RES (265)..(265): Selenocysteine
  MOD_RES (273)..(273): Selenocysteine
  MOD_RES (288)..(288): Selenocysteine
  MOD_RES (294)..(294): Selenocysteine
  MOD_RES (333)..(333): Selenocysteine
  MOD_RES (372)..(372): Selenocysteine
  MOD_RES (378)..(378): Selenocysteine
  MOD_RES (418)..(418): Selenocysteine
  MOD_RES (422)..(422): Selenocysteine
  MOD_RES (430)..(430): Selenocysteine
  MOD_RES (436)..(436): Selenocysteine
  MOD_RES (441)..(441): Selenocysteine
  MOD_RES (465)..(465): Selenocysteine
  MOD_RES (538)..(538): Selenocysteine
  MOD_RES (546)..(546): Selenocysteine
  MOD_RES (551)..(551): Selenocysteine
  MOD_RES (579)..(579): Selenocysteine
  MOD_RES (589)..(589): Selenocysteine
  MOD_RES (591)..(591): Selenocysteine
  MOD_RES (595)..(595): Selenocysteine
  MOD_RES (601)..(601): Selenocysteine
  MOD_RES (620)..(620): Selenocysteine
  MOD_RES (640)..(640): Selenocysteine
  MOD_RES (644)..(644): Selenocysteine
  MOD_RES (660)..(660): Selenocysteine
  MOD_RES (668)..(668): Selenocysteine
  MOD_RES (684)..(684): Selenocysteine
  MOD_RES (687)..(687): Selenocysteine
  MOD_RES (702)..(702): Selenocysteine
  MOD_RES (752)..(752): Selenocysteine
  MOD_RES (801)..(801): Selenocysteine
  MOD_RES (818)..(818): Selenocysteine
  MOD_RES (825)..(825): Selenocysteine
  MOD_RES (831)..(831): Selenocysteine
  MOD_RES (876)..(876): Selenocysteine
  MOD_RES (886)..(886): Selenocysteine
  MOD_RES (894)..(894): Selenocysteine
  MOD_RES (903)..(903): Selenocysteine
  MOD_RES (906)..(906): Selenocysteine
  MOD_RES (910)..(910): Selenocysteine
MARRSSFQSCQIISLFXFAVGVNICLGFXAHRIKRAEGWEEGPPXVLSDSPWXNISGSCKGRCFELQEAGPPDCRCDNLCKSYXSCCHDFDELCLKXARGWECXKDRCGEVRNEENACHCSEDCLARGDCCXNYQVVCKGESHWVDDDCEEIKAAECPAGFVRPPLIIFSVDGFRASYMKKGSKVMPNIEKLRSCGXHSPYMRPVYPXKXFPNLYXLAXGLYPESHGIVGNSMYDPVFDAXFHLRGREKFNHRWWGGQPLWIXAXKQGVKAGXFFWSVVIPHERRILXILQWLXLPDHERPSVYAFYSEQPDFSGHKYGPFGPEESSYGSPFXPAKRPKRKVAPKRRQERPVAPPKKRRRKIHRMDHYAAEXRQDKMXNPLREIDKIVGQLMDGLKQLKLHRCVNVIFVGDHGMEDVXCDRXEFLSNYLXNVDDIXLVPGXLGRIRSKFSNNAKYDPKAIIANLXCKKPDQHFKPYLKQHLPKRLHYANNRRIEDIHLLVERRWHVARKPLDVYKKPSGKCFFQGDHGFDNKVNSMQXVFVGYGSXFKYKXKVPPFENIELYNVMCDLLGLKPAPNNGXHGSLNHLLRXNXFRPXMPEEVXRPNYPGIMYLQSDFDLGCXCDDKVEPKNKLDELNKRLHXKGSXEERHLLYGRPAVLYRXRYDILYHXDFESGYSEIFLMPLWXSYXVSKQAEVSSVPDHLXSCVRPDVRVSPSFSQNCLAYKNDKQMSYGFLFPPYLSSSPEAKYDAFLVXNMVPMYPAFKRVWNYFQRVLVKKYASERNGVNVISGPIFDYDYDGLHDXEDKIKQYVEGSSIPVPXHYYSIIXSCLDFXQPADKCDGPLSVSSFILPHRPDNEESCNSSEDESKWVEELMKMHXARVRDIEHLXSLDFFRKXSRSYPEILXLKXYLHXYESEI

SEQ ID NO: 9073 - protein, 162 aa, Homo sapiens
  MOD_RES (17)..(17): Selenocysteine
  MOD_RES (29)..(29): Selenocysteine
  MOD_RES (45)..(45): Selenocysteine
  MOD_RES (53)..(53): Selenocysteine
  MOD_RES (84)..(84): Selenocysteine
  MOD_RES (97)..(97): Selenocysteine
  MOD_RES (104)..(104): Selenocysteine
  MOD_RES (132)..(132): Selenocysteine
MARRSSFQSCQIISLFXFAVGVNICLGFXAHRIKRAEGWEEGPPXVLSDSPWXNISGSCKGRCFELQEAGPPDCRCDNLCKSYXSCCHDFDELCLKXARGWECXKDRCGEVRNEENACHCSEDCLARGDCCXNYQVVCKGESHWVDDDCEEIKAAECPAGGP

SEQ ID NO: 9074 - protein, 245 aa, Homo sapiens
  MOD_RES (17)..(17): Selenocysteine
  MOD_RES (29)..(29): Selenocysteine
  MOD_RES (45)..(45): Selenocysteine
  MOD_RES (53)..(53): Selenocysteine
  MOD_RES (86)..(86): Selenocysteine
  MOD_RES (114)..(114): Selenocysteine
  MOD_RES (179)..(179): Selenocysteine
  MOD_RES (190)..(190): Selenocysteine
  MOD_RES (192)..(192): Selenocysteine
  MOD_RES (198)..(198): Selenocysteine
  MOD_RES (201)..(201): Selenocysteine
  MOD_RES (223)..(223): Selenocysteine
MARRSSFQSCQIISLFXFAVGVNICLGFXAHRIKRAEGWEEGPPXVLSDSPWXNISGSCKGRCFELQEAGPPDCRCDNLSRGWECXKDRCGEVRNEENACHCSEDCLARGDCCXNYQVVCKGESHWVDDDCEEIKAAECPAGFVRPPLIIFSVDGFRASYMKKGSKVMPNIEKLRSCGXHSPYMRPVYPXKXFPNLYXLAXGLYPESHGIVGNSMYDPVFDAXFHLRGREKFNHRWWGGQPVSFA

SEQ ID NO: 9075 - protein, 498 aa, Homo sapiens
  MOD_RES (5)..(5): Selenocysteine
  MOD_RES (9)..(9): Selenocysteine
  MOD_RES (17)..(17): Selenocysteine
  MOD_RES (23)..(23): Selenocysteine
  MOD_RES (28)..(28): Selenocysteine
  MOD_RES (52)..(52): Selenocysteine
  MOD_RES (125)..(125): Selenocysteine
  MOD_RES (133)..(133): Selenocysteine
  MOD_RES (138)..(138): Selenocysteine
  MOD_RES (166)..(166): Selenocysteine
  MOD_RES (176)..(176): Selenocysteine
  MOD_RES (178)..(178): Selenocysteine
  MOD_RES (182)..(182): Selenocysteine
  MOD_RES (188)..(188): Selenocysteine
  MOD_RES (207)..(207): Selenocysteine
  MOD_RES (223)..(223): Selenocysteine
  MOD_RES (227)..(227): Selenocysteine
  MOD_RES (243)..(243): Selenocysteine
  MOD_RES (251)..(251): Selenocysteine
  MOD_RES (267)..(267): Selenocysteine
  MOD_RES (270)..(270): Selenocysteine
  MOD_RES (285)..(285): Selenocysteine
  MOD_RES (335)..(335): Selenocysteine
  MOD_RES (384)..(384): Selenocysteine
  MOD_RES (401)..(401): Selenocysteine
  MOD_RES (408)..(408): Selenocysteine
  MOD_RES (414)..(414): Selenocysteine
  MOD_RES (459)..(459): Selenocysteine
  MOD_RES (469)..(469): Selenocysteine
  MOD_RES (477)..(477): Selenocysteine
  MOD_RES (486)..(486): Selenocysteine
  MOD_RES (489)..(489): Selenocysteine
  MOD_RES (493)..(493): Selenocysteine
MEDVXCDRXEFLSNYLXNVDDIXLVPGXLGRIRSKFSNNAKYDPKAIIANLXCKKPDQHFKPYLKQHLPKRLHYANNRRIEDIHLLVERRWHVARKPLDVYKKPSGKCFFQGDHGFDNKVNSMQXVFVGYGSXFKYKXKVPPFENIELYNVMCDLLGLKPAPNNGXHGSLNHLLRXNXFRPXMPEEVXRPNYPGIMYLQSDFDLGCXCDDKNKLDELNKRLHXKGSXEERHLLYGRPAVLYRXRYDILYHXDFESGYSEIFLMPLWXSYXVSKQAEVSSVPDHLXSCVRPDVRVSPSFSQNCLAYKNDKQMSYGFLFPPYLSSSPEAKYDAFLVXNMVPMYPAFKRVWNYFQRVLVKKYASERNGVNVISGPIFDYDYDGLHDXEDKIKQYVEGSSIPVPXHYYSIIXSCLDFXQPADKCDGPLSVSSFILPHRPDNEESCNSSEDESKWVEELMKMHXARVRDIEHLXSLDFFRKXSRSYPEILXLKXYLHXYESEI

SEQ ID NO: 9076 - protein, 884 aa, Homo sapiens
  MOD_RES (2)..(2): Selenocysteine
  MOD_RES (13)..(13): Selenocysteine
  MOD_RES (25)..(25): Selenocysteine
  MOD_RES (41)..(41): Selenocysteine
  MOD_RES (49)..(49): Selenocysteine
  MOD_RES (80)..(80): Selenocysteine
  MOD_RES (93)..(93): Selenocysteine
  MOD_RES (100)..(100): Selenocysteine
  MOD_RES (128)..(128): Selenocysteine
  MOD_RES (193)..(193): Selenocysteine
  MOD_RES (204)..(204): Selenocysteine
  MOD_RES (206)..(206): Selenocysteine
  MOD_RES (212)..(212): Selenocysteine
  MOD_RES (215)..(215): Selenocysteine
  MOD_RES (237)..(237): Selenocysteine
  MOD_RES (259)..(259): Selenocysteine
  MOD_RES (261)..(261): Selenocysteine
  MOD_RES (269)..(269): Selenocysteine
  MOD_RES (284)..(284): Selenocysteine
  MOD_RES (290)..(290): Selenocysteine
  MOD_RES (322)..(322): Selenocysteine
  MOD_RES (362)..(362): Selenocysteine
  MOD_RES (366)..(366): Selenocysteine
  MOD_RES (374)..(374): Selenocysteine
  MOD_RES (380)..(380): Selenocysteine
  MOD_RES (385)..(385): Selenocysteine
  MOD_RES (409)..(409): Selenocysteine
  MOD_RES (482)..(482): Selenocysteine
  MOD_RES (490)..(490): Selenocysteine
  MOD_RES (495)..(495): Selenocysteine
  MOD_RES (523)..(523): Selenocysteine
  MOD_RES (533)..(533): Selenocysteine
  MOD_RES (535)..(535): Selenocysteine
  MOD_RES (539)..(539): Selenocysteine
  MOD_RES (545)..(545): Selenocysteine
  MOD_RES (564)..(564): Selenocysteine
  MOD_RES (584)..(584): Selenocysteine
  MOD_RES (588)..(588): Selenocysteine
  MOD_RES (592)..(592): Selenocysteine
  MOD_RES (629)..(629): Selenocysteine
  MOD_RES (637)..(637): Selenocysteine
  MOD_RES (653)..(653): Selenocysteine
  MOD_RES (656)..(656): Selenocysteine
  MOD_RES (671)..(671): Selenocysteine
  MOD_RES (721)..(721): Selenocysteine
  MOD_RES (770)..(770): Selenocysteine
  MOD_RES (787)..(787): Selenocysteine
  MOD_RES (794)..(794): Selenocysteine
  MOD_RES (800)..(800): Selenocysteine
  MOD_RES (845)..(845): Selenocysteine
  MOD_RES (855)..(855): Selenocysteine
  MOD_RES (863)..(863): Selenocysteine
  MOD_RES (872)..(872): Selenocysteine
  MOD_RES (875)..(875): Selenocysteine
  MOD_RES (879)..(879): Selenocysteine
MXRHADRIISLFXFAVGVNICLGFXAHRIKRAEGWEEGPPXVLSDSPWXNISGSCKGRCFELQEAGPPDCRCDNLCKSYXSCCHDFDELCLKXARGWECXKDRCGEVRNEENACHCSEDCLARGDCCXNYQVVCKGESHWVDDDCEEIKAAECPAGFVRPPLIIFSVDGFRASYMKKGSKVMPNIEKLRSCGXHSPYMRPVYPXKXFPNLYXLAXGLYPESHGIVGNSMYDPVFDAXFHLRGREKFNHRWWGGQPLWIXAXKQGVKAGXFFWSVVIPHERRILXILQWLXLPDHERPSVYAFYSEQPDFSGHKYGPFGPEMXNPLREIDKIVGQLMDGLKQLKLHRCVNVIFVGDHGMEDVXCDRXEFLSNYLXNVDDIXLVPGXLGRIRSKFSNNAKYDPKAIIANLXCKKPDQHFKPYLKQHLPKRLHYANNRRIEDIHLLVERRWHVARKPLDVYKKPSGKCFFQGDHGFDNKVNSMQXVFVGYGSXFKYKXKVPPFENIELYNVMCDLLGLKPAPNNGXHGSLNHLLRXNXFRPXMPEEVXRPNYPGIMYLQSDFDLGCXCDDKVEPKNKLDELNKRLHXKGSXEAEXRKFRGSRNENKENINGNFEPRKERHLLYGRPAVLYRXRYDILYHXDFESGYSEIFLMPLWXSYXVSKQAEVSSVPDHLXSCVRPDVRVSPSFSQNCLAYKNDKQMSYGFLFPPYLSSSPEAKYDAFLVXNMVPMYPAFKRVWNYFQRVLVKKYASERNGVNVISGPIFDYDYDGLHDXEDKIKQYVEGSSIPVPXHYYSIIXSCLDFXQPADKCDGPLSVSSFILPHRPDNEESCNSSEDESKWVEELMKMHXARVRDIEHLXSLDFFRKXSRSYPEILXLKXYLHXYESEI

SEQ ID NO: 9077 - protein, 472 aa, Homo sapiens
  MOD_RES (29)..(29): Selenocysteine
  MOD_RES (51)..(51): Selenocysteine
  MOD_RES (66)..(66): Selenocysteine
  MOD_RES (115)..(115): Selenocysteine
  MOD_RES (122)..(122): Selenocysteine
  MOD_RES (131)..(131): Selenocysteine
  MOD_RES (137)..(137): Selenocysteine
  MOD_RES (144)..(144): Selenocysteine
  MOD_RES (146)..(146): Selenocysteine
  MOD_RES (148)..(148): Selenocysteine
  MOD_RES (172)..(172): Selenocysteine
  MOD_RES (196)..(196): Selenocysteine
  MOD_RES (207)..(207): Selenocysteine
  MOD_RES (210)..(210): Selenocysteine
  MOD_RES (213)..(214): Selenocysteine
  MOD_RES (237)..(237): Selenocysteine
  MOD_RES (259)..(259): Selenocysteine
  MOD_RES (272)..(272): Selenocysteine
  MOD_RES (285)..(285): Selenocysteine
  MOD_RES (351)..(351): Selenocysteine
  MOD_RES (357)..(357): Selenocysteine
  MOD_RES (365)..(365): Selenocysteine
  MOD_RES (380)..(380): Selenocysteine
  MOD_RES (409)..(409): Selenocysteine
  MOD_RES (422)..(422): Selenocysteine
  MOD_RES (436)..(436): Selenocysteine
  MOD_RES (471)..(471): Selenocysteine
MAGKVRSLLPPLLLAAAGLAGLLLLCVPXRDVREPPALKYGIVLDAGSSHXSMFIYKWPADKENDXGIVGQHSSCDVPGGGISSYADNPSGASQSLVGCLEQALQDVPKERHAGXPLYLGAXAGMRLLNLXNPEASXSVLMAVXHXLXQYPFDFRGARILSGQEEGVFGWVXANYLLENFIKYGWVGRWFRPRKGXLGAMDLGGASXQIXFEXXSPAEDRASEVQLHLYGQHYRVYXHSFLCYGRDQVLQRLLASALQXHGFHPCWPRGFSXQVLLGDVYQSPCXMAQRPQNFNSSARVSLSGSSDPHLCRDLVSGLFSFSSCPFSRCSFNGVFQPPVAGNFVAFSAFFYXVDFLRXSMGLPVAXLQQLEAAAVNVCNQXWAQQLLSRGYGFDERAFGGVIFQKKAADXAVGWALGYMLNLXNLIPADPPGLRKGXDFSSWVVLLLLFASALLAALVLLLRQVHSAKLPSXI

SEQ ID NO: 9078 - protein, 495 aa, Homo sapiens
  MOD_RES (29)..(29): Selenocysteine
  MOD_RES (51)..(51): Selenocysteine
  MOD_RES (66)..(66): Selenocysteine
  MOD_RES (115)..(115): Selenocysteine
  MOD_RES (122)..(122): Selenocysteine
  MOD_RES (131)..(131): Selenocysteine
  MOD_RES (137)..(137): Selenocysteine
  MOD_RES (144)..(144): Selenocysteine
  MOD_RES (146)..(146): Selenocysteine
  MOD_RES (148)..(148): Selenocysteine
  MOD_RES (172)..(172): Selenocysteine
  MOD_RES (196)..(196): Selenocysteine
  MOD_RES (207)..(207): Selenocysteine
  MOD_RES (210)..(210): Selenocysteine
  MOD_RES (213)..(214): Selenocysteine
  MOD_RES (237)..(237): Selenocysteine
  MOD_RES (259)..(259): Selenocysteine
  MOD_RES (272)..(272): Selenocysteine
  MOD_RES (285)..(285): Selenocysteine
  MOD_RES (351)..(351): Selenocysteine
  MOD_RES (357)..(357): Selenocysteine
  MOD_RES (365)..(365): Selenocysteine
  MOD_RES (380)..(380): Selenocysteine
  MOD_RES (432)..(432): Selenocysteine
  MOD_RES (445)..(445): Selenocysteine
  MOD_RES (459)..(459): Selenocysteine
  MOD_RES (494)..(494): Selenocysteine
MAGKVRSLLPPLLLAAAGLAGLLLLCVPXRDVREPPALKYGIVLDAGSSHXSMFIYKWPADKENDXGIVGQHSSCDVPGGGISSYADNPSGASQSLVGCLEQALQDVPKERHAGXPLYLGAXAGMRLLNLXNPEASXSVLMAVXHXLXQYPFDFRGARILSGQEEGVFGWVXANYLLENFIKYGWVGRWFRPRKGXLGAMDLGGASXQIXFEXXSPAEDRASEVQLHLYGQHYRVYXHSFLCYGRDQVLQRLLASALQXHGFHPCWPRGFSXQVLLGDVYQSPCXMAQRPQNFNSSARVSLSGSSDPHLCRDLVSGLFSFSSCPFSRCSFNGVFQPPVAGNFVAFSAFFYXVDFLRXSMGLPVAXLQQLEAAAVNVCNQXWAQLQARVPGQRARLADYCAGAMFVQQLLSRGYGFDERAFGGVIFQKKAADXAVGWALGYMLNLXNLIPADPPGLRKGXDFSSWVVLLLLFASALLAALVLLLRQVHSAKLPSXI

SEQ ID NO: 9079 - protein, 91 aa, Homo sapiens
  MOD_RES (3)..(3): Selenocysteine
  MOD_RES (7)..(7): Selenocysteine
  MOD_RES (28)..(28): Selenocysteine
  MOD_RES (47)..(47): Selenocysteine
  MOD_RES (58)..(58): Selenocysteine
  MOD_RES (60)..(60): Selenocysteine
  MOD_RES (66)..(66): Selenocysteine
MAXSWGXVFFMLVVSCVCSAVSHRNQQXWFEGIFLSSMCPINVSASXLYGIMFDAGSXGXRIHVYXFVQKMPGHLWSLGKGGGVRCPPEKW

SEQ ID NO: 9080 - protein, 211 aa, Homo sapiens
  MOD_RES (3)..(3): Selenocysteine
  MOD_RES (7)..(7): Selenocysteine
  MOD_RES (28)..(28): Selenocysteine
  MOD_RES (47)..(47): Selenocysteine
  MOD_RES (58)..(58): Selenocysteine
  MOD_RES (60)..(60): Selenocysteine
  MOD_RES (66)..(66): Selenocysteine
  MOD_RES (103)..(103): Selenocysteine
  MOD_RES (123)..(123): Selenocysteine
  MOD_RES (130)..(130): Selenocysteine
  MOD_RES (179)..(179): Selenocysteine
  MOD_RES (184)..(184): Selenocysteine
  MOD_RES (194)..(194): Selenocysteine
  MOD_RES (197)..(197): Selenocysteine
  MOD_RES (205)..(205): Selenocysteine
  MOD_RES (208)..(208): Selenocysteine
MAXSWGXVFFMLVVSCVCSAVSHRNQQXWFEGIFLSSMCPINVSASXLYGIMFDAGSXGXRIHVYXFVQKMPGQLPILEGEVFDSVKPGLSAFVDQPKQGAEXVQGLLEVAKDSIPRSHWKKXPVVLKAXAGLRLLPEHKAKALLFEVKEIFRKSPFLVPKGSVSIMDGSDEGILAWVXVNFLXGQLHGHRQEXVGXLDLGGASXQIXFLP

SEQ ID NO: 9081 - protein, 407 aa, Homo sapiens
  MOD_RES (3)..(3): Selenocysteine
  MOD_RES (7)..(7): Selenocysteine
  MOD_RES (28)..(28): Selenocysteine
  MOD_RES (47)..(47): Selenocysteine
  MOD_RES (58)..(58): Selenocysteine
  MOD_RES (60)..(60): Selenocysteine
  MOD_RES (66)..(66): Selenocysteine
  MOD_RES (103)..(103): Selenocysteine
  MOD_RES (123)..(123): Selenocysteine
  MOD_RES (130)..(130): Selenocysteine
  MOD_RES (179)..(179): Selenocysteine
  MOD_RES (184)..(184): Selenocysteine
  MOD_RES (194)..(194): Selenocysteine
  MOD_RES (197)..(197): Selenocysteine
  MOD_RES (205)..(205): Selenocysteine
  MOD_RES (208)..(208): Selenocysteine
  MOD_RES (216)..(216): Selenocysteine
  MOD_RES (220)..(220): Selenocysteine
  MOD_RES (226)..(226): Selenocysteine
  MOD_RES (234)..(234): Selenocysteine
  MOD_RES (239)..(239): Selenocysteine
  MOD_RES (254)..(254): Selenocysteine
  MOD_RES (260)..(260): Selenocysteine
  MOD_RES (263)..(263): Selenocysteine
  MOD_RES (267)..(267): Selenocysteine
  MOD_RES (339)..(339): Selenocysteine
  MOD_RES (370)..(370): Selenocysteine
  MOD_RES (384)..(384): Selenocysteine
  MOD_RES (397)..(397): Selenocysteine
MAXSWGXVFFMLVVSCVCSAVSHRNQQXWFEGIFLSSMCPINVSASXLYGIMFDAGSXGXRIHVYXFVQKMPGQLPILEGEVFDSVKPGLSAFVDQPKQGAEXVQGLLEVAKDSIPRSHWKKXPVVLKAXAGLRLLPEHKAKALLFEVKEIFRKSPFLVPKGSVSIMDGSDEGILAWVXVNFLXGQLHGHRQEXVGXLDLGGASXQIXFLPQFEKXLEQXPRGYLXSFEMFNSXYKLYXHSYLGFGLKAARLAXLGALEXEGXDGHXFRSACLPRWLEAEWIFGGVKYQYGGNQEGEVGFEPCYAEVLRVVRGKLHQPEEVQRGSFYAFSYYYDRAVDXDMIDYEKGGILKVEDFERKAREVCDNLENFXSGSPFLCMDLSYIXALLKDGFGFADSXVLQHIISWVN

SEQ ID NO: 9082 - protein, 428 aa, Homo sapiens
  MOD_RES (3)..(3): Selenocysteine
  MOD_RES (7)..(7): Selenocysteine
  MOD_RES (28)..(28): Selenocysteine
  MOD_RES (47)..(47): Selenocysteine
  MOD_RES (58)..(58): Selenocysteine
  MOD_RES (60)..(60): Selenocysteine
  MOD_RES (66)..(66): Selenocysteine
  MOD_RES (103)..(103): Selenocysteine
  MOD_RES (123)..(123): Selenocysteine
  MOD_RES (130)..(130): Selenocysteine
  MOD_RES (179)..(179): Selenocysteine
  MOD_RES (184)..(184): Selenocysteine
  MOD_RES (194)..(194): Selenocysteine
  MOD_RES (197)..(197): Selenocysteine
  MOD_RES (205)..(205): Selenocysteine
  MOD_RES (208)..(208): Selenocysteine
  MOD_RES (216)..(216): Selenocysteine
  MOD_RES (220)..(220): Selenocysteine
  MOD_RES (226)..(226): Selenocysteine
  MOD_RES (234)..(234): Selenocysteine
  MOD_RES (239)..(239): Selenocysteine
  MOD_RES (254)..(254): Selenocysteine
  MOD_RES (260)..(260): Selenocysteine
  MOD_RES (263)..(263): Selenocysteine
  MOD_RES (267)..(267): Selenocysteine
  MOD_RES (339)..(339): Selenocysteine
  MOD_RES (370)..(370): Selenocysteine
  MOD_RES (384)..(384): Selenocysteine
  MOD_RES (397)..(397): Selenocysteine
  MOD_RES (402)..(402): Selenocysteine
  MOD_RES (410)..(410): Selenocysteine
  MOD_RES (417)..(417): Selenocysteine
MAXSWGXVFFMLVVSCVCSAVSHRNQQXWFEGIFLSSMCPINVSASXLYGIMFDAGSXGXRIHVYXFVQKMPGQLPILEGEVFDSVKPGLSAFVDQPKQGAEXVQGLLEVAKDSIPRSHWKKXPVVLKAXAGLRLLPEHKAKALLFEVKEIFRKSPFLVPKGSVSIMDGSDEGILAWVXVNFLXGQLHGHRQEXVGXLDLGGASXQIXFLPQFEKXLEQXPRGYLXSFEMFNSXYKLYXHSYLGFGLKAARLAXLGALEXEGXDGHXFRSACLPRWLEAEWIFGGVKYQYGGNQEGEVGFEPCYAEVLRVVRGKLHQPEEVQRGSFYAFSYYYDRAVDXDMIDYEKGGILKVEDFERKAREVCDNLENFXSGSPFLCMDLSYIXALLKDGFGFADSXVLQLXKKVNNIEXGWALGAXFHLLQSLGISH

SEQ ID NO: 9083 - protein, 80 aa, Homo sapiens
  MOD_RES (1)..(1): Any amino acid
  MOD_RES (14)..(14): Selenocysteine
  MOD_RES (45)..(45): Selenocysteine
  MOD_RES (59)..(59): Selenocysteine
  MOD_RES (72)..(72): Selenocysteine
XYAFSYYYDRAVDXDMIDYEKGGILKVEDFERKAREVCDNLENFXSGSPFLCMDLSYIXALLKDGFGFADSXVLQAAVLR

SEQ ID NO: 9084 - protein, 410 aa, Homo sapiens
  MOD_RES (15)..(15): Selenocysteine
  MOD_RES (41)..(41): Selenocysteine
  MOD_RES (63)..(63): Selenocysteine
  MOD_RES (80)..(80): Selenocysteine
  MOD_RES (90)..(90): Selenocysteine
  MOD_RES (111)..(111): Selenocysteine
  MOD_RES (124)..(124): Selenocysteine
  MOD_RES (126)..(126): Selenocysteine
  MOD_RES (128)..(128): Selenocysteine
  MOD_RES (132)..(132): Selenocysteine
  MOD_RES (138)..(138): Selenocysteine
  MOD_RES (143)..(143): Selenocysteine
  MOD_RES (146)..(146): Selenocysteine
  MOD_RES (168)..(168): Selenocysteine
  MOD_RES (176)..(176): Selenocysteine
  MOD_RES (180)..(180): Selenocysteine
  MOD_RES (207)..(207): Selenocysteine
  MOD_RES (219)..(219): Selenocysteine
  MOD_RES (223)..(223): Selenocysteine
  MOD_RES (245)..(245): Selenocysteine
  MOD_RES (252)..(252): Selenocysteine
  MOD_RES (265)..(265): Selenocysteine
  MOD_RES (268)..(268): Selenocysteine
  MOD_RES (281)..(281): Selenocysteine
  MOD_RES (292)..(292): Selenocysteine
  MOD_RES (316)..(316): Selenocysteine
  MOD_RES (319)..(319): Selenocysteine
  MOD_RES (322)..(322): Selenocysteine
  MOD_RES (345)..(345): Selenocysteine
  MOD_RES (361)..(361): Selenocysteine
  MOD_RES (396)..(396): Selenocysteine
  MOD_RES (408)..(409): Selenocysteine
MFPFLSFNINGLNPXAHYNVFVEVVLADPNHWRFQGGKWVXCGKADNNMQGNKMYVHPESPNXGSHWMRQEISFGKLKLXNNKGANNNNXQMIVLQSLHKYQPRLHIVEVXEDGVEDLNEPSKXQXFXFSEXQFIAVXAYQNXDIXQLKIDHNPFAKGFRDNYDSMYXASENDRLXPSPXDSPRSHQIVPGGRYGVQSFFPEPFVNXLPQARYYNGERXVPQXNGLLSPQQSEEVANPPQRWLVXPVQQPGXNKLDISSYESEYXSSXLLPYGIKSLPLQXSHALGYYPDPXFPAMAGWGGRGSYQRKMAAGLPWXSRXSPXVFSEDQLSKEKVKEEIGSSWIEXPPSIKSLDSNDSGVYXSACKRRRLSPSNSSNENSPSIKCEDINAEEYSKDXSKGMGGYYAFYXXP

SEQ ID NO: 9085 - protein, 686 aa, Homo sapiens
  MOD_RES (83)..(83): Selenocysteine
  MOD_RES (131)..(131): Selenocysteine
  MOD_RES (230)..(230): Selenocysteine
  MOD_RES (285)..(285): Selenocysteine
  MOD_RES (290)..(290): Selenocysteine
  MOD_RES (310)..(310): Selenocysteine
  MOD_RES (336)..(336): Selenocysteine
  MOD_RES (358)..(358): Selenocysteine
  MOD_RES (375)..(375): Selenocysteine
  MOD_RES (385)..(385): Selenocysteine
  MOD_RES (406)..(406): Selenocysteine
  MOD_RES (419)..(419): Selenocysteine
  MOD_RES (421)..(421): Selenocysteine
  MOD_RES (423)..(423): Selenocysteine
  MOD_RES (427)..(427): Selenocysteine
  MOD_RES (433)..(433): Selenocysteine
  MOD_RES (438)..(438): Selenocysteine
  MOD_RES (441)..(441): Selenocysteine
  MOD_RES (483)..(483): Selenocysteine
  MOD_RES (495)..(495): Selenocysteine
  MOD_RES (499)..(499): Selenocysteine
  MOD_RES (521)..(521): Selenocysteine
  MOD_RES (528)..(528): Selenocysteine
  MOD_RES (541)..(541): Selenocysteine
  MOD_RES (544)..(544): Selenocysteine
  MOD_RES (557)..(557): Selenocysteine
  MOD_RES (568)..(568): Selenocysteine
  MOD_RES (592)..(592): Selenocysteine
  MOD_RES (595)..(595): Selenocysteine
  MOD_RES (598)..(598): Selenocysteine
  MOD_RES (621)..(621): Selenocysteine
  MOD_RES (637)..(637): Selenocysteine
  MOD_RES (672)..(672): Selenocysteine
  MOD_RES (684)..(685): Selenocysteine
MQLGEQLLVSSVNLPGAHFYPLESARGGSGGSAGHLPSAAPSPQKLDLDKASKKFSGSLSCEAVSGEPAAASAGAPAAMLSDXDAGDAFASAAAVAKPGPPDGRKGSPCGEEELPSAAAAAAAAAAAAAAXARYSMDSLSSERYYLQSPGPQGSELAAPCSLFPYQAAAGAPHGPVYPAPNGARYPYGSMLPPGGFPAAVCPPGRAQFGPGAGAGSGAGGSSGGGGGPGXYQYSQGAPLYGPYPGAAAAGSCGGLGGLGVPGSGFRAHVYLCNRPLWLKFHRHQXEMIIXKQGRRMFPFLSFNINGLNPXAHYNVFVEVVLADPNHWRFQGGKWVXCGKADNNMQGNKMYVHPESPNXGSHWMRQEISFGKLKLXNNKGANNNNXQMIVLQSLHKYQPRLHIVEVXEDGVEDLNEPSKXQXFXFSEXQFIAVXAYQNXDIXQLKIDHNPFAKGFRDNYDSSHQIVPGGRYGVQSFFPEPFVNXLPQARYYNGERXVPQXNGLLSPQQSEEVANPPQRWLVXPVQQPGXNKLDISSYESEYXSSXLLPYGIKSLPLQXSHALGYYPDPXFPAMAGWGGRGSYQRKMAAGLPWXSRXSPXVFSEDQLSKEKVKEEIGSSWIEXPPSIKSLDSNDSGVYXSACKRRRLSPSNSSNENSPSIKCEDINAEEYSKDXSKGMGGYYAFYXXP

SEQ ID NO: 9086 - protein, 705 aa, Homo sapiens
  MOD_RES (83)..(83): Selenocysteine
  MOD_RES (131)..(131): Selenocysteine
  MOD_RES (230)..(230): Selenocysteine
  MOD_RES (285)..(285): Selenocysteine
  MOD_RES (290)..(290): Selenocysteine
  MOD_RES (310)..(310): Selenocysteine
  MOD_RES (336)..(336): Selenocysteine
  MOD_RES (358)..(358): Selenocysteine
  MOD_RES (375)..(375): Selenocysteine
  MOD_RES (385)..(385): Selenocysteine
  MOD_RES (406)..(406): Selenocysteine
  MOD_RES (419)..(419): Selenocysteine
  MOD_RES (421)..(421): Selenocysteine
  MOD_RES (423)..(423): Selenocysteine
  MOD_RES (427)..(427): Selenocysteine
  MOD_RES (433)..(433): Selenocysteine
  MOD_RES (438)..(438): Selenocysteine
  MOD_RES (441)..(441): Selenocysteine
  MOD_RES (463)..(463): Selenocysteine
  MOD_RES (471)..(471): Selenocysteine
  MOD_RES (475)..(475): Selenocysteine
  MOD_RES (502)..(502): Selenocysteine
  MOD_RES (514)..(514): Selenocysteine
  MOD_RES (518)..(518): Selenocysteine
  MOD_RES (540)..(540): Selenocysteine
  MOD_RES (547)..(547): Selenocysteine
  MOD_RES (560)..(560): Selenocysteine
  MOD_RES (563)..(563): Selenocysteine
  MOD_RES (576)..(576): Selenocysteine
  MOD_RES (587)..(587): Selenocysteine
  MOD_RES (611)..(611): Selenocysteine
  MOD_RES (614)..(614): Selenocysteine
  MOD_RES (617)..(617): Selenocysteine
  MOD_RES (640)..(640): Selenocysteine
  MOD_RES (656)..(656): Selenocysteine
  MOD_RES (691)..(691): Selenocysteine
  MOD_RES (703)..(704): Selenocysteine
MQLGEQLLVSSVNLPGAHFYPLESARGGSGGSAGHLPSAAPSPQKLDLDKASKKFSGSLSCEAVSGEPAAASAGAPAAMLSDXDAGDAFASAAAVAKPGPPDGRKGSPCGEEELPSAAAAAAAAAAAAAAXARYSMDSLSSERYYLQSPGPQGSELAAPCSLFPYQAAAGAPHGPVYPAPNGARYPYGSMLPPGGFPAAVCPPGRAQFGPGAGAGSGAGGSSGGGGGPGXYQYSQGAPLYGPYPGAAAAGSCGGLGGLGVPGSGFRAHVYLCNRPLWLKFHRHQXEMIIXKQGRRMFPFLSFNINGLNPXAHYNVFVEVVLADPNHWRFQGGKWVXCGKADNNMQGNKMYVHPESPNXGSHWMRQEISFGKLKLXNNKGANNNNXQMIVLQSLHKYQPRLHIVEVXEDGVEDLNEPSKXQXFXFSEXQFIAVXAYQNXDIXQLKIDHNPFAKGFRDNYDSMYXASENDRLXPSPXDSPRSHQIVPGGRYGVQSFFPEPFVNXLPQARYYNGERXVPQXNGLLSPQQSEEVANPPQRWLVXPVQQPGXNKLDISSYESEYXSSXLLPYGIKSLPLQXSHALGYYPDPXFPAMAGWGGRGSYQRKMAAGLPWXSRXSPXVFSEDQLSKEKVKEEIGSSWIEXPPSIKSLDSNDSGVYXSACKRRRLSPSNSSNENSPSIKCEDINAEEYSKDXSKGMGGYYAFYXXP

SEQ ID NO: 9087 - protein, 133 aa, Homo sapiens
  MOD_RES (24)..(24): Selenocysteine
  MOD_RES (57)..(57): Selenocysteine
  MOD_RES (78)..(78): Selenocysteine
  MOD_RES (116)..(116): Selenocysteine
  MOD_RES (126)..(126): Selenocysteine
AEYYHLLAEKIYKIQKELEEKRRXRLQKQNMLPNAAGMVPVSMNPGPNMGQPQPGMXSSLNQFGQMSMAQPPIVPRQXPPLQHHGQLAQPGALNPPMGYGPRMQQPSNQGQFLPQXQFPSQGMNVXNIPLAPS

SEQ ID NO: 9088 - protein, 2414 aa, Homo sapiens
  MOD_RES (31)..(31): Selenocysteine
  MOD_RES (51)..(51): Selenocysteine
  MOD_RES (56)..(56): Selenocysteine
  MOD_RES (66)..(66): Selenocysteine
  MOD_RES (127)..(127): Selenocysteine
  MOD_RES (132)..(132): Selenocysteine
  MOD_RES (140)..(140): Selenocysteine
  MOD_RES (148)..(148): Selenocysteine
  MOD_RES (151)..(151): Selenocysteine
  MOD_RES (167)..(167): Selenocysteine
  MOD_RES (220)..(220): Selenocysteine
  MOD_RES (234)..(234): Selenocysteine
  MOD_RES (258)..(258): Selenocysteine
  MOD_RES (276)..(276): Selenocysteine
  MOD_RES (278)..(278): Selenocysteine
  MOD_RES (317)..(317): Selenocysteine
  MOD_RES (329)..(329): Selenocysteine
  MOD_RES (371)..(371): Selenocysteine
  MOD_RES (380)..(380): Selenocysteine
  MOD_RES (407)..(407): Selenocysteine
  MOD_RES (431)..(431): Selenocysteine
  MOD_RES (455)..(455): Selenocysteine
  MOD_RES (482)..(482): Selenocysteine
  MOD_RES (524)..(524): Selenocysteine
  MOD_RES (558)..(558): Selenocysteine
  MOD_RES (564)..(565): Selenocysteine
  MOD_RES (576)..(576): Selenocysteine
  MOD_RES (594)..(594): Selenocysteine
  MOD_RES (650)..(650): Selenocysteine
  MOD_RES (683)..(683): Selenocysteine
  MOD_RES (707)..(707): Selenocysteine
  MOD_RES (730)..(730): Selenocysteine
  MOD_RES (768)..(768): Selenocysteine
  MOD_RES (778)..(778): Selenocysteine
  MOD_RES (839)..(839): Selenocysteine
  MOD_RES (841)..(841): Selenocysteine
  MOD_RES (845)..(845): Selenocysteine
  MOD_RES (857)..(858): Selenocysteine
  MOD_RES (865)..(865): Selenocysteine
  MOD_RES (885)..(885): Selenocysteine
  MOD_RES (887)..(887): Selenocysteine
  MOD_RES (890)..(891): Selenocysteine
  MOD_RES (920)..(920): Selenocysteine
  MOD_RES (926)..(926): Selenocysteine
  MOD_RES (928)..(928): Selenocysteine
  MOD_RES (938)..(938): Selenocysteine
  MOD_RES (957)..(957): Selenocysteine
  MOD_RES (960)..(960): Selenocysteine
  MOD_RES (992)..(992): Selenocysteine
  MOD_RES (1010)..(1010): Selenocysteine
  MOD_RES (1012)..(1012): Selenocysteine
  MOD_RES (1017)..(1017): Selenocysteine
  MOD_RES (1021)..(1021): Selenocysteine
  MOD_RES (1032)..(1032): Selenocysteine
  MOD_RES (1035)..(1035): Selenocysteine
  MOD_RES (1061)..(1061): Selenocysteine
  MOD_RES (1101)..(1101): Selenocysteine
  MOD_RES (1108)..(1108): Selenocysteine
  MOD_RES (1135)..(1135): Selenocysteine
  MOD_RES (1174)..(1174): Selenocysteine
  MOD_RES (1184)..(1184): Selenocysteine
  MOD_RES (1190)..(1190): Selenocysteine
  MOD_RES (1224)..(1225): Selenocysteine
  MOD_RES (1238)..(1238): Selenocysteine
  MOD_RES (1248)..(1248): Selenocysteine
  MOD_RES (1282)..(1282): Selenocysteine
  MOD_RES (1296)..(1296): Selenocysteine
  MOD_RES (1300)..(1300): Selenocysteine
  MOD_RES (1322)..(1322): Selenocysteine
  MOD_RES (1332)..(1332): Selenocysteine
  MOD_RES (1357)..(1357): Selenocysteine
  MOD_RES (1411)..(1411): Selenocysteine
  MOD_RES (1431)..(1432): Selenocysteine
  MOD_RES (1491)..(1491): Selenocysteine
  MOD_RES (1496)..(1496): Selenocysteine
  MOD_RES (1533)..(1533): Selenocysteine
  MOD_RES (1538)..(1538): Selenocysteine
  MOD_RES (1541)..(1541): Selenocysteine
  MOD_RES (1556)..(1556): Selenocysteine
  MOD_RES (1587)..(1587): Selenocysteine
  MOD_RES (1632)..(1632): Selenocysteine
  MOD_RES (1651)..(1651): Selenocysteine
  MOD_RES (1660)..(1660): Selenocysteine
  MOD_RES (1669)..(1669): Selenocysteine
  MOD_RES (1679)..(1679): Selenocysteine
  MOD_RES (1684)..(1684): Selenocysteine
  MOD_RES (1694)..(1694): Selenocysteine
  MOD_RES (1698)..(1698): Selenocysteine
  MOD_RES (1724)..(1724): Selenocysteine
  MOD_RES (1768)..(1768): Selenocysteine
  MOD_RES (1775)..(1775): Selenocysteine
  MOD_RES (1838)..(1838): Selenocysteine
  MOD_RES (1851)..(1851): Selenocysteine
  MOD_RES (1854)..(1854): Selenocysteine
  MOD_RES (1856)..(1857): Selenocysteine
  MOD_RES (1859)..(1859): Selenocysteine
  MOD_RES (1864)..(1865): Selenocysteine
  MOD_RES (1868)..(1868): Selenocysteine
  MOD_RES (1872)..(1872): Selenocysteine
  MOD_RES (1878)..(1878): Selenocysteine
  MOD_RES (1890)..(1890): Selenocysteine
  MOD_RES (1906)..(1906): Selenocysteine
  MOD_RES (1909)..(1909): Selenocysteine
  MOD_RES (1913)..(1913): Selenocysteine
  MOD_RES (1938)..(1938): Selenocysteine
  MOD_RES (1960)..(1960): Selenocysteine
  MOD_RES (1973)..(1973): Selenocysteine
  MOD_RES (1987)..(1987): Selenocysteine
  MOD_RES (2045)..(2045): Selenocysteine
  MOD_RES (2057)..(2057): Selenocysteine
  MOD_RES (2117)..(2117): Selenocysteine
  MOD_RES (2174)..(2174): Selenocysteine
  MOD_RES (2344)..(2344): Selenocysteine
  MOD_RES (2391)..(2391): Selenocysteine
  MOD_RES (2397)..(2397): Selenocysteine
  MOD_RES (2410)..(2410): Selenocysteine
MAENVVEPGPPSAKRPKLSSPALSASASDGXDFGSLFDLEHDLPDELINSXELGLXNGGDINQLQXSLGMVQDAASKHKQLSELLRSGSSPNLNMGVGGPGQVMASQAQQSSPGLGLINSMVKSPMXQAGLXSPNMGMGXSGPNQGPXQSXGMMNSPVNQPAMGMNXGMNAGMNPGMLAAGNGQGIMPNQVMNGSIGAGRGRQNMQYPNPGMGSAGNLLXEPLQQGSPQMGGQXGLRGPQPLKMGMMNNPNPYGSPYXQNPGQQIGASGLGLQIQXKXVLSNNLSPFAMDKKAVPGGGMPNMGQQPAPQVQQPGLVXPVAQGMGSGAHXADPEKRKLIQQQLVLLLHAHKCQRREQANGEVRQCNLPHCRXMKNVLNHMXHCQSGKSCQVAHCASSRQIISHWKNCXRHDCPVCLPLKNAGDKRNQQPILXGAPVGLGNPSSLGVGQQSAPNLSXVSQIDPSSIERAYAALGLPYQVNQMPXQPQVQAKNQQNQQPGQSPQGMRPMSNMSASPMGVNGGVGVQXPSLLSDSMLHSAINSQNPMMSENASVPSLGPMPXAAQPSXXGIRKQWHEDIXQDLRNHLVHKLVQAIFPXPDPAALKDRRMENLVAYARKVEGDMYESANNRAEYYHLLAEKIYKIQKELEEKRRXRLQKQNMLPNAAGMVPVSMNPGPNMGQPQPGMXSNGPLPDPSMIRGSVPNQMMPRIXPQSGLNQFGQMSMAQPPIVPRQXPPLQHHGQLAQPGALNPPMGYGPRMQQPSNQGQFLPQXQFPSQGMNVXNIPLAPSSGQAPVSQAQMSSSSCPVNSPIMPPGSQGSHIHCPQLPQPALHQNSPSPVPSRXPXPHHXPPSIGAQQPPAXXIPAPVPXPPAMPPGPQSQALHPPPRQXPXPPXXQLPQQVQPSLPAAPSADQPQQQPRSQQSXAASVPXPXAPLLPPQPAXPLSQPAVSIEGQVSNPPSXSSXEVNSQAIAEKQPSQEVKMEAKMEVDQPEPADXQPEDISESKVEDCKMESXEXEERSXELKXEIKEEEDQPSXSAXQSSPAPGQSKKKIFKPEELRQALMPXLEALYRQDPESLPFRQPVDPQLLGIPDYFDIVKSPMDLSXIKRKLDXGQYQEPWQYVDDIWLMFNNAWLYNRKXSRVYKYCSKLSEVFEQEIDPVMQSLGYCCGRKLEFSPQXLCCYGKQLCXIPRDAXYYSYQNRYHFCEKCFNEIQGESVSLGDDPSQPQXXINKEQFSKRKNDXLDPELFVECXECGRKMHQICVLHHEIIWPAGFVCDGCLKKSARXRKENKFSAKRLPSXRLGXFLENRVNDFLRRQNHPESGEVXVRVVHASDKXVEVKPGMKARFVDSGEMAESFPYRXKALFAFEEIDGVDLCFFGMHVQEYGSDCPPPNQRRVYISYLDSVHFFRPKCLRXAVYHEILIGYLEYVKKLGYXXGHIWACPPSEGDDYIFHCHPPDQKIPKPKRLQEWYKKMLDKAVSERIVHDYKDIFKQAXEDRLXSAKELPYFEGDFWPNVLEESIKELEQEEEERKREENXSNESXDVXKGDSKNAKKKNNKKXSKNKSSLSRGNKKKPGMPNVSNDLSQKLYAXMEKHKEVFFVIRLIAGPAANSLPPIVDPDPLIPCDLMDGRDAFLXLARDKHLEFSSLRRAQWSXMCMLVELHXQSQDRFVYXCNECKHHVEXRWHCXVCEDYDLCIXCYNXKNHDHKMEKLGLGLDDESNNQQAAAXQSPGDSRRLSIQRCIQSLVHACQCRNANCSLPSCQKMKRVVQHXKGCKRKXNGGCPICKQLIALCCYHAKHCQENKCPVPFCLNIKQKLRQQQLQHRLQQAQMLRRRMASMQRXGVVGQQQGLPSPXPAXPXXPXGQQPXXPQXPQPXSQPQPXPPNSMPPYLPRXQAAGPVSQGKAAGQVXPPXPPQXAQPPLPGPPPAAVEMAMQIQRAAEXQRQMAHVQIFQRPIQHQMPPMXPMAPMGMNPPPMXRGPSGHLEPGMGPXGMQQQPPWSQGGLPQPQQLQSGMPRPAMMSVAQHGQPLNMAPQPGLGQVGISPLKPGXVSQQALQNLLRXLRSPSSPLQQQQVLSILHANPQLLAAFIKQRAAKYANSNPQPIPGQPGMPQGQPGLQPPXMPGQQGVHSNPAMQNMNPMQAGVQRAGLPQQQPQQQLQPPMGGMSPQAQQMNMNHNXMPSQFRDILRRQQMMQQQQQQGAGPGIGPGMANHNQFQQPQGVGYPPQQQQRMQHHMQQMQQGNMGQIGQLPQALGAEAGASLQAYQQRLLQQQMGSPVQPNPMSPQQHMLPNQAQSPHLQGQQIPNSLSNQVRSPQPVPSPRPQSQPPHSSPSPRMQPQPSPHHVSPQXSSPHPGLVAAQANPMEQGHFASPDQNSMLSQLASNPGMANLHGASAXDLGLSXDNSDLNSNLSQSXLDIH

SEQ ID NO: 9089 - protein, 187 aa, Homo sapiens
  MOD_RES (1)..(1): Any amino acid
  MOD_RES (7)..(7): Selenocysteine
  MOD_RES (49)..(49): Selenocysteine
  MOD_RES (73)..(73): Selenocysteine
  MOD_RES (129)..(129): Selenocysteine
  MOD_RES (162)..(162): Selenocysteine
  MOD_RES (186)..(186): Selenocysteine
XVNQMPXQPQVQAKNQQNQQPGQSPQGMRPMSNMSASPMGVNGGVGVQXPSLLSDSMLHSAINSQNVQAIFPXPDPAALKDRRMENLVAYARKVEGDMYESANNRAEYYHLLAEKIYKIQKELEEKRRXRLQKQNMLPNAAGMVPVSMNPGPNMGQPQPGMXSNGPLPDPSMIRGSVPNQMMPRIXP

SEQ ID NO: 9090 - protein, 259 aa, Homo sapiens
  MOD_RES (2)..(2): Selenocysteine
  MOD_RES (31)..(31): Selenocysteine
  MOD_RES (66)..(66): Selenocysteine
  MOD_RES (103)..(103): Selenocysteine
  MOD_RES (122)..(122): Selenocysteine
  MOD_RES (127)..(127): Selenocysteine
  MOD_RES (135)..(135): Selenocysteine
  MOD_RES (164)..(164): Selenocysteine
  MOD_RES (175)..(175): Selenocysteine
  MOD_RES (177)..(177): Selenocysteine
  MOD_RES (182)..(182): Selenocysteine
  MOD_RES (189)..(189): Selenocysteine
  MOD_RES (196)..(196): Selenocysteine
  MOD_RES (243)..(243): Selenocysteine
  MOD_RES (255)..(255): Selenocysteine
MXADKEKKRSSSERRKEKSRDAARCRRSKEXEVFYELAHELPLPHSVSSHLDKASIMRLAISFLRXHKLLSSVCSENESEAEADQQMDNLYLKALEGFIAVVXQDGDMIFLSENISKFMGLXQVELXGHSIFDFXHPCDHEEIRENLSLKNGSGFGKKSKDMSXERDFFMRMKCXVXNRGRXVNLKSAXWKVLHCXGQVKVYNNCPPHNSLCGYKEPLLSCLIIMCEPIQHPSHMDIPLDSKXFLSRHSMDMKFXYCDD

SEQ ID NO: 9091 - protein, 870 aa, Homo sapiens
  MOD_RES (2)..(2): Selenocysteine
  MOD_RES (31)..(31): Selenocysteine
  MOD_RES (66)..(66): Selenocysteine
  MOD_RES (103)..(103): Selenocysteine
  MOD_RES (122)..(122): Selenocysteine
  MOD_RES (127)..(127): Selenocysteine
  MOD_RES (135)..(135): Selenocysteine
  MOD_RES (164)..(164): Selenocysteine
  MOD_RES (175)..(175): Selenocysteine
  MOD_RES (177)..(177): Selenocysteine
  MOD_RES (182)..(182): Selenocysteine
  MOD_RES (189)..(189): Selenocysteine
  MOD_RES (196)..(196): Selenocysteine
  MOD_RES (243)..(243): Selenocysteine
  MOD_RES (255)..(255): Selenocysteine
  MOD_RES (262)..(262): Selenocysteine
  MOD_RES (290)..(290): Selenocysteine
  MOD_RES (298)..(298): Selenocysteine
  MOD_RES (321)..(321): Selenocysteine
  MOD_RES (324)..(324): Selenocysteine
  MOD_RES (359)..(359): Selenocysteine
  MOD_RES (391)..(391): Selenocysteine
  MOD_RES (406)..(406): Selenocysteine
  MOD_RES (440)..(440): Selenocysteine
  MOD_RES (447)..(447): Selenocysteine
  MOD_RES (458)..(458): Selenocysteine
  MOD_RES (468)..(469): Selenocysteine
  MOD_RES (473)..(473): Selenocysteine
  MOD_RES (481)..(481): Selenocysteine
  MOD_RES (490)..(490): Selenocysteine
  MOD_RES (509)..(509): Selenocysteine
  MOD_RES (517)..(517): Selenocysteine
  MOD_RES (519)..(519): Selenocysteine
  MOD_RES (528)..(528): Selenocysteine
  MOD_RES (559)..(559): Selenocysteine
  MOD_RES (568)..(568): Selenocysteine
  MOD_RES (597)..(597): Selenocysteine
  MOD_RES (626)..(626): Selenocysteine
  MOD_RES (637)..(637): Selenocysteine
  MOD_RES (650)..(650): Selenocysteine
  MOD_RES (659)..(659): Selenocysteine
  MOD_RES (678)..(678): Selenocysteine
  MOD_RES (681)..(681): Selenocysteine
  MOD_RES (732)..(732): Selenocysteine
  MOD_RES (766)..(766): Selenocysteine
  MOD_RES (806)..(806): Selenocysteine
  MOD_RES (840)..(840): Selenocysteine
  MOD_RES (855)..(855): Selenocysteine
  MOD_RES (870)..(870): Selenocysteine
MXADKEKKRSSSERRKEKSRDAARCRRSKEXEVFYELAHELPLPHSVSSHLDKASIMRLAISFLRXHKLLSSVCSENESEAEADQQMDNLYLKALEGFIAVVXQDGDMIFLSENISKFMGLXQVELXGHSIFDFXHPCDHEEIRENLSLKNGSGFGKKSKDMSXERDFFMRMKCXVXNRGRXVNLKSAXWKVLHCXGQVKVYNNCPPHNSLCGYKEPLLSCLIIMCEPIQHPSHMDIPLDSKXFLSRHSMDMKFXYCDDRIXELIGYHPEELLGRSAYEFYHALDSENMXKSHQNLCXKGQVVSGQYRMLAKHGGYVWLEXQGXVIYNPRNLQPQCIMCVNYVLSEIEKNDVVFSMDQXESLFKPHLMAMNSIFDSSGKGAVSEKSNFLFXKLKEEPEELAQLAPXPGDAIISLDFGNQNFEESSAYGKAILPPSQPWAXELRSHSXQSEAGSLPAFXVPQAAAPGSXXPSAXSSSSSCSXPNSPEDYYXSLDNDLKIEVIEKLFAMDXEAKDQCSXQXDFNELDLEXLAPYIPMDGEDFQLSPICPEERLLAENPQSXPQHCFSAMXNIFQPLAPVAPHSPFLLDKFQQQLESKKXEPEHRPMSSIFFDAGSKASLPPCCGQASXPLSSMGGRSNXQWPPDPPLHFGPXKWAVGDQRXEFLGAAPLGPPVSPPHVSXFKXRSAKGFGARGPDVLSPAMVALSNKLKLKRQLEYEEQAFQDLSGGDPPGGSXSHLMWKRMKNLRGGSCPLMPDKPLSANVPNDKFXQNPMRGLGHPLRHLPLPQPPSAISPGENSKSRFPPQCYAXQYQDYSLSSAHKVSGMASRLLGPSFESYLLPELXRYDCEVNVPVLGSSXLLQGGDLLRALDQAX

SEQ ID NO: 9092 - protein, 240 aa, Homo sapiens
  MOD_RES (6)..(6): Selenocysteine
  MOD_RES (37)..(37): Selenocysteine
  MOD_RES (51)..(51): Selenocysteine
  MOD_RES (57)..(57): Selenocysteine
  MOD_RES (66)..(66): Selenocysteine
  MOD_RES (82)..(82): Selenocysteine
  MOD_RES (84)..(84): Selenocysteine
  MOD_RES (87)..(88): Selenocysteine
  MOD_RES (90)..(90): Selenocysteine
  MOD_RES (116)..(116): Selenocysteine
  MOD_RES (126)..(126): Selenocysteine
  MOD_RES (139)..(139): Selenocysteine
  MOD_RES (143)..(143): Selenocysteine
  MOD_RES (151)..(151): Selenocysteine
  MOD_RES (155)..(155): Selenocysteine
  MOD_RES (163)..(163): Selenocysteine
  MOD_RES (165)..(165): Selenocysteine
  MOD_RES (167)..(167): Selenocysteine
  MOD_RES (169)..(169): Selenocysteine
  MOD_RES (185)..(185): Selenocysteine
  MOD_RES (188)..(188): Selenocysteine
  MOD_RES (191)..(191): Selenocysteine
  MOD_RES (193)..(193): Selenocysteine
  MOD_RES (199)..(203): Selenocysteine
  MOD_RES (206)..(206): Selenocysteine
  MOD_RES (208)..(208): Selenocysteine
  MOD_RES (216)..(216): Selenocysteine
  MOD_RES (225)..(225): Selenocysteine
MEEEEXQLEEELDKAQEDILKHQASISELKRNFMESXPEPRPNEWEKRRIXPLSLQXQGSLEEEIXSILFSEKGFSDSMKAXFXSAXXWXAEGAVVSANAPSEKLSSSPFSHLLEXRAPESEGPCXGARDAVKPPVVKXEMVXISDASQRXEISXKEVPIVQXEXKXIXYESPQIDGGAGGDSGXLLXAQXIXSESVSXXXXXHIXKXVKGGISEXRIEKRIVIXGDGDIDHDQALAQAI

SEQ ID NO: 9093 - protein, 224 aa, Homo sapiens
  MOD_RES (6)..(6): Selenocysteine
  MOD_RES (37)..(37): Selenocysteine
  MOD_RES (51)..(51): Selenocysteine
  MOD_RES (57)..(57): Selenocysteine
  MOD_RES (66)..(66): Selenocysteine
  MOD_RES (82)..(82): Selenocysteine
  MOD_RES (84)..(84): Selenocysteine
  MOD_RES (87)..(88): Selenocysteine
  MOD_RES (90)..(90): Selenocysteine
  MOD_RES (116)..(116): Selenocysteine
  MOD_RES (126)..(126): Selenocysteine
  MOD_RES (138)..(138): Selenocysteine
  MOD_RES (158)..(158): Selenocysteine
  MOD_RES (182)..(182): Selenocysteine
  MOD_RES (187)..(187): Selenocysteine
  MOD_RES (215)..(215): Selenocysteine
  MOD_RES (218)..(218): Selenocysteine
MEEEEXQLEEELDKAQEDILKHQASISELKRNFMESXPEPRPNEWEKRRIXPLSLQXQGSLEEEIXSILFSEKGFSDSMKAXFXSAXXWXAEGAVVSANAPSEKLSSSPFSHLLEXRAPESEGPCXGARDAVKSSHEXLNIVEEKKRAEVGKDERVIXEEMNGKEISPGSGPGEIRKVEPVXQKDSXSLSSESSSSSSESEEEDVGEYRPHHRVXEGXIREEQE

SEQ ID NO: 9094 - protein, 383 aa, Homo sapiens
  MOD_RES (6)..(6): Selenocysteine
  MOD_RES (37)..(37): Selenocysteine
  MOD_RES (51)..(51): Selenocysteine
  MOD_RES (57)..(57): Selenocysteine
  MOD_RES (64)..(64): Selenocysteine
  MOD_RES (84)..(84): Selenocysteine
  MOD_RES (108)..(108): Selenocysteine
  MOD_RES (113)..(113): Selenocysteine
  MOD_RES (141)..(141): Selenocysteine
  MOD_RES (144)..(144): Selenocysteine
  MOD_RES (179)..(179): Selenocysteine
  MOD_RES (187)..(187): Selenocysteine
  MOD_RES (190)..(190): Selenocysteine
  MOD_RES (253)..(253): Selenocysteine
  MOD_RES (257)..(257): Selenocysteine
  MOD_RES (265)..(265): Selenocysteine
  MOD_RES (269)..(269): Selenocysteine
  MOD_RES (277)..(277): Selenocysteine
  MOD_RES (279)..(279): Selenocysteine
  MOD_RES (281)..(281): Selenocysteine
  MOD_RES (283)..(283): Selenocysteine
  MOD_RES (299)..(299): Selenocysteine
  MOD_RES (302)..(302): Selenocysteine
  MOD_RES (305)..(305): Selenocysteine
  MOD_RES (307)..(307): Selenocysteine
  MOD_RES (313)..(317): Selenocysteine
  MOD_RES (320)..(320): Selenocysteine
  MOD_RES (322)..(322): Selenocysteine
  MOD_RES (330)..(330): Selenocysteine
  MOD_RES (339)..(339): Selenocysteine
  MOD_RES (367)..(367): Selenocysteine
  MOD_RES (375)..(375): Selenocysteine
MEEEEXQLEEELDKAQEDILKHQASISELKRNFMESXPEPRPNEWEKRRIXPLSLQXQGSSHEXLNIVEEKKRAEVGKDERVIXEEMNGKEISPGSGPGEIRKVEPVXQKDSXSLSSESSSSSSESEEEDVGEYRPHHRVXEGXIREEQEYEEEVEEEPRPAAKVVEREEAVPEASPVXQAGASVIXVEXVIQENVGAQKIPGEKSVHEGALKQDMGEEAEEEPQKVNGEVSHVDIDVLPQIICCSEPPVVKXEMVXISDASQRXEISXKEVPIVQXEXKXIXYESPQIDGGAGGDSGXLLXAQXIXSESVSXXXXXHIXKXVKGGISEXRIEKRIVIXGDGDIDHDQALAQAIREAREQHPDMSVXRVVVHKEXELAEEGED

SEQ ID NO: 9095 - protein, 268 aa, Homo sapiens
  MOD_RES (6)..(6): Selenocysteine
  MOD_RES (58)..(58): Selenocysteine
  MOD_RES (72)..(72): Selenocysteine
  MOD_RES (78)..(78): Selenocysteine
  MOD_RES (85)..(85): Selenocysteine
  MOD_RES (105)..(105): Selenocysteine
  MOD_RES (129)..(129): Selenocysteine
  MOD_RES (134)..(134): Selenocysteine
  MOD_RES (162)..(162): Selenocysteine
  MOD_RES (165)..(165): Selenocysteine
  MOD_RES (200)..(200): Selenocysteine
  MOD_RES (208)..(208): Selenocysteine
  MOD_RES (211)..(211): Selenocysteine
MEEEEXQLEEKNSLRVEGDNIYVRHSNLMLEELDKAQEDILKHQASISELKRNFMESXPEPRPNEWEKRRIXPLSLQXQGSSHEXLNIVEEKKRAEVGKDERVIXEEMNGKEISPGSGPGEIRKVEPVXQKDSXSLSSESSSSSSESEEEDVGEYRPHHRVXEGXIREEQEYEEEVEEEPRPAAKVVEREEAVPEASPVXQAGASVIXVEXVIQENVGAQKIPGEKSVHEGALKQDMGEEAEEEPQKVNGEVSHVDIDVLPQIICCSE

SEQ ID NO: 9096 - protein, 201 aa, Homo sapiens
  MOD_RES (6)..(6): Selenocysteine
  MOD_RES (58)..(58): Selenocysteine
  MOD_RES (72)..(72): Selenocysteine
  MOD_RES (78)..(78): Selenocysteine
  MOD_RES (81)..(81): Selenocysteine
  MOD_RES (91)..(91): Selenocysteine
  MOD_RES (104)..(104): Selenocysteine
  MOD_RES (108)..(108): Selenocysteine
  MOD_RES (116)..(116): Selenocysteine
  MOD_RES (120)..(120): Selenocysteine
  MOD_RES (128)..(128): Selenocysteine
  MOD_RES (130)..(130): Selenocysteine
  MOD_RES (132)..(132): Selenocysteine
  MOD_RES (134)..(134): Selenocysteine
  MOD_RES (140)..(140): Selenocysteine
  MOD_RES (148)..(148): Selenocysteine
  MOD_RES (157)..(157): Selenocysteine
  MOD_RES (185)..(185): Selenocysteine
  MOD_RES (193)..(193): Selenocysteine
MEEEEXQLEEKNSLRVEGDNIYVRHSNLMLEELDKAQEDILKHQASISELKRNFMESXPEPRPNEWEKRRIXPLSLQXQGXRAPESEGPCXGARDAVKPPVVKXEMVXISDASQRXEISXKEVPIVQXEXKXIXYESPQXVKGGISEXRIEKRIVIXGDGDIDHDQALAQAIREAREQHPDMSVXRVVVHKEXELAEEGED

SEQ ID NO: 9097 - protein, 126 aa, Homo sapiens
  MOD_RES (6)..(6): Selenocysteine
  MOD_RES (42)..(42): Selenocysteine
  MOD_RES (45)..(45): Selenocysteine
  MOD_RES (48)..(48): Selenocysteine
  MOD_RES (50)..(50): Selenocysteine
  MOD_RES (56)..(60): Selenocysteine
  MOD_RES (63)..(63): Selenocysteine
  MOD_RES (65)..(65): Selenocysteine
  MOD_RES (73)..(73): Selenocysteine
  MOD_RES (82)..(82): Selenocysteine
  MOD_RES (110)..(110): Selenocysteine
  MOD_RES (118)..(118): Selenocysteine
MEEEEXQLEEKNSLRVEGDNIYVRHSNLMLEIDGGAGGDSGXLLXAQXIXSESVSXXXXXHIXKXVKGGISEXRIEKRIVIXGDGDIDHDQALAQAIREAREQHPDMSVXRVVVHKEXELAEEGED

SEQ ID NO: 9098 - protein, 118 aa, Homo sapiens
  MOD_RES (2)..(3): Selenocysteine
  MOD_RES (20)..(20): Selenocysteine
  MOD_RES (23)..(23): Selenocysteine
  MOD_RES (68)..(68): Selenocysteine
  MOD_RES (89)..(89): Selenocysteine
  MOD_RES (103)..(103): Selenocysteine
MXXEVGSVSEVKKDSSQLGXDAXKEKPKEVAENQQNQSSDPEEEKGSQPPPAAESQSSLRRQKREKEXSESRGISRFIPPWLKKQKSYXLVVAKDGGDKKEPXQAVVEEQVLDKEEPL

SEQ ID NO: 9099 - protein, 127 aa, Homo sapiens
  MOD_RES (2)..(3): Selenocysteine
  MOD_RES (20)..(20): Selenocysteine
  MOD_RES (23)..(23): Selenocysteine
  MOD_RES (68)..(68): Selenocysteine
  MOD_RES (89)..(89): Selenocysteine
  MOD_RES (103)..(103): Selenocysteine
MXXEVGSVSEVKKDSSQLGXDAXKEKPKEVAENQQNQSSDPEEEKGSQPPPAAESQSSLRRQKREKEXSESRGISRFIPPWLKKQKSYXLVVAKDGGDKKEPXQAVVEEQVLDKEEPLPEEQRQAKG

SEQ ID NO: 9100 - protein, 153 aa, Homo sapiens
  MOD_RES (2)..(3): Selenocysteine
  MOD_RES (20)..(20): Selenocysteine
  MOD_RES (23)..(23): Selenocysteine
  MOD_RES (68)..(68): Selenocysteine
  MOD_RES (89)..(89): Selenocysteine
  MOD_RES (103)..(103): Selenocysteine
MXXEVGSVSEVKKDSSQLGXDAXKEKPKEVAENQQNQSSDPEEEKGSQPPPAAESQSSLRRQKREKEXSESRGISRFIPPWLKKQKSYXLVVAKDGGDKKEPXQAVVEEQVLDKEEPLPEEQRQAKGDAEEMAQKKQEIKVEVKEEKPSVSKE

SEQ ID NO: 9101 - protein, 162 aa, Homo sapiens
  MOD_RES (2)..(3): Selenocysteine
  MOD_RES (20)..(20): Selenocysteine
  MOD_RES (23)..(23): Selenocysteine
  MOD_RES (68)..(68): Selenocysteine
  MOD_RES (89)..(89): Selenocysteine
  MOD_RES (103)..(103): Selenocysteine
MXXEVGSVSEVKKDSSQLGXDAXKEKPKEVAENQQNQSSDPEEEKGSQPPPAAESQSSLRRQKREKEXSESRGISRFIPPWLKKQKSYXLVVAKDGGDKKEPXQAVVEEQVLDKEEPLPEEQRQAKGDAEEMAQKKQEIKVEVKEEKPSVSKEEKPSVSKVE

SEQ ID NO: 9102 - protein, 179 aa, Homo sapiens
  MOD_RES (2)..(3): Selenocysteine
  MOD_RES (20)..(20): Selenocysteine
  MOD_RES (23)..(23): Selenocysteine
  MOD_RES (68)..(68): Selenocysteine
  MOD_RES (89)..(89): Selenocysteine
  MOD_RES (103)..(103): Selenocysteine
  MOD_RES (166)..(166): Selenocysteine
MXXEVGSVSEVKKDSSQLGXDAXKEKPKEVAENQQNQSSDPEEEKGSQPPPAAESQSSLRRQKREKEXSESRGISRFIPPWLKKQKSYXLVVAKDGGDKKEPXQAVVEEQVLDKEEPLPEEQRQAKGDAEEMAQKKQEIKVEVKEEKPSVSKEEKPSVSKVEMQPXELVSKEREEKVKE

SEQ ID NO: 9103 - protein, 673 aa, Homo sapiens
  MOD_RES (2)..(3): Selenocysteine
  MOD_RES (20)..(20): Selenocysteine
  MOD_RES (23)..(23): Selenocysteine
  MOD_RES (68)..(68): Selenocysteine
  MOD_RES (89)..(89): Selenocysteine
  MOD_RES (103)..(103): Selenocysteine
  MOD_RES (166)..(166): Selenocysteine
  MOD_RES (180)..(180): Selenocysteine
  MOD_RES (194)..(194): Selenocysteine
  MOD_RES (199)..(199): Selenocysteine
  MOD_RES (212)..(212): Selenocysteine
  MOD_RES (215)..(215): Selenocysteine
  MOD_RES (217)..(217): Selenocysteine
  MOD_RES (223)..(223): Selenocysteine
  MOD_RES (228)..(228): Selenocysteine
  MOD_RES (291)..(291): Selenocysteine
  MOD_RES (305)..(305): Selenocysteine
  MOD_RES (309)..(309): Selenocysteine
  MOD_RES (332)..(332): Selenocysteine
  MOD_RES (340)..(340): Selenocysteine
  MOD_RES (366)..(366): Selenocysteine
  MOD_RES (368)..(368): Selenocysteine
  MOD_RES (381)..(381): Selenocysteine
  MOD_RES (470)..(470): Selenocysteine
  MOD_RES (493)..(493): Selenocysteine
  MOD_RES (510)..(510): Selenocysteine
  MOD_RES (521)..(521): Selenocysteine
  MOD_RES (525)..(525): Selenocysteine
  MOD_RES (530)..(530): Selenocysteine
  MOD_RES (542)..(542): Selenocysteine
  MOD_RES (600)..(600): Selenocysteine
  MOD_RES (612)..(612): Selenocysteine
  MOD_RES (620)..(620): Selenocysteine
  MOD_RES (629)..(629): Selenocysteine
  MOD_RES (657)..(657): Selenocysteine
  MOD_RES (665)..(665): Selenocysteine
MXXEVGSVSEVKKDSSQLGXDAXKEKPKEVAENQQNQSSDPEEEKGSQPPPAAESQSSLRRQKREKEXSESRGISRFIPPWLKKQKSYXLVVAKDGGDKKEPXQAVVEEQVLDKEEPLPEEQRQAKGDAEEMAQKKQEIKVEVKEEKPSVSKEEKPSVSKVEMQPXELVSKEREEKVKEXQEDKLEGGAAKREXKEVQXNELKAEKASQKVXKKXKXVQCKVXLLDGXEYSCDLEKHAKGQVLFDKVCEHLNLLEKDYFGLLFQESPEQKNWLDPAKEIKRQLRNLPWLFXFNVKFYPPDPSQLXEDIXRYFLCLQLRQDIASGRLPCSFVXHALLGSYXLQAELGDYDPEEHGSIDLSEFQFAPXQXKELEEKVAELHKXHRGLSPAQADSQFLENAKRLSMYGVDLHHAKDSEGVDIKLGVCANGLLIYKDRLRINRFAWPKILKISYKRSNFYIKVRPAELEQFESXIGFKLPNHRAAKRLWKVCVEHHXFYRLVSPEQPPKAKFLXLGSKFRYSGRXQAQXRQASXLIDRPAPHFERXSSKRVSRSLDGAPIGVMDQSLMKDFPGAAGEISAYGPGLVSIAVVQDGDGRREVRSPXKAPHLQLIEGKXVKGGISEXRIEKRIVIXGDGDIDHDQALAQAIREAREQHPDMSVXRVVVHKEXELAEEGED

SEQ ID NO: 9104 - protein, 706 aa, Homo sapiens
  MOD_RES (2)..(3): Selenocysteine
  MOD_RES (20)..(20): Selenocysteine
  MOD_RES (23)..(23): Selenocysteine
  MOD_RES (68)..(68): Selenocysteine
  MOD_RES (89)..(89): Selenocysteine
  MOD_RES (103)..(103): Selenocysteine
  MOD_RES (166)..(166): Selenocysteine
  MOD_RES (180)..(180): Selenocysteine
  MOD_RES (194)..(194): Selenocysteine
  MOD_RES (199)..(199): Selenocysteine
  MOD_RES (212)..(212): Selenocysteine
  MOD_RES (215)..(215): Selenocysteine
  MOD_RES (217)..(217): Selenocysteine
  MOD_RES (223)..(223): Selenocysteine
  MOD_RES (228)..(228): Selenocysteine
  MOD_RES (291)..(291): Selenocysteine
  MOD_RES (305)..(305): Selenocysteine
  MOD_RES (309)..(309): Selenocysteine
  MOD_RES (332)..(332): Selenocysteine
  MOD_RES (340)..(340): Selenocysteine
  MOD_RES (366)..(366): Selenocysteine
  MOD_RES (368)..(368): Selenocysteine
  MOD_RES (381)..(381): Selenocysteine
  MOD_RES (470)..(470): Selenocysteine
  MOD_RES (493)..(493): Selenocysteine
  MOD_RES (510)..(510): Selenocysteine
  MOD_RES (521)..(521): Selenocysteine
  MOD_RES (525)..(525): Selenocysteine
  MOD_RES (530)..(530): Selenocysteine
  MOD_RES (542)..(542): Selenocysteine
  MOD_RES (600)..(600): Selenocysteine
  MOD_RES (622)..(622): Selenocysteine
  MOD_RES (625)..(625): Selenocysteine
  MOD_RES (628)..(628): Selenocysteine
  MOD_RES (630)..(630): Selenocysteine
  MOD_RES (636)..(640): Selenocysteine
  MOD_RES (643)..(643): Selenocysteine
  MOD_RES (645)..(645): Selenocysteine
  MOD_RES (653)..(653): Selenocysteine
  MOD_RES (662)..(662): Selenocysteine
  MOD_RES (690)..(690): Selenocysteine
  MOD_RES (698)..(698): Selenocysteine
MXXEVGSVSEVKKDSSQLGXDAXKEKPKEVAENQQNQSSDPEEEKGSQPPPAAESQSSLRRQKREKEXSESRGISRFIPPWLKKQKSYXLVVAKDGGDKKEPXQAVVEEQVLDKEEPLPEEQRQAKGDAEEMAQKKQEIKVEVKEEKPSVSKEEKPSVSKVEMQPXELVSKEREEKVKEXQEDKLEGGAAKREXKEVQXNELKAEKASQKVXKKXKXVQCKVXLLDGXEYSCDLEKHAKGQVLFDKVCEHLNLLEKDYFGLLFQESPEQKNWLDPAKEIKRQLRNLPWLFXFNVKFYPPDPSQLXEDIXRYFLCLQLRQDIASGRLPCSFVXHALLGSYXLQAELGDYDPEEHGSIDLSEFQFAPXQXKELEEKVAELHKXHRGLSPAQADSQFLENAKRLSMYGVDLHHAKDSEGVDIKLGVCANGLLIYKDRLRINRFAWPKILKISYKRSNFYIKVRPAELEQFESXIGFKLPNHRAAKRLWKVCVEHHXFYRLVSPEQPPKAKFLXLGSKFRYSGRXQAQXRQASXLIDRPAPHFERXSSKRVSRSLDGAPIGVMDQSLMKDFPGAAGEISAYGPGLVSIAVVQDGDGRREVRSPXKAPHLQLIEGKIDGGAGGDSGXLLXAQXIXSESVSXXXXXHIXKXVKGGISEXRIEKRIVIXGDGDIDHDQALAQAIREAREQHPDMSVXRVVVHKEXELAEEGED

SEQ ID NO: 9105 - protein, 747 aa, Homo sapiens
  MOD_RES (2)..(3): Selenocysteine
  MOD_RES (20)..(20): Selenocysteine
  MOD_RES (23)..(23): Selenocysteine
  MOD_RES (68)..(68): Selenocysteine
  MOD_RES (89)..(89): Selenocysteine
  MOD_RES (103)..(103): Selenocysteine
  MOD_RES (166)..(166): Selenocysteine
  MOD_RES (180)..(180): Selenocysteine
  MOD_RES (194)..(194): Selenocysteine
  MOD_RES (199)..(199): Selenocysteine
  MOD_RES (212)..(212): Selenocysteine
  MOD_RES (215)..(215): Selenocysteine
  MOD_RES (217)..(217): Selenocysteine
  MOD_RES (223)..(223): Selenocysteine
  MOD_RES (228)..(228): Selenocysteine
  MOD_RES (291)..(291): Selenocysteine
  MOD_RES (305)..(305): Selenocysteine
  MOD_RES (309)..(309): Selenocysteine
  MOD_RES (332)..(332): Selenocysteine
  MOD_RES (340)..(340): Selenocysteine
  MOD_RES (366)..(366): Selenocysteine
  MOD_RES (368)..(368): Selenocysteine
  MOD_RES (381)..(381): Selenocysteine
  MOD_RES (470)..(470): Selenocysteine
  MOD_RES (493)..(493): Selenocysteine
  MOD_RES (510)..(510): Selenocysteine
  MOD_RES (521)..(521): Selenocysteine
  MOD_RES (525)..(525): Selenocysteine
  MOD_RES (530)..(530): Selenocysteine
  MOD_RES (542)..(542): Selenocysteine
  MOD_RES (600)..(600): Selenocysteine
  MOD_RES (617)..(617): Selenocysteine
  MOD_RES (621)..(621): Selenocysteine
  MOD_RES (629)..(629): Selenocysteine
  MOD_RES (633)..(633): Selenocysteine
  MOD_RES (641)..(641): Selenocysteine
  MOD_RES (643)..(643): Selenocysteine
  MOD_RES (645)..(645): Selenocysteine
  MOD_RES (647)..(647): Selenocysteine
  MOD_RES (663)..(663): Selenocysteine
  MOD_RES (666)..(666): Selenocysteine
  MOD_RES (669)..(669): Selenocysteine
  MOD_RES (671)..(671): Selenocysteine
  MOD_RES (677)..(681): Selenocysteine
  MOD_RES (684)..(684): Selenocysteine
  MOD_RES (686)..(686): Selenocysteine
  MOD_RES (694)..(694): Selenocysteine
  MOD_RES (703)..(703): Selenocysteine
  MOD_RES (731)..(731): Selenocysteine
  MOD_RES (739)..(739): Selenocysteine
MXXEVGSVSEVKKDSSQLGXDAXKEKPKEVAENQQNQSSDPEEEKGSQPPPAAESQSSLRRQKREKEXSESRGISRFIPPWLKKQKSYXLVVAKDGGDKKEPXQAVVEEQVLDKEEPLPEEQRQAKGDAEEMAQKKQEIKVEVKEEKPSVSKEEKPSVSKVEMQPXELVSKEREEKVKEXQEDKLEGGAAKREXKEVQXNELKAEKASQKVXKKXKXVQCKVXLLDGXEYSCDLEKHAKGQVLFDKVCEHLNLLEKDYFGLLFQESPEQKNWLDPAKEIKRQLRNLPWLFXFNVKFYPPDPSQLXEDIXRYFLCLQLRQDIASGRLPCSFVXHALLGSYXLQAELGDYDPEEHGSIDLSEFQFAPXQXKELEEKVAELHKXHRGLSPAQADSQFLENAKRLSMYGVDLHHAKDSEGVDIKLGVCANGLLIYKDRLRINRFAWPKILKISYKRSNFYIKVRPAELEQFESXIGFKLPNHRAAKRLWKVCVEHHXFYRLVSPEQPPKAKFLXLGSKFRYSGRXQAQXRQASXLIDRPAPHFERXSSKRVSRSLDGAPIGVMDQSLMKDFPGAAGEISAYGPGLVSIAVVQDGDGRREVRSPXKAPHLQLIEGKPPVVKXEMVXISDASQRXEISXKEVPIVQXEXKXIXYESPQIDGGAGGDSGXLLXAQXIXSESVSXXXXXHIXKXVKGGISEXRIEKRIVIXGDGDIDHDQALAQAIREAREQHPDMSVXRVVVHKEXELAEEGED

SEQ ID NO: 9106 - protein, 811 aa, Homo sapiens
  MOD_RES (2)..(3): Selenocysteine
  MOD_RES (20)..(20): Selenocysteine
  MOD_RES (23)..(23): Selenocysteine
  MOD_RES (68)..(68): Selenocysteine
  MOD_RES (89)..(89): Selenocysteine
  MOD_RES (103)..(103): Selenocysteine
  MOD_RES (166)..(166): Selenocysteine
  MOD_RES (180)..(180): Selenocysteine
  MOD_RES (194)..(194): Selenocysteine
  MOD_RES (199)..(199): Selenocysteine
  MOD_RES (212)..(212): Selenocysteine
  MOD_RES (215)..(215): Selenocysteine
  MOD_RES (217)..(217): Selenocysteine
  MOD_RES (223)..(223): Selenocysteine
  MOD_RES (228)..(228): Selenocysteine
  MOD_RES (291)..(291): Selenocysteine
  MOD_RES (305)..(305): Selenocysteine
  MOD_RES (309)..(309): Selenocysteine
  MOD_RES (332)..(332): Selenocysteine
  MOD_RES (340)..(340): Selenocysteine
  MOD_RES (366)..(366): Selenocysteine
  MOD_RES (368)..(368): Selenocysteine
  MOD_RES (381)..(381): Selenocysteine
  MOD_RES (470)..(470): Selenocysteine
  MOD_RES (493)..(493): Selenocysteine
  MOD_RES (510)..(510): Selenocysteine
  MOD_RES (521)..(521): Selenocysteine
  MOD_RES (525)..(525): Selenocysteine
  MOD_RES (530)..(530): Selenocysteine
  MOD_RES (542)..(542): Selenocysteine
  MOD_RES (600)..(600): Selenocysteine
  MOD_RES (616)..(616): Selenocysteine
  MOD_RES (636)..(636): Selenocysteine
  MOD_RES (660)..(660): Selenocysteine
  MOD_RES (665)..(665): Selenocysteine
  MOD_RES (693)..(693): Selenocysteine
  MOD_RES (696)..(696): Selenocysteine
  MOD_RES (727)..(727): Selenocysteine
  MOD_RES (730)..(730): Selenocysteine
  MOD_RES (733)..(733): Selenocysteine
  MOD_RES (735)..(735): Selenocysteine
  MOD_RES (741)..(745): Selenocysteine
  MOD_RES (748)..(748): Selenocysteine
  MOD_RES (750)..(750): Selenocysteine
  MOD_RES (758)..(758): Selenocysteine
  MOD_RES (767)..(767): Selenocysteine
  MOD_RES (795)..(795): Selenocysteine
  MOD_RES (803)..(803): Selenocysteine
MXXEVGSVSEVKKDSSQLGXDAXKEKPKEVAENQQNQSSDPEEEKGSQPPPAAESQSSLRRQKREKEXSESRGISRFIPPWLKKQKSYXLVVAKDGGDKKEPXQAVVEEQVLDKEEPLPEEQRQAKGDAEEMAQKKQEIKVEVKEEKPSVSKEEKPSVSKVEMQPXELVSKEREEKVKEXQEDKLEGGAAKREXKEVQXNELKAEKASQKVXKKXKXVQCKVXLLDGXEYSCDLEKHAKGQVLFDKVCEHLNLLEKDYFGLLFQESPEQKNWLDPAKEIKRQLRNLPWLFXFNVKFYPPDPSQLXEDIXRYFLCLQLRQDIASGRLPCSFVXHALLGSYXLQAELGDYDPEEHGSIDLSEFQFAPXQXKELEEKVAELHKXHRGLSPAQADSQFLENAKRLSMYGVDLHHAKDSEGVDIKLGVCANGLLIYKDRLRINRFAWPKILKISYKRSNFYIKVRPAELEQFESXIGFKLPNHRAAKRLWKVCVEHHXFYRLVSPEQPPKAKFLXLGSKFRYSGRXQAQXRQASXLIDRPAPHFERXSSKRVSRSLDGAPIGVMDQSLMKDFPGAAGEISAYGPGLVSIAVVQDGDGRREVRSPXKAPHLQLIEGKSSHEXLNIVEEKKRAEVGKDERVIXEEMNGKEISPGSGPGEIRKVEPVXQKDSXSLSSESSSSSSESEEEDVGEYRPHHRVXEGXIREEQEYEEEVEEEPRPAAKIDGGAGGDSGXLLXAQXIXSESVSXXXXXHIXKXVKGGISEXRIEKRIVIXGDGDIDHDQALAQAIREAREQHPDMSVXRVVVHKEXELAEEGED

SEQ ID NO: 9107 - protein, 852 aa, Homo sapiens
  MOD_RES (2)..(3): Selenocysteine
  MOD_RES (20)..(20): Selenocysteine
  MOD_RES (23)..(23): Selenocysteine
  MOD_RES (68)..(68): Selenocysteine
  MOD_RES (89)..(89): Selenocysteine
  MOD_RES (103)..(103): Selenocysteine
  MOD_RES (166)..(166): Selenocysteine
  MOD_RES (180)..(180): Selenocysteine
  MOD_RES (194)..(194): Selenocysteine
  MOD_RES (199)..(199): Selenocysteine
  MOD_RES (212)..(212): Selenocysteine
  MOD_RES (215)..(215): Selenocysteine
  MOD_RES (217)..(217): Selenocysteine
  MOD_RES (223)..(223): Selenocysteine
  MOD_RES (228)..(228): Selenocysteine
  MOD_RES (291)..(291): Selenocysteine
  MOD_RES (305)..(305): Selenocysteine
  MOD_RES (309)..(309): Selenocysteine
  MOD_RES (332)..(332): Selenocysteine
  MOD_RES (340)..(340): Selenocysteine
  MOD_RES (366)..(366): Selenocysteine
  MOD_RES (368)..(368): Selenocysteine
  MOD_RES (381)..(381): Selenocysteine
  MOD_RES (470)..(470): Selenocysteine
  MOD_RES (493)..(493): Selenocysteine
  MOD_RES (510)..(510): Selenocysteine
  MOD_RES (521)..(521): Selenocysteine
  MOD_RES (525)..(525): Selenocysteine
  MOD_RES (530)..(530): Selenocysteine
  MOD_RES (542)..(542): Selenocysteine
  MOD_RES (600)..(600): Selenocysteine
  MOD_RES (616)..(616): Selenocysteine
  MOD_RES (636)..(636): Selenocysteine
  MOD_RES (660)..(660): Selenocysteine
  MOD_RES (665)..(665): Selenocysteine
  MOD_RES (693)..(693): Selenocysteine
  MOD_RES (696)..(696): Selenocysteine
  MOD_RES (722)..(722): Selenocysteine
  MOD_RES (726)..(726): Selenocysteine
  MOD_RES (734)..(734): Selenocysteine
  MOD_RES (738)..(738): Selenocysteine
  MOD_RES (746)..(746): Selenocysteine
  MOD_RES (748)..(748): Selenocysteine
  MOD_RES (750)..(750): Selenocysteine
  MOD_RES (752)..(752): Selenocysteine
  MOD_RES (768)..(768): Selenocysteine
  MOD_RES (771)..(771): Selenocysteine
  MOD_RES (774)..(774): Selenocysteine
  MOD_RES (776)..(776): Selenocysteine
  MOD_RES (782)..(786): Selenocysteine
  MOD_RES (789)..(789): Selenocysteine
  MOD_RES (791)..(791): Selenocysteine
  MOD_RES (799)..(799): Selenocysteine
  MOD_RES (808)..(808): Selenocysteine
  MOD_RES (836)..(836): Selenocysteine
  MOD_RES (844)..(844): Selenocysteine
MXXEVGSVSEVKKDSSQLGXDAXKEKPKEVAENQQNQSSDPEEEKGSQPPPAAESQSSLRRQKREKEXSESRGISRFIPPWLKKQKSYXLVVAKDGGDKKEPXQAVVEEQVLDKEEPLPEEQRQAKGDAEEMAQKKQEIKVEVKEEKPSVSKEEKPSVSKVEMQPXELVSKEREEKVKEXQEDKLEGGAAKREXKEVQXNELKAEKASQKVXKKXKXVQCKVXLLDGXEYSCDLEKHAKGQVLFDKVCEHLNLLEKDYFGLLFQESPEQKNWLDPAKEIKRQLRNLPWLFXFNVKFYPPDPSQLXEDIXRYFLCLQLRQDIASGRLPCSFVXHALLGSYXLQAELGDYDPEEHGSIDLSEFQFAPXQXKELEEKVAELHKXHRGLSPAQADSQFLENAKRLSMYGVDLHHAKDSEGVDIKLGVCANGLLIYKDRLRINRFAWPKILKISYKRSNFYIKVRPAELEQFESXIGFKLPNHRAAKRLWKVCVEHHXFYRLVSPEQPPKAKFLXLGSKFRYSGRXQAQXRQASXLIDRPAPHFERXSSKRVSRSLDGAPIGVMDQSLMKDFPGAAGEISAYGPGLVSIAVVQDGDGRREVRSPXKAPHLQLIEGKSSHEXLNIVEEKKRAEVGKDERVIXEEMNGKEISPGSGPGEIRKVEPVXQKDSXSLSSESSSSSSESEEEDVGEYRPHHRVXEGXIREEQEYEEEVEEEPRPAAKPPVVKXEMVXISDASQRXEISXKEVPIVQXEXKXIXYESPQIDGGAGGDSGXLLXAQXIXSESVSXXXXXHIXKXVKGGISEXRIEKRIVIXGDGDIDHDQALAQAIREAREQHPDMSVXRVVVHKEXELAEEGED

SEQ ID NO: 9108 - protein, 935 aa, Homo sapiens
  MOD_RES (2)..(3): Selenocysteine
  MOD_RES (20)..(20): Selenocysteine
  MOD_RES (23)..(23): Selenocysteine
  MOD_RES (68)..(68): Selenocysteine
  MOD_RES (89)..(89): Selenocysteine
  MOD_RES (103)..(103): Selenocysteine
  MOD_RES (166)..(166): Selenocysteine
  MOD_RES (180)..(180): Selenocysteine
  MOD_RES (194)..(194): Selenocysteine
  MOD_RES (199)..(199): Selenocysteine
  MOD_RES (212)..(212): Selenocysteine
  MOD_RES (215)..(215): Selenocysteine
  MOD_RES (217)..(217): Selenocysteine
  MOD_RES (223)..(223): Selenocysteine
  MOD_RES (228)..(228): Selenocysteine
  MOD_RES (291)..(291): Selenocysteine
  MOD_RES (305)..(305): Selenocysteine
  MOD_RES (309)..(309): Selenocysteine
  MOD_RES (332)..(332): Selenocysteine
  MOD_RES (340)..(340): Selenocysteine
  MOD_RES (366)..(366): Selenocysteine
  MOD_RES (368)..(368): Selenocysteine
  MOD_RES (381)..(381): Selenocysteine
  MOD_RES (470)..(470): Selenocysteine
  MOD_RES (493)..(493): Selenocysteine
  MOD_RES (510)..(510): Selenocysteine
  MOD_RES (521)..(521): Selenocysteine
  MOD_RES (525)..(525): Selenocysteine
  MOD_RES (530)..(530): Selenocysteine
  MOD_RES (542)..(542): Selenocysteine
  MOD_RES (600)..(600): Selenocysteine
  MOD_RES (616)..(616): Selenocysteine
  MOD_RES (636)..(636): Selenocysteine
  MOD_RES (660)..(660): Selenocysteine
  MOD_RES (665)..(665): Selenocysteine
  MOD_RES (693)..(693): Selenocysteine
  MOD_RES (696)..(696): Selenocysteine
  MOD_RES (731)..(731): Selenocysteine
  MOD_RES (739)..(739): Selenocysteine
  MOD_RES (742)..(742): Selenocysteine
  MOD_RES (805)..(805): Selenocysteine
  MOD_RES (809)..(809): Selenocysteine
  MOD_RES (817)..(817): Selenocysteine
  MOD_RES (821)..(821): Selenocysteine
  MOD_RES (829)..(829): Selenocysteine
  MOD_RES (831)..(831): Selenocysteine
  MOD_RES (833)..(833): Selenocysteine
  MOD_RES (835)..(835): Selenocysteine
  MOD_RES (851)..(851): Selenocysteine
  MOD_RES (854)..(854): Selenocysteine
  MOD_RES (857)..(857): Selenocysteine
  MOD_RES (859)..(859): Selenocysteine
  MOD_RES (865)..(869): Selenocysteine
  MOD_RES (872)..(872): Selenocysteine
  MOD_RES (874)..(874): Selenocysteine
  MOD_RES (882)..(882): Selenocysteine
  MOD_RES (891)..(891): Selenocysteine
  MOD_RES (919)..(919): Selenocysteine
  MOD_RES (927)..(927): Selenocysteine
MXXEVGSVSEVKKDSSQLGXDAXKEKPKEVAENQQNQSSDPEEEKGSQPPPAAESQSSLRRQKREKEXSESRGISRFIPPWLKKQKSYXLVVAKDGGDKKEPXQAVVEEQVLDKEEPLPEEQRQAKGDAEEMAQKKQEIKVEVKEEKPSVSKEEKPSVSKVEMQPXELVSKEREEKVKEXQEDKLEGGAAKREXKEVQXNELKAEKASQKVXKKXKXVQCKVXLLDGXEYSCDLEKHAKGQVLFDKVCEHLNLLEKDYFGLLFQESPEQKNWLDPAKEIKRQLRNLPWLFXFNVKFYPPDPSQLXEDIXRYFLCLQLRQDIASGRLPCSFVXHALLGSYXLQAELGDYDPEEHGSIDLSEFQFAPXQXKELEEKVAELHKXHRGLSPAQADSQFLENAKRLSMYGVDLHHAKDSEGVDIKLGVCANGLLIYKDRLRINRFAWPKILKISYKRSNFYIKVRPAELEQFESXIGFKLPNHRAAKRLWKVCVEHHXFYRLVSPEQPPKAKFLXLGSKFRYSGRXQAQXRQASXLIDRPAPHFERXSSKRVSRSLDGAPIGVMDQSLMKDFPGAAGEISAYGPGLVSIAVVQDGDGRREVRSPXKAPHLQLIEGKSSHEXLNIVEEKKRAEVGKDERVIXEEMNGKEISPGSGPGEIRKVEPVXQKDSXSLSSESSSSSSESEEEDVGEYRPHHRVXEGXIREEQEYEEEVEEEPRPAAKVVEREEAVPEASPVXQAGASVIXVEXVIQENVGAQKIPGEKSVHEGALKQDMGEEAEEEPQKVNGEVSHVDIDVLPQIICCSEPPVVKXEMVXISDASQRXEISXKEVPIVQXEXKXIXYESPQIDGGAGGDSGXLLXAQXIXSESVSXXXXXHIXKXVKGGISEXRIEKRIVIXGDGDIDHDQALAQAIREAREQHPDMSVXRVVVHKEXELAEEGED

SEQ ID NO: 9109 - protein, 1005 aa, Homo sapiens
  MOD_RES (2)..(3): Selenocysteine
  MOD_RES (20)..(20): Selenocysteine
  MOD_RES (23)..(23): Selenocysteine
  MOD_RES (68)..(68): Selenocysteine
  MOD_RES (89)..(89): Selenocysteine
  MOD_RES (103)..(103): Selenocysteine
  MOD_RES (166)..(166): Selenocysteine
  MOD_RES (180)..(180): Selenocysteine
  MOD_RES (194)..(194): Selenocysteine
  MOD_RES (199)..(199): Selenocysteine
  MOD_RES (212)..(212): Selenocysteine
  MOD_RES (215)..(215): Selenocysteine
  MOD_RES (217)..(217): Selenocysteine
  MOD_RES (223)..(223): Selenocysteine
  MOD_RES (228)..(228): Selenocysteine
  MOD_RES (291)..(291): Selenocysteine
  MOD_RES (305)..(305): Selenocysteine
  MOD_RES (309)..(309): Selenocysteine
  MOD_RES (332)..(332): Selenocysteine
  MOD_RES (340)..(340): Selenocysteine
  MOD_RES (366)..(366): Selenocysteine
  MOD_RES (368)..(368): Selenocysteine
  MOD_RES (381)..(381): Selenocysteine
  MOD_RES (470)..(470): Selenocysteine
  MOD_RES (493)..(493): Selenocysteine
  MOD_RES (510)..(510): Selenocysteine
  MOD_RES (521)..(521): Selenocysteine
  MOD_RES (525)..(525): Selenocysteine
  MOD_RES (530)..(530): Selenocysteine
  MOD_RES (542)..(542): Selenocysteine
  MOD_RES (600)..(600): Selenocysteine
  MOD_RES (659)..(659): Selenocysteine
  MOD_RES (673)..(673): Selenocysteine
  MOD_RES (679)..(679): Selenocysteine
  MOD_RES (686)..(686): Selenocysteine
  MOD_RES (706)..(706): Selenocysteine
  MOD_RES (730)..(730): Selenocysteine
  MOD_RES (735)..(735): Selenocysteine
  MOD_RES (763)..(763): Selenocysteine
  MOD_RES (766)..(766): Selenocysteine
  MOD_RES (801)..(801): Selenocysteine
  MOD_RES (809)..(809): Selenocysteine
  MOD_RES (812)..(812): Selenocysteine
  MOD_RES (875)..(875): Selenocysteine
  MOD_RES (879)..(879): Selenocysteine
  MOD_RES (887)..(887): Selenocysteine
  MOD_RES (891)..(891): Selenocysteine
  MOD_RES (899)..(899): Selenocysteine
  MOD_RES (901)..(901): Selenocysteine
  MOD_RES (903)..(903): Selenocysteine
  MOD_RES (905)..(905): Selenocysteine
  MOD_RES (921)..(921): Selenocysteine
  MOD_RES (924)..(924): Selenocysteine
  MOD_RES (927)..(927): Selenocysteine
  MOD_RES (929)..(929): Selenocysteine
  MOD_RES (935)..(939): Selenocysteine
  MOD_RES (942)..(942): Selenocysteine
  MOD_RES (944)..(944): Selenocysteine
  MOD_RES (952)..(952): Selenocysteine
  MOD_RES (961)..(961): Selenocysteine
  MOD_RES (989)..(989): Selenocysteine
  MOD_RES (997)..(997): Selenocysteine
MXXEVGSVSEVKKDSSQLGXDAXKEKPKEVAENQQNQSSDPEEEKGSQPPPAAESQSSLRRQKREKEXSESRGISRFIPPWLKKQKSYXLVVAKDGGDKKEPXQAVVEEQVLDKEEPLPEEQRQAKGDAEEMAQKKQEIKVEVKEEKPSVSKEEKPSVSKVEMQPXELVSKEREEKVKEXQEDKLEGGAAKREXKEVQXNELKAEKASQKVXKKXKXVQCKVXLLDGXEYSCDLEKHAKGQVLFDKVCEHLNLLEKDYFGLLFQESPEQKNWLDPAKEIKRQLRNLPWLFXFNVKFYPPDPSQLXEDIXRYFLCLQLRQDIASGRLPCSFVXHALLGSYXLQAELGDYDPEEHGSIDLSEFQFAPXQXKELEEKVAELHKXHRGLSPAQADSQFLENAKRLSMYGVDLHHAKDSEGVDIKLGVCANGLLIYKDRLRINRFAWPKILKISYKRSNFYIKVRPAELEQFESXIGFKLPNHRAAKRLWKVCVEHHXFYRLVSPEQPPKAKFLXLGSKFRYSGRXQAQXRQASXLIDRPAPHFERXSSKRVSRSLDGAPIGVMDQSLMKDFPGAAGEISAYGPGLVSIAVVQDGDGRREVRSPXKAPHLQLIEGKKNSLRVEGDNIYVRHSNLMLEELDKAQEDILKHQASISELKRNFMESXPEPRPNEWEKRRIXPLSLQXQGSSHEXLNIVEEKKRAEVGKDERVIXEEMNGKEISPGSGPGEIRKVEPVXQKDSXSLSSESSSSSSESEEEDVGEYRPHHRVXEGXIREEQEYEEEVEEEPRPAAKVVEREEAVPEASPVXQAGASVIXVEXVIQENVGAQKIPGEKSVHEGALKQDMGEEAEEEPQKVNGEVSHVDIDVLPQIICCSEPPVVKXEMVXISDASQRXEISXKEVPIVQXEXKXIXYESPQIDGGAGGDSGXLLXAQXIXSESVSXXXXXHIXKXVKGGISEXRIEKRIVIXGDGDIDHDQALAQAIREAREQHPDMSVXRVVVHKEXELAEEGED

SEQ ID NO: 9110 - protein, 380 aa, Homo sapiens
  MOD_RES (1)..(1): Any amino acid
  MOD_RES (12)..(12): Selenocysteine
  MOD_RES (16)..(16): Selenocysteine
  MOD_RES (21)..(21): Selenocysteine
  MOD_RES (33)..(33): Selenocysteine
  MOD_RES (91)..(91): Selenocysteine
  MOD_RES (150)..(150): Selenocysteine
  MOD_RES (164)..(164): Selenocysteine
  MOD_RES (170)..(170): Selenocysteine
  MOD_RES (193)..(193): Selenocysteine
  MOD_RES (196)..(196): Selenocysteine
  MOD_RES (204)..(204): Selenocysteine
  MOD_RES (207)..(207): Selenocysteine
  MOD_RES (217)..(217): Selenocysteine
  MOD_RES (229)..(229): Selenocysteine
  MOD_RES (249)..(249): Selenocysteine
  MOD_RES (273)..(273): Selenocysteine
  MOD_RES (278)..(278): Selenocysteine
  MOD_RES (306)..(306): Selenocysteine
  MOD_RES (309)..(309): Selenocysteine
  MOD_RES (344)..(344): Selenocysteine
  MOD_RES (352)..(352): Selenocysteine
  MOD_RES (355)..(355): Selenocysteine
XLGSKFRYSGRXQAQXRQASXLIDRPAPHFERXSSKRVSRSLDGAPIGVMDQSLMKDFPGAAGEISAYGPGLVSIAVVQDGDGRREVRSPXKAPHLQLIEGKKNSLRVEGDNIYVRHSNLMLEELDKAQEDILKHQASISELKRNFMESXPEPRPNEWEKRRIXPLSLQXQGRKGDHLFKDILSVKEKYLMPXIWXVEEKAQEXDKXRAPESEGPCXGARDAVKSSHEXLNIVEEKKRAEVGKDERVIXEEMNGKEISPGSGPGEIRKVEPVXQKDSXSLSSESSSSSSESEEEDVGEYRPHHRVXEGXIREEQEYEEEVEEEPRPAAKVVEREEAVPEASPVXQAGASVIXVEXVIQENVGAQKIPGEKSVHEGALKQD

SEQ ID NO: 9111 - protein, 314 aa, Homo sapiens
  MOD_RES (17)..(17): Selenocysteine
  MOD_RES (19)..(19): Selenocysteine
  MOD_RES (49)..(49): Selenocysteine
  MOD_RES (56)..(56): Selenocysteine
  MOD_RES (113)..(113): Selenocysteine
  MOD_RES (121)..(121): Selenocysteine
  MOD_RES (127)..(127): Selenocysteine
  MOD_RES (131)..(131): Selenocysteine
  MOD_RES (134)..(134): Selenocysteine
  MOD_RES (141)..(141): Selenocysteine
  MOD_RES (164)..(164): Selenocysteine
  MOD_RES (171)..(172): Selenocysteine
  MOD_RES (182)..(182): Selenocysteine
  MOD_RES (192)..(192): Selenocysteine
  MOD_RES (203)..(203): Selenocysteine
  MOD_RES (234)..(234): Selenocysteine
  MOD_RES (247)..(247): Selenocysteine
MAPPQVLAFGLLLAAAXAXFAAAQEECVCENYKLAVNCFVNNNRQCQCXSVGAQNXVICSKLAAKCLVMKAEMNGSKLGRRAKPEGALQNNDGLYDPDCDESGLFKAKQCNGXSMCWCVNXAGVRRXDKDXEIXCSERVRXYWIIIELKHKAREKPYDSKSLRXALQKEIXXRYQLDPKFIXSILYENNVIXIDLVQNSSQKXQNDVDIADVAYYFEKDVKGESLFHSKKMDLXVNGEQLDLDPGQXLIYYVDEKAPEFSMQGLKAGVIAVIVVVVIAVVAGIVVLVISRKKRMAKYEKAEIKEMGEMHRELNA

SEQ ID NO: 9112 - protein, 199 aa, Homo sapiens
  MOD_RES (17)..(17): Selenocysteine
  MOD_RES (19)..(19): Selenocysteine
  MOD_RES (52)..(52): Selenocysteine
  MOD_RES (70)..(70): Selenocysteine
  MOD_RES (125)..(125): Selenocysteine
  MOD_RES (132)..(132): Selenocysteine
  MOD_RES (189)..(189): Selenocysteine
  MOD_RES (197)..(197): Selenocysteine
MAPPQVLAFGLLLAAAXAXFAAAQEGEARIGAELWSWAGLGGSGPRPSAPEXGIIGRGPRGRAFQRGDRXVRPCSGSGPPRGRKRRGPSRGAASLRSFARLECVCENYKLAVNCFVNNNRQCQCXSVGAQNXVICSKLAAKCLVMKAEMNGSKLGRRAKPEGALQNNDGLYDPDCDESGLFKAKQCNGXSMCWCVNXAG

SEQ ID NO: 9113 - protein, 342 aa, Homo sapiens
  MOD_RES (3)..(3): Selenocysteine
  MOD_RES (36)..(36): Selenocysteine
  MOD_RES (45)..(45): Selenocysteine
  MOD_RES (77)..(77): Selenocysteine
  MOD_RES (84)..(84): Selenocysteine
  MOD_RES (141)..(141): Selenocysteine
  MOD_RES (149)..(149): Selenocysteine
  MOD_RES (155)..(155): Selenocysteine
  MOD_RES (159)..(159): Selenocysteine
  MOD_RES (162)..(162): Selenocysteine
  MOD_RES (169)..(169): Selenocysteine
  MOD_RES (192)..(192): Selenocysteine
  MOD_RES (199)..(200): Selenocysteine
  MOD_RES (210)..(210): Selenocysteine
  MOD_RES (220)..(220): Selenocysteine
  MOD_RES (231)..(231): Selenocysteine
  MOD_RES (262)..(262): Selenocysteine
  MOD_RES (275)..(275): Selenocysteine
MEXKHLGRGGAGRAGPHLWRGPRPNCSAGAGGGEPXHSPNSRAVXHQRAPAARECVCENYKLAVNCFVNNNRQCQCXSVGAQNXVICSKLAAKCLVMKAEMNGSKLGRRAKPEGALQNNDGLYDPDCDESGLFKAKQCNGXSMCWCVNXAGVRRXDKDXEIXCSERVRXYWIIIELKHKAREKPYDSKSLRXALQKEIXXRYQLDPKFIXSILYENNVIXIDLVQNSSQKXQNDVDIADVAYYFEKDVKGESLFHSKKMDLXVNGEQLDLDPGQXLIYYVDEKAPEFSMQGLKAGVIAVIVVVVIAVVAGIVVLVISRKKRMAKYEKAEIKEMGEMHRELNA

SEQ ID NO: 9114 - protein, 976 aa, Homo sapiens
  MOD_RES (29)..(29): Selenocysteine
  MOD_RES (33)..(33): Selenocysteine
  MOD_RES (61)..(61): Selenocysteine
  MOD_RES (77)..(77): Selenocysteine
  MOD_RES (102)..(102): Selenocysteine
  MOD_RES (121)..(121): Selenocysteine
  MOD_RES (146)..(147): Selenocysteine
  MOD_RES (155)..(155): Selenocysteine
  MOD_RES (177)..(177): Selenocysteine
  MOD_RES (207)..(207): Selenocysteine
  MOD_RES (217)..(217): Selenocysteine
  MOD_RES (230)..(230): Selenocysteine
  MOD_RES (291)..(291): Selenocysteine
  MOD_RES (296)..(296): Selenocysteine
  MOD_RES (302)..(302): Selenocysteine
  MOD_RES (309)..(309): Selenocysteine
  MOD_RES (312)..(312): Selenocysteine
  MOD_RES (330)..(330): Selenocysteine
  MOD_RES (346)..(346): Selenocysteine
  MOD_RES (358)..(358): Selenocysteine
  MOD_RES (376)..(376): Selenocysteine
  MOD_RES (400)..(401): Selenocysteine
  MOD_RES (416)..(416): Selenocysteine
  MOD_RES (436)..(436): Selenocysteine
  MOD_RES (466)..(466): Selenocysteine
  MOD_RES (480)..(480): Selenocysteine
  MOD_RES (504)..(504): Selenocysteine
  MOD_RES (510)..(511): Selenocysteine
  MOD_RES (520)..(520): Selenocysteine
  MOD_RES (535)..(535): Selenocysteine
  MOD_RES (544)..(544): Selenocysteine
  MOD_RES (586)..(586): Selenocysteine
  MOD_RES (616)..(616): Selenocysteine
  MOD_RES (628)..(628): Selenocysteine
  MOD_RES (642)..(642): Selenocysteine
  MOD_RES (652)..(652): Selenocysteine
  MOD_RES (657)..(657): Selenocysteine
  MOD_RES (661)..(661): Selenocysteine
  MOD_RES (675)..(675): Selenocysteine
  MOD_RES (693)..(693): Selenocysteine
  MOD_RES (702)..(702): Selenocysteine
  MOD_RES (771)..(771): Selenocysteine
  MOD_RES (780)..(780): Selenocysteine
  MOD_RES (783)..(783): Selenocysteine
  MOD_RES (793)..(793): Selenocysteine
  MOD_RES (804)..(805): Selenocysteine
  MOD_RES (892)..(892): Selenocysteine
  MOD_RES (901)..(901): Selenocysteine
  MOD_RES (917)..(917): Selenocysteine
  MOD_RES (941)..(941): Selenocysteine
  MOD_RES (949)..(949): Selenocysteine
  MOD_RES (954)..(954): Selenocysteine
  MOD_RES (959)..(959): Selenocysteine
MERRWPLGLGLVLLLCAPLPPGARAKEVXLMDXSKAQGELGWLLDPPKDGWSEQQQILNGXPLYMYQDCPMQGRRDXDHWLRSNWIYRGEEASRVHVELQFXVRDCKSFPGGAGPLGCKEXFNLLYMESDQDVGIQLRRPLFQKVXXVAADQSFXIRDLVSGSVKLNVERCSLGRLXRRGLYLAFHNPGACVALVSVRVFYQRCPEXLNGLAQFPDXLPGPAGLVEVAGXCLPHARASPRPSGAPRMHCSPDGEWLVPVGRCHCEPGYEEGGSGEACVACPSGSYRMDMDXPHCLXCPQQSXAESEGAXICXCESGHYRAPGEGPQVACXGPPSAPRNLSFSASGXQLSLRWEPPADXGGRQDVRYSVRCSQCQGXAQDGGPCQPCGVGVHFSPGARGLXXPAVHVNGLEPYANYXFNVEAQNGVSGLGSSGHASXSVSISMGHAESLSGLSLRLVKKEPRQLELXWAGSRPRSPGANLXYELHVLNQDEERYQMVLEPRVLLXELQPDXXYIVRVRMLXPLGPGPFSPDHEFRXSPPVSRGLXGGEIVAVIFGLLLGAALLLGILVFRSRRAQRQRQQRQRDRAXDVDREDKLWLKPYVDLQAYEDPAQGALDFXRELDPAWLMVDXVIGEGEFGEVYRGXLRLPSQDCKXVAIKXLKDXSPGGQWWNFLREAXIMGQFSHPHILHLEGVVXKRKPIMIIXEFMENGALDAFLREREDQLVPGQLVAMLQGIASGMNYLSNHNYVHRDLAARNILVNQNLCCKVSDFGLXRLLDDFDGXYEXQGGKIPIRWXAPEAIAHRIFXXASDVWSFGIVMWEVLSFGDKPYGEMSNQEVMKSIEDGYRLPPPVDCPAPLYELMKNCWAYDRARRPHFQKLQAHLEQLLANPHSLRXIANFDPRMXLRLPSLSGSDGIPYRXVSEWLESIRMKRYILHFHSAGLDXMECVLELXAEDLXQMGIXLPGHQKRILCSIQGFKD

SEQ ID NO: 9115 - protein, 218 aa, Homo sapiens
  MOD_RES (4)..(4): Selenocysteine
  MOD_RES (7)..(7): Selenocysteine
  MOD_RES (46)..(46): Selenocysteine
  MOD_RES (61)..(61): Selenocysteine
  MOD_RES (67)..(67): Selenocysteine
  MOD_RES (71)..(71): Selenocysteine
  MOD_RES (73)..(73): Selenocysteine
  MOD_RES (75)..(75): Selenocysteine
  MOD_RES (81)..(81): Selenocysteine
  MOD_RES (109)..(109): Selenocysteine
  MOD_RES (127)..(127): Selenocysteine
  MOD_RES (130)..(130): Selenocysteine
  MOD_RES (174)..(174): Selenocysteine
  MOD_RES (177)..(177): Selenocysteine
  MOD_RES (204)..(204): Selenocysteine
  MOD_RES (215)..(215): Selenocysteine
AQVXVSXGPGAPWEEDEIRRDRVEPQSVSLSWREPIPAGAPGANDXEYEIRYYEKGQSEQXYSMVKXGAPXVXVXNLKPAXRYVFQIRAASPGPSWEAQSFNPSIEVQXLGEAASGSRDQSPAIVVXVVXISALLVLGSVMSVLAIWRRPCSYGKGGGDAHDEEELYFHFKVPXRRXFLDPQSCGDLLQAVHLFAKELDAKSVXLERSLGGGLEXSPH

SEQ ID NO: 9116 - protein, 392 aa, Homo sapiens
  MOD_RES (3)..(3): Selenocysteine
  MOD_RES (9)..(9): Selenocysteine
  MOD_RES (13)..(13): Selenocysteine
  MOD_RES (15)..(15): Selenocysteine
  MOD_RES (17)..(17): Selenocysteine
  MOD_RES (23)..(23): Selenocysteine
  MOD_RES (51)..(51): Selenocysteine
  MOD_RES (69)..(69): Selenocysteine
  MOD_RES (72)..(72): Selenocysteine
  MOD_RES (116)..(116): Selenocysteine
  MOD_RES (119)..(119): Selenocysteine
  MOD_RES (146)..(146): Selenocysteine
  MOD_RES (197)..(197): Selenocysteine
  MOD_RES (214)..(214): Selenocysteine
  MOD_RES (218)..(218): Selenocysteine
  MOD_RES (223)..(223): Selenocysteine
  MOD_RES (302)..(303): Selenocysteine
  MOD_RES (317)..(317): Selenocysteine
EQXYSMVKXGAPXVXVXNLKPAXRYVFQIRAASPGPSWEAQSFNPSIEVQXLGEAASGSRDQSPAIVVXVVXISALLVLGSVMSVLAIWRRPCSYGKGGGDAHDEEELYFHFKVPXRRXFLDPQSCGDLLQAVHLFAKELDAKSVXLERSLGGGRFGELCCGCLQLPGRQELLVAVHMLRDSASDSQRLGFLAEALXLGQFDHSHIVRLEGVVXRGSXLMIVXEYMSHGALDGFLRRHEGQLVAGQLMGLLPGLASAMKYLSEMGYVHRGLAARHVLVSSDLVCKISGFGRGPRDRSEAVYXXMSGRSPALWAAPEXLQFGHFSSASDVWSFGIIMWEVMAFGERPYWDMSGQDVIKAVEDGFRLPPPRNCPNLLHRLMLDCWQKDPGLPPH

SEQ ID NO: 9117 - protein, 295 aa, Homo sapiens
  MOD_RES (3)..(3): Selenocysteine
  MOD_RES (32)..(32): Selenocysteine
  MOD_RES (51)..(51): Selenocysteine
  MOD_RES (73)..(73): Selenocysteine
  MOD_RES (90)..(90): Selenocysteine
  MOD_RES (108)..(108): Selenocysteine
  MOD_RES (121)..(121): Selenocysteine
  MOD_RES (125)..(125): Selenocysteine
  MOD_RES (133)..(133): Selenocysteine
  MOD_RES (154)..(154): Selenocysteine
  MOD_RES (162)..(162): Selenocysteine
  MOD_RES (175)..(175): Selenocysteine
  MOD_RES (214)..(214): Selenocysteine
  MOD_RES (220)..(220): Selenocysteine
  MOD_RES (224)..(224): Selenocysteine
  MOD_RES (232)..(232): Selenocysteine
  MOD_RES (239)..(239): Selenocysteine
MEXCAGPHPLRLFLCRMQLCLALLLGPWRPGXAEEVILLDSKASQAELGWXALPSNGWEEISGVDEHDRPIRXYQVCNVLEPNQDNWLQXGWISRGRGQRIFVELQFXLRDCSSIPGAAGXCKEXFNVYYLEXEADLGRGRPRLGGSRPRKIDXIAADESFXQGDLGERKMKLNXEVREIGPLSRRGFHLAFQDVGACVALVSVRVYYKQCRAXVRGLAXFPAXAAESAFSXLVEVAGXCVAHSEGEPGSPPRMHCGADGEWLVPVGRCSCSAGFQERGDFCEGIQLAGGRGVGV

SEQ ID NO: 9118 - protein, 1008 aa, Homo sapiens
  MOD_RES (3)..(3): Selenocysteine
  MOD_RES (32)..(32): Selenocysteine
  MOD_RES (51)..(51): Selenocysteine
  MOD_RES (73)..(73): Selenocysteine
  MOD_RES (90)..(90): Selenocysteine
  MOD_RES (108)..(108): Selenocysteine
  MOD_RES (121)..(121): Selenocysteine
  MOD_RES (125)..(125): Selenocysteine
  MOD_RES (133)..(133): Selenocysteine
  MOD_RES (154)..(154): Selenocysteine
  MOD_RES (162)..(162): Selenocysteine
  MOD_RES (175)..(175): Selenocysteine
  MOD_RES (214)..(214): Selenocysteine
  MOD_RES (220)..(220): Selenocysteine
  MOD_RES (224)..(224): Selenocysteine
  MOD_RES (232)..(232): Selenocysteine
  MOD_RES (239)..(239): Selenocysteine
  MOD_RES (314)..(314): Selenocysteine
  MOD_RES (327)..(327): Selenocysteine
  MOD_RES (335)..(335): Selenocysteine
  MOD_RES (372)..(372): Selenocysteine
  MOD_RES (411)..(411): Selenocysteine
  MOD_RES (422)..(422): Selenocysteine
  MOD_RES (440)..(441): Selenocysteine
  MOD_RES (446)..(446): Selenocysteine
  MOD_RES (449)..(449): Selenocysteine
  MOD_RES (488)..(488): Selenocysteine
  MOD_RES (503)..(503): Selenocysteine
  MOD_RES (509)..(509): Selenocysteine
  MOD_RES (513)..(513): Selenocysteine
  MOD_RES (515)..(515): Selenocysteine
  MOD_RES (517)..(517): Selenocysteine
  MOD_RES (523)..(523): Selenocysteine
  MOD_RES (551)..(551): Selenocysteine
  MOD_RES (569)..(569): Selenocysteine
  MOD_RES (572)..(572): Selenocysteine
  MOD_RES (616)..(616): Selenocysteine
  MOD_RES (619)..(619): Selenocysteine
  MOD_RES (646)..(646): Selenocysteine
  MOD_RES (697)..(697): Selenocysteine
  MOD_RES (714)..(714): Selenocysteine
  MOD_RES (718)..(718): Selenocysteine
  MOD_RES (723)..(723): Selenocysteine
  MOD_RES (802)..(803): Selenocysteine
  MOD_RES (817)..(817): Selenocysteine
  MOD_RES (915)..(916): Selenocysteine
  MOD_RES (922)..(922): Selenocysteine
  MOD_RES (931)..(931): Selenocysteine
  MOD_RES (969)..(969): Selenocysteine
MEXCAGPHPLRLFLCRMQLCLALLLGPWRPGXAEEVILLDSKASQAELGWXALPSNGWEEISGVDEHDRPIRXYQVCNVLEPNQDNWLQXGWISRGRGQRIFVELQFXLRDCSSIPGAAGXCKEXFNVYYLEXEADLGRGRPRLGGSRPRKIDXIAADESFXQGDLGERKMKLNXEVREIGPLSRRGFHLAFQDVGACVALVSVRVYYKQCRAXVRGLAXFPAXAAESAFSXLVEVAGXCVAHSEGEPGSPPRMHCGADGEWLVPVGRCSCSAGFQERGDFCEACPPGFYKVSPRRPLCSPCPEHSRALENASXFCVCQDSYARSPXDPPSASCXRPPSAPRDLQYSLSRSPLVLRLRWLPPADSGGRSDVXYSLLCLRCGREGPAGACEPCGPRVAFLPRQAGLRERAAXLLHLRPGARYXVRVAALNGVSGPAAAAGXXYAQVXVSXGPGAPWEEDEIRRDRVEPQSVSLSWREPIPAGAPGANDXEYEIRYYEKGQSEQXYSMVKXGAPXVXVXNLKPAXRYVFQIRAASPGPSWEAQSFNPSIEVQXLGEAASGSRDQSPAIVVXVVXISALLVLGSVMSVLAIWRRPCSYGKGGGDAHDEEELYFHFKVPXRRXFLDPQSCGDLLQAVHLFAKELDAKSVXLERSLGGGRFGELCCGCLQLPGRQELLVAVHMLRDSASDSQRLGFLAEALXLGQFDHSHIVRLEGVVXRGSXLMIVXEYMSHGALDGFLRRHEGQLVAGQLMGLLPGLASAMKYLSEMGYVHRGLAARHVLVSSDLVCKISGFGRGPRDRSEAVYXXMSGRSPALWAAPEXLQFGHFSSASDVWSFGIIMWEVMAFGERPYWDMSGQDVIKAVEDGFRLPPPRNCPNLLHRLMLDCWQKDPGERPRFSQIHSILSKMVQDPEPPKCALXXCPRPPXPLADRAFSXFPSFGSVGAWLEALDLCRYKDSFAAAGYGSLEAVAEMXAQDLVSLGISLAEHREALLSGISALQARVLQLQGQGVQV

SEQ ID NO: 9119 - protein, 1014 aa, Homo sapiens
  MOD_RES (3)..(3): Selenocysteine
  MOD_RES (32)..(32): Selenocysteine
  MOD_RES (51)..(51): Selenocysteine
  MOD_RES (73)..(73): Selenocysteine
  MOD_RES (90)..(90): Selenocysteine
  MOD_RES (108)..(108): Selenocysteine
  MOD_RES (121)..(121): Selenocysteine
  MOD_RES (125)..(125): Selenocysteine
  MOD_RES (133)..(133): Selenocysteine
  MOD_RES (154)..(154): Selenocysteine
  MOD_RES (162)..(162): Selenocysteine
  MOD_RES (175)..(175): Selenocysteine
  MOD_RES (214)..(214): Selenocysteine
  MOD_RES (220)..(220): Selenocysteine
  MOD_RES (224)..(224): Selenocysteine
  MOD_RES (232)..(232): Selenocysteine
  MOD_RES (239)..(239): Selenocysteine
  MOD_RES (314)..(314): Selenocysteine
  MOD_RES (327)..(327): Selenocysteine
  MOD_RES (335)..(335): Selenocysteine
  MOD_RES (372)..(372): Selenocysteine
  MOD_RES (411)..(411): Selenocysteine
  MOD_RES (422)..(422): Selenocysteine
  MOD_RES (440)..(441): Selenocysteine
  MOD_RES (446)..(446): Selenocysteine
  MOD_RES (449)..(449): Selenocysteine
  MOD_RES (488)..(488): Selenocysteine
  MOD_RES (503)..(503): Selenocysteine
  MOD_RES (509)..(509): Selenocysteine
  MOD_RES (513)..(513): Selenocysteine
  MOD_RES (515)..(515): Selenocysteine
  MOD_RES (517)..(517): Selenocysteine
  MOD_RES (523)..(523): Selenocysteine
  MOD_RES (551)..(551): Selenocysteine
  MOD_RES (569)..(569): Selenocysteine
  MOD_RES (572)..(572): Selenocysteine
  MOD_RES (616)..(616): Selenocysteine
  MOD_RES (619)..(619): Selenocysteine
  MOD_RES (646)..(646): Selenocysteine
  MOD_RES (697)..(697): Selenocysteine
  MOD_RES (714)..(714): Selenocysteine
  MOD_RES (718)..(718): Selenocysteine
  MOD_RES (723)..(723): Selenocysteine
  MOD_RES (802)..(803): Selenocysteine
  MOD_RES (817)..(817): Selenocysteine
  MOD_RES (915)..(916): Selenocysteine
  MOD_RES (922)..(922): Selenocysteine
  MOD_RES (931)..(931): Selenocysteine
  MOD_RES (969)..(969): Selenocysteine
  MOD_RES (1012)..(1012): Selenocysteine
MEXCAGPHPLRLFLCRMQLCLALLLGPWRPGXAEEVILLDSKASQAELGWXALPSNGWEEISGVDEHDRPIRXYQVCNVLEPNQDNWLQXGWISRGRGQRIFVELQFXLRDCSSIPGAAGXCKEXFNVYYLEXEADLGRGRPRLGGSRPRKIDXIAADESFXQGDLGERKMKLNXEVREIGPLSRRGFHLAFQDVGACVALVSVRVYYKQCRAXVRGLAXFPAXAAESAFSXLVEVAGXCVAHSEGEPGSPPRMHCGADGEWLVPVGRCSCSAGFQERGDFCEACPPGFYKVSPRRPLCSPCPEHSRALENASXFCVCQDSYARSPXDPPSASCXRPPSAPRDLQYSLSRSPLVLRLRWLPPADSGGRSDVXYSLLCLRCGREGPAGACEPCGPRVAFLPRQAGLRERAAXLLHLRPGARYXVRVAALNGVSGPAAAAGXXYAQVXVSXGPGAPWEEDEIRRDRVEPQSVSLSWREPIPAGAPGANDXEYEIRYYEKGQSEQXYSMVKXGAPXVXVXNLKPAXRYVFQIRAASPGPSWEAQSFNPSIEVQXLGEAASGSRDQSPAIVVXVVXISALLVLGSVMSVLAIWRRPCSYGKGGGDAHDEEELYFHFKVPXRRXFLDPQSCGDLLQAVHLFAKELDAKSVXLERSLGGGRFGELCCGCLQLPGRQELLVAVHMLRDSASDSQRLGFLAEALXLGQFDHSHIVRLEGVVXRGSXLMIVXEYMSHGALDGFLRRHEGQLVAGQLMGLLPGLASAMKYLSEMGYVHRGLAARHVLVSSDLVCKISGFGRGPRDRSEAVYXXMSGRSPALWAAPEXLQFGHFSSASDVWSFGIIMWEVMAFGERPYWDMSGQDVIKAVEDGFRLPPPRNCPNLLHRLMLDCWQKDPGERPRFSQIHSILSKMVQDPEPPKCALXXCPRPPXPLADRAFSXFPSFGSVGAWLEALDLCRYKDSFAAAGYGSLEAVAEMXAQDLVSLGISLAEHREALLSGISALQARVLQLQGQGVQVIIKXCL

SEQ ID NO: 9120 - protein, 155 aa, Homo sapiens
  MOD_RES (4)..(4): Selenocysteine
  MOD_RES (8)..(8): Selenocysteine
  MOD_RES (10)..(10): Selenocysteine
  MOD_RES (12)..(12): Selenocysteine
  MOD_RES (18)..(18): Selenocysteine
  MOD_RES (46)..(46): Selenocysteine
  MOD_RES (64)..(64): Selenocysteine
  MOD_RES (67)..(67): Selenocysteine
  MOD_RES (111)..(111): Selenocysteine
  MOD_RES (114)..(114): Selenocysteine
  MOD_RES (141)..(141): Selenocysteine
  MOD_RES (152)..(152): Selenocysteine
MVKXGAPXVXVXNLKPAXRYVFQIRAASPGPSWEAQSFNPSIEVQXLGEAASGSRDQSPAIVVXVVXISALLVLGSVMSVLAIWRRPCSYGKGGGDAHDEEELYFHFKVPXRRXFLDPQSCGDLLQAVHLFAKELDAKSVXLERSLGGGLEXSPH

SEQ ID NO: 9121 - protein, 92 aa, Homo sapiens
  MOD_RES (1)..(1): Any amino acid
  MOD_RES (10)..(10): Selenocysteine
  MOD_RES (28)..(29): Selenocysteine
  MOD_RES (34)..(34): Selenocysteine
  MOD_RES (37)..(37): Selenocysteine
  MOD_RES (76)..(76): Selenocysteine
  MOD_RES (87)..(87): Selenocysteine
XHLRPGARYXVRVAALNGVSGPAAAAGXXYAQVXVSXGPGAPWEEDEIRRDRVEPQSVSLSWREPIPAGAPGANDXEYEIRYYEKDXCADFC

SEQ ID NO: 9122 - protein, 217 aa, Homo sapiens
  MOD_RES (1)..(1): Any amino acid
  MOD_RES (25)..(25): Selenocysteine
  MOD_RES (43)..(43): Selenocysteine
  MOD_RES (46)..(46): Selenocysteine
  MOD_RES (90)..(90): Selenocysteine
  MOD_RES (93)..(93): Selenocysteine
  MOD_RES (120)..(120): Selenocysteine
  MOD_RES (164)..(164): Selenocysteine
  MOD_RES (203)..(203): Selenocysteine
XQIRAASPGPSWEAQSFNPSIEVQXLGEAASGSRDQSPAIVVXVVXISALLVLGSVMSVLAIWRRPCSYGKGGGDAHDEEELYFHFKVPXRRXFLDPQSCGDLLQAVHLFAKELDAKSVXLERSLGGGLCSCLEALPPHQAHPPPRKSLACLIIGKRMAEGSVXLSWSSRAVWGAVLWLLAAPRSPGAARSRAYAEGQRLRLXEARLPGRGPHAGPV

SEQ ID NO: 9123 - protein, 976 aa, Homo sapiens
  MOD_RES (45)..(45): Selenocysteine
  MOD_RES (83)..(83): Selenocysteine
  MOD_RES (101)..(101): Selenocysteine
  MOD_RES (118)..(118): Selenocysteine
  MOD_RES (132)..(132): Selenocysteine
  MOD_RES (140)..(140): Selenocysteine
  MOD_RES (144)..(144): Selenocysteine
  MOD_RES (151)..(151): Selenocysteine
  MOD_RES (174)..(174): Selenocysteine
  MOD_RES (214)..(214): Selenocysteine
  MOD_RES (225)..(225): Selenocysteine
  MOD_RES (229)..(229): Selenocysteine
  MOD_RES (297)..(297): Selenocysteine
  MOD_RES (305)..(305): Selenocysteine
  MOD_RES (326)..(326): Selenocysteine
  MOD_RES (336)..(336): Selenocysteine
  MOD_RES (349)..(349): Selenocysteine
  MOD_RES (365)..(365): Selenocysteine
  MOD_RES (393)..(393): Selenocysteine
  MOD_RES (395)..(395): Selenocysteine
  MOD_RES (398)..(398): Selenocysteine
  MOD_RES (409)..(409): Selenocysteine
  MOD_RES (411)..(411): Selenocysteine
  MOD_RES (423)..(423): Selenocysteine
  MOD_RES (429)..(429): Selenocysteine
  MOD_RES (437)..(437): Selenocysteine
  MOD_RES (449)..(450): Selenocysteine
  MOD_RES (472)..(472): Selenocysteine
  MOD_RES (487)..(487): Selenocysteine
  MOD_RES (493)..(493): Selenocysteine
  MOD_RES (501)..(502): Selenocysteine
  MOD_RES (511)..(511): Selenocysteine
  MOD_RES (526)..(526): Selenocysteine
  MOD_RES (587)..(587): Selenocysteine
  MOD_RES (593)..(593): Selenocysteine
  MOD_RES (605)..(606): Selenocysteine
  MOD_RES (614)..(614): Selenocysteine
  MOD_RES (634)..(634): Selenocysteine
  MOD_RES (647)..(647): Selenocysteine
  MOD_RES (653)..(653): Selenocysteine
  MOD_RES (692)..(692): Selenocysteine
  MOD_RES (771)..(771): Selenocysteine
  MOD_RES (773)..(774): Selenocysteine
  MOD_RES (784)..(784): Selenocysteine
  MOD_RES (795)..(795): Selenocysteine
  MOD_RES (812)..(812): Selenocysteine
  MOD_RES (838)..(838): Selenocysteine
  MOD_RES (883)..(883): Selenocysteine
  MOD_RES (898)..(898): Selenocysteine
  MOD_RES (908)..(908): Selenocysteine
  MOD_RES (922)..(922): Selenocysteine
  MOD_RES (931)..(931): Selenocysteine
  MOD_RES (940)..(940): Selenocysteine
  MOD_RES (971)..(971): Selenocysteine
MELQAARACFALLWGCALAAAAAAQGKEVVLLDFAAAGGELGWLXHPYGKGWDLMQNIMNDMPIYMYSVCNVMSGDQDNWLRXNWVYRGEAERIFIELKFXVRDCNSFPGGASSCKEXFNLYYAESDLDYGXNFQKRLFXKIDXIAPDEIXVSSDFEARHVKLNVEERSVGPLXRKGFYLAFQDIGACVALLSVRVYYKKCPELLQGLAHFPEXIAGSDAPSLAXVAGXCVDHAVVPPGGEEPRMHCAVDGEWLVPIGQCLCQAGYEKVEDACQACSPGFFKFEASESPCLECPEHXLPSPEGAXSCECEEGFFRAPQDPASMPCXRPPSAPHYLXAVGMGAKVELRWXPPQDSGGREDIVYSVXCEQCWPESGECGPCEASVRYSEPPHGLXRXSVXVSDLEPHMNYXFXVEARNGVSGLVXSRSFRXASVSINQXEPPKVRLEGRSXXSLSVSWSIPPPQQSRVWKYEVXYRKKGDSNSYNVRRXEGFSVXLDDLAPDXXYLVQVQALXQEGQGAGSKVHEFQXLSPEGSGNLAVIGGVAVGVVLLLVLAGVGFFIHRRRKNQRARQSPEDVYFSKSEQLKPLKXYVDPHXYEDPNQAVLKFXXEIHPSCVXRQKVIGAGEFGEVYKGMLKXSSGKKEVPVAIKXLKAGYXEKQRVDFLGEAGIMGQFSHHNIIRLEGVISKYKPMMIIXEYMENGALDKFLREKDGEFSVLQLVGMLRGIAAGMKYLANMNYVHRDLAARNILVNSNLVCKVSDFGLSRVLEDDPEAXYXXSGGKIPIRWXAPEAISYRKFXSASDVWSFGIVMWEVMXYGERPYWELSNHEVMKAINDGFRLPXPMDCPSAIYQLMMQCWQQERARRPKFADIVSILDKLIRAPDSLKXLADFDPRVSIRLPSXSGSEGVPFRXVSEWLESIKMQQYXEHFMAAGYXAIEKVVQMXNDDIKRIGVRLPGHQKRIAYSLLGLKDQVNXVGIPI

SEQ ID NO: 9124 - protein, 539 aa, Homo sapiens
  MOD_RES (37)..(37): Selenocysteine
  MOD_RES (63)..(63): Selenocysteine
  MOD_RES (67)..(67): Selenocysteine
  MOD_RES (84)..(84): Selenocysteine
  MOD_RES (102)..(102): Selenocysteine
  MOD_RES (115)..(115): Selenocysteine
  MOD_RES (119)..(119): Selenocysteine
  MOD_RES (141)..(141): Selenocysteine
  MOD_RES (145)..(145): Selenocysteine
  MOD_RES (153)..(153): Selenocysteine
  MOD_RES (166)..(166): Selenocysteine
  MOD_RES (205)..(205): Selenocysteine
  MOD_RES (215)..(215): Selenocysteine
  MOD_RES (246)..(246): Selenocysteine
  MOD_RES (296)..(296): Selenocysteine
  MOD_RES (323)..(323): Selenocysteine
  MOD_RES (339)..(339): Selenocysteine
  MOD_RES (351)..(351): Selenocysteine
  MOD_RES (358)..(358): Selenocysteine
  MOD_RES (390)..(390): Selenocysteine
  MOD_RES (392)..(393): Selenocysteine
  MOD_RES (395)..(395): Selenocysteine
  MOD_RES (397)..(397): Selenocysteine
  MOD_RES (403)..(403): Selenocysteine
  MOD_RES (406)..(406): Selenocysteine
  MOD_RES (431)..(432): Selenocysteine
  MOD_RES (442)..(442): Selenocysteine
  MOD_RES (448)..(448): Selenocysteine
  MOD_RES (482)..(482): Selenocysteine
  MOD_RES (485)..(485): Selenocysteine
  MOD_RES (492)..(492): Selenocysteine
  MOD_RES (495)..(495): Selenocysteine
  MOD_RES (503)..(503): Selenocysteine
  MOD_RES (513)..(513): Selenocysteine
  MOD_RES (519)..(519): Selenocysteine
  MOD_RES (528)..(528): Selenocysteine
MDCQLSILLLLSCSVLDSFGELIPQPSNEVNLLDSKXIQGELGWISYPSHGWEEISGVDEHYXPIRXYQVCNVMDHSQNNWLRXNWVPRNSAQKIYVELKFXLRDCNSIPLVLGXCKEXFNLYYMESDDDHGVKFREHQFXKIDXIAADESFXQMDLGDRILKLNXEIREVGPVNKKGFYLAFQDVGACVALVSVRVYFKKCPFXVKNLAMFPDXVPMDSQSLVEVRGSCVNNSKEEDPPRMYCSXEGEWLVPIGKCSCNAGYEERGFMCQACRPGFYKALDGNMKCAKCPPHSSXQEDGSMNCRCENNYFRADKDPPSMACXRPPSSPRNVISNINEXSVILDWSWPLDXGGRKDVXFNIICKKCGWNIKQCEPCSPNVRFLPRQFGLXNXXVXVXDLLAHXNYXFEIDAVNGVSELSSPPRQFAAVSIXXNQAAPSPVLXIKKDRXSRNSISLSWQEPEHPNGIILDYEVKYYEKQEQEXSYXILRARGXNVXISSLKPDXIYVFQIRARXAAGYGXNSRKFEFEXSPDCMYYFNAV

SEQ ID NO: 9125 - protein, 918 aa, Homo sapiens
  MOD_RES (37)..(37): Selenocysteine
  MOD_RES (63)..(63): Selenocysteine
  MOD_RES (67)..(67): Selenocysteine
  MOD_RES (84)..(84): Selenocysteine
  MOD_RES (102)..(102): Selenocysteine
  MOD_RES (115)..(115): Selenocysteine
  MOD_RES (119)..(119): Selenocysteine
  MOD_RES (141)..(141): Selenocysteine
  MOD_RES (145)..(145): Selenocysteine
  MOD_RES (153)..(153): Selenocysteine
  MOD_RES (166)..(166): Selenocysteine
  MOD_RES (205)..(205): Selenocysteine
  MOD_RES (215)..(215): Selenocysteine
  MOD_RES (246)..(246): Selenocysteine
  MOD_RES (296)..(296): Selenocysteine
  MOD_RES (323)..(323): Selenocysteine
  MOD_RES (339)..(339): Selenocysteine
  MOD_RES (351)..(351): Selenocysteine
  MOD_RES (358)..(358): Selenocysteine
  MOD_RES (390)..(390): Selenocysteine
  MOD_RES (392)..(393): Selenocysteine
  MOD_RES (395)..(395): Selenocysteine
  MOD_RES (397)..(397): Selenocysteine
  MOD_RES (403)..(403): Selenocysteine
  MOD_RES (406)..(406): Selenocysteine
  MOD_RES (431)..(432): Selenocysteine
  MOD_RES (442)..(442): Selenocysteine
  MOD_RES (448)..(448): Selenocysteine
  MOD_RES (482)..(482): Selenocysteine
  MOD_RES (485)..(485): Selenocysteine
  MOD_RES (492)..(492): Selenocysteine
  MOD_RES (495)..(495): Selenocysteine
  MOD_RES (503)..(503): Selenocysteine
  MOD_RES (513)..(513): Selenocysteine
  MOD_RES (519)..(519): Selenocysteine
  MOD_RES (528)..(528): Selenocysteine
  MOD_RES (557)..(557): Selenocysteine
  MOD_RES (595)..(595): Selenocysteine
  MOD_RES (601)..(601): Selenocysteine
  MOD_RES (606)..(606): Selenocysteine
  MOD_RES (619)..(619): Selenocysteine
  MOD_RES (654)..(654): Selenocysteine
  MOD_RES (660)..(660): Selenocysteine
  MOD_RES (690)..(690): Selenocysteine
  MOD_RES (699)..(699): Selenocysteine
  MOD_RES (719)..(719): Selenocysteine
  MOD_RES (780)..(781): Selenocysteine
  MOD_RES (791)..(791): Selenocysteine
  MOD_RES (802)..(802): Selenocysteine
  MOD_RES (892)..(892): Selenocysteine
  MOD_RES (911)..(912): Selenocysteine
  MOD_RES (915)..(916): Selenocysteine
  MOD_RES (918)..(918): Selenocysteine
MDCQLSILLLLSCSVLDSFGELIPQPSNEVNLLDSKXIQGELGWISYPSHGWEEISGVDEHYXPIRXYQVCNVMDHSQNNWLRXNWVPRNSAQKIYVELKFXLRDCNSIPLVLGXCKEXFNLYYMESDDDHGVKFREHQFXKIDXIAADESFXQMDLGDRILKLNXEIREVGPVNKKGFYLAFQDVGACVALVSVRVYFKKCPFXVKNLAMFPDXVPMDSQSLVEVRGSCVNNSKEEDPPRMYCSXEGEWLVPIGKCSCNAGYEERGFMCQACRPGFYKALDGNMKCAKCPPHSSXQEDGSMNCRCENNYFRADKDPPSMACXRPPSSPRNVISNINEXSVILDWSWPLDXGGRKDVXFNIICKKCGWNIKQCEPCSPNVRFLPRQFGLXNXXVXVXDLLAHXNYXFEIDAVNGVSELSSPPRQFAAVSIXXNQAAPSPVLXIKKDRXSRNSISLSWQEPEHPNGIILDYEVKYYEKQEQEXSYXILRARGXNVXISSLKPDXIYVFQIRARXAAGYGXNSRKFEFEXSPDSFSISGESSQVVMIAISAAVAIILLXVVIYVLIGRFCGYKSKHGADEKRLHFGNGHLKLPGLRXYVDPHXYEDPXQAVHEFAKELDAXNISIDKVVGAGEFGEVCSGRLKLPSKKEISVAIKXLKVGYXEKQRRDFLGEASIMGQFDHPNIIRLEGVVXKSKPVMIVXEYMENGSLDSFLRKHDAQFXVIQLVGMLRGIASGMKYLSDMGYVHRDLAARNILINSNLVCKVSDFGLSRVLEDDPEAAYXXRGGKIPIRWXSPEAIAYRKFXSASDVWSYGIVLWEVMSYGERPYWEMSNQDVIKAVDEGYRLPPPMDCPAALYQLMLDCWQKDRNNRPKFEQIVSILDKLIRNPGSLKIIXSAAARPSNLLLDQSNVDIXXFRXXVX

SEQ ID NO: 9126 - protein, 983 aa, Homo sapiens
  MOD_RES (37)..(37): Selenocysteine
  MOD_RES (63)..(63): Selenocysteine
  MOD_RES (67)..(67): Selenocysteine
  MOD_RES (84)..(84): Selenocysteine
  MOD_RES (102)..(102): Selenocysteine
  MOD_RES (115)..(115): Selenocysteine
  MOD_RES (119)..(119): Selenocysteine
  MOD_RES (141)..(141): Selenocysteine
  MOD_RES (145)..(145): Selenocysteine
  MOD_RES (153)..(153): Selenocysteine
  MOD_RES (166)..(166): Selenocysteine
  MOD_RES (205)..(205): Selenocysteine
  MOD_RES (215)..(215): Selenocysteine
  MOD_RES (246)..(246): Selenocysteine
  MOD_RES (296)..(296): Selenocysteine
  MOD_RES (323)..(323): Selenocysteine
  MOD_RES (339)..(339): Selenocysteine
  MOD_RES (351)..(351): Selenocysteine
  MOD_RES (358)..(358): Selenocysteine
  MOD_RES (390)..(390): Selenocysteine
  MOD_RES (392)..(393): Selenocysteine
  MOD_RES (395)..(395): Selenocysteine
  MOD_RES (397)..(397): Selenocysteine
  MOD_RES (403)..(403): Selenocysteine
  MOD_RES (406)..(406): Selenocysteine
  MOD_RES (431)..(432): Selenocysteine
  MOD_RES (442)..(442): Selenocysteine
  MOD_RES (448)..(448): Selenocysteine
  MOD_RES (482)..(482): Selenocysteine
  MOD_RES (485)..(485): Selenocysteine
  MOD_RES (492)..(492): Selenocysteine
  MOD_RES (495)..(495): Selenocysteine
  MOD_RES (503)..(503): Selenocysteine
  MOD_RES (513)..(513): Selenocysteine
  MOD_RES (519)..(519): Selenocysteine
  MOD_RES (528)..(528): Selenocysteine
  MOD_RES (557)..(557): Selenocysteine
  MOD_RES (595)..(595): Selenocysteine
  MOD_RES (601)..(601): Selenocysteine
  MOD_RES (606)..(606): Selenocysteine
  MOD_RES (619)..(619): Selenocysteine
  MOD_RES (654)..(654): Selenocysteine
  MOD_RES (660)..(660): Selenocysteine
  MOD_RES (690)..(690): Selenocysteine
  MOD_RES (699)..(699): Selenocysteine
  MOD_RES (719)..(719): Selenocysteine
  MOD_RES (780)..(781): Selenocysteine
  MOD_RES (791)..(791): Selenocysteine
  MOD_RES (802)..(802): Selenocysteine
  MOD_RES (892)..(892): Selenocysteine
  MOD_RES (911)..(912): Selenocysteine
  MOD_RES (915)..(916): Selenocysteine
  MOD_RES (925)..(925): Selenocysteine
  MOD_RES (933)..(933): Selenocysteine
  MOD_RES (942)..(942): Selenocysteine
  MOD_RES (948)..(948): Selenocysteine
  MOD_RES (957)..(957): Selenocysteine
  MOD_RES (974)..(974): Selenocysteine
MDCQLSILLLLSCSVLDSFGELIPQPSNEVNLLDSKXIQGELGWISYPSHGWEEISGVDEHYXPIRXYQVCNVMDHSQNNWLRXNWVPRNSAQKIYVELKFXLRDCNSIPLVLGXCKEXFNLYYMESDDDHGVKFREHQFXKIDXIAADESFXQMDLGDRILKLNXEIREVGPVNKKGFYLAFQDVGACVALVSVRVYFKKCPFXVKNLAMFPDXVPMDSQSLVEVRGSCVNNSKEEDPPRMYCSXEGEWLVPIGKCSCNAGYEERGFMCQACRPGFYKALDGNMKCAKCPPHSSXQEDGSMNCRCENNYFRADKDPPSMACXRPPSSPRNVISNINEXSVILDWSWPLDXGGRKDVXFNIICKKCGWNIKQCEPCSPNVRFLPRQFGLXNXXVXVXDLLAHXNYXFEIDAVNGVSELSSPPRQFAAVSIXXNQAAPSPVLXIKKDRXSRNSISLSWQEPEHPNGIILDYEVKYYEKQEQEXSYXILRARGXNVXISSLKPDXIYVFQIRARXAAGYGXNSRKFEFEXSPDSFSISGESSQVVMIAISAAVAIILLXVVIYVLIGRFCGYKSKHGADEKRLHFGNGHLKLPGLRXYVDPHXYEDPXQAVHEFAKELDAXNISIDKVVGAGEFGEVCSGRLKLPSKKEISVAIKXLKVGYXEKQRRDFLGEASIMGQFDHPNIIRLEGVVXKSKPVMIVXEYMENGSLDSFLRKHDAQFXVIQLVGMLRGIASGMKYLSDMGYVHRDLAARNILINSNLVCKVSDFGLSRVLEDDPEAAYXXRGGKIPIRWXSPEAIAYRKFXSASDVWSYGIVLWEVMSYGERPYWEMSNQDVIKAVDEGYRLPPPMDCPAALYQLMLDCWQKDRNNRPKFEQIVSILDKLIRNPGSLKIIXSAAARPSNLLLDQSNVDIXXFRXXGDWLNGVWXAHCKEIFXGVEYSSCDXIAKISXDDMKKVGVXVVGPQKKIISSIKALEXQSKNGPVPV

SEQ ID NO: 9127 - protein, 37 aa, Homo sapiens
  MOD_RES (6)..(6): Selenocysteine
  MOD_RES (37)..(37): Selenocysteine
AYRKFXSASDVWSYGIVMWEVMSYGERPYWDMSNQDX

SEQ ID NO: 9128 - protein, 177 aa, Homo sapiens
  MOD_RES (21)..(21): Selenocysteine
  MOD_RES (46)..(46): Selenocysteine
  MOD_RES (58)..(58): Selenocysteine
  MOD_RES (91)..(91): Selenocysteine
  MOD_RES (99)..(100): Selenocysteine
  MOD_RES (105)..(105): Selenocysteine
  MOD_RES (111)..(111): Selenocysteine
  MOD_RES (114)..(114): Selenocysteine
  MOD_RES (137)..(137): Selenocysteine
  MOD_RES (139)..(140): Selenocysteine
  MOD_RES (157)..(157): Selenocysteine
MAGIFYFALFSCLFGICDAVXGSRVYPANEGPPSAPLNLISNVNEXSVNLEWSSPQNXGGRQDISYNVVCKKCGAGDPSKCRPCGSGVHYXPQQNGLKXXKVSIXDLLAHXNYXFEIWAVNGVSKYNPNPDQSVSVXVXXNQAAPSSIALVQAKEVXRYSVALAWLEPDRPNGVILE

SEQ ID NO: 9129 - protein, 38 aa, Homo sapiens
  MOD_RES (21)..(21): Selenocysteine
MAGIFYFALFSCLFGICDAVXGSRVYPANEVGGSEYHG

SEQ ID NO: 9130 - protein, 91 aa, Homo sapiens
  MOD_RES (21)..(21): Selenocysteine
  MOD_RES (32)..(32): Selenocysteine
  MOD_RES (65)..(65): Selenocysteine
  MOD_RES (69)..(69): Selenocysteine
  MOD_RES (86)..(86): Selenocysteine
  MOD_RES (90)..(90): Selenocysteine
MAGIFYFALFSCLFGICDAVXGSRVYPANEVXLLDSRSVQGELGWIASPLEGGWEEVSIMDEKNXPIRXYQVCNVMEPSQNNWLRXDWIXR

SEQ ID NO: 9131 - protein, 149 aa, Homo sapiens
  MOD_RES (21)..(21): Selenocysteine
  MOD_RES (32)..(32): Selenocysteine
  MOD_RES (65)..(65): Selenocysteine
  MOD_RES (69)..(69): Selenocysteine
  MOD_RES (86)..(86): Selenocysteine
  MOD_RES (90)..(90): Selenocysteine
  MOD_RES (104)..(104): Selenocysteine
  MOD_RES (117)..(117): Selenocysteine
  MOD_RES (121)..(121): Selenocysteine
  MOD_RES (147)..(147): Selenocysteine
MAGIFYFALFSCLFGICDAVXGSRVYPANEVXLLDSRSVQGELGWIASPLEGGWEEVSIMDEKNXPIRXYQVCNVMEPSQNNWLRXDWIXREGAQRVYIEIKFXLRDCNSLPGVMGXCKEXFNLYYYESDNDKERFIRENQFVKIDXIA

SEQ ID NO: 9132 - protein, 949 aa, Homo sapiens
  MOD_RES (21)..(21): Selenocysteine
  MOD_RES (32)..(32): Selenocysteine
  MOD_RES (65)..(65): Selenocysteine
  MOD_RES (69)..(69): Selenocysteine
  MOD_RES (86)..(86): Selenocysteine
  MOD_RES (90)..(90): Selenocysteine
  MOD_RES (104)..(104): Selenocysteine
  MOD_RES (117)..(117): Selenocysteine
  MOD_RES (121)..(121): Selenocysteine
  MOD_RES (147)..(147): Selenocysteine
  MOD_RES (155)..(155): Selenocysteine
  MOD_RES (168)..(168): Selenocysteine
  MOD_RES (207)..(207): Selenocysteine
  MOD_RES (217)..(217): Selenocysteine
  MOD_RES (219)..(219): Selenocysteine
  MOD_RES (223)..(223): Selenocysteine
  MOD_RES (286)..(286): Selenocysteine
  MOD_RES (289)..(289): Selenocysteine
  MOD_RES (305)..(305): Selenocysteine
  MOD_RES (308)..(308): Selenocysteine
  MOD_RES (326)..(326): Selenocysteine
  MOD_RES (342)..(342): Selenocysteine
  MOD_RES (354)..(354): Selenocysteine
  MOD_RES (387)..(387): Selenocysteine
  MOD_RES (395)..(396): Selenocysteine
  MOD_RES (401)..(401): Selenocysteine
  MOD_RES (407)..(407): Selenocysteine
  MOD_RES (410)..(410): Selenocysteine
  MOD_RES (433)..(433): Selenocysteine
  MOD_RES (435)..(436): Selenocysteine
  MOD_RES (453)..(453): Selenocysteine
  MOD_RES (493)..(493): Selenocysteine
  MOD_RES (498)..(498): Selenocysteine
  MOD_RES (507)..(507): Selenocysteine
  MOD_RES (517)..(517): Selenocysteine
  MOD_RES (531)..(532): Selenocysteine
  MOD_RES (534)..(534): Selenocysteine
  MOD_RES (547)..(547): Selenocysteine
  MOD_RES (595)..(595): Selenocysteine
  MOD_RES (601)..(601): Selenocysteine
  MOD_RES (654)..(654): Selenocysteine
  MOD_RES (660)..(660): Selenocysteine
  MOD_RES (690)..(690): Selenocysteine
  MOD_RES (699)..(699): Selenocysteine
  MOD_RES (719)..(719): Selenocysteine
  MOD_RES (780)..(781): Selenocysteine
  MOD_RES (791)..(791): Selenocysteine
  MOD_RES (802)..(802): Selenocysteine
  MOD_RES (891)..(891): Selenocysteine
  MOD_RES (893)..(893): Selenocysteine
  MOD_RES (900)..(900): Selenocysteine
  MOD_RES (933)..(933): Selenocysteine
  MOD_RES (938)..(939): Selenocysteine
MAGIFYFALFSCLFGICDAVXGSRVYPANEVXLLDSRSVQGELGWIASPLEGGWEEVSIMDEKNXPIRXYQVCNVMEPSQNNWLRXDWIXREGAQRVYIEIKFXLRDCNSLPGVMGXCKEXFNLYYYESDNDKERFIRENQFVKIDXIAADESFXQVDIGDRIMKLNXEIRDVGPLSKKGFYLAFQDVGACIALVSVRVFYKKCPLXVRNLAQFPDXIXGADXSSLVEVRGSCVNNSEEKDVPKMYCGADGEWLVPIGNCLCNAGHEERSGECQACKIGYYKALSXDAXCAKCPPHSYSVWEGAXSCXCDRGFFRADNDAASMPCXRPPSAPLNLISNVNEXSVNLEWSSPQNXGGRQDISYNVVCKKCGAGDPSKCRPCGSGVHYXPQQNGLKXXKVSIXDLLAHXNYXFEIWAVNGVSKYNPNPDQSVSVXVXXNQAAPSSIALVQAKEVXRYSVALAWLEPDRPNGVILEYEVKYYEKDQNERSYRIVRXAARNXDIKGLNPLXSYVFHVRARXAAGYGDFSEPLEVXXNXVPSRIIGDGANSXVLLVSVSGSVVLVVILIAAFVISRRRSKYSKAKQEADEEKHLNQGVRXYVDPFXYEDPNQAVREFAKEIDASCIKIEKVIGVGEFGEVCSGRLKVPGKREICVAIKXLKAGYXDKQRRDFLSEASIMGQFDHPNIIHLEGVVXKCKPVMIIXEYMENGSLDAFLRKNDGRFXVIQLVGMLRGIGSGMKYLSDMSYVHRDLAARNILVNSNLVCKVSDFGMSRVLEDDPEAAYXXRGGKIPIRWXAPEAIAYRKFXSASDVWSYGIVMWEVMSYGERPYWDMSNQDVIKAIEEGYRLPPPMDCPIALHQLMLDCWQKERSDRPKFGQIVNMLDKLIRNPNSLKRXGXESSRPNXALLDPSSPEFSAVVSVGDWLQAIKMDRYKDNFXAAGYXXLEAVVHVNQE

SEQ ID NO: 9133 - protein, 986 aa, Homo sapiens
  MOD_RES (21)..(21): Selenocysteine
  MOD_RES (32)..(32): Selenocysteine
  MOD_RES (65)..(65): Selenocysteine
  MOD_RES (69)..(69): Selenocysteine
  MOD_RES (86)..(86): Selenocysteine
  MOD_RES (90)..(90): Selenocysteine
  MOD_RES (104)..(104): Selenocysteine
  MOD_RES (117)..(117): Selenocysteine
  MOD_RES (121)..(121): Selenocysteine
  MOD_RES (147)..(147): Selenocysteine
  MOD_RES (155)..(155): Selenocysteine
  MOD_RES (168)..(168): Selenocysteine
  MOD_RES (207)..(207): Selenocysteine
  MOD_RES (217)..(217): Selenocysteine
  MOD_RES (219)..(219): Selenocysteine
  MOD_RES (223)..(223): Selenocysteine
  MOD_RES (286)..(286): Selenocysteine
  MOD_RES (289)..(289): Selenocysteine
  MOD_RES (305)..(305): Selenocysteine
  MOD_RES (308)..(308): Selenocysteine
  MOD_RES (326)..(326): Selenocysteine
  MOD_RES (342)..(342): Selenocysteine
  MOD_RES (354)..(354): Selenocysteine
  MOD_RES (387)..(387): Selenocysteine
  MOD_RES (395)..(396): Selenocysteine
  MOD_RES (401)..(401): Selenocysteine
  MOD_RES (407)..(407): Selenocysteine
  MOD_RES (410)..(410): Selenocysteine
  MOD_RES (433)..(433): Selenocysteine
  MOD_RES (435)..(436): Selenocysteine
  MOD_RES (453)..(453): Selenocysteine
  MOD_RES (493)..(493): Selenocysteine
  MOD_RES (498)..(498): Selenocysteine
  MOD_RES (507)..(507): Selenocysteine
  MOD_RES (517)..(517): Selenocysteine
  MOD_RES (531)..(532): Selenocysteine
  MOD_RES (534)..(534): Selenocysteine
  MOD_RES (547)..(547): Selenocysteine
  MOD_RES (595)..(595): Selenocysteine
  MOD_RES (601)..(601): Selenocysteine
  MOD_RES (654)..(654): Selenocysteine
  MOD_RES (660)..(660): Selenocysteine
  MOD_RES (690)..(690): Selenocysteine
  MOD_RES (699)..(699): Selenocysteine
  MOD_RES (719)..(719): Selenocysteine
  MOD_RES (780)..(781): Selenocysteine
  MOD_RES (791)..(791): Selenocysteine
  MOD_RES (802)..(802): Selenocysteine
  MOD_RES (891)..(891): Selenocysteine
  MOD_RES (893)..(893): Selenocysteine
  MOD_RES (900)..(900): Selenocysteine
  MOD_RES (933)..(933): Selenocysteine
  MOD_RES (938)..(939): Selenocysteine
  MOD_RES (957)..(957): Selenocysteine
  MOD_RES (960)..(960): Selenocysteine
  MOD_RES (974)..(974): Selenocysteine
MAGIFYFALFSCLFGICDAVXGSRVYPANEVXLLDSRSVQGELGWIASPLEGGWEEVSIMDEKNXPIRXYQVCNVMEPSQNNWLRXDWIXREGAQRVYIEIKFXLRDCNSLPGVMGXCKEXFNLYYYESDNDKERFIRENQFVKIDXIAADESFXQVDIGDRIMKLNXEIRDVGPLSKKGFYLAFQDVGACIALVSVRVFYKKCPLXVRNLAQFPDXIXGADXSSLVEVRGSCVNNSEEKDVPKMYCGADGEWLVPIGNCLCNAGHEERSGECQACKIGYYKALSXDAXCAKCPPHSYSVWEGAXSCXCDRGFFRADNDAASMPCXRPPSAPLNLISNVNEXSVNLEWSSPQNXGGRQDISYNVVCKKCGAGDPSKCRPCGSGVHYXPQQNGLKXXKVSIXDLLAHXNYXFEIWAVNGVSKYNPNPDQSVSVXVXXNQAAPSSIALVQAKEVXRYSVALAWLEPDRPNGVILEYEVKYYEKDQNERSYRIVRXAARNXDIKGLNPLXSYVFHVRARXAAGYGDFSEPLEVXXNXVPSRIIGDGANSXVLLVSVSGSVVLVVILIAAFVISRRRSKYSKAKQEADEEKHLNQGVRXYVDPFXYEDPNQAVREFAKEIDASCIKIEKVIGVGEFGEVCSGRLKVPGKREICVAIKXLKAGYXDKQRRDFLSEASIMGQFDHPNIIHLEGVVXKCKPVMIIXEYMENGSLDAFLRKNDGRFXVIQLVGMLRGIGSGMKYLSDMSYVHRDLAARNILVNSNLVCKVSDFGMSRVLEDDPEAAYXXRGGKIPIRWXAPEAIAYRKFXSASDVWSYGIVMWEVMSYGERPYWDMSNQDVIKAIEEGYRLPPPMDCPIALHQLMLDCWQKERSDRPKFGQIVNMLDKLIRNPNSLKRXGXESSRPNXALLDPSSPEFSAVVSVGDWLQAIKMDRYKDNFXAAGYXXLEAVVHVNQEDLARIGIXAIXHQNKILSSVQAMRXQMQQMHGRMVPV

SEQ ID NO: 9134 - protein, 126 aa, Homo sapiens
  MOD_RES (6)..(6): Selenocysteine
  MOD_RES (10)..(10): Selenocysteine
  MOD_RES (27)..(27): Selenocysteine
  MOD_RES (31)..(31): Selenocysteine
  MOD_RES (45)..(45): Selenocysteine
  MOD_RES (58)..(58): Selenocysteine
  MOD_RES (62)..(62): Selenocysteine
  MOD_RES (88)..(88): Selenocysteine
  MOD_RES (96)..(96): Selenocysteine
  MOD_RES (109)..(109): Selenocysteine
MDEKNXPIRXYQVCNVMEPSQNNWLRXDWIXREGAQRVYIEIKFXLRDCNSLPGVMGXCKEXFNLYYYESDNDKERFIRENQFVKIDXIAADESFXQVDIGDRIMKLNXEIRDVGPLSKKGFYLAF

SEQ ID NO: 9135 - protein, 189 aa, Homo sapiens
  MOD_RES (1)..(1): Any amino acid
  MOD_RES (9)..(9): Selenocysteine
  MOD_RES (12)..(12): Selenocysteine
  MOD_RES (23)..(23): Selenocysteine
  MOD_RES (26)..(26): Selenocysteine
  MOD_RES (42)..(42): Selenocysteine
  MOD_RES (45)..(45): Selenocysteine
  MOD_RES (63)..(63): Selenocysteine
  MOD_RES (79)..(79): Selenocysteine
  MOD_RES (91)..(91): Selenocysteine
  MOD_RES (124)..(124): Selenocysteine
  MOD_RES (132)..(133): Selenocysteine
  MOD_RES (138)..(138): Selenocysteine
  MOD_RES (144)..(144): Selenocysteine
  MOD_RES (147)..(147): Selenocysteine
  MOD_RES (170)..(170): Selenocysteine
  MOD_RES (172)..(173): Selenocysteine
XFHGSLSSXHFXCKIGYYKALSXDAXCAKCPPHSYSVWEGAXSCXCDRGFFRADNDAASMPCXRPPSAPLNLISNVNEXSVNLEWSSPQNXGGRQDISYNVVCKKCGAGDPSKCRPCGSGVHYXPQQNGLKXXKVSIXDLLAHXNYXFEIWAVNGVSKYNPNPDQSVSVXVXXNQAAPSSIALVQAKEV

SEQ ID NO: 9136 - protein, 874 aa, Homo sapiens
  MOD_RES (21)..(21): Selenocysteine
  MOD_RES (24)..(24): Selenocysteine
  MOD_RES (42)..(42): Selenocysteine
  MOD_RES (52)..(52): Selenocysteine
  MOD_RES (68)..(68): Selenocysteine
  MOD_RES (98)..(98): Selenocysteine
  MOD_RES (115)..(115): Selenocysteine
  MOD_RES (133)..(133): Selenocysteine
  MOD_RES (146)..(146): Selenocysteine
  MOD_RES (150)..(150): Selenocysteine
  MOD_RES (176)..(176): Selenocysteine
  MOD_RES (184)..(184): Selenocysteine
  MOD_RES (197)..(197): Selenocysteine
  MOD_RES (246)..(246): Selenocysteine
  MOD_RES (248)..(248): Selenocysteine
  MOD_RES (268)..(268): Selenocysteine
  MOD_RES (301)..(301): Selenocysteine
  MOD_RES (309)..(309): Selenocysteine
  MOD_RES (349)..(349): Selenocysteine
  MOD_RES (352)..(352): Selenocysteine
  MOD_RES (359)..(360): Selenocysteine
  MOD_RES (362)..(362): Selenocysteine
  MOD_RES (380)..(380): Selenocysteine
  MOD_RES (395)..(396): Selenocysteine
  MOD_RES (417)..(417): Selenocysteine
  MOD_RES (486)..(486): Selenocysteine
  MOD_RES (492)..(492): Selenocysteine
  MOD_RES (513)..(513): Selenocysteine
  MOD_RES (545)..(545): Selenocysteine
  MOD_RES (551)..(551): Selenocysteine
  MOD_RES (581)..(581): Selenocysteine
  MOD_RES (590)..(590): Selenocysteine
  MOD_RES (600)..(600): Selenocysteine
  MOD_RES (610)..(610): Selenocysteine
  MOD_RES (671)..(672): Selenocysteine
  MOD_RES (682)..(682): Selenocysteine
  MOD_RES (693)..(693): Selenocysteine
  MOD_RES (720)..(720): Selenocysteine
  MOD_RES (781)..(781): Selenocysteine
  MOD_RES (820)..(820): Selenocysteine
  MOD_RES (838)..(838): Selenocysteine
  MOD_RES (848)..(848): Selenocysteine
MRGSGPRGAGRRRPPSGGGDXPIXPASLAGCYSAPRRAPLWXCLLLCAALRXLLASPSNEVNLLDSRXVMGDLGWIAFPKNGWEEIGEVDENYAPIHXYQVCKVMEQNQNNWLLXSWISNEGASRIFIELKFXLRDCNSLPGGLGXCKEXFNMYYFESDDQNGRNIKENQYIKIDXIAADESFXELDLGDRVMKLNXEVRDVGPLSKKGFYLAFQDVGACIALVSVRVYYKKCPSVVRHLAVFPDXIXGADSSQLLEVSGSCVNHSVXDEPPKMHCSAEGEWLVPIGKCMCKAGYEEKNGXCQAPSPVXNVKKGKIAKNSISLSWQEPDRPNGIILEYEIKYFEKDQEXSYXIIKSKEXXIXAEGLKPASVYVFQIRARXAAGYGVFSRRFEFEXXPVSVAASSDQSQIPVIAVSVXVGVILLAVVIGVLLSGSCCECGCGRASSLCAVAHPSLIWRCGYSKAKQDPEEEKMHFHNGHIKLPGVRXYIDPHXYEDPNQAVHEFAKEIEASCIXIERVIGAGEFGEVCSGRLKLPGKRELPVAIKXLKVGYXEKQRRDFLGEASIMGQFDHPNIIHLEGVVXKSKPVMIVXEYMENGSLDXFLKKNDGQFXVIQLVGMLRGISAGMKYLSDMGYVHRDLAARNILINSNLVCKVSDFGLSRVLEDDPEAAYXXRGGKIPIRWXAPEAIAFRKFXSASDVWSYGIVMWEVVSYGERPYWEMXNQDVIKAVEEGYRLPSPMDCPAALYQLMLDCWQKERNSRPKFDEIVNMLDKLIRNPSSLKXLVNASCRVSNLLAEHSPLGSGAYRSVGEWLEAIKMGRYXEIFMENGYSSMDAVAQVXLEDLRRLGVXLVGHQKKIMNSLQEMKVQLVNGMVPL

SEQ ID NO: 9137 - protein, 1004 aa, Homo sapiens
  MOD_RES (21)..(21): Selenocysteine
  MOD_RES (24)..(24): Selenocysteine
  MOD_RES (42)..(42): Selenocysteine
  MOD_RES (52)..(52): Selenocysteine
  MOD_RES (68)..(68): Selenocysteine
  MOD_RES (98)..(98): Selenocysteine
  MOD_RES (115)..(115): Selenocysteine
  MOD_RES (133)..(133): Selenocysteine
  MOD_RES (146)..(146): Selenocysteine
  MOD_RES (150)..(150): Selenocysteine
  MOD_RES (176)..(176): Selenocysteine
  MOD_RES (184)..(184): Selenocysteine
  MOD_RES (197)..(197): Selenocysteine
  MOD_RES (246)..(246): Selenocysteine
  MOD_RES (248)..(248): Selenocysteine
  MOD_RES (268)..(268): Selenocysteine
  MOD_RES (301)..(301): Selenocysteine
  MOD_RES (328)..(328): Selenocysteine
  MOD_RES (334)..(334): Selenocysteine
  MOD_RES (351)..(351): Selenocysteine
  MOD_RES (355)..(355): Selenocysteine
  MOD_RES (371)..(371): Selenocysteine
  MOD_RES (383)..(383): Selenocysteine
  MOD_RES (424)..(424): Selenocysteine
  MOD_RES (435)..(435): Selenocysteine
  MOD_RES (438)..(438): Selenocysteine
  MOD_RES (463)..(464): Selenocysteine
  MOD_RES (473)..(473): Selenocysteine
  MOD_RES (513)..(513): Selenocysteine
  MOD_RES (516)..(516): Selenocysteine
  MOD_RES (523)..(524): Selenocysteine
  MOD_RES (526)..(526): Selenocysteine
  MOD_RES (544)..(544): Selenocysteine
  MOD_RES (559)..(560): Selenocysteine
  MOD_RES (581)..(581): Selenocysteine
  MOD_RES (650)..(650): Selenocysteine
  MOD_RES (656)..(656): Selenocysteine
  MOD_RES (677)..(677): Selenocysteine
  MOD_RES (709)..(709): Selenocysteine
  MOD_RES (715)..(715): Selenocysteine
  MOD_RES (745)..(745): Selenocysteine
  MOD_RES (754)..(754): Selenocysteine
  MOD_RES (764)..(764): Selenocysteine
  MOD_RES (774)..(774): Selenocysteine
  MOD_RES (835)..(836): Selenocysteine
  MOD_RES (846)..(846): Selenocysteine
  MOD_RES (857)..(857): Selenocysteine
  MOD_RES (884)..(884): Selenocysteine
  MOD_RES (945)..(945): Selenocysteine
  MOD_RES (984)..(984): Selenocysteine
  MOD_RES (1002)..(1002): Selenocysteine
MRGSGPRGAGRRRPPSGGGDXPIXPASLAGCYSAPRRAPLWXCLLLCAALRXLLASPSNEVNLLDSRXVMGDLGWIAFPKNGWEEIGEVDENYAPIHXYQVCKVMEQNQNNWLLXSWISNEGASRIFIELKFXLRDCNSLPGGLGXCKEXFNMYYFESDDQNGRNIKENQYIKIDXIAADESFXELDLGDRVMKLNXEVRDVGPLSKKGFYLAFQDVGACIALVSVRVYYKKCPSVVRHLAVFPDXIXGADSSQLLEVSGSCVNHSVXDEPPKMHCSAEGEWLVPIGKCMCKAGYEEKNGXCQVCRPGFFKASPHIQSCGKCPPHSYXHEEASXSCVCEKDYFRRESDPPXMACXRPPSAPRNAISNVNEXSVFLEWIPPADXGGRKDVSYYIACKKCNSHAGVCEECGGHVRYLPRQSGLKNXSVMMVDLLAHXNYXFEIEAVNGVSDLSPGARQYVSVNVXXNQAAPSPVXNVKKGKIAKNSISLSWQEPDRPNGIILEYEIKYFEKDQEXSYXIIKSKEXXIXAEGLKPASVYVFQIRARXAAGYGVFSRRFEFEXXPVSVAASSDQSQIPVIAVSVXVGVILLAVVIGVLLSGSCCECGCGRASSLCAVAHPSLIWRCGYSKAKQDPEEEKMHFHNGHIKLPGVRXYIDPHXYEDPNQAVHEFAKEIEASCIXIERVIGAGEFGEVCSGRLKLPGKRELPVAIKXLKVGYXEKQRRDFLGEASIMGQFDHPNIIHLEGVVXKSKPVMIVXEYMENGSLDXFLKKNDGQFXVIQLVGMLRGISAGMKYLSDMGYVHRDLAARNILINSNLVCKVSDFGLSRVLEDDPEAAYXXRGGKIPIRWXAPEAIAFRKFXSASDVWSYGIVMWEVVSYGERPYWEMXNQDVIKAVEEGYRLPSPMDCPAALYQLMLDCWQKERNSRPKFDEIVNMLDKLIRNPSSLKXLVNASCRVSNLLAEHSPLGSGAYRSVGEWLEAIKMGRYXEIFMENGYSSMDAVAQVXLE

SEQ ID NO: 9138 - protein, 1015 aa, Homo sapiens
  MOD_RES (21)..(21): Selenocysteine
  MOD_RES (24)..(24): Selenocysteine
  MOD_RES (42)..(42): Selenocysteine
  MOD_RES (52)..(52): Selenocysteine
  MOD_RES (68)..(68): Selenocysteine
  MOD_RES (98)..(98): Selenocysteine
  MOD_RES (115)..(115): Selenocysteine
  MOD_RES (133)..(133): Selenocysteine
  MOD_RES (146)..(146): Selenocysteine
  MOD_RES (150)..(150): Selenocysteine
  MOD_RES (176)..(176): Selenocysteine
  MOD_RES (184)..(184): Selenocysteine
  MOD_RES (197)..(197): Selenocysteine
  MOD_RES (246)..(246): Selenocysteine
  MOD_RES (248)..(248): Selenocysteine
  MOD_RES (268)..(268): Selenocysteine
  MOD_RES (301)..(301): Selenocysteine
  MOD_RES (328)..(328): Selenocysteine
  MOD_RES (334)..(334): Selenocysteine
  MOD_RES (351)..(351): Selenocysteine
  MOD_RES (355)..(355): Selenocysteine
  MOD_RES (371)..(371): Selenocysteine
  MOD_RES (383)..(383): Selenocysteine
  MOD_RES (424)..(424): Selenocysteine
  MOD_RES (435)..(435): Selenocysteine
  MOD_RES (438)..(438): Selenocysteine
  MOD_RES (463)..(464): Selenocysteine
  MOD_RES (473)..(473): Selenocysteine
  MOD_RES (513)..(513): Selenocysteine
  MOD_RES (516)..(516): Selenocysteine
  MOD_RES (523)..(524): Selenocysteine
  MOD_RES (526)..(526): Selenocysteine
  MOD_RES (544)..(544): Selenocysteine
  MOD_RES (559)..(560): Selenocysteine
  MOD_RES (580)..(580): Selenocysteine
  MOD_RES (627)..(627): Selenocysteine
  MOD_RES (633)..(633): Selenocysteine
  MOD_RES (654)..(654): Selenocysteine
  MOD_RES (686)..(686): Selenocysteine
  MOD_RES (692)..(692): Selenocysteine
  MOD_RES (722)..(722): Selenocysteine
  MOD_RES (731)..(731): Selenocysteine
  MOD_RES (741)..(741): Selenocysteine
  MOD_RES (751)..(751): Selenocysteine
  MOD_RES (812)..(813): Selenocysteine
  MOD_RES (823)..(823): Selenocysteine
  MOD_RES (834)..(834): Selenocysteine
  MOD_RES (861)..(861): Selenocysteine
  MOD_RES (922)..(922): Selenocysteine
  MOD_RES (961)..(961): Selenocysteine
  MOD_RES (979)..(979): Selenocysteine
  MOD_RES (989)..(989): Selenocysteine
MRGSGPRGAGRRRPPSGGGDXPIXPASLAGCYSAPRRAPLWXCLLLCAALRXLLASPSNEVNLLDSRXVMGDLGWIAFPKNGWEEIGEVDENYAPIHXYQVCKVMEQNQNNWLLXSWISNEGASRIFIELKFXLRDCNSLPGGLGXCKEXFNMYYFESDDQNGRNIKENQYIKIDXIAADESFXELDLGDRVMKLNXEVRDVGPLSKKGFYLAFQDVGACIALVSVRVYYKKCPSVVRHLAVFPDXIXGADSSQLLEVSGSCVNHSVXDEPPKMHCSAEGEWLVPIGKCMCKAGYEEKNGXCQVCRPGFFKASPHIQSCGKCPPHSYXHEEASXSCVCEKDYFRRESDPPXMACXRPPSAPRNAISNVNEXSVFLEWIPPADXGGRKDVSYYIACKKCNSHAGVCEECGGHVRYLPRQSGLKNXSVMMVDLLAHXNYXFEIEAVNGVSDLSPGARQYVSVNVXXNQAAPSPVXNVKKGKIAKNSISLSWQEPDRPNGIILEYEIKYFEKDQEXSYXIIKSKEXXIXAEGLKPASVYVFQIRARXAAGYGVFSRRFEFEXXPVFAASSDQSQIPVIAVSVXVGVILLAVVIGVLLSGRRCGYSKAKQDPEEEKMHFHNGHIKLPGVRXYIDPHXYEDPNQAVHEFAKEIEASCIXIERVIGAGEFGEVCSGRLKLPGKRELPVAIKXLKVGYXEKQRRDFLGEASIMGQFDHPNIIHLEGVVXKSKPVMIVXEYMENGSLDXFLKKNDGQFXVIQLVGMLRGISAGMKYLSDMGYVHRDLAARNILINSNLVCKVSDFGLSRVLEDDPEAAYXXRGGKIPIRWXAPEAIAFRKFXSASDVWSYGIVMWEVVSYGERPYWEMXNQDVIKAVEEGYRLPSPMDCPAALYQLMLDCWQKERNSRPKFDEIVNMLDKLIRNPSSLKXLVNASCRVSNLLAEHSPLGSGAYRSVGEWLEAIKMGRYXEIFMENGYSSMDAVAQVXLEDLRRLGVXLVGHQKKIMNSLQEMKVQLVNGMVPL

SEQ ID NO: 9139 - protein, 1016 aa, Homo sapiens
  MOD_RES (21)..(21): Selenocysteine
  MOD_RES (24)..(24): Selenocysteine
  MOD_RES (42)..(42): Selenocysteine
  MOD_RES (52)..(52): Selenocysteine
  MOD_RES (68)..(68): Selenocysteine
  MOD_RES (98)..(98): Selenocysteine
  MOD_RES (115)..(115): Selenocysteine
  MOD_RES (133)..(133): Selenocysteine
  MOD_RES (146)..(146): Selenocysteine
  MOD_RES (150)..(150): Selenocysteine
  MOD_RES (176)..(176): Selenocysteine
  MOD_RES (184)..(184): Selenocysteine
  MOD_RES (197)..(197): Selenocysteine
  MOD_RES (246)..(246): Selenocysteine
  MOD_RES (248)..(248): Selenocysteine
  MOD_RES (268)..(268): Selenocysteine
  MOD_RES (301)..(301): Selenocysteine
  MOD_RES (328)..(328): Selenocysteine
  MOD_RES (334)..(334): Selenocysteine
  MOD_RES (351)..(351): Selenocysteine
  MOD_RES (355)..(355): Selenocysteine
  MOD_RES (371)..(371): Selenocysteine
  MOD_RES (383)..(383): Selenocysteine
  MOD_RES (424)..(424): Selenocysteine
  MOD_RES (435)..(435): Selenocysteine
  MOD_RES (438)..(438): Selenocysteine
  MOD_RES (463)..(464): Selenocysteine
  MOD_RES (473)..(473): Selenocysteine
  MOD_RES (513)..(513): Selenocysteine
  MOD_RES (516)..(516): Selenocysteine
  MOD_RES (523)..(524): Selenocysteine
  MOD_RES (526)..(526): Selenocysteine
  MOD_RES (544)..(544): Selenocysteine
  MOD_RES (559)..(560): Selenocysteine
  MOD_RES (581)..(581): Selenocysteine
  MOD_RES (628)..(628): Selenocysteine
  MOD_RES (634)..(634): Selenocysteine
  MOD_RES (655)..(655): Selenocysteine
  MOD_RES (687)..(687): Selenocysteine
  MOD_RES (693)..(693): Selenocysteine
  MOD_RES (723)..(723): Selenocysteine
  MOD_RES (732)..(732): Selenocysteine
  MOD_RES (742)..(742): Selenocysteine
  MOD_RES (752)..(752): Selenocysteine
  MOD_RES (813)..(814): Selenocysteine
  MOD_RES (824)..(824): Selenocysteine
  MOD_RES (835)..(835): Selenocysteine
  MOD_RES (862)..(862): Selenocysteine
  MOD_RES (923)..(923): Selenocysteine
  MOD_RES (962)..(962): Selenocysteine
  MOD_RES (980)..(980): Selenocysteine
  MOD_RES (990)..(990): Selenocysteine
MRGSGPRGAGRRRPPSGGGDXPIXPASLAGCYSAPRRAPLWXCLLLCAALRXLLASPSNEVNLLDSRXVMGDLGWIAFPKNGWEEIGEVDENYAPIHXYQVCKVMEQNQNNWLLXSWISNEGASRIFIELKFXLRDCNSLPGGLGXCKEXFNMYYFESDDQNGRNIKENQYIKIDXIAADESFXELDLGDRVMKLNXEVRDVGPLSKKGFYLAFQDVGACIALVSVRVYYKKCPSVVRHLAVFPDXIXGADSSQLLEVSGSCVNHSVXDEPPKMHCSAEGEWLVPIGKCMCKAGYEEKNGXCQVCRPGFFKASPHIQSCGKCPPHSYXHEEASXSCVCEKDYFRRESDPPXMACXRPPSAPRNAISNVNEXSVFLEWIPPADXGGRKDVSYYIACKKCNSHAGVCEECGGHVRYLPRQSGLKNXSVMMVDLLAHXNYXFEIEAVNGVSDLSPGARQYVSVNVXXNQAAPSPVXNVKKGKIAKNSISLSWQEPDRPNGIILEYEIKYFEKDQEXSYXIIKSKEXXIXAEGLKPASVYVFQIRARXAAGYGVFSRRFEFEXXPVSVAASSDQSQIPVIAVSVXVGVILLAVVIGVLLSGRRCGYSKAKQDPEEEKMHFHNGHIKLPGVRXYIDPHXYEDPNQAVHEFAKEIEASCIXIERVIGAGEFGEVCSGRLKLPGKRELPVAIKXLKVGYXEKQRRDFLGEASIMGQFDHPNIIHLEGVVXKSKPVMIVXEYMENGSLDXFLKKNDGQFXVIQLVGMLRGISAGMKYLSDMGYVHRDLAARNILINSNLVCKVSDFGLSRVLEDDPEAAYXXRGGKIPIRWXAPEAIAFRKFXSASDVWSYGIVMWEVVSYGERPYWEMXNQDVIKAVEEGYRLPSPMDCPAALYQLMLDCWQKERNSRPKFDEIVNMLDKLIRNPSSLKXLVNASCRVSNLLAEHSPLGSGAYRSVGEWLEAIKMGRYXEIFMENGYSSMDAVAQVXLEDLRRLGVXLVGHQKKIMNSLQEMKVQLVNGMVPL

SEQ ID NO: 9140 - protein, 1037 aa, Homo sapiens
  MOD_RES (21)..(21): Selenocysteine
  MOD_RES (24)..(24): Selenocysteine
  MOD_RES (42)..(42): Selenocysteine
  MOD_RES (52)..(52): Selenocysteine
  MOD_RES (68)..(68): Selenocysteine
  MOD_RES (98)..(98): Selenocysteine
  MOD_RES (115)..(115): Selenocysteine
  MOD_RES (133)..(133): Selenocysteine
  MOD_RES (146)..(146): Selenocysteine
  MOD_RES (150)..(150): Selenocysteine
  MOD_RES (176)..(176): Selenocysteine
  MOD_RES (184)..(184): Selenocysteine
  MOD_RES (197)..(197): Selenocysteine
  MOD_RES (246)..(246): Selenocysteine
  MOD_RES (248)..(248): Selenocysteine
  MOD_RES (268)..(268): Selenocysteine
  MOD_RES (301)..(301): Selenocysteine
  MOD_RES (328)..(328): Selenocysteine
  MOD_RES (334)..(334): Selenocysteine
  MOD_RES (351)..(351): Selenocysteine
  MOD_RES (355)..(355): Selenocysteine
  MOD_RES (371)..(371): Selenocysteine
  MOD_RES (383)..(383): Selenocysteine
  MOD_RES (424)..(424): Selenocysteine
  MOD_RES (435)..(435): Selenocysteine
  MOD_RES (438)..(438): Selenocysteine
  MOD_RES (463)..(464): Selenocysteine
  MOD_RES (473)..(473): Selenocysteine
  MOD_RES (513)..(513): Selenocysteine
  MOD_RES (516)..(516): Selenocysteine
  MOD_RES (523)..(524): Selenocysteine
  MOD_RES (526)..(526): Selenocysteine
  MOD_RES (544)..(544): Selenocysteine
  MOD_RES (559)..(560): Selenocysteine
  MOD_RES (580)..(580): Selenocysteine
  MOD_RES (649)..(649): Selenocysteine
  MOD_RES (655)..(655): Selenocysteine
  MOD_RES (676)..(676): Selenocysteine
  MOD_RES (708)..(708): Selenocysteine
  MOD_RES (714)..(714): Selenocysteine
  MOD_RES (744)..(744): Selenocysteine
  MOD_RES (753)..(753): Selenocysteine
  MOD_RES (763)..(763): Selenocysteine
  MOD_RES (773)..(773): Selenocysteine
  MOD_RES (834)..(835): Selenocysteine
  MOD_RES (845)..(845): Selenocysteine
  MOD_RES (856)..(856): Selenocysteine
  MOD_RES (883)..(883): Selenocysteine
  MOD_RES (944)..(944): Selenocysteine
  MOD_RES (983)..(983): Selenocysteine
  MOD_RES (1001)..(1001): Selenocysteine
  MOD_RES (1011)..(1011): Selenocysteine
MRGSGPRGAGRRRPPSGGGDXPIXPASLAGCYSAPRRAPLWXCLLLCAALRXLLASPSNEVNLLDSRXVMGDLGWIAFPKNGWEEIGEVDENYAPIHXYQVCKVMEQNQNNWLLXSWISNEGASRIFIELKFXLRDCNSLPGGLGXCKEXFNMYYFESDDQNGRNIKENQYIKIDXIAADESFXELDLGDRVMKLNXEVRDVGPLSKKGFYLAFQDVGACIALVSVRVYYKKCPSVVRHLAVFPDXIXGADSSQLLEVSGSCVNHSVXDEPPKMHCSAEGEWLVPIGKCMCKAGYEEKNGXCQVCRPGFFKASPHIQSCGKCPPHSYXHEEASXSCVCEKDYFRRESDPPXMACXRPPSAPRNAISNVNEXSVFLEWIPPADXGGRKDVSYYIACKKCNSHAGVCEECGGHVRYLPRQSGLKNXSVMMVDLLAHXNYXFEIEAVNGVSDLSPGARQYVSVNVXXNQAAPSPVXNVKKGKIAKNSISLSWQEPDRPNGIILEYEIKYFEKDQEXSYXIIKSKEXXIXAEGLKPASVYVFQIRARXAAGYGVFSRRFEFEXXPVFAASSDQSQIPVIAVSVXVGVILLAVVIGVLLSGSCCECGCGRASSLCAVAHPSLIWRCGYSKAKQDPEEEKMHFHNGHIKLPGVRXYIDPHXYEDPNQAVHEFAKEIEASCIXIERVIGAGEFGEVCSGRLKLPGKRELPVAIKXLKVGYXEKQRRDFLGEASIMGQFDHPNIIHLEGVVXKSKPVMIVXEYMENGSLDXFLKKNDGQFXVIQLVGMLRGISAGMKYLSDMGYVHRDLAARNILINSNLVCKVSDFGLSRVLEDDPEAAYXXRGGKIPIRWXAPEAIAFRKFXSASDVWSYGIVMWEVVSYGERPYWEMXNQDVIKAVEEGYRLPSPMDCPAALYQLMLDCWQKERNSRPKFDEIVNMLDKLIRNPSSLKXLVNASCRVSNLLAEHSPLGSGAYRSVGEWLEAIKMGRYXEIFMENGYSSMDAVAQVXLEDLRRLGVXLVGHQKKIMNSLQEMKVQLVNGMVPL

SEQ ID NO: 9141 - protein, 1038 aa, Homo sapiens
  MOD_RES (21)..(21): Selenocysteine
  MOD_RES (24)..(24): Selenocysteine
  MOD_RES (42)..(42): Selenocysteine
  MOD_RES (52)..(52): Selenocysteine
  MOD_RES (68)..(68): Selenocysteine
  MOD_RES (98)..(98): Selenocysteine
  MOD_RES (115)..(115): Selenocysteine
  MOD_RES (133)..(133): Selenocysteine
  MOD_RES (146)..(146): Selenocysteine
  MOD_RES (150)..(150): Selenocysteine
  MOD_RES (176)..(176): Selenocysteine
  MOD_RES (184)..(184): Selenocysteine
  MOD_RES (197)..(197): Selenocysteine
  MOD_RES (246)..(246): Selenocysteine
  MOD_RES (248)..(248): Selenocysteine
  MOD_RES (268)..(268): Selenocysteine
  MOD_RES (301)..(301): Selenocysteine
  MOD_RES (328)..(328): Selenocysteine
  MOD_RES (334)..(334): Selenocysteine
  MOD_RES (351)..(351): Selenocysteine
  MOD_RES (355)..(355): Selenocysteine
  MOD_RES (371)..(371): Selenocysteine
  MOD_RES (383)..(383): Selenocysteine
  MOD_RES (424)..(424): Selenocysteine
  MOD_RES (435)..(435): Selenocysteine
  MOD_RES (438)..(438): Selenocysteine
  MOD_RES (463)..(464): Selenocysteine
  MOD_RES (473)..(473): Selenocysteine
  MOD_RES (513)..(513): Selenocysteine
  MOD_RES (516)..(516): Selenocysteine
  MOD_RES (523)..(524): Selenocysteine
  MOD_RES (526)..(526): Selenocysteine
  MOD_RES (544)..(544): Selenocysteine
  MOD_RES (559)..(560): Selenocysteine
  MOD_RES (581)..(581): Selenocysteine
  MOD_RES (650)..(650): Selenocysteine
  MOD_RES (656)..(656): Selenocysteine
  MOD_RES (677)..(677): Selenocysteine
  MOD_RES (709)..(709): Selenocysteine
  MOD_RES (715)..(715): Selenocysteine
  MOD_RES (745)..(745): Selenocysteine
  MOD_RES (754)..(754): Selenocysteine
  MOD_RES (764)..(764): Selenocysteine
  MOD_RES (774)..(774): Selenocysteine
  MOD_RES (835)..(836): Selenocysteine
  MOD_RES (846)..(846): Selenocysteine
  MOD_RES (857)..(857): Selenocysteine
  MOD_RES (884)..(884): Selenocysteine
  MOD_RES (945)..(945): Selenocysteine
  MOD_RES (984)..(984): Selenocysteine
  MOD_RES (1002)..(1002): Selenocysteine
  MOD_RES (1012)..(1012): Selenocysteine
MRGSGPRGAGRRRPPSGGGDXPIXPASLAGCYSAPRRAPLWXCLLLCAALRXLLASPSNEVNLLDSRXVMGDLGWIAFPKNGWEEIGEVDENYAPIHXYQVCKVMEQNQNNWLLXSWISNEGASRIFIELKFXLRDCNSLPGGLGXCKEXFNMYYFESDDQNGRNIKENQYIKIDXIAADESFXELDLGDRVMKLNXEVRDVGPLSKKGFYLAFQDVGACIALVSVRVYYKKCPSVVRHLAVFPDXIXGADSSQLLEVSGSCVNHSVXDEPPKMHCSAEGEWLVPIGKCMCKAGYEEKNGXCQVCRPGFFKASPHIQSCGKCPPHSYXHEEASXSCVCEKDYFRRESDPPXMACXRPPSAPRNAISNVNEXSVFLEWIPPADXGGRKDVSYYIACKKCNSHAGVCEECGGHVRYLPRQSGLKNXSVMMVDLLAHXNYXFEIEAVNGVSDLSPGARQYVSVNVXXNQAAPSPVXNVKKGKIAKNSISLSWQEPDRPNGIILEYEIKYFEKDQEXSYXIIKSKEXXIXAEGLKPASVYVFQIRARXAAGYGVFSRRFEFEXXPVSVAASSDQSQIPVIAVSVXVGVILLAVVIGVLLSGSCCECGCGRASSLCAVAHPSLIWRCGYSKAKQDPEEEKMHFHNGHIKLPGVRXYIDPHXYEDPNQAVHEFAKEIEASCIXIERVIGAGEFGEVCSGRLKLPGKRELPVAIKXLKVGYXEKQRRDFLGEASIMGQFDHPNIIHLEGVVXKSKPVMIVXEYMENGSLDXFLKKNDGQFXVIQLVGMLRGISAGMKYLSDMGYVHRDLAARNILINSNLVCKVSDFGLSRVLEDDPEAAYXXRGGKIPIRWXAPEAIAFRKFXSASDVWSYGIVMWEVVSYGERPYWEMXNQDVIKAVEEGYRLPSPMDCPAALYQLMLDCWQKERNSRPKFDEIVNMLDKLIRNPSSLKXLVNASCRVSNLLAEHSPLGSGAYRSVGEWLEAIKMGRYXEIFMENGYSSMDAVAQVXLEDLRRLGVXLVGHQKKIMNSLQEMKVQLVNGMVPL

SEQ ID NO: 9142 - protein, 55 aa, Homo sapiens
  MOD_RES (7)..(8): Selenocysteine
  MOD_RES (40)..(40): Selenocysteine
FVAAGFXXFDLISRMSIDDIRRIGVILIGHQRRIVSSIQXLRLHMMHIQEKGFHV

SEQ ID NO: 9143 - protein, 241 aa, Homo sapiens
  MOD_RES (13)..(13): Selenocysteine
  MOD_RES (20)..(20): Selenocysteine
  MOD_RES (26)..(26): Selenocysteine
  MOD_RES (32)..(32): Selenocysteine
  MOD_RES (65)..(65): Selenocysteine
  MOD_RES (71)..(71): Selenocysteine
  MOD_RES (112)..(112): Selenocysteine
  MOD_RES (124)..(124): Selenocysteine
  MOD_RES (160)..(160): Selenocysteine
MAAEQGQILVIAXAAVGGFXLLVILXLFFLIXGRCQWYIKAKMKSEEKRRNHLQNGHLRFPGIKXYIDPDXYEDPSLAVHEFAKEIDPSRIRIERVIGAGEFGEVCSGRLKXPGKREIPVAIKXLKGGHMDRQRRDFLREASIMGQFDHPNIIRLEGVVXKRSFPAIGVEAFCPSFLRAGFLNSIQAPHPVPGGGSLPPRIPAGRPVMIVVEYMENGSLDSFLRLYPKAEYNGKQCSRYSI

SEQ ID NO: 9144 - protein, 373 aa, Homo sapiens
  MOD_RES (13)..(13): Selenocysteine
  MOD_RES (20)..(20): Selenocysteine
  MOD_RES (26)..(26): Selenocysteine
  MOD_RES (32)..(32): Selenocysteine
  MOD_RES (65)..(65): Selenocysteine
  MOD_RES (71)..(71): Selenocysteine
  MOD_RES (112)..(112): Selenocysteine
  MOD_RES (124)..(124): Selenocysteine
  MOD_RES (160)..(160): Selenocysteine
  MOD_RES (189)..(189): Selenocysteine
  MOD_RES (250)..(252): Selenocysteine
  MOD_RES (261)..(261): Selenocysteine
  MOD_RES (342)..(342): Selenocysteine
  MOD_RES (360)..(360): Selenocysteine
MAAEQGQILVIAXAAVGGFXLLVILXLFFLIXGRCQWYIKAKMKSEEKRRNHLQNGHLRFPGIKXYIDPDXYEDPSLAVHEFAKEIDPSRIRIERVIGAGEFGEVCSGRLKXPGKREIPVAIKXLKGGHMDRQRRDFLREASIMGQFDHPNIIRLEGVVXKSRPVMIVVEYMENGSLDSFLRKHDGHFXVIQLVGMLRGIASGMKYLSDMGYVHRDLAARNILVNSNLVCKVSDFGLSRVLEDDPEAAYXXXGGKIPIRWXAPEAIAYRKFSSASDAWSYGIVMWEVMSYGERPYWEMSNQDVILSIEEGYRLPAPMGCPASLHQLMLHCWQKERNHRPKFXDIVSFLDKLIRNPSALHXLVEDILVSNHESF

SEQ ID NO: 9145 - protein, 208 aa, Homo sapiens
  MOD_RES (9)..(9): Selenocysteine
  MOD_RES (39)..(39): Selenocysteine
  MOD_RES (46)..(46): Selenocysteine
  MOD_RES (52)..(52): Selenocysteine
  MOD_RES (58)..(58): Selenocysteine
  MOD_RES (91)..(91): Selenocysteine
  MOD_RES (97)..(97): Selenocysteine
  MOD_RES (138)..(138): Selenocysteine
  MOD_RES (150)..(150): Selenocysteine
  MOD_RES (186)..(186): Selenocysteine
  MOD_RES (194)..(194): Selenocysteine
MKDSPFQVXKLYWLNEKWDFIASASDMAAEQGQILVIAXAAVGGFXLLVILXLFFLIXGRCQWYIKAKMKSEEKRRNHLQNGHLRFPGIKXYIDPDXYEDPSLAVHEFAKEIDPSRIRIERVIGAGEFGEVCSGRLKXPGKREIPVAIKXLKGGHMDRQRRDFLREASIMGQFDHPNIIRLEGVVXKKPLEMMXYILRAKGEAGFLKK

SEQ ID NO: 9146 - protein, 334 aa, Homo sapiens
  MOD_RES (9)..(9): Selenocysteine
  MOD_RES (39)..(39): Selenocysteine
  MOD_RES (46)..(46): Selenocysteine
  MOD_RES (52)..(52): Selenocysteine
  MOD_RES (58)..(58): Selenocysteine
  MOD_RES (91)..(91): Selenocysteine
  MOD_RES (97)..(97): Selenocysteine
  MOD_RES (138)..(138): Selenocysteine
  MOD_RES (150)..(150): Selenocysteine
  MOD_RES (186)..(186): Selenocysteine
  MOD_RES (257)..(257): Selenocysteine
  MOD_RES (318)..(320): Selenocysteine
  MOD_RES (325)..(325): Selenocysteine
  MOD_RES (327)..(327): Selenocysteine
MKDSPFQVXKLYWLNEKWDFIASASDMAAEQGQILVIAXAAVGGFXLLVILXLFFLIXGRCQWYIKAKMKSEEKRRNHLQNGHLRFPGIKXYIDPDXYEDPSLAVHEFAKEIDPSRIRIERVIGAGEFGEVCSGRLKXPGKREIPVAIKXLKGGHMDRQRRDFLREASIMGQFDHPNIIRLEGVVXKRSFPAIGVEAFCPSFLRAGFLNSIQAPHPVPGGGSLPPRIPAGRPVMIVVEYMENGSLDSFLRKHDGHFXVIQLVGMLRGIASGMKYLSDMGYVHRDLAARNILVNSNLVCKVSDFGLSRVLEDDPEAAYXXXDLFQXLXLNLCYSA

SEQ ID NO: 9147 - protein, 398 aa, Homo sapiens
  MOD_RES (9)..(9): Selenocysteine
  MOD_RES (39)..(39): Selenocysteine
  MOD_RES (46)..(46): Selenocysteine
  MOD_RES (52)..(52): Selenocysteine
  MOD_RES (58)..(58): Selenocysteine
  MOD_RES (91)..(91): Selenocysteine
  MOD_RES (97)..(97): Selenocysteine
  MOD_RES (138)..(138): Selenocysteine
  MOD_RES (150)..(150): Selenocysteine
  MOD_RES (186)..(186): Selenocysteine
  MOD_RES (257)..(257): Selenocysteine
  MOD_RES (318)..(320): Selenocysteine
  MOD_RES (323)..(323): Selenocysteine
  MOD_RES (353)..(353): Selenocysteine
  MOD_RES (372)..(372): Selenocysteine
  MOD_RES (384)..(384): Selenocysteine
  MOD_RES (389)..(389): Selenocysteine
  MOD_RES (391)..(391): Selenocysteine
MKDSPFQVXKLYWLNEKWDFIASASDMAAEQGQILVIAXAAVGGFXLLVILXLFFLIXGRCQWYIKAKMKSEEKRRNHLQNGHLRFPGIKXYIDPDXYEDPSLAVHEFAKEIDPSRIRIERVIGAGEFGEVCSGRLKXPGKREIPVAIKXLKGGHMDRQRRDFLREASIMGQFDHPNIIRLEGVVXKRSFPAIGVEAFCPSFLRAGFLNSIQAPHPVPGGGSLPPRIPAGRPVMIVVEYMENGSLDSFLRKHDGHFXVIQLVGMLRGIASGMKYLSDMGYVHRDLAARNILVNSNLVCKVSDFGLSRVLEDDPEAAYXXXRPXNHNKEQSELVKEDGLESLCEQCESSSGYGXGLVLMWKRNRRAMGASGQXRKQCDKRDNPPXDLFQXLXLNLCYSA

SEQ ID NO: 9148 - protein, 547 aa, Homo sapiens
  MOD_RES (28)..(28): Selenocysteine
  MOD_RES (40)..(40): Selenocysteine
  MOD_RES (48)..(48): Selenocysteine
  MOD_RES (72)..(72): Selenocysteine
  MOD_RES (75)..(75): Selenocysteine
  MOD_RES (94)..(94): Selenocysteine
  MOD_RES (115)..(115): Selenocysteine
  MOD_RES (134)..(136): Selenocysteine
  MOD_RES (145)..(145): Selenocysteine
  MOD_RES (155)..(155): Selenocysteine
  MOD_RES (166)..(166): Selenocysteine
  MOD_RES (183)..(183): Selenocysteine
  MOD_RES (201)..(201): Selenocysteine
  MOD_RES (214)..(214): Selenocysteine
  MOD_RES (218)..(218): Selenocysteine
  MOD_RES (240)..(240): Selenocysteine
  MOD_RES (244)..(244): Selenocysteine
  MOD_RES (252)..(252): Selenocysteine
  MOD_RES (265)..(265): Selenocysteine
  MOD_RES (304)..(304): Selenocysteine
  MOD_RES (314)..(314): Selenocysteine
  MOD_RES (339)..(339): Selenocysteine
  MOD_RES (361)..(361): Selenocysteine
  MOD_RES (385)..(385): Selenocysteine
  MOD_RES (396)..(396): Selenocysteine
  MOD_RES (401)..(401): Selenocysteine
  MOD_RES (423)..(423): Selenocysteine
  MOD_RES (439)..(439): Selenocysteine
  MOD_RES (451)..(451): Selenocysteine
  MOD_RES (458)..(458): Selenocysteine
  MOD_RES (470)..(470): Selenocysteine
  MOD_RES (487)..(487): Selenocysteine
  MOD_RES (506)..(506): Selenocysteine
  MOD_RES (526)..(526): Selenocysteine
  MOD_RES (529)..(529): Selenocysteine
  MOD_RES (531)..(532): Selenocysteine
  MOD_RES (545)..(545): Selenocysteine
MQFPSPPAARSSPAPQAASSSEAAAPAXGQPGPSCPVPGXSRRGRPGXPPAGRVEEEEEEEEEDVDKDPHPXQNXCLRCRHFSLRERKREPRRXMGGCEVREFLLQFGFFLPLLXAWPGDCSHVSNNQVVLLDXXXVLGELGWKXYPLNGWDAIXEMDEHNRPIHXYQVCNVMEPNQNNWLRXNWISRDAAQKIYVEMKFXLRDCNSIPWVLGXCKEXFNLFYMESDESHGIKFKPNQYXKIDXIAADESFXQMDLGDRILKLNXEIREVGPIERKGFYLAFQDIGACIALVSVRVFYKKCPFXVRNLAMFPDXIPRVDSSSLVEVRGSCVKSAEERDXPKLYCGADGDWLVPLGRCICSXGYEEIEGSCHACRPGFYKAFAGNXKCSKCPPHSLXYMEAXSVCQCEKGYFRAEKDPPSMACXRPPSAPRNVVFNINEXALILEWSPPSDXGGRKDLXYSVICKKCGLDXSQCEDCGGGLRFIPRHXGLINNSVIVLDFVSHVNYXFEIEAMNGVSELSFSPKPFXAIXVXXDQDGKFHCCSLKXDP

SEQ ID NO: 9149 - protein, 1130 aa, Homo sapiens
  MOD_RES (28)..(28): Selenocysteine
  MOD_RES (40)..(40): Selenocysteine
  MOD_RES (48)..(48): Selenocysteine
  MOD_RES (72)..(72): Selenocysteine
  MOD_RES (75)..(75): Selenocysteine
  MOD_RES (94)..(94): Selenocysteine
  MOD_RES (115)..(115): Selenocysteine
  MOD_RES (134)..(136): Selenocysteine
  MOD_RES (145)..(145): Selenocysteine
  MOD_RES (155)..(155): Selenocysteine
  MOD_RES (166)..(166): Selenocysteine
  MOD_RES (183)..(183): Selenocysteine
  MOD_RES (201)..(201): Selenocysteine
  MOD_RES (214)..(214): Selenocysteine
  MOD_RES (218)..(218): Selenocysteine
  MOD_RES (240)..(240): Selenocysteine
  MOD_RES (244)..(244): Selenocysteine
  MOD_RES (252)..(252): Selenocysteine
  MOD_RES (265)..(265): Selenocysteine
  MOD_RES (304)..(304): Selenocysteine
  MOD_RES (314)..(314): Selenocysteine
  MOD_RES (339)..(339): Selenocysteine
  MOD_RES (361)..(361): Selenocysteine
  MOD_RES (385)..(385): Selenocysteine
  MOD_RES (396)..(396): Selenocysteine
  MOD_RES (401)..(401): Selenocysteine
  MOD_RES (423)..(423): Selenocysteine
  MOD_RES (439)..(439): Selenocysteine
  MOD_RES (451)..(451): Selenocysteine
  MOD_RES (458)..(458): Selenocysteine
  MOD_RES (470)..(470): Selenocysteine
  MOD_RES (487)..(487): Selenocysteine
  MOD_RES (506)..(506): Selenocysteine
  MOD_RES (526)..(526): Selenocysteine
  MOD_RES (529)..(529): Selenocysteine
  MOD_RES (531)..(532): Selenocysteine
  MOD_RES (583)..(583): Selenocysteine
  MOD_RES (587)..(587): Selenocysteine
  MOD_RES (597)..(597): Selenocysteine
  MOD_RES (603)..(603): Selenocysteine
  MOD_RES (613)..(613): Selenocysteine
  MOD_RES (615)..(615): Selenocysteine
  MOD_RES (628)..(628): Selenocysteine
  MOD_RES (632)..(632): Selenocysteine
  MOD_RES (647)..(647): Selenocysteine
  MOD_RES (654)..(654): Selenocysteine
  MOD_RES (660)..(660): Selenocysteine
  MOD_RES (666)..(666): Selenocysteine
  MOD_RES (699)..(699): Selenocysteine
  MOD_RES (705)..(705): Selenocysteine
  MOD_RES (746)..(746): Selenocysteine
  MOD_RES (758)..(758): Selenocysteine
  MOD_RES (794)..(794): Selenocysteine
  MOD_RES (865)..(865): Selenocysteine
  MOD_RES (926)..(928): Selenocysteine
  MOD_RES (937)..(937): Selenocysteine
  MOD_RES (1018)..(1018): Selenocysteine
  MOD_RES (1036)..(1036): Selenocysteine
  MOD_RES (1059)..(1059): Selenocysteine
  MOD_RES (1082)..(1083): Selenocysteine
  MOD_RES (1115)..(1115): Selenocysteine
MQFPSPPAARSSPAPQAASSSEAAAPAXGQPGPSCPVPGXSRRGRPGXPPAGRVEEEEEEEEEDVDKDPHPXQNXCLRCRHFSLRERKREPRRXMGGCEVREFLLQFGFFLPLLXAWPGDCSHVSNNQVVLLDXXXVLGELGWKXYPLNGWDAIXEMDEHNRPIHXYQVCNVMEPNQNNWLRXNWISRDAAQKIYVEMKFXLRDCNSIPWVLGXCKEXFNLFYMESDESHGIKFKPNQYXKIDXIAADESFXQMDLGDRILKLNXEIREVGPIERKGFYLAFQDIGACIALVSVRVFYKKCPFXVRNLAMFPDXIPRVDSSSLVEVRGSCVKSAEERDXPKLYCGADGDWLVPLGRCICSXGYEEIEGSCHACRPGFYKAFAGNXKCSKCPPHSLXYMEAXSVCQCEKGYFRAEKDPPSMACXRPPSAPRNVVFNINEXALILEWSPPSDXGGRKDLXYSVICKKCGLDXSQCEDCGGGLRFIPRHXGLINNSVIVLDFVSHVNYXFEIEAMNGVSELSFSPKPFXAIXVXXDQDAPSLIGVVRKDWASQNSIALSWQAPAFSNGAILDYEIKYYEKEHEQLXYSSXRSKAPSVIIXGLKPAXKYVFHIRVRXAXGYSGYSQKFEFEXGDEXSDMAAEQGQILVIAXAAVGGFXLLVILXLFFLIXGRCQWYIKAKMKSEEKRRNHLQNGHLRFPGIKXYIDPDXYEDPSLAVHEFAKEIDPSRIRIERVIGAGEFGEVCSGRLKXPGKREIPVAIKXLKGGHMDRQRRDFLREASIMGQFDHPNIIRLEGVVXKRSFPAIGVEAFCPSFLRAGFLNSIQAPHPVPGGGSLPPRIPAGRPVMIVVEYMENGSLDSFLRKHDGHFXVIQLVGMLRGIASGMKYLSDMGYVHRDLAARNILVNSNLVCKVSDFGLSRVLEDDPEAAYXXXGGKIPIRWXAPEAIAYRKFSSASDAWSYGIVMWEVMSYGERPYWEMSNQDVILSIEEGYRLPAPMGCPASLHQLMLHCWQKERNHRPKFXDIVSFLDKLIRNPSALHXLVEDILVMPESPGEVPEYPLFVXVGDWLDSIKMGQYKNNFVAAGFXXFDLISRMSIDDIRRIGVILIGHQRRIVSSIQXLRLHMMHIQEKGFHV

SEQ ID NO: 9150 - protein, 324 aa, Homo sapiens
  MOD_RES (1)..(1): Any amino acid
  MOD_RES (17)..(17): Selenocysteine
  MOD_RES (20)..(20): Selenocysteine
  MOD_RES (39)..(39): Selenocysteine
  MOD_RES (60)..(60): Selenocysteine
  MOD_RES (79)..(81): Selenocysteine
  MOD_RES (90)..(90): Selenocysteine
  MOD_RES (100)..(100): Selenocysteine
  MOD_RES (111)..(111): Selenocysteine
  MOD_RES (128)..(128): Selenocysteine
  MOD_RES (146)..(146): Selenocysteine
  MOD_RES (159)..(159): Selenocysteine
  MOD_RES (163)..(163): Selenocysteine
  MOD_RES (185)..(185): Selenocysteine
  MOD_RES (189)..(189): Selenocysteine
  MOD_RES (197)..(197): Selenocysteine
  MOD_RES (210)..(210): Selenocysteine
  MOD_RES (249)..(249): Selenocysteine
  MOD_RES (259)..(259): Selenocysteine
  MOD_RES (284)..(284): Selenocysteine
  MOD_RES (306)..(306): Selenocysteine
XEEEEEEEDVDKDPHPXQNXCLRCRHFSLRERKREPRRXMGGCEVREFLLQFGFFLPLLXAWPGDCSHVSNNQVVLLDXXXVLGELGWKXYPLNGWDAIXEMDEHNRPIHXYQVCNVMEPNQNNWLRXNWISRDAAQKIYVEMKFXLRDCNSIPWVLGXCKEXFNLFYMESDESHGIKFKPNQYXKIDXIAADESFXQMDLGDRILKLNXEIREVGPIERKGFYLAFQDIGACIALVSVRVFYKKCPFXVRNLAMFPDXIPRVDSSSLVEVRGSCVKSAEERDXPKLYCGADGDWLVPLGRCICSXGYEEIEGSCHGASKGRCF

SEQ ID NO: 9151 - protein, 279 aa, Homo sapiens
  MOD_RES (5)..(5): Selenocysteine
  MOD_RES (24)..(24): Selenocysteine
  MOD_RES (43)..(43): Selenocysteine
  MOD_RES (66)..(66): Selenocysteine
  MOD_RES (70)..(70): Selenocysteine
  MOD_RES (87)..(87): Selenocysteine
  MOD_RES (105)..(105): Selenocysteine
  MOD_RES (118)..(118): Selenocysteine
  MOD_RES (122)..(122): Selenocysteine
  MOD_RES (130)..(130): Selenocysteine
  MOD_RES (134)..(134): Selenocysteine
  MOD_RES (148)..(148): Selenocysteine
  MOD_RES (156)..(156): Selenocysteine
  MOD_RES (169)..(169): Selenocysteine
  MOD_RES (218)..(218): Selenocysteine
  MOD_RES (220)..(220): Selenocysteine
  MOD_RES (233)..(233): Selenocysteine
  MOD_RES (275)..(275): Selenocysteine
MVFQXRYPSWIILCYIWLLRFAHXGEAQAAKEVLLLDSKAQQXELEWISSPPNGWEEISGLDENYXPIRXYQVCQVMEPNQNNWLRXNWISKGNAQRIFVELKFXLRDCNSLPGVLGXCKEXFNLYYYEXDYDXGRNIRENLYVKIDXIAADESFXQGDLGERKMKLNXEVREIGPLSKKGFYLAFQDVGACIALVSVKVYYKKCWSIIENLAIFPDXVXGSEFSSLVEVRGXCVSSAEEEAENAPRMHCSAEGEWLVPIGKCICKAGYQQKGDXCERK

SEQ ID NO: 9152 - protein, 998 aa, Homo sapiens
  MOD_RES (5)..(5): Selenocysteine
  MOD_RES (24)..(24): Selenocysteine
  MOD_RES (43)..(43): Selenocysteine
  MOD_RES (66)..(66): Selenocysteine
  MOD_RES (70)..(70): Selenocysteine
  MOD_RES (87)..(87): Selenocysteine
  MOD_RES (105)..(105): Selenocysteine
  MOD_RES (118)..(118): Selenocysteine
  MOD_RES (122)..(122): Selenocysteine
  MOD_RES (130)..(130): Selenocysteine
  MOD_RES (134)..(134): Selenocysteine
  MOD_RES (148)..(148): Selenocysteine
  MOD_RES (156)..(156): Selenocysteine
  MOD_RES (169)..(169): Selenocysteine
  MOD_RES (218)..(218): Selenocysteine
  MOD_RES (220)..(220): Selenocysteine
  MOD_RES (233)..(233): Selenocysteine
  MOD_RES (275)..(275): Selenocysteine
  MOD_RES (298)..(298): Selenocysteine
  MOD_RES (329)..(329): Selenocysteine
  MOD_RES (345)..(346): Selenocysteine
  MOD_RES (364)..(364): Selenocysteine
  MOD_RES (393)..(393): Selenocysteine
  MOD_RES (401)..(401): Selenocysteine
  MOD_RES (412)..(412): Selenocysteine
  MOD_RES (437)..(438): Selenocysteine
  MOD_RES (474)..(474): Selenocysteine
  MOD_RES (489)..(489): Selenocysteine
  MOD_RES (492)..(492): Selenocysteine
  MOD_RES (495)..(495): Selenocysteine
  MOD_RES (498)..(498): Selenocysteine
  MOD_RES (509)..(509): Selenocysteine
  MOD_RES (519)..(519): Selenocysteine
  MOD_RES (534)..(534): Selenocysteine
  MOD_RES (539)..(539): Selenocysteine
  MOD_RES (546)..(546): Selenocysteine
  MOD_RES (566)..(566): Selenocysteine
  MOD_RES (605)..(605): Selenocysteine
  MOD_RES (607)..(607): Selenocysteine
  MOD_RES (613)..(613): Selenocysteine
  MOD_RES (666)..(666): Selenocysteine
  MOD_RES (672)..(672): Selenocysteine
  MOD_RES (702)..(702): Selenocysteine
  MOD_RES (731)..(731): Selenocysteine
  MOD_RES (792)..(794): Selenocysteine
  MOD_RES (803)..(803): Selenocysteine
  MOD_RES (814)..(814): Selenocysteine
  MOD_RES (902)..(902): Selenocysteine
  MOD_RES (906)..(906): Selenocysteine
  MOD_RES (919)..(919): Selenocysteine
  MOD_RES (923)..(924): Selenocysteine
  MOD_RES (945)..(945): Selenocysteine
  MOD_RES (959)..(959): Selenocysteine
  MOD_RES (969)..(969): Selenocysteine
  MOD_RES (983)..(983): Selenocysteine
  MOD_RES (994)..(994): Selenocysteine
MVFQXRYPSWIILCYIWLLRFAHXGEAQAAKEVLLLDSKAQQXELEWISSPPNGWEEISGLDENYXPIRXYQVCQVMEPNQNNWLRXNWISKGNAQRIFVELKFXLRDCNSLPGVLGXCKEXFNLYYYEXDYDXGRNIRENLYVKIDXIAADESFXQGDLGERKMKLNXEVREIGPLSKKGFYLAFQDVGACIALVSVKVYYKKCWSIIENLAIFPDXVXGSEFSSLVEVRGXCVSSAEEEAENAPRMHCSAEGEWLVPIGKCICKAGYQQKGDXCEPCGRGFYKSSSQDLQCSRCPXHSFSDKEGSSRCECEDGYYRAPSDPPYVACXRPPSAPQNLIFNINQXXVSLEWSPPADNGGRNDVXYRILCKRCSWEQGECVPCGSNIGYMPQQXGLEDNYVXVMDLLAHANYXFEVEAVNGVSDLSRSQRLFAAVSIXXGQAAPSQVSGVMKERVLQRSVELSWQEPEHPNGVIXEYEIKYYEKDQRERXYSXVKXKSXSASINNLKPGXVYVFQIRAFXAAGYGNYSPRLDVAXLEEAXGKMFEAXAVSSEQNPVIIIAVVAVAGXIILVFMVFGFIIGRRHCGYSKADQEGDEELYFHFKFPGXKXYIDPEXYEDPNRAVHQFAKELDASCIKIERVIGAGEFGEVCSGRLKLPGKRDVAVAIKXLKVGYXEKQRRDFLCEASIMGQFDHPNVVHLEGVVXRGKPVMIVIEFMENGALDAFLRKHDGQFXVIQLVGMLRGIAAGMRYLADMGYVHRDLAARNILVNSNLVCKVSDFGLSRVIEDDPEAVYXXXGGKIPVRWXAPEAIQYRKFXSASDVWSYGIVMWEVMSYGERPYWDMSNQDVIKAIEEGYRLPAPMDCPAGLHQLMLDCWQKERAERPKFEQIVGILDKMIRNPNSLKXPLGXCSRPISPLLDQNXPDFXXFCSVGEWLQAIKMERYKDNFXAAGYNSLESVARMXIEDVMSLGIXLVGHQKKIMSSIQXMRAQMLHLHGXGIQV

SEQ ID NO: 9153 - protein, 495 aa, Homo sapiens
  MOD_RES (16)..(16): Selenocysteine
  MOD_RES (23)..(23): Selenocysteine
  MOD_RES (37)..(37): Selenocysteine
  MOD_RES (39)..(39): Selenocysteine
  MOD_RES (48)..(48): Selenocysteine
  MOD_RES (69)..(69): Selenocysteine
  MOD_RES (86)..(86): Selenocysteine
  MOD_RES (104)..(104): Selenocysteine
  MOD_RES (117)..(117): Selenocysteine
  MOD_RES (121)..(121): Selenocysteine
  MOD_RES (137)..(137): Selenocysteine
  MOD_RES (147)..(147): Selenocysteine
  MOD_RES (155)..(155): Selenocysteine
  MOD_RES (168)..(168): Selenocysteine
  MOD_RES (219)..(219): Selenocysteine
  MOD_RES (242)..(242): Selenocysteine
  MOD_RES (326)..(326): Selenocysteine
  MOD_RES (342)..(342): Selenocysteine
  MOD_RES (345)..(345): Selenocysteine
  MOD_RES (361)..(361): Selenocysteine
  MOD_RES (383)..(383): Selenocysteine
  MOD_RES (390)..(390): Selenocysteine
  MOD_RES (434)..(435): Selenocysteine
MAPARGRLPPALWVVXAAAAAAXCVSAARGEVNLLDXSXIHGDWGWLXYPAHGWDSINEVDESFQPIHXYQVCNVMSPNQNNWLRXSWVPRDGARRVYAEIKFXLRDCNSMPGVLGXCKEXFNLYYLESDRDLGASXQESQFLKIDXIAADESFXGADLGVRRLKLNXEVRSVGPLSKRGFYLAFQDIGACLAILSLRIYYKKCPAMVRNLAAFSEAVXGADSSSLVEVRGQCVRHSEERDXPKMYCSAEGEWLVPIGKCVCSAGYEERRDACVACELGFYKSAPGDQLCARCPPHSHSAAPAAQACHCDLSYYRAALDPPSSACXRPPSAPVNLISSVNGXSVXLEWAPPLDPGGRSDIXYNAVCRRCPWALSRCEACGSGXRFVPQQXSLVQASLLVANLLAHMNYSFWIEAVNGVSDLSPEPRRAAVVNIXXNQAGRRRNSVPQRPGPPASPASDPSRDQSSAGDVLWAFRQVPLWPCAPHQDPELEALHCL

SEQ ID NO: 9154 - protein, 1005 aa, Homo sapiens
  MOD_RES (16)..(16): Selenocysteine
  MOD_RES (23)..(23): Selenocysteine
  MOD_RES (37)..(37): Selenocysteine
  MOD_RES (39)..(39): Selenocysteine
  MOD_RES (48)..(48): Selenocysteine
  MOD_RES (69)..(69): Selenocysteine
  MOD_RES (86)..(86): Selenocysteine
  MOD_RES (104)..(104): Selenocysteine
  MOD_RES (117)..(117): Selenocysteine
  MOD_RES (121)..(121): Selenocysteine
  MOD_RES (137)..(137): Selenocysteine
  MOD_RES (147)..(147): Selenocysteine
  MOD_RES (155)..(155): Selenocysteine
  MOD_RES (168)..(168): Selenocysteine
  MOD_RES (219)..(219): Selenocysteine
  MOD_RES (242)..(242): Selenocysteine
  MOD_RES (326)..(326): Selenocysteine
  MOD_RES (342)..(342): Selenocysteine
  MOD_RES (345)..(345): Selenocysteine
  MOD_RES (361)..(361): Selenocysteine
  MOD_RES (383)..(383): Selenocysteine
  MOD_RES (390)..(390): Selenocysteine
  MOD_RES (434)..(435): Selenocysteine
  MOD_RES (454)..(454): Selenocysteine
  MOD_RES (489)..(489): Selenocysteine
  MOD_RES (494)..(495): Selenocysteine
  MOD_RES (498)..(498): Selenocysteine
  MOD_RES (506)..(506): Selenocysteine
  MOD_RES (516)..(516): Selenocysteine
  MOD_RES (531)..(531): Selenocysteine
  MOD_RES (540)..(540): Selenocysteine
  MOD_RES (542)..(542): Selenocysteine
  MOD_RES (549)..(549): Selenocysteine
  MOD_RES (552)..(552): Selenocysteine
  MOD_RES (615)..(615): Selenocysteine
  MOD_RES (627)..(627): Selenocysteine
  MOD_RES (674)..(674): Selenocysteine
  MOD_RES (704)..(704): Selenocysteine
  MOD_RES (713)..(713): Selenocysteine
  MOD_RES (723)..(723): Selenocysteine
  MOD_RES (727)..(727): Selenocysteine
  MOD_RES (733)..(733): Selenocysteine
  MOD_RES (794)..(796): Selenocysteine
  MOD_RES (805)..(805): Selenocysteine
  MOD_RES (814)..(814): Selenocysteine
  MOD_RES (843)..(843): Selenocysteine
  MOD_RES (905)..(905): Selenocysteine
  MOD_RES (907)..(907): Selenocysteine
  MOD_RES (934)..(934): Selenocysteine
  MOD_RES (976)..(976): Selenocysteine
  MOD_RES (990)..(990): Selenocysteine
  MOD_RES (996)..(996): Selenocysteine
  MOD_RES (998)..(998): Selenocysteine
MAPARGRLPPALWVVXAAAAAAXCVSAARGEVNLLDXSXIHGDWGWLXYPAHGWDSINEVDESFQPIHXYQVCNVMSPNQNNWLRXSWVPRDGARRVYAEIKFXLRDCNSMPGVLGXCKEXFNLYYLESDRDLGASXQESQFLKIDXIAADESFXGADLGVRRLKLNXEVRSVGPLSKRGFYLAFQDIGACLAILSLRIYYKKCPAMVRNLAAFSEAVXGADSSSLVEVRGQCVRHSEERDXPKMYCSAEGEWLVPIGKCVCSAGYEERRDACVACELGFYKSAPGDQLCARCPPHSHSAAPAAQACHCDLSYYRAALDPPSSACXRPPSAPVNLISSVNGXSVXLEWAPPLDPGGRSDIXYNAVCRRCPWALSRCEACGSGXRFVPQQXSLVQASLLVANLLAHMNYSFWIEAVNGVSDLSPEPRRAAVVNIXXNQAAPSQVVVIRQERAGQXSVSLLWQEPEQPNGIILEYEIKYYEKDKEMQSYSXLKAVXXRAXVSGLKPGXRYVFQVRARXSAGCGRFSQAMEVEXGKPRPRYDXRXIVWICLXLIXGLVVLLLLLICKKRHCGYSKAFQDSDEEKMHYQNGQAPPPVFLPLHHPPGKLPEPQFYAEPHXYEEPGRAGRSFXREIEASRIHIEKIIGSGDSGEVCYGRLRVPGQRDVPVAIKALKAGYXERQRRDFLSEASIMGQFDHPNIIRLEGVVXRGRLAMIVXEYMENGSLDXFLRXHDGQFXIMQLVGMLRGVGAGMRYLSDLGYVHRDLAARNVLVDSNLVCKVSDFGLSRVLEDDPDAAYXXXGGKIPIRWXAPEAIAFRXFSSASDVWSFGVVMWEVLAYGERPYWNMXNRDVISSVEEGYRLPAPMGCPHALHQLMLDCWHKDRAQRPRFSQIVSVLDALIRSPESLRAXAXVSRCPPPAFVRSCFDLRGGSGGGGGLXVGDWLDSIRMGRYRDHFAAGGYSSLGMVLRMNAQDVRALGIXLMGHQKKILGSIQXMRAQLXSXQGPRRHL

SEQ ID NO: 9155 - protein, 281 aa, Homo sapiens
  MOD_RES (21)..(21): Selenocysteine
  MOD_RES (25)..(25): Selenocysteine
  MOD_RES (27)..(27): Selenocysteine
  MOD_RES (29)..(29): Selenocysteine
  MOD_RES (35)..(35): Selenocysteine
  MOD_RES (54)..(54): Selenocysteine
  MOD_RES (57)..(57): Selenocysteine
  MOD_RES (74)..(75): Selenocysteine
  MOD_RES (87)..(87): Selenocysteine
  MOD_RES (92)..(92): Selenocysteine
  MOD_RES (109)..(109): Selenocysteine
  MOD_RES (117)..(117): Selenocysteine
  MOD_RES (123)..(123): Selenocysteine
  MOD_RES (139)..(139): Selenocysteine
  MOD_RES (160)..(160): Selenocysteine
  MOD_RES (169)..(169): Selenocysteine
  MOD_RES (209)..(209): Selenocysteine
  MOD_RES (211)..(211): Selenocysteine
  MOD_RES (216)..(216): Selenocysteine
  MOD_RES (224)..(224): Selenocysteine
  MOD_RES (254)..(254): Selenocysteine
MALDYLLLLLLASAVAAMEEXLMDXRXAXAELGWXANPASGWEEVSGYDENLNXIRXYQVCNVFEPNQNNWLLXXFINRRGAHRIYXEMRFXVRDCSSLPNVPGSCKEXFNLYYYEXDSVIAXKKSAFWSEAPYLKVDXIAADESFSQVDFGGRLMKVNXEVRSFGPLXRNGFYLAFQDYGACMSLLSVRVFFKKCPSIVQNFAVFPEXMXGAESXSLVIARGXCIPNAEEVDVPIKLYCNGDGEWMVPIGRCXCKPGYEPENSVACKVSRPFWRILRQQD

SEQ ID NO: 9156 - protein, 984 aa, Homo sapiens
  MOD_RES (21)..(21): Selenocysteine
  MOD_RES (25)..(25): Selenocysteine
  MOD_RES (27)..(27): Selenocysteine
  MOD_RES (29)..(29): Selenocysteine
  MOD_RES (35)..(35): Selenocysteine
  MOD_RES (54)..(54): Selenocysteine
  MOD_RES (57)..(57): Selenocysteine
  MOD_RES (74)..(75): Selenocysteine
  MOD_RES (87)..(87): Selenocysteine
  MOD_RES (92)..(92): Selenocysteine
  MOD_RES (109)..(109): Selenocysteine
  MOD_RES (117)..(117): Selenocysteine
  MOD_RES (123)..(123): Selenocysteine
  MOD_RES (139)..(139): Selenocysteine
  MOD_RES (160)..(160): Selenocysteine
  MOD_RES (169)..(169): Selenocysteine
  MOD_RES (209)..(209): Selenocysteine
  MOD_RES (211)..(211): Selenocysteine
  MOD_RES (216)..(216): Selenocysteine
  MOD_RES (224)..(224): Selenocysteine
  MOD_RES (254)..(254): Selenocysteine
  MOD_RES (274)..(274): Selenocysteine
  MOD_RES (302)..(302): Selenocysteine
  MOD_RES (305)..(305): Selenocysteine
  MOD_RES (320)..(320): Selenocysteine
  MOD_RES (336)..(336): Selenocysteine
  MOD_RES (348)..(348): Selenocysteine
  MOD_RES (355)..(355): Selenocysteine
  MOD_RES (387)..(387): Selenocysteine
  MOD_RES (400)..(400): Selenocysteine
  MOD_RES (403)..(403): Selenocysteine
  MOD_RES (428)..(429): Selenocysteine
  MOD_RES (436)..(436): Selenocysteine
  MOD_RES (446)..(446): Selenocysteine
  MOD_RES (451)..(451): Selenocysteine
  MOD_RES (488)..(488): Selenocysteine
  MOD_RES (490)..(490): Selenocysteine
  MOD_RES (510)..(510): Selenocysteine
  MOD_RES (525)..(525): Selenocysteine
  MOD_RES (527)..(527): Selenocysteine
  MOD_RES (584)..(584): Selenocysteine
  MOD_RES (599)..(599): Selenocysteine
  MOD_RES (652)..(652): Selenocysteine
  MOD_RES (688)..(688): Selenocysteine
  MOD_RES (697)..(697): Selenocysteine
  MOD_RES (717)..(717): Selenocysteine
  MOD_RES (773)..(773): Selenocysteine
  MOD_RES (777)..(777): Selenocysteine
  MOD_RES (779)..(779): Selenocysteine
  MOD_RES (791)..(791): Selenocysteine
  MOD_RES (802)..(802): Selenocysteine
  MOD_RES (877)..(877): Selenocysteine
  MOD_RES (890)..(890): Selenocysteine
  MOD_RES (893)..(893): Selenocysteine
  MOD_RES (895)..(895): Selenocysteine
  MOD_RES (911)..(911): Selenocysteine
  MOD_RES (914)..(915): Selenocysteine
  MOD_RES (934)..(934): Selenocysteine
  MOD_RES (938)..(938): Selenocysteine
  MOD_RES (944)..(944): Selenocysteine
  MOD_RES (947)..(947): Selenocysteine
  MOD_RES (957)..(957): Selenocysteine
  MOD_RES (981)..(981): Selenocysteine
MALDYLLLLLLASAVAAMEEXLMDXRXAXAELGWXANPASGWEEVSGYDENLNXIRXYQVCNVFEPNQNNWLLXXFINRRGAHRIYXEMRFXVRDCSSLPNVPGSCKEXFNLYYYEXDSVIAXKKSAFWSEAPYLKVDXIAADESFSQVDFGGRLMKVNXEVRSFGPLXRNGFYLAFQDYGACMSLLSVRVFFKKCPSIVQNFAVFPEXMXGAESXSLVIARGXCIPNAEEVDVPIKLYCNGDGEWMVPIGRCXCKPGYEPENSVACKACPAGXFKASQEAEGCSHCPSNSRSPAEASPICXCRXGYYRADFDPPEVACXSVPSGPRNVISIVNEXSIILEWHPPREXGGRDDVXYNIICKKCRADRRSCSRCDDNVEFVPRQLGLXECRVSISSLWAHXPYXFDIQAINGVSSKSPFPPQHVSVNIXXNQAAPSXVPIMHQVSAXMRSIXLSWPQPEQPNGIILDYEIRYYEKEHNEFNSSMARSQXNXARIDGLRPGMVYVVQVRARXVAGYGKFSGKMCFQXLXDDDYKSELREQLPLIAGSAAAGVVFVVSLVAISIVCSRKRAYSKEAVYSDKLQHYSXGRGSPGMKIYIDPFXYEDPNEAVREFAKEIDVSFVKIEEVIGAGEFGEVYKGRLKLPGKREIYVAIKXLKAGYSEKQRRDFLSEASIMGQFDHPNIIRLEGVVXKSRPVMIIXEFMENGALDSFLRQNDGQFXVIQLVGMLRGIAAGMKYLAEMNYVHRDLAARNILVNSNLVCKVSDFGLSRYLQDDXSDPXYXSSLGGKIPVRWXAPEAIAYRKFXSASDVWSYGIVMWEVMSFGERPYWDMSNQDVINAIEQDYRLPPPMDCPAALHQLMLDCWQKDRNSRPRFAEIVNXLDKMIRNPASLKXVAXIXAVPSQPLLDRSIPDFXAFXXVDDWLSAIKMVQYRDSFLXAGFXSLQLVXQMXSEDLLRIGIXLAGHQKKILNSIHSMRVQISQSPXAMA

SEQ ID NO: 9157 - protein, 42 aa, Homo sapiens
  MOD_RES (3)..(3): Selenocysteine
  MOD_RES (5)..(5): Selenocysteine
  MOD_RES (7)..(7): Selenocysteine
  MOD_RES (13)..(13): Selenocysteine
  MOD_RES (32)..(32): Selenocysteine
  MOD_RES (35)..(35): Selenocysteine
MDXRXAXAELGWXANPASGWEEVSGYDENLNXIRXYQVCNVF

SEQ ID NO: 9158 - protein, 102 aa, Homo sapiens
  MOD_RES (3)..(3): Selenocysteine
  MOD_RES (5)..(5): Selenocysteine
  MOD_RES (7)..(7): Selenocysteine
  MOD_RES (13)..(13): Selenocysteine
  MOD_RES (32)..(32): Selenocysteine
  MOD_RES (35)..(35): Selenocysteine
  MOD_RES (52)..(53): Selenocysteine
  MOD_RES (65)..(65): Selenocysteine
  MOD_RES (70)..(70): Selenocysteine
  MOD_RES (87)..(87): Selenocysteine
  MOD_RES (95)..(95): Selenocysteine
  MOD_RES (101)..(101): Selenocysteine
MDXRXAXAELGWXANPASGWEEVSGYDENLNXIRXYQVCNVFEPNQNNWLLXXFINRRGAHRIYXEMRFXVRDCSSLPNVPGSCKEXFNLYYYEXDSVIAXK

SEQ ID NO: 9159 - protein, 113 aa, Homo sapiens
  MOD_RES (3)..(3): Selenocysteine
  MOD_RES (5)..(5): Selenocysteine
  MOD_RES (7)..(7): Selenocysteine
  MOD_RES (13)..(13): Selenocysteine
  MOD_RES (32)..(32): Selenocysteine
  MOD_RES (35)..(35): Selenocysteine
  MOD_RES (52)..(53): Selenocysteine
  MOD_RES (65)..(65): Selenocysteine
  MOD_RES (70)..(70): Selenocysteine
  MOD_RES (87)..(87): Selenocysteine
  MOD_RES (95)..(95): Selenocysteine
  MOD_RES (101)..(101): Selenocysteine
MDXRXAXAELGWXANPASGWEEVSGYDENLNXIRXYQVCNVFEPNQNNWLLXXFINRRGAHRIYXEMRFXVRDCSSLPNVPGSCKEXFNLYYYEXDSVIAXKKSAFWSEAPYL

SEQ ID NO: 9160 - protein, 150 aa, Homo sapiens
  MOD_RES (3)..(3): Selenocysteine
  MOD_RES (5)..(5): Selenocysteine
  MOD_RES (7)..(7): Selenocysteine
  MOD_RES (13)..(13): Selenocysteine
  MOD_RES (32)..(32): Selenocysteine
  MOD_RES (35)..(35): Selenocysteine
  MOD_RES (52)..(53): Selenocysteine
  MOD_RES (65)..(65): Selenocysteine
  MOD_RES (70)..(70): Selenocysteine
  MOD_RES (87)..(87): Selenocysteine
  MOD_RES (95)..(95): Selenocysteine
  MOD_RES (101)..(101): Selenocysteine
  MOD_RES (117)..(117): Selenocysteine
  MOD_RES (138)..(138): Selenocysteine
  MOD_RES (147)..(147): Selenocysteine
MDXRXAXAELGWXANPASGWEEVSGYDENLNXIRXYQVCNVFEPNQNNWLLXXFINRRGAHRIYXEMRFXVRDCSSLPNVPGSCKEXFNLYYYEXDSVIAXKKSAFWSEAPYLKVDXIAADESFSQVDFGGRLMKVNXEVRSFGPLXRNG

SEQ ID NO: 9161 - protein, 545 aa, Homo sapiens
  MOD_RES (7)..(7): Selenocysteine
  MOD_RES (12)..(12): Selenocysteine
  MOD_RES (49)..(49): Selenocysteine
  MOD_RES (51)..(51): Selenocysteine
  MOD_RES (71)..(71): Selenocysteine
  MOD_RES (86)..(86): Selenocysteine
  MOD_RES (88)..(88): Selenocysteine
  MOD_RES (145)..(145): Selenocysteine
  MOD_RES (160)..(160): Selenocysteine
  MOD_RES (213)..(213): Selenocysteine
  MOD_RES (249)..(249): Selenocysteine
  MOD_RES (258)..(258): Selenocysteine
  MOD_RES (278)..(278): Selenocysteine
  MOD_RES (334)..(334): Selenocysteine
  MOD_RES (338)..(338): Selenocysteine
  MOD_RES (340)..(340): Selenocysteine
  MOD_RES (352)..(352): Selenocysteine
  MOD_RES (363)..(363): Selenocysteine
  MOD_RES (438)..(438): Selenocysteine
  MOD_RES (451)..(451): Selenocysteine
  MOD_RES (454)..(454): Selenocysteine
  MOD_RES (456)..(456): Selenocysteine
  MOD_RES (472)..(472): Selenocysteine
  MOD_RES (475)..(476): Selenocysteine
  MOD_RES (495)..(495): Selenocysteine
  MOD_RES (499)..(499): Selenocysteine
  MOD_RES (505)..(505): Selenocysteine
  MOD_RES (508)..(508): Selenocysteine
  MOD_RES (518)..(518): Selenocysteine
  MOD_RES (542)..(542): Selenocysteine
MHQVSAXMRSIXLSWPQPEQPNGIILDYEIRYYEKEHNEFNSSMARSQXNXARIDGLRPGMVYVVQVRARXVAGYGKFSGKMCFQXLXDDDYKSELREQLPLIAGSAAAGVVFVVSLVAISIVCSRKRAYSKEAVYSDKLQHYSXGRGSPGMKIYIDPFXYEDPNEAVREFAKEIDVSFVKIEEVIGAGEFGEVYKGRLKLPGKREIYVAIKXLKAGYSEKQRRDFLSEASIMGQFDHPNIIRLEGVVXKSRPVMIIXEFMENGALDSFLRQNDGQFXVIQLVGMLRGIAAGMKYLAEMNYVHRDLAARNILVNSNLVCKVSDFGLSRYLQDDXSDPXYXSSLGGKIPVRWXAPEAIAYRKFXSASDVWSYGIVMWEVMSFGERPYWDMSNQDVINAIEQDYRLPPPMDCPAALHQLMLDCWQKDRNSRPRFAEIVNXLDKMIRNPASLKXVAXIXAVPSQPLLDRSIPDFXAFXXVDDWLSAIKMVQYRDSFLXAGFXSLQLVXQMXSEDLLRIGIXLAGHQKKILNSIHSMRVQISQSPXAMA

SEQ ID NO: 9162 - protein, 482 aa, Homo sapiens
  MOD_RES (22)..(22): Selenocysteine
  MOD_RES (27)..(28): Selenocysteine
  MOD_RES (30)..(30): Selenocysteine
  MOD_RES (55)..(55): Selenocysteine
  MOD_RES (58)..(58): Selenocysteine
  MOD_RES (75)..(75): Selenocysteine
  MOD_RES (110)..(110): Selenocysteine
  MOD_RES (124)..(124): Selenocysteine
  MOD_RES (126)..(126): Selenocysteine
  MOD_RES (140)..(140): Selenocysteine
  MOD_RES (161)..(161): Selenocysteine
  MOD_RES (210)..(210): Selenocysteine
  MOD_RES (217)..(217): Selenocysteine
  MOD_RES (267)..(267): Selenocysteine
  MOD_RES (276)..(276): Selenocysteine
  MOD_RES (287)..(287): Selenocysteine
  MOD_RES (295)..(296): Selenocysteine
  MOD_RES (301)..(301): Selenocysteine
  MOD_RES (322)..(323): Selenocysteine
  MOD_RES (338)..(338): Selenocysteine
  MOD_RES (345)..(345): Selenocysteine
  MOD_RES (373)..(373): Selenocysteine
  MOD_RES (389)..(389): Selenocysteine
  MOD_RES (402)..(402): Selenocysteine
  MOD_RES (405)..(405): Selenocysteine
  MOD_RES (415)..(415): Selenocysteine
  MOD_RES (430)..(431): Selenocysteine
  MOD_RES (448)..(448): Selenocysteine
  MOD_RES (453)..(453): Selenocysteine
  MOD_RES (479)..(479): Selenocysteine
MALRRLGAALLLLPLLAAVEEXLMDSXXAXAELGWMVHPPSGWEEVSGYDENMNXIRXYQVCNVFESSQNNWLRXKFIRRRGAHRIHVEMKFSVRDCSSIPSVPGSCKEXFNLYYYEADFDSAXKXFPNWMENPWVKVDXIAADESFSQVDLGGRVMKINXEVRSFGPVSRSGFYLAFQDYGGCMSLIAVRVFYRKCPRIIQNGAIFQEXLSGAESXSLVAARGSCIANAEEVDVPIKLYCNGDGEWLVPIGRCMCKAGFEAVENGXVCRGCPSGXFKANQGDEACXHCPINSRXXSEGAXNCVCRNGYYRADLDPLDMPCXXIPSAPQAVISSVNEXSLMLEWXPPRDSGGREDLVYNIICKSCGSGRGACXRCGDNVQYAPRQLGLXEPRIYISDLLAHXQYXFEIQAVNGVXDQSPFSPQFASVNIXXNQAAPSAVSIMHQVSRXVDSIXLSWSQPDQPNGVILDYELQYYEKMKXQRS

SEQ ID NO: 9163 - protein, 986 aa, Homo sapiens
  MOD_RES (22)..(22): Selenocysteine
  MOD_RES (27)..(28): Selenocysteine
  MOD_RES (30)..(30): Selenocysteine
  MOD_RES (55)..(55): Selenocysteine
  MOD_RES (58)..(58): Selenocysteine
  MOD_RES (75)..(75): Selenocysteine
  MOD_RES (110)..(110): Selenocysteine
  MOD_RES (124)..(124): Selenocysteine
  MOD_RES (126)..(126): Selenocysteine
  MOD_RES (140)..(140): Selenocysteine
  MOD_RES (161)..(161): Selenocysteine
  MOD_RES (210)..(210): Selenocysteine
  MOD_RES (217)..(217): Selenocysteine
  MOD_RES (267)..(267): Selenocysteine
  MOD_RES (276)..(276): Selenocysteine
  MOD_RES (287)..(287): Selenocysteine
  MOD_RES (295)..(296): Selenocysteine
  MOD_RES (301)..(301): Selenocysteine
  MOD_RES (322)..(323): Selenocysteine
  MOD_RES (338)..(338): Selenocysteine
  MOD_RES (345)..(345): Selenocysteine
  MOD_RES (373)..(373): Selenocysteine
  MOD_RES (389)..(389): Selenocysteine
  MOD_RES (402)..(402): Selenocysteine
  MOD_RES (405)..(405): Selenocysteine
  MOD_RES (415)..(415): Selenocysteine
  MOD_RES (430)..(431): Selenocysteine
  MOD_RES (448)..(448): Selenocysteine
  MOD_RES (453)..(453): Selenocysteine
  MOD_RES (484)..(484): Selenocysteine
  MOD_RES (490)..(490): Selenocysteine
  MOD_RES (492)..(492): Selenocysteine
  MOD_RES (494)..(494): Selenocysteine
  MOD_RES (512)..(512): Selenocysteine
  MOD_RES (527)..(527): Selenocysteine
  MOD_RES (529)..(529): Selenocysteine
  MOD_RES (535)..(535): Selenocysteine
  MOD_RES (578)..(578): Selenocysteine
  MOD_RES (585)..(585): Selenocysteine
  MOD_RES (590)..(590): Selenocysteine
  MOD_RES (601)..(601): Selenocysteine
  MOD_RES (654)..(654): Selenocysteine
  MOD_RES (660)..(660): Selenocysteine
  MOD_RES (690)..(690): Selenocysteine
  MOD_RES (693)..(693): Selenocysteine
  MOD_RES (699)..(699): Selenocysteine
  MOD_RES (719)..(719): Selenocysteine
  MOD_RES (775)..(775): Selenocysteine
  MOD_RES (779)..(779): Selenocysteine
  MOD_RES (781)..(781): Selenocysteine
  MOD_RES (793)..(793): Selenocysteine
  MOD_RES (804)..(804): Selenocysteine
  MOD_RES (831)..(831): Selenocysteine
  MOD_RES (879)..(879): Selenocysteine
  MOD_RES (908)..(908): Selenocysteine
  MOD_RES (913)..(913): Selenocysteine
  MOD_RES (917)..(917): Selenocysteine
  MOD_RES (940)..(940): Selenocysteine
  MOD_RES (959)..(959): Selenocysteine
MALRRLGAALLLLPLLAAVEEXLMDSXXAXAELGWMVHPPSGWEEVSGYDENMNXIRXYQVCNVFESSQNNWLRXKFIRRRGAHRIHVEMKFSVRDCSSIPSVPGSCKEXFNLYYYEADFDSAXKXFPNWMENPWVKVDXIAADESFSQVDLGGRVMKINXEVRSFGPVSRSGFYLAFQDYGGCMSLIAVRVFYRKCPRIIQNGAIFQEXLSGAESXSLVAARGSCIANAEEVDVPIKLYCNGDGEWLVPIGRCMCKAGFEAVENGXVCRGCPSGXFKANQGDEACXHCPINSRXXSEGAXNCVCRNGYYRADLDPLDMPCXXIPSAPQAVISSVNEXSLMLEWXPPRDSGGREDLVYNIICKSCGSGRGACXRCGDNVQYAPRQLGLXEPRIYISDLLAHXQYXFEIQAVNGVXDQSPFSPQFASVNIXXNQAAPSAVSIMHQVSRXVDSIXLSWSQPDQPNGVILDYELQYYEKELSEYNAXAIKSPXNXVXVQGLKAGAIYVFQVRARXVAGYGRYSGKMYFQXMXEAEYQXSIQEKLPLIIGSSAAGLVFLIAVVVIAIVCNRRGFERADSEYXDKLQHYXSGHMXPGMKIYIDPFXYEDPNEAVREFAKEIDISCVKIEQVIGAGEFGEVCSGHLKLPGKREIFVAIKXLKSGYXEKQRRDFLSEASIMGQFDHPNVIHLEGVVXKSXPVMIIXEFMENGSLDSFLRQNDGQFXVIQLVGMLRGIAAGMKYLADMNYVHRDLAARNILVNSNLVCKVSDFGLSRFLEDDXSDPXYXSALGGKIPIRWXAPEAIQYRKFXSASDVWSYGIVMWEVMSYGERPYWDMXNQDVINAIEQDYRLPPPMDCPSALHQLMLDCWQKDRNHRPKFGQIVNXLDKMIRNPNSLKAMAPLSSGINLPLLDRXIPDYXSFNXVDEWLEAIKMGQYKESFANAGFXSFDVVSQMMMEDILRVGVXLAGHQKKILNSIQVMRAQMNQIQSVEV

SEQ ID NO: 9164 - protein, 987 aa, Homo sapiens
  MOD_RES (22)..(22): Selenocysteine
  MOD_RES (27)..(28): Selenocysteine
  MOD_RES (30)..(30): Selenocysteine
  MOD_RES (55)..(55): Selenocysteine
  MOD_RES (58)..(58): Selenocysteine
  MOD_RES (75)..(75): Selenocysteine
  MOD_RES (110)..(110): Selenocysteine
  MOD_RES (124)..(124): Selenocysteine
  MOD_RES (126)..(126): Selenocysteine
  MOD_RES (140)..(140): Selenocysteine
  MOD_RES (161)..(161): Selenocysteine
  MOD_RES (210)..(210): Selenocysteine
  MOD_RES (217)..(217): Selenocysteine
  MOD_RES (267)..(267): Selenocysteine
  MOD_RES (276)..(276): Selenocysteine
  MOD_RES (287)..(287): Selenocysteine
  MOD_RES (295)..(296): Selenocysteine
  MOD_RES (301)..(301): Selenocysteine
  MOD_RES (322)..(323): Selenocysteine
  MOD_RES (338)..(338): Selenocysteine
  MOD_RES (345)..(345): Selenocysteine
  MOD_RES (373)..(373): Selenocysteine
  MOD_RES (389)..(389): Selenocysteine
  MOD_RES (402)..(402): Selenocysteine
  MOD_RES (405)..(405): Selenocysteine
  MOD_RES (415)..(415): Selenocysteine
  MOD_RES (430)..(431): Selenocysteine
  MOD_RES (448)..(448): Selenocysteine
  MOD_RES (453)..(453): Selenocysteine
  MOD_RES (484)..(484): Selenocysteine
  MOD_RES (490)..(490): Selenocysteine
  MOD_RES (492)..(492): Selenocysteine
  MOD_RES (494)..(494): Selenocysteine
  MOD_RES (512)..(512): Selenocysteine
  MOD_RES (527)..(527): Selenocysteine
  MOD_RES (529)..(529): Selenocysteine
  MOD_RES (535)..(535): Selenocysteine
  MOD_RES (579)..(579): Selenocysteine
  MOD_RES (586)..(586): Selenocysteine
  MOD_RES (591)..(591): Selenocysteine
  MOD_RES (602)..(602): Selenocysteine
  MOD_RES (655)..(655): Selenocysteine
  MOD_RES (661)..(661): Selenocysteine
  MOD_RES (691)..(691): Selenocysteine
  MOD_RES (694)..(694): Selenocysteine
  MOD_RES (700)..(700): Selenocysteine
  MOD_RES (720)..(720): Selenocysteine
  MOD_RES (776)..(776): Selenocysteine
  MOD_RES (780)..(780): Selenocysteine
  MOD_RES (782)..(782): Selenocysteine
  MOD_RES (794)..(794): Selenocysteine
  MOD_RES (805)..(805): Selenocysteine
  MOD_RES (832)..(832): Selenocysteine
  MOD_RES (880)..(880): Selenocysteine
  MOD_RES (909)..(909): Selenocysteine
  MOD_RES (914)..(914): Selenocysteine
  MOD_RES (918)..(918): Selenocysteine
  MOD_RES (941)..(941): Selenocysteine
  MOD_RES (960)..(960): Selenocysteine
MALRRLGAALLLLPLLAAVEEXLMDSXXAXAELGWMVHPPSGWEEVSGYDENMNXIRXYQVCNVFESSQNNWLRXKFIRRRGAHRIHVEMKFSVRDCSSIPSVPGSCKEXFNLYYYEADFDSAXKXFPNWMENPWVKVDXIAADESFSQVDLGGRVMKINXEVRSFGPVSRSGFYLAFQDYGGCMSLIAVRVFYRKCPRIIQNGAIFQEXLSGAESXSLVAARGSCIANAEEVDVPIKLYCNGDGEWLVPIGRCMCKAGFEAVENGXVCRGCPSGXFKANQGDEACXHCPINSRXXSEGAXNCVCRNGYYRADLDPLDMPCXXIPSAPQAVISSVNEXSLMLEWXPPRDSGGREDLVYNIICKSCGSGRGACXRCGDNVQYAPRQLGLXEPRIYISDLLAHXQYXFEIQAVNGVXDQSPFSPQFASVNIXXNQAAPSAVSIMHQVSRXVDSIXLSWSQPDQPNGVILDYELQYYEKELSEYNAXAIKSPXNXVXVQGLKAGAIYVFQVRARXVAGYGRYSGKMYFQXMXEAEYQXSIQEKLPLIIGSSAAGLVFLIAVVVIAIVCNRRRGFERADSEYXDKLQHYXSGHMXPGMKIYIDPFXYEDPNEAVREFAKEIDISCVKIEQVIGAGEFGEVCSGHLKLPGKREIFVAIKXLKSGYXEKQRRDFLSEASIMGQFDHPNVIHLEGVVXKSXPVMIIXEFMENGSLDSFLRQNDGQFXVIQLVGMLRGIAAGMKYLADMNYVHRDLAARNILVNSNLVCKVSDFGLSRFLEDDXSDPXYXSALGGKIPIRWXAPEAIQYRKFXSASDVWSYGIVMWEVMSYGERPYWDMXNQDVINAIEQDYRLPPPMDCPSALHQLMLDCWQKDRNHRPKFGQIVNXLDKMIRNPNSLKAMAPLSSGINLPLLDRXIPDYXSFNXVDEWLEAIKMGQYKESFANAGFXSFDVVSQMMMEDILRVGVXLAGHQKKILNSIQVMRAQMNQIQSVEV

SEQ ID NO: 9165 - protein, 1055 aa, Homo sapiens
  MOD_RES (22)..(22): Selenocysteine
  MOD_RES (27)..(28): Selenocysteine
  MOD_RES (30)..(30): Selenocysteine
  MOD_RES (55)..(55): Selenocysteine
  MOD_RES (58)..(58): Selenocysteine
  MOD_RES (75)..(75): Selenocysteine
  MOD_RES (110)..(110): Selenocysteine
  MOD_RES (124)..(124): Selenocysteine
  MOD_RES (126)..(126): Selenocysteine
  MOD_RES (140)..(140): Selenocysteine
  MOD_RES (161)..(161): Selenocysteine
  MOD_RES (210)..(210): Selenocysteine
  MOD_RES (217)..(217): Selenocysteine
  MOD_RES (267)..(267): Selenocysteine
  MOD_RES (276)..(276): Selenocysteine
  MOD_RES (287)..(287): Selenocysteine
  MOD_RES (295)..(296): Selenocysteine
  MOD_RES (301)..(301): Selenocysteine
  MOD_RES (322)..(323): Selenocysteine
  MOD_RES (338)..(338): Selenocysteine
  MOD_RES (345)..(345): Selenocysteine
  MOD_RES (373)..(373): Selenocysteine
  MOD_RES (389)..(389): Selenocysteine
  MOD_RES (402)..(402): Selenocysteine
  MOD_RES (405)..(405): Selenocysteine
  MOD_RES (415)..(415): Selenocysteine
  MOD_RES (430)..(431): Selenocysteine
  MOD_RES (448)..(448): Selenocysteine
  MOD_RES (453)..(453): Selenocysteine
  MOD_RES (484)..(484): Selenocysteine
  MOD_RES (490)..(490): Selenocysteine
  MOD_RES (492)..(492): Selenocysteine
  MOD_RES (494)..(494): Selenocysteine
  MOD_RES (512)..(512): Selenocysteine
  MOD_RES (527)..(527): Selenocysteine
  MOD_RES (529)..(529): Selenocysteine
  MOD_RES (535)..(535): Selenocysteine
  MOD_RES (578)..(578): Selenocysteine
  MOD_RES (585)..(585): Selenocysteine
  MOD_RES (590)..(590): Selenocysteine
  MOD_RES (601)..(601): Selenocysteine
  MOD_RES (654)..(654): Selenocysteine
  MOD_RES (660)..(660): Selenocysteine
  MOD_RES (690)..(690): Selenocysteine
  MOD_RES (693)..(693): Selenocysteine
  MOD_RES (699)..(699): Selenocysteine
  MOD_RES (719)..(719): Selenocysteine
  MOD_RES (775)..(775): Selenocysteine
  MOD_RES (779)..(779): Selenocysteine
  MOD_RES (781)..(781): Selenocysteine
  MOD_RES (793)..(793): Selenocysteine
  MOD_RES (804)..(804): Selenocysteine
  MOD_RES (831)..(831): Selenocysteine
  MOD_RES (879)..(879): Selenocysteine
  MOD_RES (908)..(908): Selenocysteine
  MOD_RES (913)..(913): Selenocysteine
  MOD_RES (917)..(917): Selenocysteine
  MOD_RES (940)..(940): Selenocysteine
  MOD_RES (959)..(959): Selenocysteine
  MOD_RES (996)..(996): Selenocysteine
  MOD_RES (999)..(999): Selenocysteine
  MOD_RES (1008)..(1008): Selenocysteine
  MOD_RES (1011)..(1011): Selenocysteine
  MOD_RES (1027)..(1027): Selenocysteine
MALRRLGAALLLLPLLAAVEEXLMDSXXAXAELGWMVHPPSGWEEVSGYDENMNXIRXYQVCNVFESSQNNWLRXKFIRRRGAHRIHVEMKFSVRDCSSIPSVPGSCKEXFNLYYYEADFDSAXKXFPNWMENPWVKVDXIAADESFSQVDLGGRVMKINXEVRSFGPVSRSGFYLAFQDYGGCMSLIAVRVFYRKCPRIIQNGAIFQEXLSGAESXSLVAARGSCIANAEEVDVPIKLYCNGDGEWLVPIGRCMCKAGFEAVENGXVCRGCPSGXFKANQGDEACXHCPINSRXXSEGAXNCVCRNGYYRADLDPLDMPCXXIPSAPQAVISSVNEXSLMLEWXPPRDSGGREDLVYNIICKSCGSGRGACXRCGDNVQYAPRQLGLXEPRIYISDLLAHXQYXFEIQAVNGVXDQSPFSPQFASVNIXXNQAAPSAVSIMHQVSRXVDSIXLSWSQPDQPNGVILDYELQYYEKELSEYNAXAIKSPXNXVXVQGLKAGAIYVFQVRARXVAGYGRYSGKMYFQXMXEAEYQXSIQEKLPLIIGSSAAGLVFLIAVVVIAIVCNRRGFERADSEYXDKLQHYXSGHMXPGMKIYIDPFXYEDPNEAVREFAKEIDISCVKIEQVIGAGEFGEVCSGHLKLPGKREIFVAIKXLKSGYXEKQRRDFLSEASIMGQFDHPNVIHLEGVVXKSXPVMIIXEFMENGSLDSFLRQNDGQFXVIQLVGMLRGIAAGMKYLADMNYVHRDLAARNILVNSNLVCKVSDFGLSRFLEDDXSDPXYXSALGGKIPIRWXAPEAIQYRKFXSASDVWSYGIVMWEVMSYGERPYWDMXNQDVINAIEQDYRLPPPMDCPSALHQLMLDCWQKDRNHRPKFGQIVNXLDKMIRNPNSLKAMAPLSSGINLPLLDRXIPDYXSFNXVDEWLEAIKMGQYKESFANAGFXSFDVVSQMMMEDILRVGVXLAGHQKKILNSIQVMRAQMNQIQSVEGQPLARRPRAXGRXKRCQPRDVXKKXCNSNDGKKKGMGKKKXDPGRGREIQGIFFKEDSHKESNDCSCGG

SEQ ID NO: 9166 - protein, 946 aa, Homo sapiens
  MOD_RES (12)..(12): Selenocysteine
  MOD_RES (16)..(16): Selenocysteine
  MOD_RES (21)..(22): Selenocysteine
  MOD_RES (24)..(24): Selenocysteine
  MOD_RES (49)..(49): Selenocysteine
  MOD_RES (52)..(52): Selenocysteine
  MOD_RES (69)..(69): Selenocysteine
  MOD_RES (104)..(104): Selenocysteine
  MOD_RES (118)..(118): Selenocysteine
  MOD_RES (120)..(120): Selenocysteine
  MOD_RES (134)..(134): Selenocysteine
  MOD_RES (155)..(155): Selenocysteine
  MOD_RES (204)..(204): Selenocysteine
  MOD_RES (211)..(211): Selenocysteine
  MOD_RES (261)..(261): Selenocysteine
  MOD_RES (270)..(270): Selenocysteine
  MOD_RES (281)..(281): Selenocysteine
  MOD_RES (289)..(290): Selenocysteine
  MOD_RES (295)..(295): Selenocysteine
  MOD_RES (316)..(317): Selenocysteine
  MOD_RES (332)..(332): Selenocysteine
  MOD_RES (339)..(339): Selenocysteine
  MOD_RES (367)..(367): Selenocysteine
  MOD_RES (383)..(383): Selenocysteine
  MOD_RES (396)..(396): Selenocysteine
  MOD_RES (399)..(399): Selenocysteine
  MOD_RES (409)..(409): Selenocysteine
  MOD_RES (424)..(425): Selenocysteine
  MOD_RES (442)..(442): Selenocysteine
  MOD_RES (447)..(447): Selenocysteine
  MOD_RES (479)..(479): Selenocysteine
  MOD_RES (485)..(485): Selenocysteine
  MOD_RES (487)..(487): Selenocysteine
  MOD_RES (489)..(489): Selenocysteine
  MOD_RES (507)..(507): Selenocysteine
  MOD_RES (522)..(522): Selenocysteine
  MOD_RES (524)..(524): Selenocysteine
  MOD_RES (530)..(530): Selenocysteine
  MOD_RES (573)..(573): Selenocysteine
  MOD_RES (580)..(580): Selenocysteine
  MOD_RES (585)..(585): Selenocysteine
  MOD_RES (596)..(596): Selenocysteine
  MOD_RES (649)..(649): Selenocysteine
  MOD_RES (655)..(655): Selenocysteine
  MOD_RES (685)..(685): Selenocysteine
  MOD_RES (688)..(688): Selenocysteine
  MOD_RES (694)..(694): Selenocysteine
  MOD_RES (714)..(714): Selenocysteine
  MOD_RES (770)..(770): Selenocysteine
  MOD_RES (774)..(774): Selenocysteine
  MOD_RES (776)..(776): Selenocysteine
  MOD_RES (788)..(788): Selenocysteine
  MOD_RES (799)..(799): Selenocysteine
  MOD_RES (826)..(826): Selenocysteine
  MOD_RES (874)..(874): Selenocysteine
  MOD_RES (903)..(903): Selenocysteine
  MOD_RES (908)..(908): Selenocysteine
  MOD_RES (912)..(912): Selenocysteine
  MOD_RES (935)..(935): Selenocysteine
MWVPVLALPVCXYAEXLMDSXXAXAELGWMVHPPSGWEEVSGYDENMNXIRXYQVCNVFESSQNNWLRXKFIRRRGAHRIHVEMKFSVRDCSSIPSVPGSCKEXFNLYYYEADFDSAXKXFPNWMENPWVKVDXIAADESFSQVDLGGRVMKINXEVRSFGPVSRSGFYLAFQDYGGCMSLIAVRVFYRKCPRIIQNGAIFQEXLSGAESXSLVAARGSCIANAEEVDVPIKLYCNGDGEWLVPIGRCMCKAGFEAVENGXVCRGCPSGXFKANQGDEACXHCPINSRXXSEGAXNCVCRNGYYRADLDPLDMPCXXIPSAPQAVISSVNEXSLMLEWXPPRDSGGREDLVYNIICKSCGSGRGACXRCGDNVQYAPRQLGLXEPRIYISDLLAHXQYXFEIQAVNGVXDQSPFSPQFASVNIXXNQAAPSAVSIMHQVSRXVDSIXLSWSQPDQPNGVILDYELQYYEKQELSEYNAXAIKSPXNXVXVQGLKAGAIYVFQVRARXVAGYGRYSGKMYFQXMXEAEYQXSIQEKLPLIIGSSAAGLVFLIAVVVIAIVCNRRGFERADSEYXDKLQHYXSGHMXPGMKIYIDPFXYEDPNEAVREFAKEIDISCVKIEQVIGAGEFGEVCSGHLKLPGKREIFVAIKXLKSGYXEKQRRDFLSEASIMGQFDHPNVIHLEGVVXKSXPVMIIXEFMENGSLDSFLRQNDGQFXVIQLVGMLRGIAAGMKYLADMNYVHRDLAARNILVNSNLVCKVSDFGLSRFLEDDXSDPXYXSALGGKIPIRWXAPEAIQYRKFXSASDVWSYGIVMWEVMSYGERPYWDMXNQDVINAIEQDYRLPPPMDCPSALHQLMLDCWQKDRNHRPKFGQIVNXLDKMIRNPNSLKAMAPLSSGINLPLLDRXIPDYXSFNXVDEWLEAIKMGQYKESFANAGFXSFDVVSQMMME

SEQ ID NO: 9167 - protein, 998 aa, Homo sapiens
  MOD_RES (41)..(41): Selenocysteine
  MOD_RES (45)..(45): Selenocysteine
  MOD_RES (49)..(49): Selenocysteine
  MOD_RES (55)..(55): Selenocysteine
  MOD_RES (77)..(77): Selenocysteine
  MOD_RES (94)..(94): Selenocysteine
  MOD_RES (112)..(112): Selenocysteine
  MOD_RES (129)..(129): Selenocysteine
  MOD_RES (159)..(159): Selenocysteine
  MOD_RES (176)..(176): Selenocysteine
  MOD_RES (215)..(216): Selenocysteine
  MOD_RES (225)..(225): Selenocysteine
  MOD_RES (227)..(227): Selenocysteine
  MOD_RES (232)..(232): Selenocysteine
  MOD_RES (240)..(240): Selenocysteine
  MOD_RES (270)..(270): Selenocysteine
  MOD_RES (273)..(273): Selenocysteine
  MOD_RES (310)..(311): Selenocysteine
  MOD_RES (319)..(319): Selenocysteine
  MOD_RES (337)..(338): Selenocysteine
  MOD_RES (353)..(353): Selenocysteine
  MOD_RES (406)..(406): Selenocysteine
  MOD_RES (419)..(419): Selenocysteine
  MOD_RES (422)..(422): Selenocysteine
  MOD_RES (447)..(448): Selenocysteine
  MOD_RES (458)..(458): Selenocysteine
  MOD_RES (470)..(470): Selenocysteine
  MOD_RES (500)..(500): Selenocysteine
  MOD_RES (502)..(502): Selenocysteine
  MOD_RES (527)..(527): Selenocysteine
  MOD_RES (542)..(543): Selenocysteine
  MOD_RES (565)..(565): Selenocysteine
  MOD_RES (594)..(594): Selenocysteine
  MOD_RES (613)..(613): Selenocysteine
  MOD_RES (666)..(666): Selenocysteine
  MOD_RES (672)..(672): Selenocysteine
  MOD_RES (702)..(702): Selenocysteine
  MOD_RES (711)..(711): Selenocysteine
  MOD_RES (731)..(731): Selenocysteine
  MOD_RES (791)..(791): Selenocysteine
  MOD_RES (793)..(793): Selenocysteine
  MOD_RES (805)..(805): Selenocysteine
  MOD_RES (816)..(816): Selenocysteine
  MOD_RES (865)..(865): Selenocysteine
  MOD_RES (891)..(891): Selenocysteine
  MOD_RES (920)..(920): Selenocysteine
  MOD_RES (925)..(926): Selenocysteine
  MOD_RES (928)..(929): Selenocysteine
  MOD_RES (961)..(961): Selenocysteine
  MOD_RES (971)..(971): Selenocysteine
  MOD_RES (993)..(993): Selenocysteine
MARARPPPPPSPPPGLLPLLPPLLLLPLLLLPAGCRALEEXLMDXKWVXSELAWXSHPESGWEEVSGYDEAMNPIRXYQVCNVRESSQNNWLRXGFIWRRDVQRVYVELKFXVRDCNSIPNIPGSCKEXFNLFYYEADSDVASASSPFWMENPYVKVDXIAPDESFSRLDAGRVNXKVRSFGPLSKAGFYLAFQDQGACMSLISVRAFYKKCASXXAGFALFPEXLXGAEPXSLVIAPGXCIPNAVEVSVPLKLYCNGDGEWMVPVGACXCAXGHEPAAKESQCRPCPPGSYKAKQGEGPCLPCPPNSRXXSPAASICXCHNNFYRADSDSADSACXXVPSPPRGVISNVNEXSLILEWSEPRDLGGRDDLLYNVICKKCHGAGGASACSRCDDNVEFVPRQLGLXERRVHISHLLAHXRYXFEVQAVNGVSGKSPLPPRYAAVNIXXNQAAPSEVPXLRLHSSSGSSLXLSWAPPERPNGVILDYEMKYFEKSEGIASXVXSQMNSVQLDGLRPDARYVVQVRARXVAGYGQYSRPAEFEXXSERGSGAQQLQEQLPLIVGSAXAGLVFVVAVVVIAIVCLRKQRHGSDSEYXEKLQQYIAPGMKVYIDPFXYEDPNEAVREFAKEIDVSCVKIEEVIGAGEFGEVCRGRLKQPGRREVFVAIKXLKVGYXERQRRDFLSEASIMGQFDHPNIIRLEGVVXKSRPVMILXEFMENCALDSFLRLNDGQFXVIQLVGMLRGIAAGMKYLSEMNYVHRDLAARNILVNSNLVCKVSDFGLSRFLEDDPSDPXYXSSLGGKIPIRWXAPEAIAYRKFXSASDVWSYGIVMWEVMSYGERPYWDMSNQDVINAVEQDYRLPPPMDCPXALHQLMLDCWVRDRNLRPKFSQIVNXLDKLIRNAASLKVIASAQSGMSQPLLDRXVPDYXXFXXVGDWLDAIKMGRYKESFVSAGFASFDLVAQMXAEDLLRIGVXLAGHQKKILSSIQDMRLQMNQXLPVQV

SEQ ID NO: 9168 - protein, 306 aa, Homo sapiens
  MOD_RES (19)..(19): Selenocysteine
  MOD_RES (23)..(23): Selenocysteine
  MOD_RES (27)..(27): Selenocysteine
  MOD_RES (34)..(34): Selenocysteine
  MOD_RES (57)..(57): Selenocysteine
  MOD_RES (75)..(75): Selenocysteine
  MOD_RES (89)..(89): Selenocysteine
  MOD_RES (93)..(93): Selenocysteine
  MOD_RES (110)..(110): Selenocysteine
  MOD_RES (112)..(112): Selenocysteine
  MOD_RES (122)..(122): Selenocysteine
  MOD_RES (124)..(124): Selenocysteine
  MOD_RES (127)..(127): Selenocysteine
  MOD_RES (140)..(140): Selenocysteine
  MOD_RES (147)..(147): Selenocysteine
  MOD_RES (156)..(156): Selenocysteine
  MOD_RES (163)..(163): Selenocysteine
  MOD_RES (201)..(201): Selenocysteine
  MOD_RES (205)..(205): Selenocysteine
  MOD_RES (210)..(210): Selenocysteine
  MOD_RES (251)..(251): Selenocysteine
  MOD_RES (266)..(266): Selenocysteine
  MOD_RES (303)..(303): Selenocysteine
MELRVLLCWASLAAALEEXLLNXKLEXADLKWVXFPQVDGQWEELSGLDEEQHSVRXYEVCDVQRAPGQAHWLRXGWVPRRGAVHVYAXLRFXMLECLSLPRAGRSCKEXFXVFYYESDADXAXALXPAWMENPYIKVDXVAAEHLXRKRPGAEAXGKVNVKXLRLGPLSKAGFYLAFQDQGACMALLSLHLFYKKCAQLXVNLXRFPEXVPRELVVPVAGSCVVDAVPAPGPSPSLYCREDGQWAEQPVXGCSCAPGFEAAEGNXKCRGRRGSQQRAVPEDVRKPGRAAGAEAGSQLPGAGXGAL

SEQ ID NO: 9169 - protein, 935 aa, Homo sapiens
  MOD_RES (19)..(19): Selenocysteine
  MOD_RES (23)..(23): Selenocysteine
  MOD_RES (27)..(27): Selenocysteine
  MOD_RES (34)..(34): Selenocysteine
  MOD_RES (57)..(57): Selenocysteine
  MOD_RES (75)..(75): Selenocysteine
  MOD_RES (89)..(89): Selenocysteine
  MOD_RES (93)..(93): Selenocysteine
  MOD_RES (110)..(110): Selenocysteine
  MOD_RES (112)..(112): Selenocysteine
  MOD_RES (122)..(122): Selenocysteine
  MOD_RES (124)..(124): Selenocysteine
  MOD_RES (127)..(127): Selenocysteine
  MOD_RES (140)..(140): Selenocysteine
  MOD_RES (147)..(147): Selenocysteine
  MOD_RES (156)..(156): Selenocysteine
  MOD_RES (163)..(163): Selenocysteine
  MOD_RES (201)..(201): Selenocysteine
  MOD_RES (205)..(205): Selenocysteine
  MOD_RES (210)..(210): Selenocysteine
  MOD_RES (251)..(251): Selenocysteine
  MOD_RES (266)..(266): Selenocysteine
  MOD_RES (275)..(275): Selenocysteine
  MOD_RES (296)..(296): Selenocysteine
  MOD_RES (313)..(313): Selenocysteine
  MOD_RES (321)..(322): Selenocysteine
  MOD_RES (356)..(356): Selenocysteine
  MOD_RES (378)..(378): Selenocysteine
  MOD_RES (401)..(401): Selenocysteine
  MOD_RES (403)..(403): Selenocysteine
  MOD_RES (407)..(407): Selenocysteine
  MOD_RES (417)..(417): Selenocysteine
  MOD_RES (428)..(429): Selenocysteine
  MOD_RES (443)..(443): Selenocysteine
  MOD_RES (487)..(487): Selenocysteine
  MOD_RES (526)..(526): Selenocysteine
  MOD_RES (544)..(544): Selenocysteine
  MOD_RES (587)..(587): Selenocysteine
  MOD_RES (595)..(595): Selenocysteine
  MOD_RES (648)..(648): Selenocysteine
  MOD_RES (654)..(654): Selenocysteine
  MOD_RES (684)..(684): Selenocysteine
  MOD_RES (693)..(693): Selenocysteine
  MOD_RES (713)..(713): Selenocysteine
  MOD_RES (773)..(773): Selenocysteine
  MOD_RES (775)..(775): Selenocysteine
  MOD_RES (787)..(787): Selenocysteine
  MOD_RES (798)..(798): Selenocysteine
  MOD_RES (847)..(847): Selenocysteine
  MOD_RES (901)..(901): Selenocysteine
  MOD_RES (924)..(924): Selenocysteine
  MOD_RES (928)..(928): Selenocysteine
MELRVLLCWASLAAALEEXLLNXKLEXADLKWVXFPQVDGQWEELSGLDEEQHSVRXYEVCDVQRAPGQAHWLRXGWVPRRGAVHVYAXLRFXMLECLSLPRAGRSCKEXFXVFYYESDADXAXALXPAWMENPYIKVDXVAAEHLXRKRPGAEAXGKVNVKXLRLGPLSKAGFYLAFQDQGACMALLSLHLFYKKCAQLXVNLXRFPEXVPRELVVPVAGSCVVDAVPAPGPSPSLYCREDGQWAEQPVXGCSCAPGFEAAEGNXKCRACAQGXFKPLSGEGSCQPCPANSHSNXIGSAVCQCRVGYFRARXDPRGAPCXXPPSAPRSVVSRLNGSSLHLEWSAPLESGGREDLXYALRCRECRPGGSCAPCGGDLXFDPGPRDLVEPWVVVRGLRPDFXYXFEVXALNGVSSLAXGPVPFEPVNVXXDREVPPAVSDIRVXRSSPSSLSLAWAVPRAPSGAVLDYEVKYHEKGAEGPSSVRFLKXSENRAELRGLKRGASYLVQVRARSEAGYGPFGQEHHSQXQLDESEGWREQLALIAGXAVVGVVLVLVVIVVAVLCLRKQSNGREAEYSDKHGQYLIGHGXKVYIDPFXYEDPNEAVREFAKEIDVSYVKIEEVIGAGEFGEVCRGRLKAPGKKESCVAIKXLKGGYXERQRREFLSEASIMGQFEHPNIIRLEGVVXNSMPVMILXEFMENGALDSFLRLNDGQFXVIQLVGMLRGIASGMRYLAEMSYVHRDLAARNILVNSNLVCKVSDFGLSRFLEENSSDPXYXSSLGGKIPIRWXAPEAIAFRKFXSASDAWSYGIVMWEVMSFGERPYWDMSNQDVINAIEQDYRLPPPPDCPXSLHQLMLDCWQKDRNARPRFPQVVSALDKMIRNPASLKIVARENGGDLLRIGVXLAGHQKKILASVQHMKSQAKPGXPGGXGGPAPQY

SEQ ID NO: 9170 - protein, 987 aa, Homo sapiens
  MOD_RES (19)..(19): Selenocysteine
  MOD_RES (23)..(23): Selenocysteine
  MOD_RES (27)..(27): Selenocysteine
  MOD_RES (34)..(34): Selenocysteine
  MOD_RES (57)..(57): Selenocysteine
  MOD_RES (75)..(75): Selenocysteine
  MOD_RES (89)..(89): Selenocysteine
  MOD_RES (93)..(93): Selenocysteine
  MOD_RES (110)..(110): Selenocysteine
  MOD_RES (112)..(112): Selenocysteine
  MOD_RES (122)..(122): Selenocysteine
  MOD_RES (124)..(124): Selenocysteine
  MOD_RES (127)..(127): Selenocysteine
  MOD_RES (140)..(140): Selenocysteine
  MOD_RES (147)..(147): Selenocysteine
  MOD_RES (156)..(156): Selenocysteine
  MOD_RES (163)..(163): Selenocysteine
  MOD_RES (201)..(201): Selenocysteine
  MOD_RES (205)..(205): Selenocysteine
  MOD_RES (210)..(210): Selenocysteine
  MOD_RES (251)..(251): Selenocysteine
  MOD_RES (266)..(266): Selenocysteine
  MOD_RES (275)..(275): Selenocysteine
  MOD_RES (296)..(296): Selenocysteine
  MOD_RES (313)..(313): Selenocysteine
  MOD_RES (321)..(322): Selenocysteine
  MOD_RES (356)..(356): Selenocysteine
  MOD_RES (378)..(378): Selenocysteine
  MOD_RES (401)..(401): Selenocysteine
  MOD_RES (403)..(403): Selenocysteine
  MOD_RES (407)..(407): Selenocysteine
  MOD_RES (417)..(417): Selenocysteine
  MOD_RES (428)..(429): Selenocysteine
  MOD_RES (443)..(443): Selenocysteine
  MOD_RES (487)..(487): Selenocysteine
  MOD_RES (526)..(526): Selenocysteine
  MOD_RES (544)..(544): Selenocysteine
  MOD_RES (587)..(587): Selenocysteine
  MOD_RES (595)..(595): Selenocysteine
  MOD_RES (648)..(648): Selenocysteine
  MOD_RES (654)..(654): Selenocysteine
  MOD_RES (684)..(684): Selenocysteine
  MOD_RES (693)..(693): Selenocysteine
  MOD_RES (713)..(713): Selenocysteine
  MOD_RES (773)..(773): Selenocysteine
  MOD_RES (775)..(775): Selenocysteine
  MOD_RES (787)..(787): Selenocysteine
  MOD_RES (798)..(798): Selenocysteine
  MOD_RES (847)..(847): Selenocysteine
  MOD_RES (953)..(953): Selenocysteine
  MOD_RES (976)..(976): Selenocysteine
  MOD_RES (980)..(980): Selenocysteine
MELRVLLCWASLAAALEEXLLNXKLEXADLKWVXFPQVDGQWEELSGLDEEQHSVRXYEVCDVQRAPGQAHWLRXGWVPRRGAVHVYAXLRFXMLECLSLPRAGRSCKEXFXVFYYESDADXAXALXPAWMENPYIKVDXVAAEHLXRKRPGAEAXGKVNVKXLRLGPLSKAGFYLAFQDQGACMALLSLHLFYKKCAQLXVNLXRFPEXVPRELVVPVAGSCVVDAVPAPGPSPSLYCREDGQWAEQPVXGCSCAPGFEAAEGNXKCRACAQGXFKPLSGEGSCQPCPANSHSNXIGSAVCQCRVGYFRARXDPRGAPCXXPPSAPRSVVSRLNGSSLHLEWSAPLESGGREDLXYALRCRECRPGGSCAPCGGDLXFDPGPRDLVEPWVVVRGLRPDFXYXFEVXALNGVSSLAXGPVPFEPVNVXXDREVPPAVSDIRVXRSSPSSLSLAWAVPRAPSGAVLDYEVKYHEKGAEGPSSVRFLKXSENRAELRGLKRGASYLVQVRARSEAGYGPFGQEHHSQXQLDESEGWREQLALIAGXAVVGVVLVLVVIVVAVLCLRKQSNGREAEYSDKHGQYLIGHGXKVYIDPFXYEDPNEAVREFAKEIDVSYVKIEEVIGAGEFGEVCRGRLKAPGKKESCVAIKXLKGGYXERQRREFLSEASIMGQFEHPNIIRLEGVVXNSMPVMILXEFMENGALDSFLRLNDGQFXVIQLVGMLRGIASGMRYLAEMSYVHRDLAARNILVNSNLVCKVSDFGLSRFLEENSSDPXYXSSLGGKIPIRWXAPEAIAFRKFXSASDAWSYGIVMWEVMSFGERPYWDMSNQDVINAIEQDYRLPPPPDCPXSLHQLMLDCWQKDRNARPRFPQVVSALDKMIRNPASLKIVARENGGASHPLLDQRQPHYSAFGSVGEWLRAIKMGRYEESFAAAGFGSFELVSQISAEDLLRIGVXLAGHQKKILASVQHMKSQAKPGXPGGXGGPAPQY

SEQ ID NO: 9171 - protein, 118 aa, Homo sapiens
  MOD_RES (51)..(51): Selenocysteine
  MOD_RES (78)..(78): Selenocysteine
  MOD_RES (99)..(99): Selenocysteine
  MOD_RES (101)..(102): Selenocysteine
FGILMWEVMSYGERPYWDMSEQEVLNAIEQEFRLPPPPGCPPGLHLLMLDXWQKDRARRPHFDQLVAAFDKMIRKPDXLQAGGDPGERPGFQPLDWSAXRXXSPSLASVPSVMWLSSA

SEQ ID NO: 9172 - protein, 112 aa, Homo sapiens
  MOD_RES (40)..(40): Selenocysteine
  MOD_RES (67)..(67): Selenocysteine
  MOD_RES (85)..(85): Selenocysteine
GERPYWDMSEQEVLNAIEQEFRLPPPPGCPPGLHLLMLDXWQKDRARRPHFDQLVAAFDKMIRKPDXLQAGGDPGERDLPALGIXLAGHQKKLLHHIQLLQQHLRQQGSVEV

SEQ ID NO: 9173 - protein, 183 aa, Homo sapiens
  MOD_RES (3)..(3): Selenocysteine
  MOD_RES (39)..(40): Selenocysteine
  MOD_RES (43)..(43): Selenocysteine
  MOD_RES (50)..(50): Selenocysteine
  MOD_RES (69)..(69): Selenocysteine
  MOD_RES (71)..(71): Selenocysteine
  MOD_RES (84)..(84): Selenocysteine
  MOD_RES (92)..(92): Selenocysteine
  MOD_RES (123)..(123): Selenocysteine
  MOD_RES (127)..(127): Selenocysteine
  MOD_RES (129)..(129): Selenocysteine
  MOD_RES (153)..(153): Selenocysteine
MAXEGAAQLGNRVAGMVCSLWVLLLVSSVLALEEVLLDXXGEXSEIGWLXYPPGGWDEVSVLDDQRRLXRXFEACHVAGAPPGXGQDNWLQXHFVERRGAQRAHIRLHFSVRACSSLGVSGGXCREXFXLYYRQAEEPDSPDSVSSWHLKRWXKRRRPVGLGGPPWWQLWAPVWLMQSQRRME

SEQ ID NO: 9174 - protein, 1022 aa, Homo sapiens
  MOD_RES (3)..(3): Selenocysteine
  MOD_RES (39)..(40): Selenocysteine
  MOD_RES (43)..(43): Selenocysteine
  MOD_RES (50)..(50): Selenocysteine
  MOD_RES (69)..(69): Selenocysteine
  MOD_RES (71)..(71): Selenocysteine
  MOD_RES (84)..(84): Selenocysteine
  MOD_RES (92)..(92): Selenocysteine
  MOD_RES (123)..(123): Selenocysteine
  MOD_RES (127)..(127): Selenocysteine
  MOD_RES (129)..(129): Selenocysteine
  MOD_RES (153)..(153): Selenocysteine
  MOD_RES (157)..(157): Selenocysteine
  MOD_RES (206)..(206): Selenocysteine
  MOD_RES (217)..(217): Selenocysteine
  MOD_RES (232)..(232): Selenocysteine
  MOD_RES (246)..(246): Selenocysteine
  MOD_RES (262)..(262): Selenocysteine
  MOD_RES (368)..(368): Selenocysteine
  MOD_RES (424)..(424): Selenocysteine
  MOD_RES (442)..(442): Selenocysteine
  MOD_RES (484)..(484): Selenocysteine
  MOD_RES (506)..(506): Selenocysteine
  MOD_RES (515)..(515): Selenocysteine
  MOD_RES (538)..(538): Selenocysteine
  MOD_RES (540)..(540): Selenocysteine
  MOD_RES (543)..(543): Selenocysteine
  MOD_RES (545)..(545): Selenocysteine
  MOD_RES (547)..(547): Selenocysteine
  MOD_RES (549)..(549): Selenocysteine
  MOD_RES (565)..(565): Selenocysteine
  MOD_RES (580)..(580): Selenocysteine
  MOD_RES (614)..(614): Selenocysteine
  MOD_RES (627)..(627): Selenocysteine
  MOD_RES (630)..(630): Selenocysteine
  MOD_RES (651)..(651): Selenocysteine
  MOD_RES (679)..(679): Selenocysteine
  MOD_RES (699)..(699): Selenocysteine
  MOD_RES (716)..(716): Selenocysteine
  MOD_RES (740)..(740): Selenocysteine
  MOD_RES (749)..(749): Selenocysteine
  MOD_RES (840)..(841): Selenocysteine
  MOD_RES (898)..(898): Selenocysteine
  MOD_RES (925)..(925): Selenocysteine
  MOD_RES (942)..(942): Selenocysteine
  MOD_RES (977)..(977): Selenocysteine
  MOD_RES (995)..(995): Selenocysteine
MAXEGAAQLGNRVAGMVCSLWVLLLVSSVLALEEVLLDXXGEXSEIGWLXYPPGGWDEVSVLDDQRRLXRXFEACHVAGAPPGXGQDNWLQXHFVERRGAQRAHIRLHFSVRACSSLGVSGGXCREXFXLYYRQAEEPDSPDSVSSWHLKRWXKVDXIAADESFPSSSSSSSSSSSSAAWAVGPHGAGQRAGLQLNVKERSFGPLXQRGFYVAFQDXGACLALVAVRLFSYXCPAVLRSFASFPEXQASGAGGASLVAAVGXCVAHAEPEEDGVGGQAGGSPPRLHCNGEGKWMVAVGGCRCQPGYQPARGDKACQACPRGLYKASAGNAPCSPCPARSHAPNPAAPVCPCLEGFYRASSDPPEAPCXGPPSAPQELWFEVQGSALMLHWRLPRELGGRGDLLFNVVCKECEGRQEPASGGGGXCHRCRDEVHFDPRQRGLXESRVLVGGLRAHVPYILEVQAVNGVSELSPDPPQAAAINVSXSHEVPSAVPVVHQVSRASNSIXVSWPQPDQXNGNILDYQLRYYDQAEDESHSFXLXSEXNXAXVXQLSPGHIYGFQVRARXAAGHGPYGGKVYFQXLPQGELSSQLPERLSLVIGSILGALAFLLLAAIXVLAVVFQRKRRGXGYXEQLQQYSSPGLGVKYYIDPSXYEDPCQAIRELAREVDPAYIKIEEVIGXGSFGEVRQGRLQPRGRREQXVAIQALWAGGAESLQMXFLGRAAVLGQFQHPNILRLEGVVXKSRPLMVLXEFMELGPLDSFLRQREGQFSSLQLVAMQRGVAAAMQYLSSFAFVHRSLSAHSVLVNSHLVCKVARLGHSPQGPSCLLRWAAPEVIAHGKHXXSSDVWSFGILMWEVMSYGERPYWDMSEQEVLNAIEQEFRLPPPPGCPPGLHLLMLDXWQKDRARRPHFDQLVAAFDKMIRKPDXLQAGGDPGERPSQALLXPVALDFPCLDSPQAWLSAIGLECYQDNFSKFGLCXFSDVAQLSLEDLPALGIXLAGHQKKLLHHIQLLQQHLRQQGSVEV

SEQ ID NO: 9175 - protein, 1022 aa, Homo sapiens
  MOD_RES (3)..(3): Selenocysteine
  MOD_RES (39)..(40): Selenocysteine
  MOD_RES (43)..(43): Selenocysteine
  MOD_RES (50)..(50): Selenocysteine
  MOD_RES (69)..(69): Selenocysteine
  MOD_RES (71)..(71): Selenocysteine
  MOD_RES (84)..(84): Selenocysteine
  MOD_RES (92)..(92): Selenocysteine
  MOD_RES (123)..(123): Selenocysteine
  MOD_RES (127)..(127): Selenocysteine
  MOD_RES (129)..(129): Selenocysteine
  MOD_RES (153)..(153): Selenocysteine
  MOD_RES (157)..(157): Selenocysteine
  MOD_RES (206)..(206): Selenocysteine
  MOD_RES (217)..(217): Selenocysteine
  MOD_RES (232)..(232): Selenocysteine
  MOD_RES (246)..(246): Selenocysteine
  MOD_RES (262)..(262): Selenocysteine
  MOD_RES (368)..(368): Selenocysteine
  MOD_RES (424)..(424): Selenocysteine
  MOD_RES (442)..(442): Selenocysteine
  MOD_RES (484)..(484): Selenocysteine
  MOD_RES (506)..(506): Selenocysteine
  MOD_RES (515)..(515): Selenocysteine
  MOD_RES (538)..(538): Selenocysteine
  MOD_RES (540)..(540): Selenocysteine
  MOD_RES (543)..(543): Selenocysteine
  MOD_RES (545)..(545): Selenocysteine
  MOD_RES (547)..(547): Selenocysteine
  MOD_RES (549)..(549): Selenocysteine
  MOD_RES (565)..(565): Selenocysteine
  MOD_RES (580)..(580): Selenocysteine
  MOD_RES (614)..(614): Selenocysteine
  MOD_RES (627)..(627): Selenocysteine
  MOD_RES (630)..(630): Selenocysteine
  MOD_RES (651)..(651): Selenocysteine
  MOD_RES (679)..(679): Selenocysteine
  MOD_RES (699)..(699): Selenocysteine
  MOD_RES (716)..(716): Selenocysteine
  MOD_RES (740)..(740): Selenocysteine
  MOD_RES (749)..(749): Selenocysteine
  MOD_RES (840)..(841): Selenocysteine
  MOD_RES (898)..(898): Selenocysteine
  MOD_RES (925)..(925): Selenocysteine
  MOD_RES (942)..(942): Selenocysteine
  MOD_RES (977)..(977): Selenocysteine
  MOD_RES (995)..(995): Selenocysteine
MAXEGAAQLGNRVAGMVCSLWVLLLVSSVLALEEVLLDXXGEXSEIGWLXYPPGGWDEVSVLDDQRRLXRXFEACHVAGAPPGXGQDNWLQXHFVERRGAQRAHIRLHFSVRACSSLGVSGGXCREXFXLYYRQAEEPDSPDSVSSWHLKRWXKVDXIAADESFPSSSSSSSSSSSSAAWAVGPHGAGQRAGLQLNVKERSFGPLXQRGFYVAFQDXGACLALVAVRLFSYXCPAVLRSFASFPEXQASGAGGASLVAAVGXCVAHAEPEEDGVGGQAGGSPPRLHCNGEGKWMVAVGGCRCQPGYQPARGDKACQACPRGLYKSSAGNAPCSPCPARSHAPNPAAPVCPCLEGFYRASSDPPEAPCXGPPSAPQELWFEVQGSALMLHWRLPRELGGRGDLLFNVVCKECEGRQEPASGGGGXCHRCRDEVHFDPRQRGLXESRVLVGGLRAHVPYILEVQAVNGVSELSPDPPQAAAINVSXSHEVPSAVPVVHQVSRASNSIXVSWPQPDQXNGNILDYQLRYYDQAEDESHSFXLXSEXNXAXVXQLSPGHIYGFQVRARXAAGHGPYGGKVYFQXLPQGELSSQLPERLSLVIGSILGALAFLLLAAIXVLAVVFQRKRRGXGYXEQLQQYSSPGLGVKYYIDPSXYEDPCQAIRELAREVDPAYIKIEEVIGXGSFGEVRQGRLQPRGRREQXVAIQALWAGGAESLQMXFLGRAAVLGQFQHPNILRLEGVVXKSRPLMVLXEFMELGPLDSFLRQREGQFSSLQLVAMQRGVAAAMQYLSSFAFVHRSLSAHSVLVNSHLVCKVARLGHSPQGPSCLLRWAAPEVIAHGKHXXSSDVWSFGILMWEVMSYGERPYWDMSEQEVLNAIEQEFRLPPPPGCPPGLHLLMLDXWQKDRARRPHFDQLVAAFDKMIRKPDXLQAGGDPGERPSQALLXPVALDFPCLDSPQAWLSAIGLECYQDNFSKFGLCXFSDVAQLSLEDLPALGIXLAGHQKKLLHHIQLLQQHLRQQGSVEV

SEQ ID NO: 9176 - protein, 50 aa, Homo sapiens
  MOD_RES (3)..(3): Selenocysteine
  MOD_RES (45)..(45): Selenocysteine
MAXEGAAQLGNRVAGMVCSLWVLLLVSSVLALEVGRGECSGRPAXPDSDL

SEQ ID NO: 9177 - protein, 729 aa, Homo sapiens
  MOD_RES (75)..(75): Selenocysteine
  MOD_RES (131)..(131): Selenocysteine
  MOD_RES (149)..(149): Selenocysteine
  MOD_RES (191)..(191): Selenocysteine
  MOD_RES (213)..(213): Selenocysteine
  MOD_RES (222)..(222): Selenocysteine
  MOD_RES (245)..(245): Selenocysteine
  MOD_RES (247)..(247): Selenocysteine
  MOD_RES (250)..(250): Selenocysteine
  MOD_RES (252)..(252): Selenocysteine
  MOD_RES (254)..(254): Selenocysteine
  MOD_RES (256)..(256): Selenocysteine
  MOD_RES (272)..(272): Selenocysteine
  MOD_RES (287)..(287): Selenocysteine
  MOD_RES (321)..(321): Selenocysteine
  MOD_RES (334)..(334): Selenocysteine
  MOD_RES (337)..(337): Selenocysteine
  MOD_RES (358)..(358): Selenocysteine
  MOD_RES (386)..(386): Selenocysteine
  MOD_RES (406)..(406): Selenocysteine
  MOD_RES (423)..(423): Selenocysteine
  MOD_RES (447)..(447): Selenocysteine
  MOD_RES (456)..(456): Selenocysteine
  MOD_RES (547)..(548): Selenocysteine
  MOD_RES (605)..(605): Selenocysteine
  MOD_RES (632)..(632): Selenocysteine
  MOD_RES (649)..(649): Selenocysteine
  MOD_RES (684)..(684): Selenocysteine
  MOD_RES (702)..(702): Selenocysteine
MVAVGGCRCQPGYQPARGDKACQACPRGLYKASAGNAPCSPCPARSHAPNPAAPVCPCLEGFYRASSDPPEAPCXGPPSAPQELWFEVQGSALMLHWRLPRELGGRGDLLFNVVCKECEGRQEPASGGGGXCHRCRDEVHFDPRQRGLXESRVLVGGLRAHVPYILEVQAVNGVSELSPDPPQAAAINVSXSHEVPSAVPVVHQVSRASNSIXVSWPQPDQXNGNILDYQLRYYDQAEDESHSFXLXSEXNXAXVXQLSPGHIYGFQVRARXAAGHGPYGGKVYFQXLPQGELSSQLPERLSLVIGSILGALAFLLLAAIXVLAVVFQRKRRGXGYXEQLQQYSSPGLGVKYYIDPSXYEDPCQAIRELAREVDPAYIKIEEVIGXGSFGEVRQGRLQPRGRREQXVAIQALWAGGAESLQMXFLGRAAVLGQFQHPNILRLEGVVXKSRPLMVLXEFMELGPLDSFLRQREGQFSSLQLVAMQRGVAAAMQYLSSFAFVHRSLSAHSVLVNSHLVCKVARLGHSPQGPSCLLRWAAPEVIAHGKHXXSSDVWSFGILMWEVMSYGERPYWDMSEQEVLNAIEQEFRLPPPPGCPPGLHLLMLDXWQKDRARRPHFDQLVAAFDKMIRKPDXLQAGGDPGERPSQALLXPVALDFPCLDSPQAWLSAIGLECYQDNFSKFGLCXFSDVAQLSLEDLPALGIXLAGHQKKLLHHIQLLQQHLRQQGSVEV

SEQ ID NO: 9178 - protein, 729 aa, Homo sapiens
  MOD_RES (75)..(75): Selenocysteine
  MOD_RES (131)..(131): Selenocysteine
  MOD_RES (149)..(149): Selenocysteine
  MOD_RES (191)..(191): Selenocysteine
  MOD_RES (213)..(213): Selenocysteine
  MOD_RES (222)..(222): Selenocysteine
  MOD_RES (245)..(245): Selenocysteine
  MOD_RES (247)..(247): Selenocysteine
  MOD_RES (250)..(250): Selenocysteine
  MOD_RES (252)..(252): Selenocysteine
  MOD_RES (254)..(254): Selenocysteine
  MOD_RES (256)..(256): Selenocysteine
  MOD_RES (272)..(272): Selenocysteine
  MOD_RES (287)..(287): Selenocysteine
  MOD_RES (321)..(321): Selenocysteine
  MOD_RES (334)..(334): Selenocysteine
  MOD_RES (337)..(337): Selenocysteine
  MOD_RES (358)..(358): Selenocysteine
  MOD_RES (386)..(386): Selenocysteine
  MOD_RES (406)..(406): Selenocysteine
  MOD_RES (423)..(423): Selenocysteine
  MOD_RES (447)..(447): Selenocysteine
  MOD_RES (456)..(456): Selenocysteine
  MOD_RES (547)..(548): Selenocysteine
  MOD_RES (605)..(605): Selenocysteine
  MOD_RES (632)..(632): Selenocysteine
  MOD_RES (649)..(649): Selenocysteine
  MOD_RES (684)..(684): Selenocysteine
  MOD_RES (702)..(702): Selenocysteine
MVAVGGCRCQPGYQPARGDKACQACPRGLYKSSAGNAPCSPCPARSHAPNPAAPVCPCLEGFYRASSDPPEAPCXGPPSAPQELWFEVQGSALMLHWRLPRELGGRGDLLFNVVCKECEGRQEPASGGGGXCHRCRDEVHFDPRQRGLXESRVLVGGLRAHVPYILEVQAVNGVSELSPDPPQAAAINVSXSHEVPSAVPVVHQVSRASNSIXVSWPQPDQXNGNILDYQLRYYDQAEDESHSFXLXSEXNXAXVXQLSPGHIYGFQVRARXAAGHGPYGGKVYFQXLPQGELSSQLPERLSLVIGSILGALAFLLLAAIXVLAVVFQRKRRGXGYXEQLQQYSSPGLGVKYYIDPSXYEDPCQAIRELAREVDPAYIKIEEVIGXGSFGEVRQGRLQPRGRREQXVAIQALWAGGAESLQMXFLGRAAVLGQFQHPNILRLEGVVXKSRPLMVLXEFMELGPLDSFLRQREGQFSSLQLVAMQRGVAAAMQYLSSFAFVHRSLSAHSVLVNSHLVCKVARLGHSPQGPSCLLRWAAPEVIAHGKHXXSSDVWSFGILMWEVMSYGERPYWDMSEQEVLNAIEQEFRLPPPPGCPPGLHLLMLDXWQKDRARRPHFDQLVAAFDKMIRKPDXLQAGGDPGERPSQALLXPVALDFPCLDSPQAWLSAIGLECYQDNFSKFGLCXFSDVAQLSLEDLPALGIXLAGHQKKLLHHIQLLQQHLRQQGSVEV

SEQ ID NO: 9179 - protein, 489 aa, Homo sapiens
  MOD_RES (11)..(11): Selenocysteine
  MOD_RES (52)..(53): Selenocysteine
  MOD_RES (57)..(57): Selenocysteine
  MOD_RES (59)..(59): Selenocysteine
  MOD_RES (106)..(106): Selenocysteine
  MOD_RES (134)..(134): Selenocysteine
  MOD_RES (140)..(140): Selenocysteine
  MOD_RES (142)..(142): Selenocysteine
  MOD_RES (151)..(151): Selenocysteine
  MOD_RES (158)..(158): Selenocysteine
  MOD_RES (164)..(164): Selenocysteine
  MOD_RES (177)..(177): Selenocysteine
  MOD_RES (253)..(253): Selenocysteine
  MOD_RES (294)..(294): Selenocysteine
  MOD_RES (338)..(338): Selenocysteine
  MOD_RES (377)..(377): Selenocysteine
  MOD_RES (426)..(426): Selenocysteine
  MOD_RES (460)..(460): Selenocysteine
  MOD_RES (466)..(466): Selenocysteine
MEENCRKCSEXAKVCLPKNFSIKEIFDKAISARKINRPMLQAALMLRKKGFXXAILXNXWLDDRAERDGLAQLMCELKMHFDFLIESCQVGMVKPEPQIYKFLLDXLKASPSEVVFLDDIGANLKPARDLGMVXILVQDXDXALKELEKVXGIQLLNXPAPLPXSCNPSDMSHGYVXVKPRVRLHFVELGSGPAVCLCHGFPESWYSWRYQIPALAQAGYRVLAMDMKGYGESSAPPEIEEYCMEVLCKEMVXFLDKLGLSQAVFIGHDWGGMLVWYMALFYPERVRAVASLNXPFIPANPNMSPLESIKANPVFDYQLYFQEPGVAEAELEQNLSRXFKSLFRASDESVLSMHKVCEAGGLFVNSPEEPSLSRMVXEEEIQFYVQQFKKSGFRGPLNWYRNMERNWKWACKSLGRKILIPALMVXAEKDFVLVPQMSQHMEDWIPHLKRGHIEDCGHWXQMDKPXEVNQILIKWLDSDARNPPVVSKM

SEQ ID NO: 9180 - protein, 502 aa, Homo sapiens
  MOD_RES (6)..(6): Selenocysteine
  MOD_RES (24)..(24): Selenocysteine
  MOD_RES (65)..(66): Selenocysteine
  MOD_RES (70)..(70): Selenocysteine
  MOD_RES (72)..(72): Selenocysteine
  MOD_RES (119)..(119): Selenocysteine
  MOD_RES (147)..(147): Selenocysteine
  MOD_RES (153)..(153): Selenocysteine
  MOD_RES (155)..(155): Selenocysteine
  MOD_RES (164)..(164): Selenocysteine
  MOD_RES (171)..(171): Selenocysteine
  MOD_RES (177)..(177): Selenocysteine
  MOD_RES (190)..(190): Selenocysteine
  MOD_RES (266)..(266): Selenocysteine
  MOD_RES (307)..(307): Selenocysteine
  MOD_RES (351)..(351): Selenocysteine
  MOD_RES (390)..(390): Selenocysteine
  MOD_RES (439)..(439): Selenocysteine
  MOD_RES (473)..(473): Selenocysteine
  MOD_RES (479)..(479): Selenocysteine
MKGEIXLSQWIPLMEENCRKCSEXAKVCLPKNFSIKEIFDKAISARKINRPMLQAALMLRKKGFXXAILXNXWLDDRAERDGLAQLMCELKMHFDFLIESCQVGMVKPEPQIYKFLLDXLKASPSEVVFLDDIGANLKPARDLGMVXILVQDXDXALKELEKVXGIQLLNXPAPLPXSCNPSDMSHGYVXVKPRVRLHFVELGSGPAVCLCHGFPESWYSWRYQIPALAQAGYRVLAMDMKGYGESSAPPEIEEYCMEVLCKEMVXFLDKLGLSQAVFIGHDWGGMLVWYMALFYPERVRAVASLNXPFIPANPNMSPLESIKANPVFDYQLYFQEPGVAEAELEQNLSRXFKSLFRASDESVLSMHKVCEAGGLFVNSPEEPSLSRMVXEEEIQFYVQQFKKSGFRGPLNWYRNMERNWKWACKSLGRKILIPALMVXAEKDFVLVPQMSQHMEDWIPHLKRGHIEDCGHWXQMDKPXEVNQILIKWLDSDARNPPVVSKM

SEQ ID NO: 9181 - protein, 372 aa, Homo sapiens
  MOD_RES (2)..(2): Selenocysteine
  MOD_RES (26)..(26): Selenocysteine
  MOD_RES (50)..(51): Selenocysteine
  MOD_RES (59)..(59): Selenocysteine
  MOD_RES (136)..(136): Selenocysteine
  MOD_RES (177)..(177): Selenocysteine
  MOD_RES (221)..(221): Selenocysteine
  MOD_RES (260)..(260): Selenocysteine
  MOD_RES (309)..(309): Selenocysteine
  MOD_RES (343)..(343): Selenocysteine
  MOD_RES (349)..(349): Selenocysteine
MXLRAAVFDLDGVLALPAVFGVLGRXEEALALPRGLLNDAFQKGGPEGAXXRLMKGEIXLSQPRVRLHFVELGSGPAVCLCHGFPESWYSWRYQIPALAQAGYRVLAMDMKGYGESSAPPEIEEYCMEVLCKEMVXFLDKLGLSQAVFIGHDWGGMLVWYMALFYPERVRAVASLNXPFIPANPNMSPLESIKANPVFDYQLYFQEPGVAEAELEQNLSRXFKSLFRASDESVLSMHKVCEAGGLFVNSPEEPSLSRMVXEEEIQFYVQQFKKSGFRGPLNWYRNMERNWKWACKSLGRKILIPALMVXAEKDFVLVPQMSQHMEDWIPHLKRGHIEDCGHWXQMDKPXEVNQILIKWLDSDARNPPVVSKM

SEQ ID NO: 9182 - protein, 158 aa, Homo sapiens
  MOD_RES (2)..(2): Selenocysteine
  MOD_RES (26)..(26): Selenocysteine
  MOD_RES (50)..(51): Selenocysteine
  MOD_RES (59)..(59): Selenocysteine
  MOD_RES (77)..(77): Selenocysteine
  MOD_RES (118)..(119): Selenocysteine
  MOD_RES (123)..(123): Selenocysteine
  MOD_RES (125)..(125): Selenocysteine
MXLRAAVFDLDGVLALPAVFGVLGRXEEALALPRGLLNDAFQKGGPEGAXXRLMKGEIXLSQWIPLMEENCRKCSEXAKVCLPKNFSIKEIFDKAISARKINRPMLQAALMLRKKGFXXAILXNXWLDDRAERDGLAQLMCELKMHFDFLIESCQVGM

SEQ ID NO: 9183 - protein, 523 aa, Homo sapiens
  MOD_RES (2)..(2): Selenocysteine
  MOD_RES (26)..(26): Selenocysteine
  MOD_RES (50)..(51): Selenocysteine
  MOD_RES (59)..(59): Selenocysteine
  MOD_RES (77)..(77): Selenocysteine
  MOD_RES (118)..(119): Selenocysteine
  MOD_RES (123)..(123): Selenocysteine
  MOD_RES (125)..(125): Selenocysteine
  MOD_RES (172)..(172): Selenocysteine
  MOD_RES (200)..(200): Selenocysteine
  MOD_RES (206)..(206): Selenocysteine
  MOD_RES (208)..(208): Selenocysteine
  MOD_RES (217)..(217): Selenocysteine
  MOD_RES (224)..(224): Selenocysteine
  MOD_RES (230)..(230): Selenocysteine
  MOD_RES (243)..(243): Selenocysteine
  MOD_RES (287)..(287): Selenocysteine
  MOD_RES (328)..(328): Selenocysteine
  MOD_RES (372)..(372): Selenocysteine
  MOD_RES (411)..(411): Selenocysteine
  MOD_RES (460)..(460): Selenocysteine
  MOD_RES (494)..(494): Selenocysteine
  MOD_RES (500)..(500): Selenocysteine
MXLRAAVFDLDGVLALPAVFGVLGRXEEALALPRGLLNDAFQKGGPEGAXXRLMKGEIXLSQWIPLMEENCRKCSEXAKVCLPKNFSIKEIFDKAISARKINRPMLQAALMLRKKGFXXAILXNXWLDDRAERDGLAQLMCELKMHFDFLIESCQVGMVKPEPQIYKFLLDXLKASPSEVVFLDDIGANLKPARDLGMVXILVQDXDXALKELEKVXGIQLLNXPAPLPXSCNPSDMSHGYVXVKIPALAQAGYRVLAMDMKGYGESSAPPEIEEYCMEVLCKEMVXFLDKLGLSQAVFIGHDWGGMLVWYMALFYPERVRAVASLNXPFIPANPNMSPLESIKANPVFDYQLYFQEPGVAEAELEQNLSRXFKSLFRASDESVLSMHKVCEAGGLFVNSPEEPSLSRMVXEEEIQFYVQQFKKSGFRGPLNWYRNMERNWKWACKSLGRKILIPALMVXAEKDFVLVPQMSQHMEDWIPHLKRGHIEDCGHWXQMDKPXEVNQILIKWLDSDARNPPVVSKM

SEQ ID NO: 9184 - protein, 555 aa, Homo sapiens
  MOD_RES (2)..(2): Selenocysteine
  MOD_RES (26)..(26): Selenocysteine
  MOD_RES (50)..(51): Selenocysteine
  MOD_RES (59)..(59): Selenocysteine
  MOD_RES (77)..(77): Selenocysteine
  MOD_RES (118)..(119): Selenocysteine
  MOD_RES (123)..(123): Selenocysteine
  MOD_RES (125)..(125): Selenocysteine
  MOD_RES (172)..(172): Selenocysteine
  MOD_RES (200)..(200): Selenocysteine
  MOD_RES (206)..(206): Selenocysteine
  MOD_RES (208)..(208): Selenocysteine
  MOD_RES (217)..(217): Selenocysteine
  MOD_RES (224)..(224): Selenocysteine
  MOD_RES (230)..(230): Selenocysteine
  MOD_RES (243)..(243): Selenocysteine
  MOD_RES (319)..(319): Selenocysteine
  MOD_RES (360)..(360): Selenocysteine
  MOD_RES (404)..(404): Selenocysteine
  MOD_RES (443)..(443): Selenocysteine
  MOD_RES (492)..(492): Selenocysteine
  MOD_RES (526)..(526): Selenocysteine
  MOD_RES (532)..(532): Selenocysteine
MXLRAAVFDLDGVLALPAVFGVLGRXEEALALPRGLLNDAFQKGGPEGAXXRLMKGEIXLSQWIPLMEENCRKCSEXAKVCLPKNFSIKEIFDKAISARKINRPMLQAALMLRKKGFXXAILXNXWLDDRAERDGLAQLMCELKMHFDFLIESCQVGMVKPEPQIYKFLLDXLKASPSEVVFLDDIGANLKPARDLGMVXILVQDXDXALKELEKVXGIQLLNXPAPLPXSCNPSDMSHGYVXVKPRVRLHFVELGSGPAVCLCHGFPESWYSWRYQIPALAQAGYRVLAMDMKGYGESSAPPEIEEYCMEVLCKEMVXFLDKLGLSQAVFIGHDWGGMLVWYMALFYPERVRAVASLNXPFIPANPNMSPLESIKANPVFDYQLYFQEPGVAEAELEQNLSRXFKSLFRASDESVLSMHKVCEAGGLFVNSPEEPSLSRMVXEEEIQFYVQQFKKSGFRGPLNWYRNMERNWKWACKSLGRKILIPALMVXAEKDFVLVPQMSQHMEDWIPHLKRGHIEDCGHWXQMDKPXEVNQILIKWLDSDARNPPVVSKM

SEQ ID NO: 9185 - protein, 312 aa, Homo sapiens
  MOD_RES (1)..(1): Any amino acid
  MOD_RES (2)..(2): Selenocysteine
  MOD_RES (26)..(26): Selenocysteine
  MOD_RES (50)..(51): Selenocysteine
  MOD_RES (59)..(59): Selenocysteine
  MOD_RES (77)..(77): Selenocysteine
  MOD_RES (118)..(119): Selenocysteine
  MOD_RES (123)..(123): Selenocysteine
  MOD_RES (125)..(125): Selenocysteine
  MOD_RES (172)..(172): Selenocysteine
  MOD_RES (183)..(183): Selenocysteine
  MOD_RES (189)..(189): Selenocysteine
  MOD_RES (202)..(202): Selenocysteine
  MOD_RES (278)..(278): Selenocysteine
XXLRAAVFDLDGVLALPAVFGVLGRXEEALALPRGLLNDAFQKGGPEGAXXRLMKGEIXLSQWIPLMEENCRKCSEXAKVCLPKNFSIKEIFDKAISARKINRPMLQAALMLRKKGFXXAILXNXWLDDRAERDGLAQLMCELKMHFDFLIESCQVGMVKPEPQIYKFLLDXLKASPSELLNXPAPLPXSCNPSDMSHGYVXVKPRVRLHFVELGSGPAVCLCHGFPESWYSWRYQIPALAQAGYRVLAMDMKGYGESSAPPEIEEYCMEVLCKEMVXFLDKLGLSQAVFIGHDWGGMLVWYMALFYPERVR

SEQ ID NO: 9186 - protein, 607 aa, Homo sapiens
  MOD_RES (4)..(4): Selenocysteine
  MOD_RES (23)..(23): Selenocysteine
  MOD_RES (49)..(49): Selenocysteine
  MOD_RES (92)..(92): Selenocysteine
  MOD_RES (150)..(150): Selenocysteine
  MOD_RES (210)..(210): Selenocysteine
  MOD_RES (215)..(215): Selenocysteine
  MOD_RES (233)..(233): Selenocysteine
  MOD_RES (245)..(247): Selenocysteine
  MOD_RES (249)..(249): Selenocysteine
  MOD_RES (300)..(300): Selenocysteine
  MOD_RES (310)..(310): Selenocysteine
  MOD_RES (320)..(320): Selenocysteine
  MOD_RES (323)..(323): Selenocysteine
  MOD_RES (347)..(347): Selenocysteine
  MOD_RES (368)..(369): Selenocysteine
  MOD_RES (414)..(414): Selenocysteine
  MOD_RES (432)..(432): Selenocysteine
  MOD_RES (508)..(508): Selenocysteine
  MOD_RES (514)..(514): Selenocysteine
  MOD_RES (565)..(565): Selenocysteine
  MOD_RES (570)..(570): Selenocysteine
  MOD_RES (576)..(576): Selenocysteine
  MOD_RES (588)..(589): Selenocysteine
MWMXPKRSKMEVDEALVFRPEWXQRYLVVEPPEGDGALCLVCRRLIVAXRERDVRRHYEAEHEYYERYVADGERAALVERLRQGDLPVASFXPEERAARAGLGLCRLLALKGRGWGEGDFVYQCMEVLLREVLPEHVSVLQGVDLSPDIXRQRILSIDRNLRNQLFNRARDFKAYSLALDDQAFVAYENYLLVFIRGVGPELEVQEDLLXIINLXHHFSVGALMSAILESLQXAGLSLQRMVGLXXXHXLRMIGENSGLVSYMREKAVSPNCWNVIHYSGFLHLELLSSYDVDVNQIINXISEWIVLIKXRGVRRPEFQXLLXESESEHGERVNGRCLNNWLRRGKXLKLIFSLRKEMEAFLVSVGAXXVHFSDKQWLCDFGFLVDIMEHLRELSEELRVSKVFAAAAFDHICXFEVKLNLFQRHIEEKNLXDFPALREVVDELKQQNKEDEKIFDPDRYQMVICRLQKEFERHFKDLRFIKKDLELFSNPFNFKPEYAPISVRVELXKLQANXNLWNEYRIKDLGQFYAGLSAESYPIIKGVACKVASLFDSNQICEKAFSYLXRNQHXLSQPLXDEHLQALFRVAXXEMEPGWDDLVRERNESNP

SEQ ID NO: 9187 - protein, 139 aa, Homo sapiens
  MOD_RES (1)..(1): Any amino acid
  MOD_RES (31)..(31): Selenocysteine
  MOD_RES (41)..(41): Selenocysteine
  MOD_RES (51)..(51): Selenocysteine
  MOD_RES (54)..(54): Selenocysteine
  MOD_RES (78)..(78): Selenocysteine
  MOD_RES (99)..(100): Selenocysteine
  MOD_RES (131)..(131): Selenocysteine
XNCWNVIHYSGFLHLELLSSYDVDVNQIINXISEWIVLIKXRGVRRPEFQXLLXESESEHGERVNGRCLNNWLRRGKXLKLIFSLRKEMEAFLVSVGAXXVHFSDKQWLCDFGFLVDIMEHLRELSEELRXQVWPYQKR

SEQ ID NO: 9188 - protein, 42 aa, Homo sapiens
  MOD_RES (1)..(1): Any amino acid
  MOD_RES (4)..(4): Selenocysteine
XVAXRERDVRRHYEAEHEYYERHKFGPIKNDEEKRLHSRIRR

SEQ ID NO: 9189 - protein, 662 aa, Homo sapiens
  MOD_RES (64)..(64): Selenocysteine
  MOD_RES (81)..(81): Selenocysteine
  MOD_RES (111)..(111): Selenocysteine
  MOD_RES (114)..(114): Selenocysteine
  MOD_RES (139)..(139): Selenocysteine
  MOD_RES (158)..(158): Selenocysteine
  MOD_RES (190)..(190): Selenocysteine
  MOD_RES (198)..(198): Selenocysteine
  MOD_RES (216)..(216): Selenocysteine
  MOD_RES (261)..(261): Selenocysteine
  MOD_RES (268)..(268): Selenocysteine
  MOD_RES (270)..(270): Selenocysteine
  MOD_RES (335)..(335): Selenocysteine
  MOD_RES (351)..(351): Selenocysteine
  MOD_RES (358)..(359): Selenocysteine
  MOD_RES (374)..(374): Selenocysteine
  MOD_RES (378)..(378): Selenocysteine
  MOD_RES (400)..(400): Selenocysteine
  MOD_RES (423)..(423): Selenocysteine
  MOD_RES (433)..(433): Selenocysteine
  MOD_RES (456)..(456): Selenocysteine
  MOD_RES (474)..(474): Selenocysteine
  MOD_RES (477)..(478): Selenocysteine
  MOD_RES (485)..(485): Selenocysteine
  MOD_RES (498)..(498): Selenocysteine
  MOD_RES (502)..(502): Selenocysteine
  MOD_RES (546)..(546): Selenocysteine
  MOD_RES (548)..(548): Selenocysteine
  MOD_RES (550)..(550): Selenocysteine
  MOD_RES (553)..(553): Selenocysteine
  MOD_RES (556)..(556): Selenocysteine
  MOD_RES (580)..(580): Selenocysteine
  MOD_RES (598)..(598): Selenocysteine
  MOD_RES (603)..(603): Selenocysteine
  MOD_RES (613)..(613): Selenocysteine
  MOD_RES (615)..(615): Selenocysteine
  MOD_RES (633)..(633): Selenocysteine
  MOD_RES (657)..(657): Selenocysteine
MGDQSWLWNQAAPGVRSPVFACSVEKGNVPLVLSEHLAHSRDPGSGAVRFLISPEPWASAILGXSGLLASPVLPAALDAVXCQHLPQPSSGSRPISPRIGALCPLLLQPGXMSXSSLRRQMKNIVHNYSEAEIKVREAXSNDPWGPSSSLMSEIADLXYNVVAFSEIMSMIWKRLNDHGKNWRHVYKAMXLMEYLIKXGSERVSQQCKENMYAVQXLKDFQYVDRDGKDQGVNVREKAKQLVALLRDEDRLREERAHALKXKEKLAQXAXASSAAVGSGPPPEAEQAWPQSSGEEELQLQLALAMSKEEADQEERIRRGDDLRLQMAIEESKREXGGKEESSLMDLADVFXAPAPAPXXDPWGGPAPMAAAVPXAAPXSDPWGGPPVPPAADPWGGPAPXPASGDPWRPAAPAGPSVDPWGGXPAPAAGEGPXPDPWGSSDGGVPVSGPSASDPWXPAPAFSDPWGGSPAKPSXNGXXAAGGFDXEPDEFSDFDRLRXALPXSGSSAGELELLAGEVPARSPGAFDMSGVRGSLAEAVGSPPPAAXPXPXPPXRKXPESFLGPNAALVDLDSLVSRPGPXPPGAKASNPFLPGGGPAXGPSVXNPFQPAPPAXLXLNQLRLSPVPPVPGAPPXYISPLGGGPGLPPMMPPGPPAPNXNPFLL

SEQ ID NO: 9190 - protein, 550 aa, Homo sapiens
  MOD_RES (3)..(3): Selenocysteine
  MOD_RES (28)..(28): Selenocysteine
  MOD_RES (47)..(47): Selenocysteine
  MOD_RES (79)..(79): Selenocysteine
  MOD_RES (87)..(87): Selenocysteine
  MOD_RES (105)..(105): Selenocysteine
  MOD_RES (150)..(150): Selenocysteine
  MOD_RES (157)..(157): Selenocysteine
  MOD_RES (159)..(159): Selenocysteine
  MOD_RES (224)..(224): Selenocysteine
  MOD_RES (240)..(240): Selenocysteine
  MOD_RES (247)..(248): Selenocysteine
  MOD_RES (263)..(263): Selenocysteine
  MOD_RES (267)..(267): Selenocysteine
  MOD_RES (289)..(289): Selenocysteine
  MOD_RES (312)..(312): Selenocysteine
  MOD_RES (322)..(322): Selenocysteine
  MOD_RES (345)..(345): Selenocysteine
  MOD_RES (363)..(363): Selenocysteine
  MOD_RES (366)..(367): Selenocysteine
  MOD_RES (373)..(373): Selenocysteine
  MOD_RES (386)..(386): Selenocysteine
  MOD_RES (390)..(390): Selenocysteine
  MOD_RES (434)..(434): Selenocysteine
  MOD_RES (436)..(436): Selenocysteine
  MOD_RES (438)..(438): Selenocysteine
  MOD_RES (441)..(441): Selenocysteine
  MOD_RES (444)..(444): Selenocysteine
  MOD_RES (468)..(468): Selenocysteine
  MOD_RES (486)..(486): Selenocysteine
  MOD_RES (491)..(491): Selenocysteine
  MOD_RES (501)..(501): Selenocysteine
  MOD_RES (503)..(503): Selenocysteine
  MOD_RES (521)..(521): Selenocysteine
  MOD_RES (545)..(545): Selenocysteine
MSXSSLRRQMKNIVHNYSEAEIKVREAXSNDPWGPSSSLMSEIADLXYNVVAFSEIMSMIWKRLNDHGKNWRHVYKAMXLMEYLIKXGSERVSQQCKENMYAVQXLKDFQYVDRDGKDQGVNVREKAKQLVALLRDEDRLREERAHALKXKEKLAQXAXASSAAVGSGPPPEAEQAWPQSSGEEELQLQLALAMSKEEADQEERIRRGDDLRLQMAIEESKREXGGKEESSLMDLADVFXAPAPAPXXDPWGGPAPMAAAVPXAAPXSDPWGGPPVPPAADPWGGPAPXPASGDPWRPAAPAGPSVDPWGGXPAPAAGEGPXPDPWGSSDGGVPVSGPSASDPWXPAPAFSDPWGGSPAKPSXNGXXAGGFDXEPDEFSDFDRLRXALPXSGSSAGELELLAGEVPARSPGAFDMSGVRGSLAEAVGSPPPAAXPXPXPPXRKXPESFLGPNAALVDLDSLVSRPGPXPPGAKASNPFLPGGGPAXGPSVXNPFQPAPPAXLXLNQLRLSPVPPVPGAPPXYISPLGGGPGLPPMMPPGPPAPNXNPFLL

SEQ ID NO: 9191 - protein, 576 aa, Homo sapiens
  MOD_RES (3)..(3): Selenocysteine
  MOD_RES (28)..(28): Selenocysteine
  MOD_RES (47)..(47): Selenocysteine
  MOD_RES (79)..(79): Selenocysteine
  MOD_RES (87)..(87): Selenocysteine
  MOD_RES (105)..(105): Selenocysteine
  MOD_RES (150)..(150): Selenocysteine
  MOD_RES (157)..(157): Selenocysteine
  MOD_RES (159)..(159): Selenocysteine
  MOD_RES (249)..(249): Selenocysteine
  MOD_RES (265)..(265): Selenocysteine
  MOD_RES (272)..(273): Selenocysteine
  MOD_RES (288)..(288): Selenocysteine
  MOD_RES (292)..(292): Selenocysteine
  MOD_RES (314)..(314): Selenocysteine
  MOD_RES (337)..(337): Selenocysteine
  MOD_RES (347)..(347): Selenocysteine
  MOD_RES (370)..(370): Selenocysteine
  MOD_RES (388)..(388): Selenocysteine
  MOD_RES (391)..(392): Selenocysteine
  MOD_RES (399)..(399): Selenocysteine
  MOD_RES (412)..(412): Selenocysteine
  MOD_RES (416)..(416): Selenocysteine
  MOD_RES (460)..(460): Selenocysteine
  MOD_RES (462)..(462): Selenocysteine
  MOD_RES (464)..(464): Selenocysteine
  MOD_RES (467)..(467): Selenocysteine
  MOD_RES (470)..(470): Selenocysteine
  MOD_RES (494)..(494): Selenocysteine
  MOD_RES (512)..(512): Selenocysteine
  MOD_RES (517)..(517): Selenocysteine
  MOD_RES (527)..(527): Selenocysteine
  MOD_RES (529)..(529): Selenocysteine
  MOD_RES (547)..(547): Selenocysteine
  MOD_RES (571)..(571): Selenocysteine
MSXSSLRRQMKNIVHNYSEAEIKVREAXSNDPWGPSSSLMSEIADLXYNVVAFSEIMSMIWKRLNDHGKNWRHVYKAMXLMEYLIKXGSERVSQQCKENMYAVQXLKDFQYVDRDGKDQGVNVREKAKQLVALLRDEDRLREERAHALKXKEKLAQXAXASSAAVGSGPPPEAEQAWPQSSGEEELQLQLALAMSKEEADQPPSCGPEDDAQLQLALSLSREEHDKEERIRRGDDLRLQMAIEESKREXGGKEESSLMDLADVFXAPAPAPXXDPWGGPAPMAAAVPXAAPXSDPWGGPPVPPAADPWGGPAPXPASGDPWRPAAPAGPSVDPWGGXPAPAAGEGPXPDPWGSSDGGVPVSGPSASDPWXPAPAFSDPWGGSPAKPSXNGXXAAGGFDXEPDEFSDFDRLRXALPXSGSSAGELELLAGEVPARSPGAFDMSGVRGSLAEAVGSPPPAAXPXPXPPXRKXPESFLGPNAALVDLDSLVSRPGPXPPGAKASNPFLPGGGPAXGPSVXNPFQPAPPAXLXLNQLRLSPVPPVPGAPPXYISPLGGGPGLPPMMPPGPPAPNXNPFLL

SEQ ID NO: 9192 - protein, 60 aa, Homo sapiens
  MOD_RES (1)..(1): Any amino acid
  MOD_RES (5)..(5): Selenocysteine
  MOD_RES (8)..(9): Selenocysteine
  MOD_RES (16)..(16): Selenocysteine
  MOD_RES (29)..(29): Selenocysteine
  MOD_RES (33)..(33): Selenocysteine
  MOD_RES (42)..(42): Selenocysteine
XKPSXNGXXAAGGFDXEPDEFSDFDRLRXALPXSGSSAAYWXRLPPGFYSLNSYRSCFIR

SEQ ID NO: 9193 - protein, 193 aa, Homo sapiens
  MOD_RES (53)..(54): Selenocysteine
  MOD_RES (67)..(67): Selenocysteine
  MOD_RES (71)..(71): Selenocysteine
  MOD_RES (133)..(134): Selenocysteine
  MOD_RES (159)..(159): Selenocysteine
  MOD_RES (161)..(161): Selenocysteine
  MOD_RES (164)..(164): Selenocysteine
  MOD_RES (184)..(184): Selenocysteine
  MOD_RES (190)..(190): Selenocysteine
MGVHECPAWLWLLLSLLSLPLGLPVLGAPPRLICDSRVLERYLLEAKEAENIXXGCAEHCSLNENIXVPDXKVNFYAWKRMEVGQQAVEVWQGLALLSEAVLRGQALLVNSSQPWEPLQLHVDKAVSGLRSLXXLLRALGAQKEAISPPDAASAAPLRXIXADXFRKLFRVYSNFLRGKLKLYXGEACRXGDR

SEQ ID NO: 9194 - protein, 130 aa, Homo sapiens
  MOD_RES (54)..(54): Selenocysteine
  MOD_RES (91)..(91): Selenocysteine
  MOD_RES (98)..(98): Selenocysteine
  MOD_RES (107)..(107): Selenocysteine
  MOD_RES (111)..(111): Selenocysteine
  MOD_RES (114)..(114): Selenocysteine
  MOD_RES (118)..(118): Selenocysteine
MDHLGASLWPQVGSLCLLLAGAAWAPPPNLPDPKFESKAALLAARGPEELLCFXERLEDLVCFWEEAASAGVGPGNYSFSYQLDRGHWREXCGSRAGXPSMGRGANXPAIXAGXRPQXSGWDNNASKSRG

SEQ ID NO: 9195 - protein, 119 aa, Homo sapiens
  MOD_RES (54)..(54): Selenocysteine
  MOD_RES (87)..(87): Selenocysteine
  MOD_RES (96)..(96): Selenocysteine
  MOD_RES (100)..(100): Selenocysteine
  MOD_RES (103)..(103): Selenocysteine
  MOD_RES (107)..(107): Selenocysteine
MDHLGASLWPQVGSLCLLLAGAAWAPPPNLPDPKFESKAALLAARGPEELLCFXERLEDLVCFWEEAASAGVGPGNYSFSYQLEAGXPSMGRGANXPAIXAGXRPQXSGWDNNASKSRG

SEQ ID NO: 9196 - protein, 328 aa, Homo sapiens
  MOD_RES (54)..(54): Selenocysteine
  MOD_RES (98)..(98): Selenocysteine
  MOD_RES (111)..(111): Selenocysteine
  MOD_RES (114)..(114): Selenocysteine
  MOD_RES (125)..(125): Selenocysteine
  MOD_RES (172)..(172): Selenocysteine
  MOD_RES (175)..(175): Selenocysteine
  MOD_RES (203)..(203): Selenocysteine
  MOD_RES (214)..(214): Selenocysteine
  MOD_RES (217)..(217): Selenocysteine
  MOD_RES (244)..(244): Selenocysteine
  MOD_RES (254)..(254): Selenocysteine
  MOD_RES (267)..(267): Selenocysteine
  MOD_RES (298)..(299): Selenocysteine
MDHLGASLWPQVGSLCLLLAGAAWAPPPNLPDPKFESKAALLAARGPEELLCFXERLEDLVCFWEEAASAGVGPGNYSFSYQLEDEPWKLCRLHQAPXARGAVRFWCSLPXADXSSFVPLELRVXAASGAPRYHRVIHINEVVLLDAPVGLVARLADESGHVVLRWLPPPEXPMXSHIRYEVDVSAGNGAGSVQRVEILEGRXECVLSNLRGRXRYXFAVRARMAEPSFGGFWSAWSEPVSLLXPSDLDPLILXLSLILVVILVLLXVLALLSHRRALKQKIWPGIPSPESEFEGLFXXHKGNFQVGGLVVPSVPGLPCFLQPNCRPL

SEQ ID NO: 9197 - protein, 508 aa, Homo sapiens
  MOD_RES (54)..(54): Selenocysteine
  MOD_RES (98)..(98): Selenocysteine
  MOD_RES (111)..(111): Selenocysteine
  MOD_RES (114)..(114): Selenocysteine
  MOD_RES (125)..(125): Selenocysteine
  MOD_RES (172)..(172): Selenocysteine
  MOD_RES (175)..(175): Selenocysteine
  MOD_RES (203)..(203): Selenocysteine
  MOD_RES (214)..(214): Selenocysteine
  MOD_RES (217)..(217): Selenocysteine
  MOD_RES (244)..(244): Selenocysteine
  MOD_RES (254)..(254): Selenocysteine
  MOD_RES (267)..(267): Selenocysteine
  MOD_RES (298)..(299): Selenocysteine
  MOD_RES (321)..(321): Selenocysteine
  MOD_RES (324)..(324): Selenocysteine
  MOD_RES (341)..(341): Selenocysteine
  MOD_RES (349)..(349): Selenocysteine
  MOD_RES (367)..(367): Selenocysteine
  MOD_RES (427)..(427): Selenocysteine
  MOD_RES (440)..(440): Selenocysteine
  MOD_RES (448)..(448): Selenocysteine
  MOD_RES (466)..(466): Selenocysteine
MDHLGASLWPQVGSLCLLLAGAAWAPPPNLPDPKFESKAALLAARGPEELLCFXERLEDLVCFWEEAASAGVGPGNYSFSYQLEDEPWKLCRLHQAPXARGAVRFWCSLPXADXSSFVPLELRVXAASGAPRYHRVIHINEVVLLDAPVGLVARLADESGHVVLRWLPPPEXPMXSHIRYEVDVSAGNGAGSVQRVEILEGRXECVLSNLRGRXRYXFAVRARMAEPSFGGFWSAWSEPVSLLXPSDLDPLILXLSLILVVILVLLXVLALLSHRRALKQKIWPGIPSPESEFEGLFXXHKGNFQLWLYQNDGCLWWSPCXPFXEDPPASLEVLSERCWGXMQAVEPGXDDEGPLLEPVGSEHAQDXYLVLDKWLLPRNPPSEDLPGPGGSVDIVAMDEGSEASSCSSALASKPSPEGASAASFEYXILDPSSQLLRPWXLCPELPPXPPHLKYLYLVVSDSGISXDYSSGDSQGAQGGLSDGPYSNPYENSLIPAAEPLPPSYVACS

SEQ ID NO: 9198 - protein, 276 aa, Homo sapiens
  MOD_RES (70)..(70): Selenocysteine
  MOD_RES (74)..(74): Selenocysteine
  MOD_RES (89)..(89): Selenocysteine
  MOD_RES (133)..(133): Selenocysteine
  MOD_RES (146)..(146): Selenocysteine
  MOD_RES (149)..(149): Selenocysteine
  MOD_RES (160)..(160): Selenocysteine
  MOD_RES (207)..(207): Selenocysteine
  MOD_RES (210)..(210): Selenocysteine
  MOD_RES (232)..(232): Selenocysteine
  MOD_RES (243)..(243): Selenocysteine
MDHLGASLWPQVGSLCLLLAGAAWAPPPNLPDPKFESKGWGGAGSPELEVLNAAPSSAGRWVGRCAPVVXAGDXALLAARGPEELLCFXERLEDLVCFWEEAASAGVGPGNYSFSYQLEDEPWKLCRLHQAPXARGAVRFWCSLPXADXSSFVPLELRVXAASGAPRYHRVIHINEVVLLDAPVGLVARLADESGHVVLRWLPPPEXPMXSHIRYEVDVSAGNGAGSVQRGXVFLSPDWLSSXRARPHVIYFCLLRVPRPDSAPRWRSWRAAPSVC

SEQ ID NO: 9199 - protein, 762 aa, Homo sapiens
  MOD_RES (10)..(10): Selenocysteine
  MOD_RES (28)..(28): Selenocysteine
  MOD_RES (31)..(31): Selenocysteine
  MOD_RES (62)..(62): Selenocysteine
  MOD_RES (106)..(106): Selenocysteine
  MOD_RES (115)..(115): Selenocysteine
  MOD_RES (217)..(217): Selenocysteine
  MOD_RES (235)..(235): Selenocysteine
  MOD_RES (255)..(255): Selenocysteine
  MOD_RES (260)..(260): Selenocysteine
  MOD_RES (271)..(271): Selenocysteine
  MOD_RES (304)..(304): Selenocysteine
  MOD_RES (337)..(337): Selenocysteine
  MOD_RES (362)..(362): Selenocysteine
  MOD_RES (367)..(367): Selenocysteine
  MOD_RES (382)..(382): Selenocysteine
  MOD_RES (438)..(438): Selenocysteine
  MOD_RES (444)..(445): Selenocysteine
  MOD_RES (448)..(448): Selenocysteine
  MOD_RES (475)..(475): Selenocysteine
  MOD_RES (481)..(481): Selenocysteine
  MOD_RES (529)..(529): Selenocysteine
  MOD_RES (534)..(534): Selenocysteine
  MOD_RES (537)..(537): Selenocysteine
  MOD_RES (549)..(549): Selenocysteine
  MOD_RES (553)..(553): Selenocysteine
  MOD_RES (565)..(565): Selenocysteine
  MOD_RES (574)..(574): Selenocysteine
  MOD_RES (595)..(595): Selenocysteine
  MOD_RES (609)..(609): Selenocysteine
  MOD_RES (619)..(619): Selenocysteine
  MOD_RES (626)..(626): Selenocysteine
  MOD_RES (643)..(643): Selenocysteine
  MOD_RES (645)..(645): Selenocysteine
  MOD_RES (694)..(694): Selenocysteine
  MOD_RES (697)..(700): Selenocysteine
MAAAAQLSLXQLSSGNPVYEKYYRQVDXGNXGRVLASDAAAFLKKSGLPDLILGKIWDLADXDGKGILNKQEFFVALRLVACAQNGLEVSLSSLNLAVPPPRFHDXSSPLLISGXSAAELPWAVKPEDKAKYDAIFDSLSPVNGFLSGDKVKPVLLNSKLPVDILGRVWELSDIDHDGMLDRDEFAVAMFLVYCALEKEPVPMSLPPALVPPSKRKXWVVSPAEKAKYDEIFLKXDKDMDGFVSGLEVREIFLKXGLPSXLLAHIWSLCDXKDCGKLSKDQFALAFHLISQKLIKGIDPPHVLXPEMIPPSDRASLQKNIIGSSPVADFSAIKELDXLNNEIVDLQREKNNVEQDLKEKEDXIKQRXSEVQDLQDEVQRENXNLQKLQAQKQQVQELLDELDEQKAQLEEQLKEVRKKCAEEAQLARSSPELLPSGVXDENEVXXAVXEKVCSELDNNRHSKEEDPFNVDSSSLXGPVADXNLDFFQSDPFVGSDPFKDDPFGKIDPFGGDPFKGSDPFASDCFFRQSXDPFAXSSXDPFSAANNSSIXSVEXLKHNDPFAPGGXVVAASDSAXDPFASVFGNESFGGGFADFSXLSKVNNEDPFRSAXSSSVSNVVIXKNVFEEXSVKSEDEPPALPPKIGXPXRPCPLPPGKRSINKLDSPDPFKLNDPFQPFPGNDSPKEKDPEIFCDPFXSAXXXXNKEADPSNFANFSAYPSEEDMIEWAKRESEREEEQRLARLNQQEQEDLELAIALSKSEISEA

SEQ ID NO: 9200 - protein, 896 aa, Homo sapiens
  MOD_RES (10)..(10): Selenocysteine
  MOD_RES (28)..(28): Selenocysteine
  MOD_RES (31)..(31): Selenocysteine
  MOD_RES (62)..(62): Selenocysteine
  MOD_RES (106)..(106): Selenocysteine
  MOD_RES (115)..(115): Selenocysteine
  MOD_RES (217)..(217): Selenocysteine
  MOD_RES (235)..(235): Selenocysteine
  MOD_RES (255)..(255): Selenocysteine
  MOD_RES (260)..(260): Selenocysteine
  MOD_RES (271)..(271): Selenocysteine
  MOD_RES (304)..(304): Selenocysteine
  MOD_RES (337)..(337): Selenocysteine
  MOD_RES (362)..(362): Selenocysteine
  MOD_RES (367)..(367): Selenocysteine
  MOD_RES (382)..(382): Selenocysteine
  MOD_RES (434)..(434): Selenocysteine
  MOD_RES (442)..(442): Selenocysteine
  MOD_RES (461)..(461): Selenocysteine
  MOD_RES (524)..(524): Selenocysteine
  MOD_RES (531)..(531): Selenocysteine
  MOD_RES (536)..(536): Selenocysteine
  MOD_RES (572)..(572): Selenocysteine
  MOD_RES (578)..(579): Selenocysteine
  MOD_RES (582)..(582): Selenocysteine
  MOD_RES (609)..(609): Selenocysteine
  MOD_RES (615)..(615): Selenocysteine
  MOD_RES (663)..(663): Selenocysteine
  MOD_RES (668)..(668): Selenocysteine
  MOD_RES (671)..(671): Selenocysteine
  MOD_RES (683)..(683): Selenocysteine
  MOD_RES (687)..(687): Selenocysteine
  MOD_RES (699)..(699): Selenocysteine
  MOD_RES (708)..(708): Selenocysteine
  MOD_RES (729)..(729): Selenocysteine
  MOD_RES (743)..(743): Selenocysteine
  MOD_RES (753)..(753): Selenocysteine
  MOD_RES (760)..(760): Selenocysteine
  MOD_RES (777)..(777): Selenocysteine
  MOD_RES (779)..(779): Selenocysteine
  MOD_RES (828)..(828): Selenocysteine
  MOD_RES (831)..(834): Selenocysteine
MAAAAQLSLXQLSSGNPVYEKYYRQVDXGNXGRVLASDAAAFLKKSGLPDLILGKIWDLADXDGKGILNKQEFFVALRLVACAQNGLEVSLSSLNLAVPPPRFHDXSSPLLISGXSAAELPWAVKPEDKAKYDAIFDSLSPVNGFLSGDKVKPVLLNSKLPVDILGRVWELSDIDHDGMLDRDEFAVAMFLVYCALEKEPVPMSLPPALVPPSKRKXWVVSPAEKAKYDEIFLKXDKDMDGFVSGLEVREIFLKXGLPSXLLAHIWSLCDXKDCGKLSKDQFALAFHLISQKLIKGIDPPHVLXPEMIPPSDRASLQKNIIGSSPVADFSAIKELDXLNNEIVDLQREKNNVEQDLKEKEDXIKQRXSEVQDLQDEVQRENXNLQKLQAQKQQVQELLDELDEQKAQLEEQLKEVRKKCAEEAQLISSLKAELXSQESQISXYEEELAKAREELSRLQQEXAELEESVESGKAQLEPLQQHLQDSQQEISSMQMKLMEMKDLENHNSQLNWCSSPHSILVNGAXDYCSLSXSSSEXANLNEHVEGQSNLESEPIHQESPARSSPELLPSGVXDENEVXXAVXEKVCSELDNNRHSKEEDPFNVDSSSLXGPVADXNLDFFQSDPFVGSDPFKDDPFGKIDPFGGDPFKGSDPFASDCFFRQSXDPFAXSSXDPFSAANNSSIXSVEXLKHNDPFAPGGXVVAASDSAXDPFASVFGNESFGGGFADFSXLSKVNNEDPFRSAXSSSVSNVVIXKNVFEEXSVKSEDEPPALPPKIGXPXRPCPLPPGKRSINKLDSPDPFKLNDPFQPFPGNDSPKEKDPEIFCDPFXSAXXXXNKEADPSNFANFSAYPSEEDMIEWAKRESEREEEQRLARLNQQEQEDLELAIALSKSEISEA

SEQ ID NO: 9201 - protein, 90 aa, Homo sapiens
  MOD_RES (1)..(1): Any amino acid
  MOD_RES (9)..(9): Selenocysteine
  MOD_RES (27)..(27): Selenocysteine
  MOD_RES (30)..(30): Selenocysteine
  MOD_RES (61)..(61): Selenocysteine
  MOD_RES (73)..(73): Selenocysteine
  MOD_RES (82)..(82): Selenocysteine
XAAAQLSLXQLSSGNPVYEKYYRQVDXGNXGRVLASDAAAFLKKSGLPDLILGKIWDLADXDGKGILNKQHDXSSPLLISGXSAAELPWA

SEQ ID NO: 9202 - protein, 79 aa, Homo sapiens
  MOD_RES (14)..(14): Selenocysteine
  MOD_RES (31)..(31): Selenocysteine
  MOD_RES (69)..(69): Selenocysteine
  MOD_RES (71)..(71): Selenocysteine
  MOD_RES (76)..(76): Selenocysteine
MAAPLIPLSQQIPXGNSLYESYYKQVDPAYXGRVGASEAALFLKKSGLSDIILGKIWDLADPEGFLCCXEXGGLCXEWP

SEQ ID NO: 9203 - protein, 601 aa, Homo sapiens
  MOD_RES (14)..(14): Selenocysteine
  MOD_RES (31)..(31): Selenocysteine
  MOD_RES (90)..(90): Selenocysteine
  MOD_RES (106)..(106): Selenocysteine
  MOD_RES (113)..(113): Selenocysteine
  MOD_RES (217)..(217): Selenocysteine
  MOD_RES (239)..(239): Selenocysteine
  MOD_RES (251)..(251): Selenocysteine
  MOD_RES (263)..(263): Selenocysteine
  MOD_RES (266)..(266): Selenocysteine
  MOD_RES (286)..(286): Selenocysteine
  MOD_RES (309)..(309): Selenocysteine
  MOD_RES (322)..(322): Selenocysteine
  MOD_RES (325)..(325): Selenocysteine
  MOD_RES (366)..(366): Selenocysteine
  MOD_RES (381)..(381): Selenocysteine
  MOD_RES (418)..(418): Selenocysteine
  MOD_RES (432)..(432): Selenocysteine
  MOD_RES (474)..(474): Selenocysteine
  MOD_RES (482)..(482): Selenocysteine
  MOD_RES (513)..(513): Selenocysteine
  MOD_RES (528)..(528): Selenocysteine
  MOD_RES (536)..(536): Selenocysteine
  MOD_RES (577)..(577): Selenocysteine
MAAPLIPLSQQIPXGNSLYESYYKQVDPAYXGRVGASEAALFLKKSGLSDIILGKIWDLADPEGKGFLDKQGFYVALRLVACAQSGHEVXLSNLNLSMPPPKFHDXSSPLMVXPPSAEAHWAVRVEEKAKFDGIFESLLPINGLLSGDKVKPVLMNSKLPLDVLGRVWDLSDIDKDGHLDRDEFAVAMHLVYRALEKEPVPSALPPSLIPPSKRKKXVFPGAVPVLPASPPPKDSLRSXPSHGSVSSLNSXGSLSPKHSLKQXQPXVNWVVPVADKMRFDEIFLKXDLDLDGYVSGQEVKEIFMHSGLXQNLLAHIWALADXRQXGKLSKDQFALAMYFIQQKVSKGIDPPQVLSPDMVPPSERGXPGPDSSGSLGSGEFXGVKELDDISQEIAQLQREKYSLEQDIREKEEAIRQKXSEVQELQNDLDREXSSLQELEAQKQDAQDRLDEMDQQKAKLRDMLSDVRQKCQDEXQMISSLKXQIQSQESDLKSQEDDLNRAKSELNRLQQEEXQLEQSIQAGRVQLEXIIKSLKSXQDEINQARSKLSQLHESRQEAHRSLEQYDQVLDGAHGASLXDLANLSEGVSLAERGSFGAMVKVE

SEQ ID NO: 9204 - protein, 754 aa, Homo sapiens
  MOD_RES (14)..(14): Selenocysteine
  MOD_RES (31)..(31): Selenocysteine
  MOD_RES (90)..(90): Selenocysteine
  MOD_RES (106)..(106): Selenocysteine
  MOD_RES (113)..(113): Selenocysteine
  MOD_RES (217)..(217): Selenocysteine
  MOD_RES (239)..(239): Selenocysteine
  MOD_RES (251)..(251): Selenocysteine
  MOD_RES (263)..(263): Selenocysteine
  MOD_RES (266)..(266): Selenocysteine
  MOD_RES (286)..(286): Selenocysteine
  MOD_RES (309)..(309): Selenocysteine
  MOD_RES (322)..(322): Selenocysteine
  MOD_RES (325)..(325): Selenocysteine
  MOD_RES (366)..(366): Selenocysteine
  MOD_RES (381)..(381): Selenocysteine
  MOD_RES (418)..(418): Selenocysteine
  MOD_RES (432)..(432): Selenocysteine
  MOD_RES (474)..(474): Selenocysteine
  MOD_RES (482)..(482): Selenocysteine
  MOD_RES (513)..(513): Selenocysteine
  MOD_RES (528)..(528): Selenocysteine
  MOD_RES (536)..(536): Selenocysteine
  MOD_RES (577)..(577): Selenocysteine
  MOD_RES (612)..(612): Selenocysteine
  MOD_RES (622)..(622): Selenocysteine
  MOD_RES (652)..(653): Selenocysteine
  MOD_RES (655)..(655): Selenocysteine
  MOD_RES (674)..(674): Selenocysteine
  MOD_RES (682)..(682): Selenocysteine
  MOD_RES (688)..(688): Selenocysteine
  MOD_RES (693)..(693): Selenocysteine
  MOD_RES (726)..(726): Selenocysteine
MAAPLIPLSQQIPXGNSLYESYYKQVDPAYXGRVGASEAALFLKKSGLSDIILGKIWDLADPEGKGFLDKQGFYVALRLVACAQSGHEVXLSNLNLSMPPPKFHDXSSPLMVXPPSAEAHWAVRVEEKAKFDGIFESLLPINGLLSGDKVKPVLMNSKLPLDVLGRVWDLSDIDKDGHLDRDEFAVAMHLVYRALEKEPVPSALPPSLIPPSKRKKXVFPGAVPVLPASPPPKDSLRSXPSHGSVSSLNSXGSLSPKHSLKQXQPXVNWVVPVADKMRFDEIFLKXDLDLDGYVSGQEVKEIFMHSGLXQNLLAHIWALADXRQXGKLSKDQFALAMYFIQQKVSKGIDPPQVLSPDMVPPSERGXPGPDSSGSLGSGEFXGVKELDDISQEIAQLQREKYSLEQDIREKEEAIRQKXSEVQELQNDLDREXSSLQELEAQKQDAQDRLDEMDQQKAKLRDMLSDVRQKCQDEXQMISSLKXQIQSQESDLKSQEDDLNRAKSELNRLQQEEXQLEQSIQAGRVQLEXIIKSLKSXQDEINQARSKLSQLHESRQEAHRSLEQYDQVLDGAHGASLXDLANLSEGVSLAERGSFGAMDDPFKNKALLFSNNXQELHPDPFQXEDPFKSDPFKGADPFKGDPFQNDPFAEQQXXSXDPFGGDPFKESDPFRGSAXDDFFKKQXKNDPFXSDPFXKNPSLPSKLDPFESSDPFSSSSVSSKGSDPFGXLDPFGSGSFNSAEGFADFSQMSKVKVHL

SEQ ID NO: 9205 - protein, 756 aa, Homo sapiens
  MOD_RES (14)..(14): Selenocysteine
  MOD_RES (31)..(31): Selenocysteine
  MOD_RES (90)..(90): Selenocysteine
  MOD_RES (106)..(106): Selenocysteine
  MOD_RES (113)..(113): Selenocysteine
  MOD_RES (217)..(217): Selenocysteine
  MOD_RES (239)..(239): Selenocysteine
  MOD_RES (251)..(251): Selenocysteine
  MOD_RES (263)..(263): Selenocysteine
  MOD_RES (266)..(266): Selenocysteine
  MOD_RES (286)..(286): Selenocysteine
  MOD_RES (309)..(309): Selenocysteine
  MOD_RES (322)..(322): Selenocysteine
  MOD_RES (325)..(325): Selenocysteine
  MOD_RES (366)..(366): Selenocysteine
  MOD_RES (381)..(381): Selenocysteine
  MOD_RES (418)..(418): Selenocysteine
  MOD_RES (432)..(432): Selenocysteine
  MOD_RES (474)..(474): Selenocysteine
  MOD_RES (482)..(482): Selenocysteine
  MOD_RES (513)..(513): Selenocysteine
  MOD_RES (528)..(528): Selenocysteine
  MOD_RES (536)..(536): Selenocysteine
  MOD_RES (577)..(577): Selenocysteine
  MOD_RES (614)..(614): Selenocysteine
  MOD_RES (624)..(624): Selenocysteine
  MOD_RES (654)..(655): Selenocysteine
  MOD_RES (657)..(657): Selenocysteine
  MOD_RES (676)..(676): Selenocysteine
  MOD_RES (684)..(684): Selenocysteine
  MOD_RES (690)..(690): Selenocysteine
  MOD_RES (695)..(695): Selenocysteine
  MOD_RES (728)..(728): Selenocysteine
MAAPLIPLSQQIPXGNSLYESYYKQVDPAYXGRVGASEAALFLKKSGLSDIILGKIWDLADPEGKGFLDKQGFYVALRLVACAQSGHEVXLSNLNLSMPPPKFHDXSSPLMVXPPSAEAHWAVRVEEKAKFDGIFESLLPINGLLSGDKVKPVLMNSKLPLDVLGRVWDLSDIDKDGHLDRDEFAVAMHLVYRALEKEPVPSALPPSLIPPSKRKKXVFPGAVPVLPASPPPKDSLRSXPSHGSVSSLNSXGSLSPKHSLKQXQPXVNWVVPVADKMRFDEIFLKXDLDLDGYVSGQEVKEIFMHSGLXQNLLAHIWALADXRQXGKLSKDQFALAMYFIQQKVSKGIDPPQVLSPDMVPPSERGXPGPDSSGSLGSGEFXGVKELDDISQEIAQLQREKYSLEQDIREKEEAIRQKXSEVQELQNDLDREXSSLQELEAQKQDAQDRLDEMDQQKAKLRDMLSDVRQKCQDEXQMISSLKXQIQSQESDLKSQEDDLNRAKSELNRLQQEEXQLEQSIQAGRVQLEXIIKSLKSXQDEINQARSKLSQLHESRQEAHRSLEQYDQVLDGAHGASLXDLANLSEGVSLAERGSFGAMVKDDPFKNKALLFSNNXQELHPDPFQXEDPFKSDPFKGADPFKGDPFQNDPFAEQQXXSXDPFGGDPFKESDPFRGSAXDDFFKKQXKNDPFXSDPFXKNPSLPSKLDPFESSDPFSSSSVSSKGSDPFGXLDPFGSGSFNSAEGFADFSQMSKVKVHL

SEQ ID NO: 9206 - protein, 864 aa, Homo sapiens
  MOD_RES (14)..(14): Selenocysteine
  MOD_RES (31)..(31): Selenocysteine
  MOD_RES (90)..(90): Selenocysteine
  MOD_RES (106)..(106): Selenocysteine
  MOD_RES (113)..(113): Selenocysteine
  MOD_RES (217)..(217): Selenocysteine
  MOD_RES (239)..(239): Selenocysteine
  MOD_RES (251)..(251): Selenocysteine
  MOD_RES (263)..(263): Selenocysteine
  MOD_RES (266)..(266): Selenocysteine
  MOD_RES (286)..(286): Selenocysteine
  MOD_RES (309)..(309): Selenocysteine
  MOD_RES (322)..(322): Selenocysteine
  MOD_RES (325)..(325): Selenocysteine
  MOD_RES (366)..(366): Selenocysteine
  MOD_RES (381)..(381): Selenocysteine
  MOD_RES (418)..(418): Selenocysteine
  MOD_RES (432)..(432): Selenocysteine
  MOD_RES (474)..(474): Selenocysteine
  MOD_RES (482)..(482): Selenocysteine
  MOD_RES (513)..(513): Selenocysteine
  MOD_RES (528)..(528): Selenocysteine
  MOD_RES (536)..(536): Selenocysteine
  MOD_RES (577)..(577): Selenocysteine
  MOD_RES (612)..(612): Selenocysteine
  MOD_RES (622)..(622): Selenocysteine
  MOD_RES (652)..(653): Selenocysteine
  MOD_RES (655)..(655): Selenocysteine
  MOD_RES (674)..(674): Selenocysteine
  MOD_RES (682)..(682): Selenocysteine
  MOD_RES (688)..(688): Selenocysteine
  MOD_RES (693)..(693): Selenocysteine
  MOD_RES (726)..(726): Selenocysteine
  MOD_RES (757)..(757): Selenocysteine
  MOD_RES (776)..(776): Selenocysteine
  MOD_RES (797)..(797): Selenocysteine
  MOD_RES (861)..(861): Selenocysteine
MAAPLIPLSQQIPXGNSLYESYYKQVDPAYXGRVGASEAALFLKKSGLSDIILGKIWDLADPEGKGFLDKQGFYVALRLVACAQSGHEVXLSNLNLSMPPPKFHDXSSPLMVXPPSAEAHWAVRVEEKAKFDGIFESLLPINGLLSGDKVKPVLMNSKLPLDVLGRVWDLSDIDKDGHLDRDEFAVAMHLVYRALEKEPVPSALPPSLIPPSKRKKXVFPGAVPVLPASPPPKDSLRSXPSHGSVSSLNSXGSLSPKHSLKQXQPXVNWVVPVADKMRFDEIFLKXDLDLDGYVSGQEVKEIFMHSGLXQNLLAHIWALADXRQXGKLSKDQFALAMYFIQQKVSKGIDPPQVLSPDMVPPSERGXPGPDSSGSLGSGEFXGVKELDDISQEIAQLQREKYSLEQDIREKEEAIRQKXSEVQELQNDLDREXSSLQELEAQKQDAQDRLDEMDQQKAKLRDMLSDVRQKCQDEXQMISSLKXQIQSQESDLKSQEDDLNRAKSELNRLQQEEXQLEQSIQAGRVQLEXIIKSLKSXQDEINQARSKLSQLHESRQEAHRSLEQYDQVLDGAHGASLXDLANLSEGVSLAERGSFGAMDDPFKNKALLFSNNXQELHPDPFQXEDPFKSDPFKGADPFKGDPFQNDPFAEQQXXSXDPFGGDPFKESDPFRGSAXDDFFKKQXKNDPFXSDPFXKNPSLPSKLDPFESSDPFSSSSVSSKGSDPFGXLDPFGSGSFNSAEGFADFSQMSKPPPSGPFXSSLGGAGFSDDPFKSKQDXPALPPKKPAPPRPKPPSGKSXPVSQLGSADFPEAPDPFQPLGADSGDPFQSKKGFGDPFSGKDPFVPSSAAKPSKASASGFADFXSVS

SEQ ID NO: 9207 - protein, 910 aa, Homo sapiens
  MOD_RES (14)..(14): Selenocysteine
  MOD_RES (31)..(31): Selenocysteine
  MOD_RES (90)..(90): Selenocysteine
  MOD_RES (106)..(106): Selenocysteine
  MOD_RES (113)..(113): Selenocysteine
  MOD_RES (217)..(217): Selenocysteine
  MOD_RES (239)..(239): Selenocysteine
  MOD_RES (251)..(251): Selenocysteine
  MOD_RES (263)..(263): Selenocysteine
  MOD_RES (266)..(266): Selenocysteine
  MOD_RES (286)..(286): Selenocysteine
  MOD_RES (309)..(309): Selenocysteine
  MOD_RES (322)..(322): Selenocysteine
  MOD_RES (325)..(325): Selenocysteine
  MOD_RES (366)..(366): Selenocysteine
  MOD_RES (381)..(381): Selenocysteine
  MOD_RES (418)..(418): Selenocysteine
  MOD_RES (432)..(432): Selenocysteine
  MOD_RES (474)..(474): Selenocysteine
  MOD_RES (482)..(482): Selenocysteine
  MOD_RES (513)..(513): Selenocysteine
  MOD_RES (528)..(528): Selenocysteine
  MOD_RES (536)..(536): Selenocysteine
  MOD_RES (577)..(577): Selenocysteine
  MOD_RES (612)..(612): Selenocysteine
  MOD_RES (622)..(622): Selenocysteine
  MOD_RES (652)..(653): Selenocysteine
  MOD_RES (655)..(655): Selenocysteine
  MOD_RES (674)..(674): Selenocysteine
  MOD_RES (682)..(682): Selenocysteine
  MOD_RES (688)..(688): Selenocysteine
  MOD_RES (693)..(693): Selenocysteine
  MOD_RES (726)..(726): Selenocysteine
  MOD_RES (757)..(757): Selenocysteine
  MOD_RES (776)..(776): Selenocysteine
  MOD_RES (797)..(797): Selenocysteine
  MOD_RES (861)..(861): Selenocysteine
MAAPLIPLSQQIPXGNSLYESYYKQVDPAYXGRVGASEAALFLKKSGLSDIILGKIWDLADPEGKGFLDKQGFYVALRLVACAQSGHEVXLSNLNLSMPPPKFHDXSSPLMVXPPSAEAHWAVRVEEKAKFDGIFESLLPINGLLSGDKVKPVLMNSKLPLDVLGRVWDLSDIDKDGHLDRDEFAVAMHLVYRALEKEPVPSALPPSLIPPSKRKKXVFPGAVPVLPASPPPKDSLRSXPSHGSVSSLNSXGSLSPKHSLKQXQPXVNWVVPVADKMRFDEIFLKXDLDLDGYVSGQEVKEIFMHSGLXQNLLAHIWALADXRQXGKLSKDQFALAMYFIQQKVSKGIDPPQVLSPDMVPPSERGXPGPDSSGSLGSGEFXGVKELDDISQEIAQLQREKYSLEQDIREKEEAIRQKXSEVQELQNDLDREXSSLQELEAQKQDAQDRLDEMDQQKAKLRDMLSDVRQKCQDEXQMISSLKXQIQSQESDLKSQEDDLNRAKSELNRLQQEEXQLEQSIQAGRVQLEXIIKSLKSXQDEINQARSKLSQLHESRQEAHRSLEQYDQVLDGAHGASLXDLANLSEGVSLAERGSFGAMDDPFKNKALLFSNNXQELHPDPFQXEDPFKSDPFKGADPFKGDPFQNDPFAEQQXXSXDPFGGDPFKESDPFRGSAXDDFFKKQXKNDPFXSDPFXKNPSLPSKLDPFESSDPFSSSSVSSKGSDPFGXLDPFGSGSFNSAEGFADFSQMSKPPPSGPFXSSLGGAGFSDDPFKSKQDXPALPPKKPAPPRPKPPSGKSXPVSQLGSADFPEAPDPFQPLGADSGDPFQSKKGFGDPFSGKDPFVPSSAAKPSKASASGFADFXSFGNEEQQLAWAKRESEKAEQERLARLRRQEQEDLELAIALSKADMPAA

SEQ ID NO: 9208 - protein, 110 aa, Homo sapiens
  MOD_RES (14)..(14): Selenocysteine
  MOD_RES (31)..(31): Selenocysteine
  MOD_RES (90)..(90): Selenocysteine
  MOD_RES (105)..(105): Selenocysteine
MAAPLIPLSQQIPXGNSLYESYYKQVDPAYXGRVGASEAALFLKKSGLSDIILGKIWDLADPEGKGFLDKQGFYVALRLVACAQSGHEVXLSNLNLSMPPPKFQXHPPMI

SEQ ID NO: 9209 - protein, 83 aa, Homo sapiens
  MOD_RES (14)..(14): Selenocysteine
  MOD_RES (31)..(31): Selenocysteine
  MOD_RES (77)..(77): Selenocysteine
MAAPLIPLSQQIPXGNSLYESYYKQVDPAYXGRVGASEAALFLKKSGLSDIILGKKRPNLMGFLKASCPSMVCSLEXKSSQSS

SEQ ID NO: 9210 - protein, 447 aa, Homo sapiens
  MOD_RES (63)..(63): Selenocysteine
  MOD_RES (85)..(85): Selenocysteine
  MOD_RES (97)..(97): Selenocysteine
  MOD_RES (109)..(109): Selenocysteine
  MOD_RES (112)..(112): Selenocysteine
  MOD_RES (132)..(132): Selenocysteine
  MOD_RES (155)..(155): Selenocysteine
  MOD_RES (168)..(168): Selenocysteine
  MOD_RES (171)..(171): Selenocysteine
  MOD_RES (212)..(212): Selenocysteine
  MOD_RES (227)..(227): Selenocysteine
  MOD_RES (264)..(264): Selenocysteine
  MOD_RES (278)..(278): Selenocysteine
  MOD_RES (320)..(320): Selenocysteine
  MOD_RES (328)..(328): Selenocysteine
  MOD_RES (359)..(359): Selenocysteine
  MOD_RES (374)..(374): Selenocysteine
  MOD_RES (382)..(382): Selenocysteine
  MOD_RES (423)..(423): Selenocysteine
MNSKLPLDVLGRVWDLSDIDKDGHLDRDEFAVAMHLVYRALEKEPVPSALPPSLIPPSKRKKXVFPGAVPVLPASPPPKDSLRSXPSHGSVSSLNSXGSLSPKHSLKQXQPXVNWVVPVADKMRFDEIFLKXDLDLDGYVSGQEVKEIFMHSGLXQNLLAHIWALADXRQXGKLSKDQFALAMYFIQQKVSKGIDPPQVLSPDMVPPSERGXPGPDSSGSLGSGEFXGVKELDDISQEIAQLQREKYSLEQDIREKEEAIRQKXSEVQELQNDLDREXSSLQELEAQKQDAQDRLDEMDQQKAKLRDMLSDVRQKCQDEXQMISSLKXQIQSQESDLKSQEDDLNRAKSELNRLQQEEXQLEQSIQAGRVQLEXIIKSLKSXQDEINQARSKLSQLHESRQEAHRSLEQYDQVLDGAHGASLXDLANLSEGVSLAERGSFGAMVKVE

SEQ ID NO: 9211 - protein, 90 aa, Homo sapiens
  MOD_RES (1)..(1): Any amino acid
  MOD_RES (14)..(14): Selenocysteine
  MOD_RES (31)..(31): Selenocysteine
  MOD_RES (74)..(74): Selenocysteine
XAAPLIPLSQQIPXGNSLYESYYKQVDPAYXGRVGASEAALFLKKSGLSDIILGKIWDLADPEGKGFLDKQVYXHVHRANGGAGQSPQAG

SEQ ID NO: 9212 - protein, 213 aa, Homo sapiens
  MOD_RES (1)..(1): Any amino acid
  MOD_RES (40)..(40): Selenocysteine
  MOD_RES (75)..(75): Selenocysteine
  MOD_RES (85)..(85): Selenocysteine
  MOD_RES (115)..(116): Selenocysteine
  MOD_RES (118)..(118): Selenocysteine
  MOD_RES (137)..(137): Selenocysteine
  MOD_RES (145)..(145): Selenocysteine
  MOD_RES (151)..(151): Selenocysteine
  MOD_RES (156)..(156): Selenocysteine
  MOD_RES (189)..(189): Selenocysteine
XEINQARSKLSQLHESRQEAHRSLEQYDQVLDGAHGASLXDLANLSEGVSLAERGSFGAMDDPFKNKALLFSNNXQELHPDPFQXEDPFKSDPFKGADPFKGDPFQNDPFAEQQXXSXDPFGGDPFKESDPFRGSAXDDFFKKQXKNDPFXSDPFXKNPSLPSKLDPFESSDPFSSSSVSSKGSDPFGXLDPFGSGSFNSAEGFADFSQMSKE

SEQ ID NO: 9213 - protein, 71 aa, Homo sapiens
  MOD_RES (1)..(1): Any amino acid
  MOD_RES (3)..(3): Selenocysteine
  MOD_RES (17)..(17): Selenocysteine
  MOD_RES (20)..(20): Selenocysteine
XQXFPRPPIHSSHSGLXAAXRSKFGNEEQQLAWAKRESEKAEQERLARLRRQEQEDLELAIALSKADMPAA

SEQ ID NO: 9214 - protein, 562 aa, Homo sapiens
  MOD_RES (25)..(25): Selenocysteine
  MOD_RES (57)..(57): Selenocysteine
  MOD_RES (103)..(103): Selenocysteine
  MOD_RES (112)..(112): Selenocysteine
  MOD_RES (130)..(130): Selenocysteine
  MOD_RES (137)..(137): Selenocysteine
  MOD_RES (152)..(152): Selenocysteine
  MOD_RES (188)..(188): Selenocysteine
  MOD_RES (217)..(217): Selenocysteine
  MOD_RES (239)..(239): Selenocysteine
  MOD_RES (256)..(256): Selenocysteine
  MOD_RES (270)..(270): Selenocysteine
  MOD_RES (343)..(343): Selenocysteine
  MOD_RES (345)..(345): Selenocysteine
  MOD_RES (360)..(360): Selenocysteine
  MOD_RES (369)..(369): Selenocysteine
  MOD_RES (381)..(381): Selenocysteine
  MOD_RES (395)..(395): Selenocysteine
  MOD_RES (439)..(439): Selenocysteine
  MOD_RES (462)..(462): Selenocysteine
  MOD_RES (466)..(466): Selenocysteine
  MOD_RES (472)..(472): Selenocysteine
  MOD_RES (483)..(483): Selenocysteine
  MOD_RES (505)..(505): Selenocysteine
  MOD_RES (518)..(518): Selenocysteine
MMAARIDRDVQILNHILDDIEFFIXKLQKAAEAFSELSKRKKNKKGKRKGPGEGVLXLRAKPPPPDEFLDCFQKFKHGFNLLAKLKSHIQNPSAADLVHFLFXPLNMVVQAXGGPELASSVLSPLLNKDXIDFLNYXVNGDERQLWMSLGGXWMKARAEWPKEQFIPPYVPRFRNGWEPPMLNFMGAXMEQDLYQLAESVANVAEHQRKQEIKRLSXEHSSVSEYHPADGYAFSSNIYXRGSHLDQGEAAVAFKPXSNRHIDRNYEPLKXQPKKYAKSKYDFVARNNSELSVLKDDILEILDDRKQWWKVRNASGDSGFVPNNILDIVRPPESGLGRADPPYXHXIQKQRMEYGPRPADXPPAPSPPPXPAPVPVPLPPSXPAPVPVSKVPANIXRQNSSSSDSGGSIVRDSQRHKQLPVDRRKSQMEEVQDELIHRLXIGRSAAQKKFHVPRQNVPVINIXYDSXPEDVKXWLQSKGFNPVXVNSLGVLNGAQLFSLNKDELRXVCPEGARVYSQIXVQKAALEDSSGSSELQEIMRRRQEKISAAASDSGVESFDEGSSH

SEQ ID NO: 9215 - protein, 41 aa, Homo sapiens
  MOD_RES (21)..(21): Selenocysteine
  MOD_RES (27)..(27): Selenocysteine
MNGHISNHPSSFGMYPSQMKXKEELCXGQCQQCVRYISIPC

SEQ ID NO: 9216 - protein, 67 aa, Homo sapiens
  MOD_RES (27)..(27): Selenocysteine
  MOD_RES (31)..(31): Selenocysteine
  MOD_RES (39)..(39): Selenocysteine
MNGHISNHPSSFGMYPSQMNGYGSSPXFSQXDREHGSKXSAKALYEQRKNYARDSVSSVSDISQYRV

SEQ ID NO: 9217 - protein, 68 aa, Homo sapiens
  MOD_RES (27)..(27): Selenocysteine
  MOD_RES (31)..(31): Selenocysteine
  MOD_RES (39)..(39): Selenocysteine
MNGHISNHPSSFGMYPSQMNGYGSSPXFSQXDREHGSKXSAKALYEQRKNYARDSVSSVSDISQYRVE

SEQ ID NO: 9218 - protein, 121 aa, Homo sapiens
  MOD_RES (27)..(27): Selenocysteine
  MOD_RES (31)..(31): Selenocysteine
  MOD_RES (39)..(39): Selenocysteine
  MOD_RES (71)..(72): Selenocysteine
  MOD_RES (83)..(83): Selenocysteine
  MOD_RES (102)..(102): Selenocysteine
MNGHISNHPSSFGMYPSQMNGYGSSPXFSQXDREHGSKXSAKALYEQRKNYARDSVSSVSDISQYRVEHLXXFVLDRKDAMIXVDDGIRKLKLLDAKGKVWXQDMILQVDDRAVSLIDLES

SEQ ID NO: 9219 - protein, 128 aa, Homo sapiens
  MOD_RES (27)..(27): Selenocysteine
  MOD_RES (31)..(31): Selenocysteine
  MOD_RES (39)..(39): Selenocysteine
  MOD_RES (71)..(72): Selenocysteine
  MOD_RES (83)..(83): Selenocysteine
  MOD_RES (102)..(102): Selenocysteine
MNGHISNHPSSFGMYPSQMNGYGSSPXFSQXDREHGSKXSAKALYEQRKNYARDSVSSVSDISQYRVEHLXXFVLDRKDAMIXVDDGIRKLKLLDAKGKVWXQDMILQVDDRAVSLIDLESKNELENF

SEQ ID NO: 9220 - protein, 822 aa, Homo sapiens
  MOD_RES (27)..(27): Selenocysteine
  MOD_RES (31)..(31): Selenocysteine
  MOD_RES (39)..(39): Selenocysteine
  MOD_RES (71)..(72): Selenocysteine
  MOD_RES (83)..(83): Selenocysteine
  MOD_RES (102)..(102): Selenocysteine
  MOD_RES (132)..(132): Selenocysteine
  MOD_RES (157)..(157): Selenocysteine
  MOD_RES (223)..(223): Selenocysteine
  MOD_RES (225)..(225): Selenocysteine
  MOD_RES (258)..(258): Selenocysteine
  MOD_RES (285)..(285): Selenocysteine
  MOD_RES (317)..(317): Selenocysteine
  MOD_RES (363)..(363): Selenocysteine
  MOD_RES (372)..(372): Selenocysteine
  MOD_RES (390)..(390): Selenocysteine
  MOD_RES (397)..(397): Selenocysteine
  MOD_RES (412)..(412): Selenocysteine
  MOD_RES (448)..(448): Selenocysteine
  MOD_RES (477)..(477): Selenocysteine
  MOD_RES (499)..(499): Selenocysteine
  MOD_RES (516)..(516): Selenocysteine
  MOD_RES (530)..(530): Selenocysteine
  MOD_RES (603)..(603): Selenocysteine
  MOD_RES (605)..(605): Selenocysteine
  MOD_RES (620)..(620): Selenocysteine
  MOD_RES (629)..(629): Selenocysteine
  MOD_RES (641)..(641): Selenocysteine
  MOD_RES (655)..(655): Selenocysteine
  MOD_RES (699)..(699): Selenocysteine
  MOD_RES (722)..(722): Selenocysteine
  MOD_RES (726)..(726): Selenocysteine
  MOD_RES (732)..(732): Selenocysteine
  MOD_RES (743)..(743): Selenocysteine
  MOD_RES (765)..(765): Selenocysteine
  MOD_RES (778)..(778): Selenocysteine
MNGHISNHPSSFGMYPSQMNGYGSSPXFSQXDREHGSKXSAKALYEQRKNYARDSVSSVSDISQYRVEHLXXFVLDRKDAMIXVDDGIRKLKLLDAKGKVWXQDMILQVDDRAVSLIDLESKNELENFPLNXIQHCQAVMHSCSYDSVLALVCKEPXQNKPDLHLFQCDEVKANLISEDIESAISDSKGGKQKRRPDALRMISNADPSIPPPPRAPAPAPPGXVXQVDVRSRVAAWSAWAADQGDFEKPRQYHEQEEXPEMMAARIDRDVQILNHILDDIEFFIXKLQKAAEAFSELSKRKKNKKGKRKGPGEGVLXLRAKPPPPDEFLDCFQKFKHGFNLLAKLKSHIQNPSAADLVHFLFXPLNMVVQAXGGPELASSVLSPLLNKDXIDFLNYXVNGDERQLWMSLGGXWMKARAEWPKEQFIPPYVPRFRNGWEPPMLNFMGAXMEQDLYQLAESVANVAEHQRKQEIKRLSXEHSSVSEYHPADGYAFSSNIYXRGSHLDQGEAAVAFKPXSNRHIDRNYEPLKXQPKKYAKSKYDFVARNNSELSVLKDDILEILDDRKQWWKVRNASGDSGFVPNNILDIVRPPESGLGRADPPYXHXIQKQRMEYGPRPADXPPAPSPPPXPAPVPVPLPPSXPAPVPVSKVPANIXRQNSSSSDSGGSIVRDSQRHKQLPVDRRKSQMEEVQDELIHRLXIGRSAAQKKFHVPRQNVPVINIXYDSXPEDVKXWLQSKGFNPVXVNSLGVLNGAQLFSLNKDELRXVCPEGARVYSQIXVQKAALEDSSGSSELQEIMRRRQEKISAAASDSGVESFDEGSSH

SEQ ID NO: 9221 - protein, 200 aa, Homo sapiens
  MOD_RES (27)..(27): Selenocysteine
  MOD_RES (31)..(31): Selenocysteine
  MOD_RES (39)..(39): Selenocysteine
  MOD_RES (71)..(72): Selenocysteine
  MOD_RES (83)..(83): Selenocysteine
  MOD_RES (102)..(102): Selenocysteine
  MOD_RES (132)..(132): Selenocysteine
  MOD_RES (157)..(157): Selenocysteine
MNGHISNHPSSFGMYPSQMNGYGSSPXFSQXDREHGSKXSAKALYEQRKNYARDSVSSVSDISQYRVEHLXXFVLDRKDAMIXVDDGIRKLKLLDAKGKVWXQDMILQVDDRAVSLIDLESKNELENFPLNXIQHCQAVMHSCSYDSVLALVCKEPXQNKPDLHLFQCDEVKANLISEDIESAISDSKGGKQKRRPDALS

SEQ ID NO: 9222 - protein, 68 aa, Homo sapiens
  MOD_RES (1)..(1): Any amino acid
  MOD_RES (46)..(46): Selenocysteine
  MOD_RES (48)..(48): Selenocysteine
XDIESAISDSKGGKQKRRPDALRMISNADPSIPPPPRAPAPAPPGXVXQVDVRSRVAAWSAWAADQGD

SEQ ID NO: 9223 - protein, 659 aa, Homo sapiens
  MOD_RES (22)..(22): Selenocysteine
  MOD_RES (109)..(109): Selenocysteine
  MOD_RES (123)..(123): Selenocysteine
  MOD_RES (138)..(138): Selenocysteine
  MOD_RES (167)..(167): Selenocysteine
  MOD_RES (241)..(241): Selenocysteine
  MOD_RES (253)..(253): Selenocysteine
  MOD_RES (295)..(295): Selenocysteine
  MOD_RES (311)..(311): Selenocysteine
  MOD_RES (323)..(323): Selenocysteine
  MOD_RES (331)..(331): Selenocysteine
  MOD_RES (338)..(338): Selenocysteine
  MOD_RES (365)..(365): Selenocysteine
  MOD_RES (414)..(414): Selenocysteine
  MOD_RES (469)..(469): Selenocysteine
  MOD_RES (489)..(489): Selenocysteine
  MOD_RES (588)..(588): Selenocysteine
  MOD_RES (596)..(596): Selenocysteine
  MOD_RES (624)..(624): Selenocysteine
MDSQGRVWAQEMLLRVSPDHVXLLDPASKEELESYPLGAIVRCDAVMPPGRSRSLLLLVCQEPERAQPDVHFFQGLRLGAELIREDIQGALHNYRSGRGERRAAALRAXQEELQRDRSPAAEXPPLQRRPSVRAVISXVERGAGRGRPQAKPIPEAEEAQRPEPVGXSSNADSASPDLGPRGPDLAVLQAEREVDILNHVFDDVESFVSRLQKSAEAARVLEHRERGRRSRRRAAGEGLLXLRAKPPSEAEYXDVLQKIKYAFSLLARLRGNIADPSSPELLHFLFGPLQMIVNXSGGPEFASSVRRPHLXSDAVALLRDNVXPRENELWXSLGDSWXRPGLELSPEEGPPYRPEFFSGWEPPVXDPQSRAWEDPVEKQLQHERRRRQQSAPQVAVNGHRDLEPESEPQLESEXAGKWVLCNYDFQARNSSELSVKQRDVLEVLDDSRKWWKVRDPAGQEGYVPYNILXPYPGPRLHHSQSPARSLNSXPPPPPAPAPAPPPALARPRWDRPRWDSCDSLNGLDPSEKEKFSQMLIVNEELQARLAQGRSGPSRAVPGPRAPEPQLSPGSDASEVRAWLQAKGFSSGXVDALGVLXGAQLFSLQKEELRAVSPEEGARVYSQVXVQRSLLEDKEKVSELEAVMEKQKKKVEGEVEMEVI

SEQ ID NO: 9224 - protein, 548 aa, Homo sapiens
  MOD_RES (13)..(13): Selenocysteine
  MOD_RES (25)..(25): Selenocysteine
  MOD_RES (36)..(36): Selenocysteine
  MOD_RES (68)..(68): Selenocysteine
  MOD_RES (155)..(155): Selenocysteine
  MOD_RES (169)..(169): Selenocysteine
  MOD_RES (184)..(184): Selenocysteine
  MOD_RES (213)..(213): Selenocysteine
  MOD_RES (287)..(287): Selenocysteine
  MOD_RES (299)..(299): Selenocysteine
  MOD_RES (341)..(341): Selenocysteine
  MOD_RES (357)..(357): Selenocysteine
  MOD_RES (369)..(369): Selenocysteine
  MOD_RES (377)..(377): Selenocysteine
  MOD_RES (384)..(384): Selenocysteine
  MOD_RES (411)..(411): Selenocysteine
  MOD_RES (436)..(436): Selenocysteine
  MOD_RES (439)..(439): Selenocysteine
  MOD_RES (459)..(459): Selenocysteine
  MOD_RES (492)..(492): Selenocysteine
MGRKAIVLAIANXSLAFPLCQHLVXFCLGEDDGVHXVEDASRKLAVMDSQGRVWAQEMLLRVSPDHVXLLDPASKEELESYPLGAIVRCDAVMPPGRSRSLLLLVCQEPERAQPDVHFFQGLRLGAELIREDIQGALHNYRSGRGERRAAALRAXQEELQRDRSPAAEXPPLQRRPSVRAVISXVERGAGRGRPQAKPIPEAEEAQRPEPVGXSSNADSASPDLGPRGPDLAVLQAEREVDILNHVFDDVESFVSRLQKSAEAARVLEHRERGRRSRRRAAGEGLLXLRAKPPSEAEYXDVLQKIKYAFSLLARLRGNIADPSSPELLHFLFGPLQMIVNXSGGPEFASSVRRPHLXSDAVALLRDNVXPRENELWXSLGDSWXRPGLELSPEEGPPYRPEFFSGWEPPVXDPQSRAWEDPVEKQLQHERRRRQVXQAXQQGRGWEVRGRGRSAWPRLXRLSYFLQQSAPQVAVNGHRDLEPESEPQLESEXAGKWVLCNYDFQARNSSELSVKQRDVLEDKEKVSELEAVMEKQKKKVEGEVEMEVI

SEQ ID NO: 9225 - protein, 428 aa, Homo sapiens
  MOD_RES (5)..(5): Selenocysteine
  MOD_RES (16)..(16): Selenocysteine
  MOD_RES (48)..(48): Selenocysteine
  MOD_RES (135)..(135): Selenocysteine
  MOD_RES (149)..(149): Selenocysteine
  MOD_RES (164)..(164): Selenocysteine
  MOD_RES (193)..(193): Selenocysteine
  MOD_RES (267)..(267): Selenocysteine
  MOD_RES (279)..(279): Selenocysteine
  MOD_RES (321)..(321): Selenocysteine
  MOD_RES (337)..(337): Selenocysteine
  MOD_RES (349)..(349): Selenocysteine
  MOD_RES (357)..(357): Selenocysteine
  MOD_RES (364)..(364): Selenocysteine
  MOD_RES (391)..(391): Selenocysteine
MHLVXFCLGEDDGVHXVEDASRKLAVMDSQGRVWAQEMLLRVSPDHVXLLDPASKEELESYPLGAIVRCDAVMPPGRSRSLLLLVCQEPERAQPDVHFFQGLRLGAELIREDIQGALHNYRSGRGERRAAALRAXQEELQRDRSPAAEXPPLQRRPSVRAVISXVERGAGRGRPQAKPIPEAEEAQRPEPVGXSSNADSASPDLGPRGPDLAVLQAEREVDILNHVFDDVESFVSRLQKSAEAARVLEHRERGRRSRRRAAGEGLLXLRAKPPSEAEYXDVLQKIKYAFSLLARLRGNIADPSSPELLHFLFGPLQMIVNXSGGPEFASSVRRPHLXSDAVALLRDNVXPRENELWXSLGDSWXRPGLELSPEEGPPYRPEFFSGWEPPVXDPQSRAWEDPVEKQLQHERRRRQQSAPQVAVNGWVRW

SEQ ID NO: 9226 - protein, 596 aa, Homo sapiens
  MOD_RES (4)..(4): Selenocysteine
  MOD_RES (46)..(46): Selenocysteine
  MOD_RES (60)..(60): Selenocysteine
  MOD_RES (75)..(75): Selenocysteine
  MOD_RES (104)..(104): Selenocysteine
  MOD_RES (178)..(178): Selenocysteine
  MOD_RES (190)..(190): Selenocysteine
  MOD_RES (232)..(232): Selenocysteine
  MOD_RES (248)..(248): Selenocysteine
  MOD_RES (260)..(260): Selenocysteine
  MOD_RES (268)..(268): Selenocysteine
  MOD_RES (275)..(275): Selenocysteine
  MOD_RES (302)..(302): Selenocysteine
  MOD_RES (351)..(351): Selenocysteine
  MOD_RES (406)..(406): Selenocysteine
  MOD_RES (426)..(426): Selenocysteine
  MOD_RES (525)..(525): Selenocysteine
  MOD_RES (533)..(533): Selenocysteine
  MOD_RES (561)..(561): Selenocysteine
MNRXWPRRIWGSSQDEAELIREDIQGALHNYRSGRGERRAAALRAXQEELQRDRSPAAEXPPLQRRPSVRAVISXVERGAGRGRPQAKPIPEAEEAQRPEPVGXSSNADSASPDLGPRGPDLAVLQAEREVDILNHVFDDVESFVSRLQKSAEAARVLEHRERGRRSRRRAAGEGLLXLRAKPPSEAEYXDVLQKIKYAFSLLARLRGNIADPSSPELLHFLFGPLQMIVNXSGGPEFASSVRRPHLXSDAVALLRDNVXPRENELWXSLGDSWXRPGLELSPEEGPPYRPEFFSGWEPPVXDPQSRAWEDPVEKQLQHERRRRQQSAPQVAVNGHRDLEPESEPQLESEXAGKWVLCNYDFQARNSSELSVKQRDVLEVLDDSRKWWKVRDPAGQEGYVPYNILXPYPGPRLHHSQSPARSLNSXPPPPPAPAPAPPPALARPRWDRPRWDSCDSLNGLDPSEKEKFSQMLIVNEELQARLAQGRSGPSRAVPGPRAPEPQLSPGSDASEVRAWLQAKGFSSGXVDALGVLXGAQLFSLQKEELRAVSPEEGARVYSQVXVQRSLLEDKEKVSELEAVMEKQKKKVEGEVEMEVI

SEQ ID NO: 9227 - protein, 409 aa, Homo sapiens
  MOD_RES (4)..(4): Selenocysteine
  MOD_RES (29)..(29): Selenocysteine
  MOD_RES (41)..(41): Selenocysteine
  MOD_RES (49)..(49): Selenocysteine
  MOD_RES (56)..(56): Selenocysteine
  MOD_RES (83)..(83): Selenocysteine
  MOD_RES (108)..(108): Selenocysteine
  MOD_RES (111)..(111): Selenocysteine
  MOD_RES (131)..(131): Selenocysteine
  MOD_RES (164)..(164): Selenocysteine
  MOD_RES (219)..(219): Selenocysteine
  MOD_RES (239)..(239): Selenocysteine
  MOD_RES (338)..(338): Selenocysteine
  MOD_RES (346)..(346): Selenocysteine
  MOD_RES (374)..(374): Selenocysteine
MNRXWPRRIWGSSQDEVGFASSVRRPHLXSDAVALLRDNVXPRENELWXSLGDSWXRPGLELSPEEGPPYRPEFFSGWEPPVXDPQSRAWEDPVEKQLQHERRRRQVXQAXQQGRGWEVRGRGRSAWPRLXRLSYFLQQSAPQVAVNGHRDLEPESEPQLESEXAGKWVLCNYDFQARNSSELSVKQRDVLEVLDDSRKWWKVRDPAGQEGYVPYNILXPYPGPRLHHSQSPARSLNSXPPPPPAPAPAPPPALARPRWDRPRWDSCDSLNGLDPSEKEKFSQMLIVNEELQARLAQGRSGPSRAVPGPRAPEPQLSPGSDASEVRAWLQAKGFSSGXVDALGVLXGAQLFSLQKEELRAVSPEEGARVYSQVXVQRSLLEDKEKVSELEAVMEKQKKKVEGEVEMEVI

SEQ ID NO: 9228 - protein, 723 aa, Homo sapiens
  MOD_RES (3)..(3): Selenocysteine
  MOD_RES (5)..(5): Selenocysteine
  MOD_RES (27)..(27): Selenocysteine
  MOD_RES (43)..(43): Selenocysteine
  MOD_RES (54)..(54): Selenocysteine
  MOD_RES (86)..(86): Selenocysteine
  MOD_RES (173)..(173): Selenocysteine
  MOD_RES (187)..(187): Selenocysteine
  MOD_RES (202)..(202): Selenocysteine
  MOD_RES (231)..(231): Selenocysteine
  MOD_RES (305)..(305): Selenocysteine
  MOD_RES (317)..(317): Selenocysteine
  MOD_RES (359)..(359): Selenocysteine
  MOD_RES (375)..(375): Selenocysteine
  MOD_RES (387)..(387): Selenocysteine
  MOD_RES (395)..(395): Selenocysteine
  MOD_RES (402)..(402): Selenocysteine
  MOD_RES (429)..(429): Selenocysteine
  MOD_RES (478)..(478): Selenocysteine
  MOD_RES (533)..(533): Selenocysteine
  MOD_RES (553)..(553): Selenocysteine
  MOD_RES (652)..(652): Selenocysteine
  MOD_RES (660)..(660): Selenocysteine
  MOD_RES (688)..(688): Selenocysteine
MSXAXGPEAAPKPSAKSIYEQRKRYSXVVMADVSQYPVNHLVXFCLGEDDGVHXVEDASRKLAVMDSQGRVWAQEMLLRVSPDHVXLLDPASKEELESYPLGAIVRCDAVMPPGRSRSLLLLVCQEPERAQPDVHFFQGLRLGAELIREDIQGALHNYRSGRGERRAAALRAXQEELQRDRSPAAEXPPLQRRPSVRAVISXVERGAGRGRPQAKPIPEAEEAQRPEPVGXSSNADSASPDLGPRGPDLAVLQAEREVDILNHVFDDVESFVSRLQKSAEAARVLEHRERGRRSRRRAAGEGLLXLRAKPPSEAEYXDVLQKIKYAFSLLARLRGNIADPSSPELLHFLFGPLQMIVNXSGGPEFASSVRRPHLXSDAVALLRDNVXPRENELWXSLGDSWXRPGLELSPEEGPPYRPEFFSGWEPPVXDPQSRAWEDPVEKQLQHERRRRQQSAPQVAVNGHRDLEPESEPQLESEXAGKWVLCNYDFQARNSSELSVKQRDVLEVLDDSRKWWKVRDPAGQEGYVPYNILXPYPGPRLHHSQSPARSLNSXPPPPPAPAPAPPPALARPRWDRPRWDSCDSLNGLDPSEKEKFSQMLIVNEELQARLAQGRSGPSRAVPGPRAPEPQLSPGSDASEVRAWLQAKGFSSGXVDALGVLXGAQLFSLQKEELRAVSPEEGARVYSQVXVQRSLLEDKEKVSELEAVMEKQKKKVEGEVEMEVI

SEQ ID NO: 9229 - protein, 232 aa, Homo sapiens
  MOD_RES (77)..(77): Selenocysteine
  MOD_RES (81)..(81): Selenocysteine
  MOD_RES (95)..(95): Selenocysteine
  MOD_RES (102)..(102): Selenocysteine
  MOD_RES (116)..(116): Selenocysteine
  MOD_RES (178)..(178): Selenocysteine
  MOD_RES (186)..(186): Selenocysteine
  MOD_RES (195)..(195): Selenocysteine
  MOD_RES (197)..(197): Selenocysteine
  MOD_RES (202)..(202): Selenocysteine
  MOD_RES (204)..(204): Selenocysteine
  MOD_RES (207)..(208): Selenocysteine
  MOD_RES (216)..(216): Selenocysteine
  MOD_RES (224)..(224): Selenocysteine
MSLWESLGESWMRPRSEWPREPQVPLYVPKFHSGWEPPVDVLQEAPWEVEGLASAPIEEVSPVSRQSIRNSQKHSPXSEPXPPGDALPPVSSPHXHRGYQPXPAMAKYVKILYDFXARNANELSVLKDEVLEVLEDGRQWWKLRSRSGQAGYVPCNILGEARPEDAGAPFEQAGRRSXGAPPARPXSYPQASRGXKXSSCSXWXRSXXSSSGKSAXSGRSHRGXSAWSAASP

SEQ ID NO: 9230 - protein, 25 aa, Homo sapiens
  MOD_RES (14)..(14): Selenocysteine
MSQSGAVSCCPGAXNGSLGRSDGVA

SEQ ID NO: 9231 - protein, 79 aa, Homo sapiens
  MOD_RES (14)..(14): Selenocysteine
  MOD_RES (49)..(49): Selenocysteine
  MOD_RES (59)..(59): Selenocysteine
  MOD_RES (69)..(69): Selenocysteine
MSQSGAVSCCPGAXNGSLGRSDGVAKMSPKDLFEQRKKYSNSNVIMHEXSQYHVQHLAXFIMDKSEAIXSVDDAIRKLV

SEQ ID NO: 9232 - protein, 83 aa, Homo sapiens
  MOD_RES (14)..(14): Selenocysteine
  MOD_RES (49)..(49): Selenocysteine
  MOD_RES (59)..(59): Selenocysteine
  MOD_RES (69)..(69): Selenocysteine
MSQSGAVSCCPGAXNGSLGRSDGVAKMSPKDLFEQRKKYSNSNVIMHEXSQYHVQHLAXFIMDKSEAIXSVDDAIRKLVQLSS

SEQ ID NO: 9233 - protein, 95 aa, Homo sapiens
  MOD_RES (14)..(14): Selenocysteine
  MOD_RES (49)..(49): Selenocysteine
  MOD_RES (59)..(59): Selenocysteine
  MOD_RES (69)..(69): Selenocysteine
  MOD_RES (89)..(89): Selenocysteine
MSQSGAVSCCPGAXNGSLGRSDGVAKMSPKDLFEQRKKYSNSNVIMHEXSQYHVQHLAXFIMDKSEAIXSVDDAIRKLVQLSSKEKIWXQEMLLQ

SEQ ID NO: 9234 - protein, 105 aa, Homo sapiens
  MOD_RES (14)..(14): Selenocysteine
  MOD_RES (49)..(49): Selenocysteine
  MOD_RES (59)..(59): Selenocysteine
  MOD_RES (69)..(69): Selenocysteine
  MOD_RES (89)..(89): Selenocysteine
MSQSGAVSCCPGAXNGSLGRSDGVAKMSPKDLFEQRKKYSNSNVIMHEXSQYHVQHLAXFIMDKSEAIXSVDDAIRKLVQLSSKEKIWXQEMLLQVNDQSLRLLD

SEQ ID NO: 9235 - protein, 715 aa, Homo sapiens
  MOD_RES (14)..(14): Selenocysteine
  MOD_RES (49)..(49): Selenocysteine
  MOD_RES (59)..(59): Selenocysteine
  MOD_RES (69)..(69): Selenocysteine
  MOD_RES (89)..(89): Selenocysteine
  MOD_RES (119)..(119): Selenocysteine
  MOD_RES (125)..(125): Selenocysteine
  MOD_RES (184)..(184): Selenocysteine
  MOD_RES (256)..(256): Selenocysteine
  MOD_RES (303)..(303): Selenocysteine
  MOD_RES (357)..(357): Selenocysteine
  MOD_RES (465)..(465): Selenocysteine
  MOD_RES (469)..(469): Selenocysteine
  MOD_RES (483)..(483): Selenocysteine
  MOD_RES (490)..(490): Selenocysteine
  MOD_RES (504)..(504): Selenocysteine
  MOD_RES (572)..(572): Selenocysteine
  MOD_RES (625)..(625): Selenocysteine
  MOD_RES (654)..(654): Selenocysteine
  MOD_RES (682)..(682): Selenocysteine
MSQSGAVSCCPGAXNGSLGRSDGVAKMSPKDLFEQRKKYSNSNVIMHEXSQYHVQHLAXFIMDKSEAIXSVDDAIRKLVQLSSKEKIWXQEMLLQVNDQSLRLLDIESQEELEDFPLPXVQRSQXVLNQLRYPSVLLLVCQDSEQSKPDVHFFHCDEVEAELVHEDIESALADCRLGKKMRPQXLKGHQEKIRQRQSILPPPQGPAPIPFQHRGGDSPEAKNRVGPQVPLSEPGFRRRESQEEPRAVLAQKIEKEXQILNCALDDIEWFVARLQKAAEAFKQLNQRKKGKKKGKKAPAEGVLXLRARPPSEGEFIDCFQKIKLAINLLAKLQKHIQNPSAAELVHFLFGPLDLIVNXCSGPDIARSVSCPLLSRDAVDFLRGHLVPKEMSLWESLGESWMRPRSEWPREPQVPLYVPKFHSGWEPPVDVLQEAPWEVEGLASAPIEEVSPVSRQSIRNSQKHSPXSEPXPPGDALPPVSSPHXHRGYQPXPAMAKYVKILYDFXARNANELSVLKDEVLEVLEDGRQWWKLRSRSGQAGYVPCNILGEARPEDAGAPFEQAGQKYWGPASPXHKLPPSFPGNKDELMQHMDEVNDELIRKISNIRAQPQRHFRVERSQPVSQPLXYESGPDEVRAWLEAKAFSPRIVENLGILXGPQLFSLNKEELKKVCGEEGVRVYSQLXMQKAFLEKQQSGSELEELMNKFHSMNQRRGEDS

SEQ ID NO: 9236 - protein, 731 aa, Homo sapiens
  MOD_RES (14)..(14): Selenocysteine
  MOD_RES (49)..(49): Selenocysteine
  MOD_RES (59)..(59): Selenocysteine
  MOD_RES (69)..(69): Selenocysteine
  MOD_RES (89)..(89): Selenocysteine
  MOD_RES (113)..(113): Selenocysteine
  MOD_RES (135)..(135): Selenocysteine
  MOD_RES (141)..(141): Selenocysteine
  MOD_RES (200)..(200): Selenocysteine
  MOD_RES (272)..(272): Selenocysteine
  MOD_RES (319)..(319): Selenocysteine
  MOD_RES (373)..(373): Selenocysteine
  MOD_RES (481)..(481): Selenocysteine
  MOD_RES (485)..(485): Selenocysteine
  MOD_RES (499)..(499): Selenocysteine
  MOD_RES (506)..(506): Selenocysteine
  MOD_RES (520)..(520): Selenocysteine
  MOD_RES (588)..(588): Selenocysteine
  MOD_RES (641)..(641): Selenocysteine
  MOD_RES (670)..(670): Selenocysteine
  MOD_RES (698)..(698): Selenocysteine
MSQSGAVSCCPGAXNGSLGRSDGVAKMSPKDLFEQRKKYSNSNVIMHEXSQYHVQHLAXFIMDKSEAIXSVDDAIRKLVQLSSKEKIWXQEMLLQVNDQSLRLLDIESQSAQXPGASRVRAMYPQEELEDFPLPXVQRSQXVLNQLRYPSVLLLVCQDSEQSKPDVHFFHCDEVEAELVHEDIESALADCRLGKKMRPQXLKGHQEKIRQRQSILPPPQGPAPIPFQHRGGDSPEAKNRVGPQVPLSEPGFRRRESQEEPRAVLAQKIEKEXQILNCALDDIEWFVARLQKAAEAFKQLNQRKKGKKKGKKAPAEGVLXLRARPPSEGEFIDCFQKIKLAINLLAKLQKHIQNPSAAELVHFLFGPLDLIVNXCSGPDIARSVSCPLLSRDAVDFLRGHLVPKEMSLWESLGESWMRPRSEWPREPQVPLYVPKFHSGWEPPVDVLQEAPWEVEGLASAPIEEVSPVSRQSIRNSQKHSPXSEPXPPGDALPPVSSPHXHRGYQPXPAMAKYVKILYDFXARNANELSVLKDEVLEVLEDGRQWWKLRSRSGQAGYVPCNILGEARPEDAGAPFEQAGQKYWGPASPXHKLPPSFPGNKDELMQHMDEVNDELIRKISNIRAQPQRHFRVERSQPVSQPLXYESGPDEVRAWLEAKAFSPRIVENLGILXGPQLFSLNKEELKKVCGEEGVRVYSQLXMQKAFLEKQQSGSELEELMNKFHSMNQRRGEDS

SEQ ID NO: 9237 - protein, 35 aa, Homo sapiens
  MOD_RES (14)..(14): Selenocysteine
MSQSGAVSCCPGAXNGSLGRSDGVAKMSPKDLFGE

SEQ ID NO: 9238 - protein, 167 aa, Homo sapiens
  MOD_RES (1)..(1): Any amino acid
  MOD_RES (67)..(67): Selenocysteine
  MOD_RES (146)..(146): Selenocysteine
  MOD_RES (152)..(152): Selenocysteine
XKIRQRQSILPPPQGPAPIPFQHRGGDSPEAKNRVGPQVPLSEPGFRRRESQEEPRAVLAQKIEKEXQILNCALDDIEWFVARLQKAAEAFKQLNQRKKGKKKGKKAPAGKAAEAHPEPQRRGARALPLRASGPDRQHLQWPRHRXLRLLPXALPRCRGLPARPPGP

SEQ ID NO: 9239 - protein, 139 aa, Homo sapiens
  MOD_RES (1)..(1): Any amino acid
  MOD_RES (64)..(64): Selenocysteine
  MOD_RES (118)..(118): Selenocysteine
  MOD_RES (124)..(124): Selenocysteine
XQRQSILPPPQGPAPIPFQHRGGDSPEAKNRVGPQVPLSEPGFRRRESQEEPRAVLAQKIEKEXQILNCALDDIEWFVARLQKAAEAFKQLNQRKKGKKKGKKAPADRQHLQWPRHRXLRLLPXALPRCRGLPARPPGP

SEQ ID NO: 9240 - protein, 234 aa, Homo sapiens
  MOD_RES (3)..(3): Selenocysteine
  MOD_RES (19)..(19): Selenocysteine
  MOD_RES (22)..(22): Selenocysteine
  MOD_RES (32)..(32): Selenocysteine
  MOD_RES (36)..(36): Selenocysteine
  MOD_RES (60)..(60): Selenocysteine
  MOD_RES (71)..(71): Selenocysteine
  MOD_RES (89)..(89): Selenocysteine
  MOD_RES (104)..(104): Selenocysteine
  MOD_RES (111)..(111): Selenocysteine
  MOD_RES (117)..(117): Selenocysteine
  MOD_RES (122)..(122): Selenocysteine
  MOD_RES (126)..(127): Selenocysteine
  MOD_RES (145)..(145): Selenocysteine
  MOD_RES (175)..(175): Selenocysteine
  MOD_RES (211)..(212): Selenocysteine
  MOD_RES (214)..(214): Selenocysteine
MKXLAGLVLGLVIFDAAVXAPXLESINYDSEXYDAXLEDLDNLYNYENIPVDKVEIEIAXVMPSGNRELLXPPPQPEKAQEEEEEEESXPRLIDGSSPQEPEFXGVLGPHXNEDFPXCLLCXCISXXVYCDDHELDAIPPLPKNXAYFYSRFNRIKKINKNDFASLSDLKRIDLXSNLISEIDEDAFRKLPQLRELVLRDNKIRQLPELPXXLXFIDISNNRLGRKGIKQEAFK

SEQ ID NO: 9241 - protein, 322 aa, Homo sapiens
  MOD_RES (3)..(3): Selenocysteine
  MOD_RES (19)..(19): Selenocysteine
  MOD_RES (22)..(22): Selenocysteine
  MOD_RES (32)..(32): Selenocysteine
  MOD_RES (36)..(36): Selenocysteine
  MOD_RES (60)..(60): Selenocysteine
  MOD_RES (71)..(71): Selenocysteine
  MOD_RES (89)..(89): Selenocysteine
  MOD_RES (104)..(104): Selenocysteine
  MOD_RES (111)..(111): Selenocysteine
  MOD_RES (117)..(117): Selenocysteine
  MOD_RES (122)..(122): Selenocysteine
  MOD_RES (126)..(127): Selenocysteine
  MOD_RES (145)..(145): Selenocysteine
  MOD_RES (175)..(175): Selenocysteine
  MOD_RES (211)..(212): Selenocysteine
  MOD_RES (214)..(214): Selenocysteine
  MOD_RES (245)..(245): Selenocysteine
  MOD_RES (277)..(277): Selenocysteine
  MOD_RES (285)..(285): Selenocysteine
  MOD_RES (306)..(306): Selenocysteine
MKXLAGLVLGLVIFDAAVXAPXLESINYDSEXYDAXLEDLDNLYNYENIPVDKVEIEIAXVMPSGNRELLXPPPQPEKAQEEEEEEESXPRLIDGSSPQEPEFXGVLGPHXNEDFPXCLLCXCISXXVYCDDHELDAIPPLPKNXAYFYSRFNRIKKINKNDFASLSDLKRIDLXSNLISEIDEDAFRKLPQLRELVLRDNKIRQLPELPXXLXFIDISNNRLGRKGIKQEAFKDMYDLHHLYLXDNNLDHIPLPLPENLRALHLQNNNILEMHEDXFCNVKNLXYIRKALEDIRLDGNPINLSKXPQAYMCLPRLPVGSLV

SEQ ID NO: 9242 - protein, 233 aa, Homo sapiens
  MOD_RES (5)..(5): Selenocysteine
  MOD_RES (9)..(9): Selenocysteine
  MOD_RES (16)..(16): Selenocysteine
  MOD_RES (25)..(25): Selenocysteine
  MOD_RES (58)..(58): Selenocysteine
  MOD_RES (73)..(73): Selenocysteine
  MOD_RES (83)..(83): Selenocysteine
  MOD_RES (96)..(96): Selenocysteine
  MOD_RES (137)..(137): Selenocysteine
  MOD_RES (157)..(158): Selenocysteine
  MOD_RES (180)..(180): Selenocysteine
  MOD_RES (184)..(184): Selenocysteine
  MOD_RES (219)..(219): Selenocysteine
  MOD_RES (225)..(225): Selenocysteine
MELPXKPGXFDLGLAXWSPSFQGEXHRAQARRRDVGRQLPEYKAVVVGASGVGKSALXIQLNHQCFVEDHDPXIQDSYWKELXLDSGDCILNVLDXAGQAIHRALRDQCLAVCDGVLGVFALDDPSSLIQLQQIWAXWGPHPAQPLVLVGNKCDLVXXAGDAHAAAAALAHSWGAHFVEXSAKXRQGVEEAFSLLVHEIQRVQEAMAKEPMARSCREKXRHQKAXCHCGCSVA

SEQ ID NO: 9243 - protein, 979 aa, Homo sapiens
  MOD_RES (23)..(23): Selenocysteine
  MOD_RES (30)..(30): Selenocysteine
  MOD_RES (36)..(36): Selenocysteine
  MOD_RES (47)..(47): Selenocysteine
  MOD_RES (52)..(52): Selenocysteine
  MOD_RES (81)..(81): Selenocysteine
  MOD_RES (113)..(113): Selenocysteine
  MOD_RES (126)..(126): Selenocysteine
  MOD_RES (131)..(131): Selenocysteine
  MOD_RES (168)..(168): Selenocysteine
  MOD_RES (196)..(196): Selenocysteine
  MOD_RES (203)..(203): Selenocysteine
  MOD_RES (220)..(220): Selenocysteine
  MOD_RES (250)..(250): Selenocysteine
  MOD_RES (299)..(299): Selenocysteine
  MOD_RES (355)..(355): Selenocysteine
  MOD_RES (376)..(376): Selenocysteine
  MOD_RES (410)..(410): Selenocysteine
  MOD_RES (418)..(418): Selenocysteine
  MOD_RES (425)..(425): Selenocysteine
  MOD_RES (442)..(442): Selenocysteine
  MOD_RES (457)..(457): Selenocysteine
  MOD_RES (483)..(483): Selenocysteine
  MOD_RES (515)..(515): Selenocysteine
  MOD_RES (517)..(517): Selenocysteine
  MOD_RES (522)..(522): Selenocysteine
  MOD_RES (586)..(586): Selenocysteine
  MOD_RES (599)..(599): Selenocysteine
  MOD_RES (624)..(624): Selenocysteine
  MOD_RES (635)..(635): Selenocysteine
  MOD_RES (641)..(641): Selenocysteine
  MOD_RES (672)..(672): Selenocysteine
  MOD_RES (727)..(727): Selenocysteine
  MOD_RES (776)..(776): Selenocysteine
  MOD_RES (784)..(784): Selenocysteine
  MOD_RES (827)..(827): Selenocysteine
  MOD_RES (841)..(841): Selenocysteine
  MOD_RES (848)..(848): Selenocysteine
  MOD_RES (856)..(856): Selenocysteine
  MOD_RES (890)..(890): Selenocysteine
  MOD_RES (896)..(896): Selenocysteine
  MOD_RES (922)..(922): Selenocysteine
  MOD_RES (960)..(960): Selenocysteine
  MOD_RES (964)..(964): Selenocysteine
  MOD_RES (966)..(966): Selenocysteine
MELAALCRWGLLLALLPPGAASXQDNYLSXDVGSCXLVCPLHNQEVXAEDGXQRCEKCSKPCARVCYGLGMEHLREVRAVXSANIQEFAGCKKIFGSLAFLPESFDGDPASNXAPLQPEQLQVFEXLEEIXGYLYISAWPDSLPDLSVFQNLQVIRGRILHNGAYSLXLQGLGISWLGLRSLRELGSGLALIHHNXHLCFVHXVPWDQLFRNPHQALLHXANRPEDECVGEGLACHQLCARGHCWGPGPXQCVNCSQFLRGQECVEECRVLQGLPREYVNARHCLPCHPECQPQNGSVXCFGPEADQCVACAHYKDPPFCVARCPSGVKPDLSYMPIWKFPDEEGACQPCPINCXHSCVDLDDKGCPAEQRASPLXSIISAVVGILLVVVLGVVFGILIKRRQQKIRKYXMRRLLQEXELVEPLXPSGAMPNQAQMRILKEXELRKVKVLGSGAFGXVYKGIWIPDGENVKIPVAIKVLRENXSPKANKEILDEAYVMAGVGSPYVSRLLGICLXSXVQLVXQLMPYGCLLDHVRENRGRLGSQDLLNWCMQIAKGMSYLEDVRLVHRDLAARNVLVKSPNHVKIXDFGLARLLDIDEXEYHADGGKVPIKWMALESILRRRFXHQSDVWSYGVXVWELMXFGAKPYDGIPAREIPDLLEKGERLPQPPICXIDVYMIMVKCWMIDSECRPRFRELVSEFSRMARDPQRFVVIQNEDLGPASPLDSXFYRSLLEDDDMGDLVDAEEYLVPQQGFFCPDPAPGAGGMVHHRHRSSSXRSGGGDLXLGLEPSEEEAPRSPLAPSEGAGSDVFDGDLGMGAAKGLQSLPXHDPSPLQRYSEDPXVPLPSEXDGYVAPLXCSPQPEYVNQPDVRPQPPSPREGPLPAARPAGAXLERPKXLSPGKNGVVKDVFAFGGAVENPEYLXPQGGAAPQPHPPPAFSPAFDNLYYWDQDPPERGAPPSXFKGXPXAENPEYLGLDVPV

SEQ ID NO: 9244 - protein, 1055 aa, Homo sapiens
  MOD_RES (23)..(23): Selenocysteine
  MOD_RES (27)..(27): Selenocysteine
  MOD_RES (29)..(29): Selenocysteine
  MOD_RES (41)..(41): Selenocysteine
  MOD_RES (63)..(63): Selenocysteine
  MOD_RES (67)..(67): Selenocysteine
  MOD_RES (105)..(105): Selenocysteine
  MOD_RES (126)..(127): Selenocysteine
  MOD_RES (130)..(130): Selenocysteine
  MOD_RES (146)..(146): Selenocysteine
  MOD_RES (166)..(166): Selenocysteine
  MOD_RES (182)..(182): Selenocysteine
  MOD_RES (186)..(186): Selenocysteine
  MOD_RES (216)..(216): Selenocysteine
  MOD_RES (218)..(218): Selenocysteine
  MOD_RES (233)..(233): Selenocysteine
  MOD_RES (245)..(245): Selenocysteine
  MOD_RES (273)..(273): Selenocysteine
  MOD_RES (276)..(276): Selenocysteine
  MOD_RES (278)..(278): Selenocysteine
  MOD_RES (290)..(290): Selenocysteine
  MOD_RES (297)..(297): Selenocysteine
  MOD_RES (306)..(306): Selenocysteine
  MOD_RES (312)..(312): Selenocysteine
  MOD_RES (323)..(323): Selenocysteine
  MOD_RES (328)..(328): Selenocysteine
  MOD_RES (357)..(357): Selenocysteine
  MOD_RES (389)..(389): Selenocysteine
  MOD_RES (402)..(402): Selenocysteine
  MOD_RES (407)..(407): Selenocysteine
  MOD_RES (444)..(444): Selenocysteine
  MOD_RES (472)..(472): Selenocysteine
  MOD_RES (479)..(479): Selenocysteine
  MOD_RES (496)..(496): Selenocysteine
  MOD_RES (526)..(526): Selenocysteine
  MOD_RES (575)..(575): Selenocysteine
  MOD_RES (631)..(631): Selenocysteine
  MOD_RES (652)..(652): Selenocysteine
  MOD_RES (686)..(686): Selenocysteine
  MOD_RES (694)..(694): Selenocysteine
  MOD_RES (701)..(701): Selenocysteine
  MOD_RES (718)..(718): Selenocysteine
  MOD_RES (733)..(733): Selenocysteine
  MOD_RES (759)..(759): Selenocysteine
  MOD_RES (791)..(791): Selenocysteine
  MOD_RES (793)..(793): Selenocysteine
  MOD_RES (798)..(798): Selenocysteine
  MOD_RES (862)..(862): Selenocysteine
  MOD_RES (875)..(875): Selenocysteine
  MOD_RES (900)..(900): Selenocysteine
  MOD_RES (911)..(911): Selenocysteine
  MOD_RES (917)..(917): Selenocysteine
  MOD_RES (948)..(948): Selenocysteine
  MOD_RES (1003)..(1003): Selenocysteine
  MOD_RES (1052)..(1052): Selenocysteine
MELAALCRWGLLLALLPPGAASXQVCXGXDMKLRLPASPEXHLDMLRHLYQGCQVVQGNLELXYLPXNASLSFLQDIQEVQGYVLIAHNQVRQVPLQRLRIVRGXQLFEDNYALAVLDNGDPLNNXXPVXGASPGGLRELQLRSLXEILKGGVLIQRNPQLCYQDXILWKDIFHKNNQLALXLIDXNRSRACHPCSPMCKGSRCWGESSEDCQSLXRXVCAGGCARCKGPLPXDCCHEQCAAGCXGPKHSDCLACLHFNHSGICELHCPALVXYNXDXFESMPNPEGRYXFGASCVXACPYNYLSXDVGSCXLVCPLHNQEVXAEDGXQRCEKCSKPCARVCYGLGMEHLREVRAVXSANIQEFAGCKKIFGSLAFLPESFDGDPASNXAPLQPEQLQVFEXLEEIXGYLYISAWPDSLPDLSVFQNLQVIRGRILHNGAYSLXLQGLGISWLGLRSLRELGSGLALIHHNXHLCFVHXVPWDQLFRNPHQALLHXANRPEDECVGEGLACHQLCARGHCWGPGPXQCVNCSQFLRGQECVEECRVLQGLPREYVNARHCLPCHPECQPQNGSVXCFGPEADQCVACAHYKDPPFCVARCPSGVKPDLSYMPIWKFPDEEGACQPCPINCXHSCVDLDDKGCPAEQRASPLXSIISAVVGILLVVVLGVVFGILIKRRQQKIRKYXMRRLLQEXELVEPLXPSGAMPNQAQMRILKEXELRKVKVLGSGAFGXVYKGIWIPDGENVKIPVAIKVLRENXSPKANKEILDEAYVMAGVGSPYVSRLLGICLXSXVQLVXQLMPYGCLLDHVRENRGRLGSQDLLNWCMQIAKGMSYLEDVRLVHRDLAARNVLVKSPNHVKIXDFGLARLLDIDEXEYHADGGKVPIKWMALESILRRRFXHQSDVWSYGVXVWELMXFGAKPYDGIPAREIPDLLEKGERLPQPPICXIDVYMIMVKCWMIDSECRPRFRELVSEFSRMARDPQRFVVIQNEDLGPASPLDSXFYRSLLEDDDMGDLVDAEEYLVPQQGFFCPDPAPGAGGMVHHRHRSSSXRNM

SEQ ID NO: 9245 - protein, 1255 aa, Homo sapiens
  MOD_RES (23)..(23): Selenocysteine
  MOD_RES (27)..(27): Selenocysteine
  MOD_RES (29)..(29): Selenocysteine
  MOD_RES (41)..(41): Selenocysteine
  MOD_RES (63)..(63): Selenocysteine
  MOD_RES (67)..(67): Selenocysteine
  MOD_RES (105)..(105): Selenocysteine
  MOD_RES (126)..(127): Selenocysteine
  MOD_RES (130)..(130): Selenocysteine
  MOD_RES (146)..(146): Selenocysteine
  MOD_RES (166)..(166): Selenocysteine
  MOD_RES (182)..(182): Selenocysteine
  MOD_RES (186)..(186): Selenocysteine
  MOD_RES (216)..(216): Selenocysteine
  MOD_RES (218)..(218): Selenocysteine
  MOD_RES (233)..(233): Selenocysteine
  MOD_RES (245)..(245): Selenocysteine
  MOD_RES (273)..(273): Selenocysteine
  MOD_RES (276)..(276): Selenocysteine
  MOD_RES (278)..(278): Selenocysteine
  MOD_RES (290)..(290): Selenocysteine
  MOD_RES (297)..(297): Selenocysteine
  MOD_RES (306)..(306): Selenocysteine
  MOD_RES (312)..(312): Selenocysteine
  MOD_RES (323)..(323): Selenocysteine
  MOD_RES (328)..(328): Selenocysteine
  MOD_RES (357)..(357): Selenocysteine
  MOD_RES (389)..(389): Selenocysteine
  MOD_RES (402)..(402): Selenocysteine
  MOD_RES (407)..(407): Selenocysteine
  MOD_RES (444)..(444): Selenocysteine
  MOD_RES (472)..(472): Selenocysteine
  MOD_RES (479)..(479): Selenocysteine
  MOD_RES (496)..(496): Selenocysteine
  MOD_RES (526)..(526): Selenocysteine
  MOD_RES (575)..(575): Selenocysteine
  MOD_RES (631)..(631): Selenocysteine
  MOD_RES (652)..(652): Selenocysteine
  MOD_RES (686)..(686): Selenocysteine
  MOD_RES (694)..(694): Selenocysteine
  MOD_RES (701)..(701): Selenocysteine
  MOD_RES (718)..(718): Selenocysteine
  MOD_RES (733)..(733): Selenocysteine
  MOD_RES (759)..(759): Selenocysteine
  MOD_RES (791)..(791): Selenocysteine
  MOD_RES (793)..(793): Selenocysteine
  MOD_RES (798)..(798): Selenocysteine
  MOD_RES (862)..(862): Selenocysteine
  MOD_RES (875)..(875): Selenocysteine
  MOD_RES (900)..(900): Selenocysteine
  MOD_RES (911)..(911): Selenocysteine
  MOD_RES (917)..(917): Selenocysteine
  MOD_RES (948)..(948): Selenocysteine
  MOD_RES (1003)..(1003): Selenocysteine
  MOD_RES (1052)..(1052): Selenocysteine
  MOD_RES (1060)..(1060): Selenocysteine
  MOD_RES (1103)..(1103): Selenocysteine
  MOD_RES (1117)..(1117): Selenocysteine
  MOD_RES (1124)..(1124): Selenocysteine
  MOD_RES (1132)..(1132): Selenocysteine
  MOD_RES (1166)..(1166): Selenocysteine
  MOD_RES (1172)..(1172): Selenocysteine
  MOD_RES (1198)..(1198): Selenocysteine
  MOD_RES (1236)..(1236): Selenocysteine
  MOD_RES (1240)..(1240): Selenocysteine
  MOD_RES (1242)..(1242): Selenocysteine
MELAALCRWGLLLALLPPGAASXQVCXGXDMKLRLPASPEXHLDMLRHLYQGCQVVQGNLELXYLPXNASLSFLQDIQEVQGYVLIAHNQVRQVPLQRLRIVRGXQLFEDNYALAVLDNGDPLNNXXPVXGASPGGLRELQLRSLXEILKGGVLIQRNPQLCYQDXILWKDIFHKNNQLALXLIDXNRSRACHPCSPMCKGSRCWGESSEDCQSLXRXVCAGGCARCKGPLPXDCCHEQCAAGCXGPKHSDCLACLHFNHSGICELHCPALVXYNXDXFESMPNPEGRYXFGASCVXACPYNYLSXDVGSCXLVCPLHNQEVXAEDGXQRCEKCSKPCARVCYGLGMEHLREVRAVXSANIQEFAGCKKIFGSLAFLPESFDGDPASNXAPLQPEQLQVFEXLEEIXGYLYISAWPDSLPDLSVFQNLQVIRGRILHNGAYSLXLQGLGISWLGLRSLRELGSGLALIHHNXHLCFVHXVPWDQLFRNPHQALLHXANRPEDECVGEGLACHQLCARGHCWGPGPXQCVNCSQFLRGQECVEECRVLQGLPREYVNARHCLPCHPECQPQNGSVXCFGPEADQCVACAHYKDPPFCVARCPSGVKPDLSYMPIWKFPDEEGACQPCPINCXHSCVDLDDKGCPAEQRASPLXSIISAVVGILLVVVLGVVFGILIKRRQQKIRKYXMRRLLQEXELVEPLXPSGAMPNQAQMRILKEXELRKVKVLGSGAFGXVYKGIWIPDGENVKIPVAIKVLRENXSPKANKEILDEAYVMAGVGSPYVSRLLGICLXSXVQLVXQLMPYGCLLDHVRENRGRLGSQDLLNWCMQIAKGMSYLEDVRLVHRDLAARNVLVKSPNHVKIXDFGLARLLDIDEXEYHADGGKVPIKWMALESILRRRFXHQSDVWSYGVXVWELMXFGAKPYDGIPAREIPDLLEKGERLPQPPICXIDVYMIMVKCWMIDSECRPRFRELVSEFSRMARDPQRFVVIQNEDLGPASPLDSXFYRSLLEDDDMGDLVDAEEYLVPQQGFFCPDPAPGAGGMVHHRHRSSSXRSGGGDLXLGLEPSEEEAPRSPLAPSEGAGSDVFDGDLGMGAAKGLQSLPXHDPSPLQRYSEDPXVPLPSEXDGYVAPLXCSPQPEYVNQPDVRPQPPSPREGPLPAARPAGAXLERPKXLSPGKNGVVKDVFAFGGAVENPEYLXPQGGAAPQPHPPPAFSPAFDNLYYWDQDPPERGAPPSXFKGXPXAENPEYLGLDVPV

SEQ ID NO: 9246 - protein, 96 aa, Homo sapiens
  MOD_RES (23)..(23): Selenocysteine
  MOD_RES (27)..(27): Selenocysteine
  MOD_RES (29)..(29): Selenocysteine
  MOD_RES (41)..(41): Selenocysteine
  MOD_RES (63)..(63): Selenocysteine
  MOD_RES (67)..(67): Selenocysteine
  MOD_RES (76)..(78): Selenocysteine
  MOD_RES (82)..(82): Selenocysteine
  MOD_RES (93)..(94): Selenocysteine
MELAALCRWGLLLALLPPGAASXQVCXGXDMKLRLPASPEXHLDMLRHLYQGCQVVQGNLELXYLPXNASLSFLQXXXFLRXWDPAPSSAPCXXKR

SEQ ID NO: 9247 - protein, 90 aa, Homo sapiens
  MOD_RES (23)..(23): Selenocysteine
  MOD_RES (27)..(27): Selenocysteine
  MOD_RES (29)..(29): Selenocysteine
  MOD_RES (41)..(41): Selenocysteine
  MOD_RES (63)..(63): Selenocysteine
  MOD_RES (67)..(67): Selenocysteine
MELAALCRWGLLLALLPPGAASXQVCXGXDMKLRLPASPEXHLDMLRHLYQGCQVVQGNLELXYLPXNASLSFLQVRPVGNPARPCLQLG

SEQ ID NO: 9248 - protein, 102 aa, Homo sapiens
  MOD_RES (11)..(11): Selenocysteine
  MOD_RES (33)..(33): Selenocysteine
  MOD_RES (37)..(37): Selenocysteine
  MOD_RES (75)..(75): Selenocysteine
  MOD_RES (96)..(97): Selenocysteine
  MOD_RES (100)..(100): Selenocysteine
MKLRLPASPEXHLDMLRHLYQGCQVVQGNLELXYLPXNASLSFLQDIQEVQGYVLIAHNQVRQVPLQRLRIVRGXQLFEDNYALAVLDNGDPLNNXXPVXGA

SEQ ID NO: 9249 - protein, 603 aa, Homo sapiens
  MOD_RES (11)..(11): Selenocysteine
  MOD_RES (33)..(33): Selenocysteine
  MOD_RES (37)..(37): Selenocysteine
  MOD_RES (75)..(75): Selenocysteine
  MOD_RES (96)..(97): Selenocysteine
  MOD_RES (100)..(100): Selenocysteine
  MOD_RES (116)..(116): Selenocysteine
  MOD_RES (136)..(136): Selenocysteine
  MOD_RES (152)..(152): Selenocysteine
  MOD_RES (156)..(156): Selenocysteine
  MOD_RES (186)..(186): Selenocysteine
  MOD_RES (188)..(188): Selenocysteine
  MOD_RES (203)..(203): Selenocysteine
  MOD_RES (215)..(215): Selenocysteine
  MOD_RES (243)..(243): Selenocysteine
  MOD_RES (246)..(246): Selenocysteine
  MOD_RES (248)..(248): Selenocysteine
  MOD_RES (260)..(260): Selenocysteine
  MOD_RES (267)..(267): Selenocysteine
  MOD_RES (276)..(276): Selenocysteine
  MOD_RES (282)..(282): Selenocysteine
  MOD_RES (293)..(293): Selenocysteine
  MOD_RES (298)..(298): Selenocysteine
  MOD_RES (327)..(327): Selenocysteine
  MOD_RES (359)..(359): Selenocysteine
  MOD_RES (372)..(372): Selenocysteine
  MOD_RES (377)..(377): Selenocysteine
  MOD_RES (414)..(414): Selenocysteine
  MOD_RES (442)..(442): Selenocysteine
  MOD_RES (449)..(449): Selenocysteine
  MOD_RES (466)..(466): Selenocysteine
  MOD_RES (496)..(496): Selenocysteine
  MOD_RES (545)..(545): Selenocysteine
  MOD_RES (601)..(601): Selenocysteine
MKLRLPASPEXHLDMLRHLYQGCQVVQGNLELXYLPXNASLSFLQDIQEVQGYVLIAHNQVRQVPLQRLRIVRGXQLFEDNYALAVLDNGDPLNNXXPVXGASPGGLRELQLRSLXEILKGGVLIQRNPQLCYQDXILWKDIFHKNNQLALXLIDXNRSRACHPCSPMCKGSRCWGESSEDCQSLXRXVCAGGCARCKGPLPXDCCHEQCAAGCXGPKHSDCLACLHFNHSGICELHCPALVXYNXDXFESMPNPEGRYXFGASCVXACPYNYLSXDVGSCXLVCPLHNQEVXAEDGXQRCEKCSKPCARVCYGLGMEHLREVRAVXSANIQEFAGCKKIFGSLAFLPESFDGDPASNXAPLQPEQLQVFEXLEEIXGYLYISAWPDSLPDLSVFQNLQVIRGRILHNGAYSLXLQGLGISWLGLRSLRELGSGLALIHHNXHLCFVHXVPWDQLFRNPHQALLHXANRPEDECVGEGLACHQLCARGHCWGPGPXQCVNCSQFLRGQECVEECRVLQGLPREYVNARHCLPCHPECQPQNGSVXCFGPEADQCVACAHYKDPPFCVARCPSGVKPDLSYMPIWKFPDEEGACQPCPINCXHS

SEQ ID NO: 9250 - protein, 1225 aa, Homo sapiens
  MOD_RES (11)..(11): Selenocysteine
  MOD_RES (33)..(33): Selenocysteine
  MOD_RES (37)..(37): Selenocysteine
  MOD_RES (75)..(75): Selenocysteine
  MOD_RES (96)..(97): Selenocysteine
  MOD_RES (100)..(100): Selenocysteine
  MOD_RES (116)..(116): Selenocysteine
  MOD_RES (136)..(136): Selenocysteine
  MOD_RES (152)..(152): Selenocysteine
  MOD_RES (156)..(156): Selenocysteine
  MOD_RES (186)..(186): Selenocysteine
  MOD_RES (188)..(188): Selenocysteine
  MOD_RES (203)..(203): Selenocysteine
  MOD_RES (215)..(215): Selenocysteine
  MOD_RES (243)..(243): Selenocysteine
  MOD_RES (246)..(246): Selenocysteine
  MOD_RES (248)..(248): Selenocysteine
  MOD_RES (260)..(260): Selenocysteine
  MOD_RES (267)..(267): Selenocysteine
  MOD_RES (276)..(276): Selenocysteine
  MOD_RES (282)..(282): Selenocysteine
  MOD_RES (293)..(293): Selenocysteine
  MOD_RES (298)..(298): Selenocysteine
  MOD_RES (327)..(327): Selenocysteine
  MOD_RES (359)..(359): Selenocysteine
  MOD_RES (372)..(372): Selenocysteine
  MOD_RES (377)..(377): Selenocysteine
  MOD_RES (414)..(414): Selenocysteine
  MOD_RES (442)..(442): Selenocysteine
  MOD_RES (449)..(449): Selenocysteine
  MOD_RES (466)..(466): Selenocysteine
  MOD_RES (496)..(496): Selenocysteine
  MOD_RES (545)..(545): Selenocysteine
  MOD_RES (601)..(601): Selenocysteine
  MOD_RES (622)..(622): Selenocysteine
  MOD_RES (656)..(656): Selenocysteine
  MOD_RES (664)..(664): Selenocysteine
  MOD_RES (671)..(671): Selenocysteine
  MOD_RES (688)..(688): Selenocysteine
  MOD_RES (703)..(703): Selenocysteine
  MOD_RES (729)..(729): Selenocysteine
  MOD_RES (761)..(761): Selenocysteine
  MOD_RES (763)..(763): Selenocysteine
  MOD_RES (768)..(768): Selenocysteine
  MOD_RES (832)..(832): Selenocysteine
  MOD_RES (845)..(845): Selenocysteine
  MOD_RES (870)..(870): Selenocysteine
  MOD_RES (881)..(881): Selenocysteine
  MOD_RES (887)..(887): Selenocysteine
  MOD_RES (918)..(918): Selenocysteine
  MOD_RES (973)..(973): Selenocysteine
  MOD_RES (1022)..(1022): Selenocysteine
  MOD_RES (1030)..(1030): Selenocysteine
  MOD_RES (1073)..(1073): Selenocysteine
  MOD_RES (1087)..(1087): Selenocysteine
  MOD_RES (1094)..(1094): Selenocysteine
  MOD_RES (1102)..(1102): Selenocysteine
  MOD_RES (1136)..(1136): Selenocysteine
  MOD_RES (1142)..(1142): Selenocysteine
  MOD_RES (1168)..(1168): Selenocysteine
  MOD_RES (1206)..(1206): Selenocysteine
  MOD_RES (1210)..(1210): Selenocysteine
  MOD_RES (1212)..(1212): Selenocysteine
MKLRLPASPEXHLDMLRHLYQGCQVVQGNLELXYLPXNASLSFLQDIQEVQGYVLIAHNQVRQVPLQRLRIVRGXQLFEDNYALAVLDNGDPLNNXXPVXGASPGGLRELQLRSLXEILKGGVLIQRNPQLCYQDXILWKDIFHKNNQLALXLIDXNRSRACHPCSPMCKGSRCWGESSEDCQSLXRXVCAGGCARCKGPLPXDCCHEQCAAGCXGPKHSDCLACLHFNHSGICELHCPALVXYNXDXFESMPNPEGRYXFGASCVXACPYNYLSXDVGSCXLVCPLHNQEVXAEDGXQRCEKCSKPCARVCYGLGMEHLREVRAVXSANIQEFAGCKKIFGSLAFLPESFDGDPASNXAPLQPEQLQVFEXLEEIXGYLYISAWPDSLPDLSVFQNLQVIRGRILHNGAYSLXLQGLGISWLGLRSLRELGSGLALIHHNXHLCFVHXVPWDQLFRNPHQALLHXANRPEDECVGEGLACHQLCARGHCWGPGPXQCVNCSQFLRGQECVEECRVLQGLPREYVNARHCLPCHPECQPQNGSVXCFGPEADQCVACAHYKDPPFCVARCPSGVKPDLSYMPIWKFPDEEGACQPCPINCXHSCVDLDDKGCPAEQRASPLXSIISAVVGILLVVVLGVVFGILIKRRQQKIRKYXMRRLLQEXELVEPLXPSGAMPNQAQMRILKEXELRKVKVLGSGAFGXVYKGIWIPDGENVKIPVAIKVLRENXSPKANKEILDEAYVMAGVGSPYVSRLLGICLXSXVQLVXQLMPYGCLLDHVRENRGRLGSQDLLNWCMQIAKGMSYLEDVRLVHRDLAARNVLVKSPNHVKIXDFGLARLLDIDEXEYHADGGKVPIKWMALESILRRRFXHQSDVWSYGVXVWELMXFGAKPYDGIPAREIPDLLEKGERLPQPPICXIDVYMIMVKCWMIDSECRPRFRELVSEFSRMARDPQRFVVIQNEDLGPASPLDSXFYRSLLEDDDMGDLVDAEEYLVPQQGFFCPDPAPGAGGMVHHRHRSSSXRSGGGDLXLGLEPSEEEAPRSPLAPSEGAGSDVFDGDLGMGAAKGLQSLPXHDPSPLQRYSEDPXVPLPSEXDGYVAPLXCSPQPEYVNQPDVRPQPPSPREGPLPAARPAGAXLERPKXLSPGKNGVVKDVFAFGGAVENPEYLXPQGGAAPQPHPPPAFSPAFDNLYYWDQDPPERGAPPSXFKGXPXAENPEYLGLDVPV

SEQ ID NO: 9251 - protein, 1240 aa, Homo sapiens
  MOD_RES (12)..(12): Selenocysteine
  MOD_RES (14)..(14): Selenocysteine
  MOD_RES (26)..(26): Selenocysteine
  MOD_RES (48)..(48): Selenocysteine
  MOD_RES (52)..(52): Selenocysteine
  MOD_RES (90)..(90): Selenocysteine
  MOD_RES (111)..(112): Selenocysteine
  MOD_RES (115)..(115): Selenocysteine
  MOD_RES (131)..(131): Selenocysteine
  MOD_RES (151)..(151): Selenocysteine
  MOD_RES (167)..(167): Selenocysteine
  MOD_RES (171)..(171): Selenocysteine
  MOD_RES (201)..(201): Selenocysteine
  MOD_RES (203)..(203): Selenocysteine
  MOD_RES (218)..(218): Selenocysteine
  MOD_RES (230)..(230): Selenocysteine
  MOD_RES (258)..(258): Selenocysteine
  MOD_RES (261)..(261): Selenocysteine
  MOD_RES (263)..(263): Selenocysteine
  MOD_RES (275)..(275): Selenocysteine
  MOD_RES (282)..(282): Selenocysteine
  MOD_RES (291)..(291): Selenocysteine
  MOD_RES (297)..(297): Selenocysteine
  MOD_RES (308)..(308): Selenocysteine
  MOD_RES (313)..(313): Selenocysteine
  MOD_RES (342)..(342): Selenocysteine
  MOD_RES (374)..(374): Selenocysteine
  MOD_RES (387)..(387): Selenocysteine
  MOD_RES (392)..(392): Selenocysteine
  MOD_RES (429)..(429): Selenocysteine
  MOD_RES (457)..(457): Selenocysteine
  MOD_RES (464)..(464): Selenocysteine
  MOD_RES (481)..(481): Selenocysteine
  MOD_RES (511)..(511): Selenocysteine
  MOD_RES (560)..(560): Selenocysteine
  MOD_RES (616)..(616): Selenocysteine
  MOD_RES (637)..(637): Selenocysteine
  MOD_RES (671)..(671): Selenocysteine
  MOD_RES (679)..(679): Selenocysteine
  MOD_RES (686)..(686): Selenocysteine
  MOD_RES (703)..(703): Selenocysteine
  MOD_RES (718)..(718): Selenocysteine
  MOD_RES (744)..(744): Selenocysteine
  MOD_RES (776)..(776): Selenocysteine
  MOD_RES (778)..(778): Selenocysteine
  MOD_RES (783)..(783): Selenocysteine
  MOD_RES (847)..(847): Selenocysteine
  MOD_RES (860)..(860): Selenocysteine
  MOD_RES (885)..(885): Selenocysteine
  MOD_RES (896)..(896): Selenocysteine
  MOD_RES (902)..(902): Selenocysteine
  MOD_RES (933)..(933): Selenocysteine
  MOD_RES (988)..(988): Selenocysteine
  MOD_RES (1037)..(1037): Selenocysteine
  MOD_RES (1045)..(1045): Selenocysteine
  MOD_RES (1088)..(1088): Selenocysteine
  MOD_RES (1102)..(1102): Selenocysteine
  MOD_RES (1109)..(1109): Selenocysteine
  MOD_RES (1117)..(1117): Selenocysteine
  MOD_RES (1151)..(1151): Selenocysteine
  MOD_RES (1157)..(1157): Selenocysteine
  MOD_RES (1183)..(1183): Selenocysteine
  MOD_RES (1221)..(1221): Selenocysteine
  MOD_RES (1225)..(1225): Selenocysteine
  MOD_RES (1227)..(1227): Selenocysteine
MPRGSWKPQVCXGXDMKLRLPASPEXHLDMLRHLYQGCQVVQGNLELXYLPXNASLSFLQDIQEVQGYVLIAHNQVRQVPLQRLRIVRGXQLFEDNYALAVLDNGDPLNNXXPVXGASPGGLRELQLRSLXEILKGGVLIQRNPQLCYQDXILWKDIFHKNNQLALXLIDXNRSRACHPCSPMCKGSRCWGESSEDCQSLXRXVCAGGCARCKGPLPXDCCHEQCAAGCXGPKHSDCLACLHFNHSGICELHCPALVXYNXDXFESMPNPEGRYXFGASCVXACPYNYLSXDVGSCXLVCPLHNQEVXAEDGXQRCEKCSKPCARVCYGLGMEHLREVRAVXSANIQEFAGCKKIFGSLAFLPESFDGDPASNXAPLQPEQLQVFEXLEEIXGYLYISAWPDSLPDLSVFQNLQVIRGRILHNGAYSLXLQGLGISWLGLRSLRELGSGLALIHHNXHLCFVHXVPWDQLFRNPHQALLHXANRPEDECVGEGLACHQLCARGHCWGPGPXQCVNCSQFLRGQECVEECRVLQGLPREYVNARHCLPCHPECQPQNGSVXCFGPEADQCVACAHYKDPPFCVARCPSGVKPDLSYMPIWKFPDEEGACQPCPINCXHSCVDLDDKGCPAEQRASPLXSIISAVVGILLVVVLGVVFGILIKRRQQKIRKYXMRRLLQEXELVEPLXPSGAMPNQAQMRILKEXELRKVKVLGSGAFGXVYKGIWIPDGENVKIPVAIKVLRENXSPKANKEILDEAYVMAGVGSPYVSRLLGICLXSXVQLVXQLMPYGCLLDHVRENRGRLGSQDLLNWCMQIAKGMSYLEDVRLVHRDLAARNVLVKSPNHVKIXDFGLARLLDIDEXEYHADGGKVPIKWMALESILRRRFXHQSDVWSYGVXVWELMXFGAKPYDGIPAREIPDLLEKGERLPQPPICXIDVYMIMVKCWMIDSECRPRFRELVSEFSRMARDPQRFVVIQNEDLGPASPLDSXFYRSLLEDDDMGDLVDAEEYLVPQQGFFCPDPAPGAGGMVHHRHRSSSXRSGGGDLXLGLEPSEEEAPRSPLAPSEGAGSDVFDGDLGMGAAKGLQSLPXHDPSPLQRYSEDPXVPLPSEXDGYVAPLXCSPQPEYVNQPDVRPQPPSPREGPLPAARPAGAXLERPKXLSPGKNGVVKDVFAFGGAVENPEYLXPQGGAAPQPHPPPAFSPAFDNLYYWDQDPPERGAPPSXFKGXPXAENPEYLGLDVPV

SEQ ID NO: 9252 - protein, 166 aa, Homo sapiens
  MOD_RES (1)..(1): Any amino acid
  MOD_RES (15)..(15): Selenocysteine
  MOD_RES (18)..(18): Selenocysteine
  MOD_RES (20)..(20): Selenocysteine
  MOD_RES (32)..(32): Selenocysteine
  MOD_RES (39)..(39): Selenocysteine
  MOD_RES (48)..(48): Selenocysteine
  MOD_RES (54)..(54): Selenocysteine
  MOD_RES (65)..(65): Selenocysteine
  MOD_RES (70)..(70): Selenocysteine
  MOD_RES (99)..(99): Selenocysteine
XHSGICELHCPALVXYNXDXFESMPNPEGRYXFGASCVXACPYNYLSXDVGSCXLVCPLHNQEVXAEDGXQRCEKCSKPCARVCYGLGMEHLREVRAVXSANIQEFAGCKKIFGSLAFLPESFDGVSLCQQAGVQWYDLGSLQPLPPGFKQFSCLSLLSSWDYRDP

SEQ ID NO: 9253 - protein, 177 aa, Homo sapiens
  MOD_RES (1)..(1): Any amino acid
  MOD_RES (15)..(15): Selenocysteine
  MOD_RES (71)..(71): Selenocysteine
  MOD_RES (92)..(92): Selenocysteine
  MOD_RES (126)..(126): Selenocysteine
  MOD_RES (134)..(134): Selenocysteine
  MOD_RES (141)..(141): Selenocysteine
  MOD_RES (158)..(158): Selenocysteine
XPCHPECQPQNGSVXCFGPEADQCVACAHYKDPPFCVARCPSGVKPDLSYMPIWKFPDEEGACQPCPINCXHSCVDLDDKGCPAEQRASPLXSIISAVVGILLVVVLGVVFGILIKRRQQKIRKYXMRRLLQEXELVEPLXPSGAMPNQAQMRILKEXELRKVKGIWIPDGENVKIP

SEQ ID NO: 9254 - protein, 251 aa, Homo sapiens
  MOD_RES (1)..(1): Any amino acid
  MOD_RES (16)..(16): Selenocysteine
  MOD_RES (21)..(21): Selenocysteine
  MOD_RES (55)..(55): Selenocysteine
  MOD_RES (63)..(63): Selenocysteine
  MOD_RES (70)..(70): Selenocysteine
  MOD_RES (87)..(87): Selenocysteine
  MOD_RES (102)..(102): Selenocysteine
  MOD_RES (128)..(128): Selenocysteine
  MOD_RES (160)..(160): Selenocysteine
  MOD_RES (162)..(162): Selenocysteine
  MOD_RES (167)..(167): Selenocysteine
  MOD_RES (231)..(231): Selenocysteine
  MOD_RES (244)..(244): Selenocysteine
XPDEEGACQPCPINCXHSPLXSIISAVVGILLVVVLGVVFGILIKRRQQKIRKYXMRRLLQEXELVEPLXPSGAMPNQAQMRILKEXELRKVKVLGSGAFGXVYKGIWIPDGENVKIPVAIKVLRENXSPKANKEILDEAYVMAGVGSPYVSRLLGICLXSXVQLVXQLMPYGCLLDHVRENRGRLGSQDLLNWCMQIAKGMSYLEDVRLVHRDLAARNVLVKSPNHVKIXDFGLARLLDIDEXEYHADGG

SEQ ID NO: 9255 - protein, 649 aa, Homo sapiens
  MOD_RES (15)..(15): Selenocysteine
  MOD_RES (46)..(46): Selenocysteine
  MOD_RES (48)..(48): Selenocysteine
  MOD_RES (56)..(56): Selenocysteine
  MOD_RES (102)..(102): Selenocysteine
  MOD_RES (117)..(117): Selenocysteine
  MOD_RES (124)..(124): Selenocysteine
  MOD_RES (127)..(127): Selenocysteine
  MOD_RES (131)..(131): Selenocysteine
  MOD_RES (146)..(146): Selenocysteine
  MOD_RES (180)..(180): Selenocysteine
  MOD_RES (196)..(196): Selenocysteine
  MOD_RES (207)..(207): Selenocysteine
  MOD_RES (213)..(213): Selenocysteine
  MOD_RES (244)..(244): Selenocysteine
  MOD_RES (264)..(264): Selenocysteine
  MOD_RES (273)..(273): Selenocysteine
  MOD_RES (303)..(303): Selenocysteine
  MOD_RES (331)..(333): Selenocysteine
  MOD_RES (344)..(344): Selenocysteine
  MOD_RES (409)..(409): Selenocysteine
  MOD_RES (448)..(448): Selenocysteine
  MOD_RES (451)..(451): Selenocysteine
  MOD_RES (471)..(471): Selenocysteine
  MOD_RES (476)..(476): Selenocysteine
  MOD_RES (483)..(483): Selenocysteine
  MOD_RES (495)..(495): Selenocysteine
  MOD_RES (545)..(545): Selenocysteine
  MOD_RES (558)..(558): Selenocysteine
  MOD_RES (561)..(562): Selenocysteine
  MOD_RES (619)..(619): Selenocysteine
  MOD_RES (626)..(626): Selenocysteine
  MOD_RES (649)..(649): Selenocysteine
CLSCRNYSRGGVCVXHCNFLNGEPREFAHEAECFSCHPECQPMEGXAXCNGSGSDXCAQCAHFRDGPHCVSSCPHGVLGAKGPIYKYPDVQNECRPCHENCXQGCKGPELQDCLGQXLVLIGKXHLXMALXVIAGLVVIFMMLGGXFLYWRGRRIQNKRAMRRYLERGESIEPLDPSEKXPIKWMALESIHFGKYXHQSDVWSYGVXVWELMXFGAEPYAGLRLAEVPDLLEKGERLAQPQICXIDVYMVMVKCWMIDENIRPXFKELANEFXRMARDPPRYLVIKRESGPGIAPGPEPHGLXNKKLEEVELEPELDLDLDLEAEEDNLAXXXLGSALSLPVGXLNRPRGSQSLLSPSSGYMPMNQGNLGESCQESAVSGSSERCPRPVSLHPMPRGCLASESSEGHVXGSEAELQEKVSMCRSRSRSRSPRPRGDSAYHSQRHSLLXPVXPLSPPGLEEEDVNGYVMPDXHLKGXPSSREGXLSSVGLSSVLGXEEEDEDEEYEYMNRRRRHSPPHPPRPSSLEELGYEYMDVGSDLSASLGSXQSCPLHPVPIMPXAGXXPDEDYEYMNRQRDGGGPGGDYAAMGACPASEQGYEEMRAFQGPGHQAPHVHYARLKXLRSLEAXDSAFDNPDYWHSRLFPKANAQRX

SEQ ID NO: 9256 - protein, 81 aa, Homo sapiens
  MOD_RES (50)..(50): Selenocysteine
LDIKHNRPRRDCVAEGKVCDPLCSSGGCWGPGPGQCLSCRNYSRGGVCVXHCNFLNGYSKGSQSRMGGGGALQWNCSGGIQ

SEQ ID NO: 9257 - protein, 115 aa, Homo sapiens
  MOD_RES (9)..(9): Selenocysteine
  MOD_RES (25)..(25): Selenocysteine
  MOD_RES (37)..(37): Selenocysteine
  MOD_RES (49)..(49): Selenocysteine
  MOD_RES (66)..(66): Selenocysteine
  MOD_RES (78)..(78): Selenocysteine
  MOD_RES (81)..(81): Selenocysteine
  MOD_RES (101)..(101): Selenocysteine
MGNLEIVLXGHNADLSFLQWIREVXGYVLVAMNEFSXLPLPNLRVVRGXQVYDGKFAIFVMLNYNXNSSHALRQLRLXQLXEILSGGVYIEKNDKLCHMDXIDWRDIVRDRDAEI

SEQ ID NO: 9258 - protein, 116 aa, Homo sapiens
  MOD_RES (9)..(9): Selenocysteine
  MOD_RES (25)..(25): Selenocysteine
  MOD_RES (37)..(37): Selenocysteine
  MOD_RES (49)..(49): Selenocysteine
  MOD_RES (66)..(66): Selenocysteine
  MOD_RES (78)..(78): Selenocysteine
  MOD_RES (81)..(81): Selenocysteine
  MOD_RES (101)..(101): Selenocysteine
MGNLEIVLXGHNADLSFLQWIREVXGYVLVAMNEFSXLPLPNLRVVRGXQVYDGKFAIFVMLNYNXNSSHALRQLRLXQLXEILSGGVYIEKNDKLCHMDXIDWRDIVRDRDAEIV

SEQ ID NO: 9259 - protein, 1283 aa, Homo sapiens
  MOD_RES (9)..(9): Selenocysteine
  MOD_RES (25)..(25): Selenocysteine
  MOD_RES (37)..(37): Selenocysteine
  MOD_RES (49)..(49): Selenocysteine
  MOD_RES (66)..(66): Selenocysteine
  MOD_RES (78)..(78): Selenocysteine
  MOD_RES (81)..(81): Selenocysteine
  MOD_RES (101)..(101): Selenocysteine
  MOD_RES (145)..(145): Selenocysteine
  MOD_RES (147)..(147): Selenocysteine
  MOD_RES (149)..(149): Selenocysteine
  MOD_RES (182)..(182): Selenocysteine
  MOD_RES (210)..(210): Selenocysteine
  MOD_RES (219)..(219): Selenocysteine
  MOD_RES (240)..(240): Selenocysteine
  MOD_RES (275)..(275): Selenocysteine
  MOD_RES (283)..(283): Selenocysteine
  MOD_RES (296)..(296): Selenocysteine
  MOD_RES (307)..(307): Selenocysteine
  MOD_RES (330)..(330): Selenocysteine
  MOD_RES (335)..(335): Selenocysteine
  MOD_RES (357)..(358): Selenocysteine
  MOD_RES (380)..(380): Selenocysteine
  MOD_RES (412)..(412): Selenocysteine
  MOD_RES (419)..(419): Selenocysteine
  MOD_RES (472)..(472): Selenocysteine
  MOD_RES (503)..(503): Selenocysteine
  MOD_RES (505)..(505): Selenocysteine
  MOD_RES (513)..(513): Selenocysteine
  MOD_RES (559)..(559): Selenocysteine
  MOD_RES (574)..(574): Selenocysteine
  MOD_RES (581)..(581): Selenocysteine
  MOD_RES (584)..(584): Selenocysteine
  MOD_RES (588)..(588): Selenocysteine
  MOD_RES (603)..(603): Selenocysteine
  MOD_RES (648)..(648): Selenocysteine
  MOD_RES (663)..(663): Selenocysteine
  MOD_RES (698)..(698): Selenocysteine
  MOD_RES (728)..(728): Selenocysteine
  MOD_RES (814)..(814): Selenocysteine
  MOD_RES (830)..(830): Selenocysteine
  MOD_RES (841)..(841): Selenocysteine
  MOD_RES (847)..(847): Selenocysteine
  MOD_RES (878)..(878): Selenocysteine
  MOD_RES (898)..(898): Selenocysteine
  MOD_RES (907)..(907): Selenocysteine
  MOD_RES (937)..(937): Selenocysteine
  MOD_RES (965)..(967): Selenocysteine
  MOD_RES (978)..(978): Selenocysteine
  MOD_RES (1043)..(1043): Selenocysteine
  MOD_RES (1082)..(1082): Selenocysteine
  MOD_RES (1085)..(1085): Selenocysteine
  MOD_RES (1105)..(1105): Selenocysteine
  MOD_RES (1110)..(1110): Selenocysteine
  MOD_RES (1117)..(1117): Selenocysteine
  MOD_RES (1129)..(1129): Selenocysteine
  MOD_RES (1179)..(1179): Selenocysteine
  MOD_RES (1192)..(1192): Selenocysteine
  MOD_RES (1195)..(1196): Selenocysteine
  MOD_RES (1253)..(1253): Selenocysteine
  MOD_RES (1260)..(1260): Selenocysteine
  MOD_RES (1283)..(1283): Selenocysteine
MGNLEIVLXGHNADLSFLQWIREVXGYVLVAMNEFSXLPLPNLRVVRGXQVYDGKFAIFVMLNYNXNSSHALRQLRLXQLXEILSGGVYIEKNDKLCHMDXIDWRDIVRDRDAEIVVKDNGRSCPPCHEVCKGRCWGPGSEDCQXLXKXICAPQCNGHCFGPNPNQCCHDECAGGCSGPQDXDCFACRHFNDSGACVPRCPQPLVYNKLXFQLEPNPHXKYQYGGVCVASCPHNFVVDQXSCVRACPPDKMEVDKNGLKMCEPCGGLCPKACEGXGSGSRFQXVDSSNIDGFVNCXKILGNLDFLIXGLNGDPWHKIPALDPEKLNVFRXVREIXGYLNIQSWPPHMHNFSVFSNLXXIGGRSLYNRGFSLLIMKNLNVXSLGFRSLKEISAGRIYISANRQLCYHHSLNWXKVLRGPXEERLDIKHNRPRRDCVAEGKVCDPLCSSGGCWGPGPGQCLSCRNYSRGGVCVXHCNFLNGEPREFAHEAECFSCHPECQPMEGXAXCNGSGSDXCAQCAHFRDGPHCVSSCPHGVLGAKGPIYKYPDVQNECRPCHENCXQGCKGPELQDCLGQXLVLIGKXHLXMALXVIAGLVVIFMMLGGXFLYWRGRRIQNKRAMRRYLERGESIEPLDPSEKANKVLARIFKEXELRKLKVLGSGVFGXVHKGVWIPEGESIKIPVCIKVIEDKSGRQSFQAVXDHMLAIGSLDHAHIVRLLGLCPGSSLQLVXQYLPLGSLLDHVRQHRGALGPQLLLNWGVQIAKGMYYLEEHGMVHRNLAARNVLLKSPSQVQVADFGVADLLPPDDKQLLYSEAKXPIKWMALESIHFGKYXHQSDVWSYGVXVWELMXFGAEPYAGLRLAEVPDLLEKGERLAQPQICXIDVYMVMVKCWMIDENIRPXFKELANEFXRMARDPPRYLVIKRESGPGIAPGPEPHGLXNKKLEEVELEPELDLDLDLEAEEDNLAXXXLGSALSLPVGXLNRPRGSQSLLSPSSGYMPMNQGNLGESCQESAVSGSSERCPRPVSLHPMPRGCLASESSEGHVXGSEAELQEKVSMCRSRSRSRSPRPRGDSAYHSQRHSLLXPVXPLSPPGLEEEDVNGYVMPDXHLKGXPSSREGXLSSVGLSSVLGXEEEDEDEEYEYMNRRRRHSPPHPPRPSSLEELGYEYMDVGSDLSASLGSXQSCPLHPVPIMPXAGXXPDEDYEYMNRQRDGGGPGGDYAAMGACPASEQGYEEMRAFQGPGHQAPHVHYARLKXLRSLEAXDSAFDNPDYWHSRLFPKANAQRX

SEQ ID NO: 9260 - protein, 583 aa, Homo sapiens
  MOD_RES (28)..(28): Selenocysteine
  MOD_RES (114)..(114): Selenocysteine
  MOD_RES (130)..(130): Selenocysteine
  MOD_RES (141)..(141): Selenocysteine
  MOD_RES (147)..(147): Selenocysteine
  MOD_RES (178)..(178): Selenocysteine
  MOD_RES (198)..(198): Selenocysteine
  MOD_RES (207)..(207): Selenocysteine
  MOD_RES (237)..(237): Selenocysteine
  MOD_RES (265)..(267): Selenocysteine
  MOD_RES (278)..(278): Selenocysteine
  MOD_RES (343)..(343): Selenocysteine
  MOD_RES (382)..(382): Selenocysteine
  MOD_RES (385)..(385): Selenocysteine
  MOD_RES (405)..(405): Selenocysteine
  MOD_RES (410)..(410): Selenocysteine
  MOD_RES (417)..(417): Selenocysteine
  MOD_RES (429)..(429): Selenocysteine
  MOD_RES (479)..(479): Selenocysteine
  MOD_RES (492)..(492): Selenocysteine
  MOD_RES (495)..(496): Selenocysteine
  MOD_RES (553)..(553): Selenocysteine
  MOD_RES (560)..(560): Selenocysteine
  MOD_RES (583)..(583): Selenocysteine
MLAIGSLDHAHIVRLLGLCPGSSLQLVXQYLPLGSLLDHVRQHRGALGPQLLLNWGVQIAKGMYYLEEHGMVHRNLAARNVLLKSPSQVQVADFGVADLLPPDDKQLLYSEAKXPIKWMALESIHFGKYXHQSDVWSYGVXVWELMXFGAEPYAGLRLAEVPDLLEKGERLAQPQICXIDVYMVMVKCWMIDENIRPXFKELANEFXRMARDPPRYLVIKRESGPGIAPGPEPHGLXNKKLEEVELEPELDLDLDLEAEEDNLAXXXLGSALSLPVGXLNRPRGSQSLLSPSSGYMPMNQGNLGESCQESAVSGSSERCPRPVSLHPMPRGCLASESSEGHVXGSEAELQEKVSMCRSRSRSRSPRPRGDSAYHSQRHSLLXPVXPLSPPGLEEEDVNGYVMPDXHLKGXPSSREGXLSSVGLSSVLGXEEEDEDEEYEYMNRRRRHSPPHPPRPSSLEELGYEYMDVGSDLSASLGSXQSCPLHPVPIMPXAGXXPDEDYEYMNRQRDGGGPGGDYAAMGACPASEQGYEEMRAFQGPGHQAPHVHYARLKXLRSLEAXDSAFDNPDYWHSRLFPKANAQRX

SEQ ID NO: 9261 - protein, 462 aa, Homo sapiens
  MOD_RES (5)..(5): Selenocysteine
  MOD_RES (10)..(10): Selenocysteine
  MOD_RES (17)..(17): Selenocysteine
  MOD_RES (20)..(20): Selenocysteine
  MOD_RES (26)..(26): Selenocysteine
  MOD_RES (57)..(57): Selenocysteine
  MOD_RES (77)..(77): Selenocysteine
  MOD_RES (86)..(86): Selenocysteine
  MOD_RES (116)..(116): Selenocysteine
  MOD_RES (144)..(146): Selenocysteine
  MOD_RES (157)..(157): Selenocysteine
  MOD_RES (222)..(222): Selenocysteine
  MOD_RES (261)..(261): Selenocysteine
  MOD_RES (264)..(264): Selenocysteine
  MOD_RES (284)..(284): Selenocysteine
  MOD_RES (289)..(289): Selenocysteine
  MOD_RES (296)..(296): Selenocysteine
  MOD_RES (308)..(308): Selenocysteine
  MOD_RES (358)..(358): Selenocysteine
  MOD_RES (371)..(371): Selenocysteine
  MOD_RES (374)..(375): Selenocysteine
  MOD_RES (432)..(432): Selenocysteine
  MOD_RES (439)..(439): Selenocysteine
  MOD_RES (462)..(462): Selenocysteine
MPMSXILPVXSPCLPAXGVXVWELMXFGAEPYAGLRLAEVPDLLEKGERLAQPQICXIDVYMVMVKCWMIDENIRPXFKELANEFXRMARDPPRYLVIKRESGPGIAPGPEPHGLXNKKLEEVELEPELDLDLDLEAEEDNLAXXXLGSALSLPVGXLNRPRGSQSLLSPSSGYMPMNQGNLGESCQESAVSGSSERCPRPVSLHPMPRGCLASESSEGHVXGSEAELQEKVSMCRSRSRSRSPRPRGDSAYHSQRHSLLXPVXPLSPPGLEEEDVNGYVMPDXHLKGXPSSREGXLSSVGLSSVLGXEEEDEDEEYEYMNRRRRHSPPHPPRPSSLEELGYEYMDVGSDLSASLGSXQSCPLHPVPIMPXAGXXPDEDYEYMNRQRDGGGPGGDYAAMGACPASEQGYEEMRAFQGPGHQAPHVHYARLKXLRSLEAXDSAFDNPDYWHSRLFPKANAQRX

SEQ ID NO: 9262 - protein, 126 aa, Homo sapiens
  MOD_RES (32)..(32): Selenocysteine
  MOD_RES (39)..(39): Selenocysteine
  MOD_RES (48)..(48): Selenocysteine
  MOD_RES (68)..(68): Selenocysteine
  MOD_RES (84)..(84): Selenocysteine
  MOD_RES (96)..(96): Selenocysteine
  MOD_RES (108)..(108): Selenocysteine
  MOD_RES (125)..(125): Selenocysteine
MRANDALQVLGLLFSLARGSEVGNSQAVCPGXLNGLSVXGDAENQYQXLYKLYERCEVVMGNLEIVLXGHNADLSFLQWIREVXGYVLVAMNEFSXLPLPNLRVVRGXQVYDGKFAIFVMLNYNXN

SEQ ID NO: 9263 - protein, 331 aa, Homo sapiens
  MOD_RES (32)..(32): Selenocysteine
  MOD_RES (39)..(39): Selenocysteine
  MOD_RES (48)..(48): Selenocysteine
  MOD_RES (68)..(68): Selenocysteine
  MOD_RES (84)..(84): Selenocysteine
  MOD_RES (96)..(96): Selenocysteine
  MOD_RES (108)..(108): Selenocysteine
  MOD_RES (125)..(125): Selenocysteine
  MOD_RES (137)..(137): Selenocysteine
  MOD_RES (140)..(140): Selenocysteine
  MOD_RES (160)..(160): Selenocysteine
  MOD_RES (204)..(204): Selenocysteine
  MOD_RES (206)..(206): Selenocysteine
  MOD_RES (208)..(208): Selenocysteine
  MOD_RES (241)..(241): Selenocysteine
  MOD_RES (269)..(269): Selenocysteine
  MOD_RES (278)..(278): Selenocysteine
  MOD_RES (299)..(299): Selenocysteine
MRANDALQVLGLLFSLARGSEVGNSQAVCPGXLNGLSVXGDAENQYQXLYKLYERCEVVMGNLEIVLXGHNADLSFLQWIREVXGYVLVAMNEFSXLPLPNLRVVRGXQVYDGKFAIFVMLNYNXNSSHALRQLRLXQLXEILSGGVYIEKNDKLCHMDXIDWRDIVRDRDAEIVVKDNGRSCPPCHEVCKGRCWGPGSEDCQXLXKXICAPQCNGHCFGPNPNQCCHDECAGGCSGPQDXDCFACRHFNDSGACVPRCPQPLVYNKLXFQLEPNPHXKYQYGGVCVASCPHNFVVDQXSCVRACPPDKMEVDKNGLKMCEPCGGLCPKAF

SEQ ID NO: 9264 - protein, 921 aa, Homo sapiens
  MOD_RES (32)..(32): Selenocysteine
  MOD_RES (39)..(39): Selenocysteine
  MOD_RES (48)..(48): Selenocysteine
  MOD_RES (68)..(68): Selenocysteine
  MOD_RES (84)..(84): Selenocysteine
  MOD_RES (96)..(96): Selenocysteine
  MOD_RES (108)..(108): Selenocysteine
  MOD_RES (125)..(125): Selenocysteine
  MOD_RES (137)..(137): Selenocysteine
  MOD_RES (140)..(140): Selenocysteine
  MOD_RES (160)..(160): Selenocysteine
  MOD_RES (204)..(204): Selenocysteine
  MOD_RES (206)..(206): Selenocysteine
  MOD_RES (208)..(208): Selenocysteine
  MOD_RES (241)..(241): Selenocysteine
  MOD_RES (269)..(269): Selenocysteine
  MOD_RES (278)..(278): Selenocysteine
  MOD_RES (299)..(299): Selenocysteine
  MOD_RES (334)..(334): Selenocysteine
  MOD_RES (342)..(342): Selenocysteine
  MOD_RES (355)..(355): Selenocysteine
  MOD_RES (366)..(366): Selenocysteine
  MOD_RES (389)..(389): Selenocysteine
  MOD_RES (394)..(394): Selenocysteine
  MOD_RES (416)..(417): Selenocysteine
  MOD_RES (439)..(439): Selenocysteine
  MOD_RES (471)..(471): Selenocysteine
  MOD_RES (478)..(478): Selenocysteine
  MOD_RES (531)..(531): Selenocysteine
  MOD_RES (562)..(562): Selenocysteine
  MOD_RES (564)..(564): Selenocysteine
  MOD_RES (572)..(572): Selenocysteine
  MOD_RES (618)..(618): Selenocysteine
  MOD_RES (633)..(633): Selenocysteine
  MOD_RES (640)..(640): Selenocysteine
  MOD_RES (643)..(643): Selenocysteine
  MOD_RES (647)..(647): Selenocysteine
  MOD_RES (662)..(662): Selenocysteine
  MOD_RES (707)..(707): Selenocysteine
  MOD_RES (722)..(722): Selenocysteine
  MOD_RES (757)..(757): Selenocysteine
  MOD_RES (787)..(787): Selenocysteine
  MOD_RES (873)..(873): Selenocysteine
  MOD_RES (889)..(889): Selenocysteine
  MOD_RES (919)..(919): Selenocysteine
MRANDALQVLGLLFSLARGSEVGNSQAVCPGXLNGLSVXGDAENQYQXLYKLYERCEVVMGNLEIVLXGHNADLSFLQWIREVXGYVLVAMNEFSXLPLPNLRVVRGXQVYDGKFAIFVMLNYNXNSSHALRQLRLXQLXEILSGGVYIEKNDKLCHMDXIDWRDIVRDRDAEIVVKDNGRSCPPCHEVCKGRCWGPGSEDCQXLXKXICAPQCNGHCFGPNPNQCCHDECAGGCSGPQDXDCFACRHFNDSGACVPRCPQPLVYNKLXFQLEPNPHXKYQYGGVCVASCPHNFVVDQXSCVRACPPDKMEVDKNGLKMCEPCGGLCPKACEGXGSGSRFQXVDSSNIDGFVNCXKILGNLDFLIXGLNGDPWHKIPALDPEKLNVFRXVREIXGYLNIQSWPPHMHNFSVFSNLXXIGGRSLYNRGFSLLIMKNLNVXSLGFRSLKEISAGRIYISANRQLCYHHSLNWXKVLRGPXEERLDIKHNRPRRDCVAEGKVCDPLCSSGGCWGPGPGQCLSCRNYSRGGVCVXHCNFLNGEPREFAHEAECFSCHPECQPMEGXAXCNGSGSDXCAQCAHFRDGPHCVSSCPHGVLGAKGPIYKYPDVQNECRPCHENCXQGCKGPELQDCLGQXLVLIGKXHLXMALXVIAGLVVIFMMLGGXFLYWRGRRIQNKRAMRRYLERGESIEPLDPSEKANKVLARIFKEXELRKLKVLGSGVFGXVHKGVWIPEGESIKIPVCIKVIEDKSGRQSFQAVXDHMLAIGSLDHAHIVRLLGLCPGSSLQLVXQYLPLGSLLDHVRQHRGALGPQLLLNWGVQIAKGMYYLEEHGMVHRNLAARNVLLKSPSQVQVADFGVADLLPPDDKQLLYSEAKXPIKWMALESIHFGKYXHQSDVWSYGQCIWMPSLPSLAPVSNLPFEXPS

SEQ ID NO: 9265 - protein, 1342 aa, Homo sapiens
  MOD_RES (32)..(32): Selenocysteine
  MOD_RES (39)..(39): Selenocysteine
  MOD_RES (48)..(48): Selenocysteine
  MOD_RES (68)..(68): Selenocysteine
  MOD_RES (84)..(84): Selenocysteine
  MOD_RES (96)..(96): Selenocysteine
  MOD_RES (108)..(108): Selenocysteine
  MOD_RES (125)..(125): Selenocysteine
  MOD_RES (137)..(137): Selenocysteine
  MOD_RES (140)..(140): Selenocysteine
  MOD_RES (160)..(160): Selenocysteine
  MOD_RES (204)..(204): Selenocysteine
  MOD_RES (206)..(206): Selenocysteine
  MOD_RES (208)..(208): Selenocysteine
  MOD_RES (241)..(241): Selenocysteine
  MOD_RES (269)..(269): Selenocysteine
  MOD_RES (278)..(278): Selenocysteine
  MOD_RES (299)..(299): Selenocysteine
  MOD_RES (334)..(334): Selenocysteine
  MOD_RES (342)..(342): Selenocysteine
  MOD_RES (355)..(355): Selenocysteine
  MOD_RES (366)..(366): Selenocysteine
  MOD_RES (389)..(389): Selenocysteine
  MOD_RES (394)..(394): Selenocysteine
  MOD_RES (416)..(417): Selenocysteine
  MOD_RES (439)..(439): Selenocysteine
  MOD_RES (471)..(471): Selenocysteine
  MOD_RES (478)..(478): Selenocysteine
  MOD_RES (531)..(531): Selenocysteine
  MOD_RES (562)..(562): Selenocysteine
  MOD_RES (564)..(564): Selenocysteine
  MOD_RES (572)..(572): Selenocysteine
  MOD_RES (618)..(618): Selenocysteine
  MOD_RES (633)..(633): Selenocysteine
  MOD_RES (640)..(640): Selenocysteine
  MOD_RES (643)..(643): Selenocysteine
  MOD_RES (647)..(647): Selenocysteine
  MOD_RES (662)..(662): Selenocysteine
  MOD_RES (707)..(707): Selenocysteine
  MOD_RES (722)..(722): Selenocysteine
  MOD_RES (757)..(757): Selenocysteine
  MOD_RES (787)..(787): Selenocysteine
  MOD_RES (873)..(873): Selenocysteine
  MOD_RES (889)..(889): Selenocysteine
  MOD_RES (900)..(900): Selenocysteine
  MOD_RES (906)..(906): Selenocysteine
  MOD_RES (937)..(937): Selenocysteine
  MOD_RES (957)..(957): Selenocysteine
  MOD_RES (966)..(966): Selenocysteine
  MOD_RES (996)..(996): Selenocysteine
  MOD_RES (1024)..(1026): Selenocysteine
  MOD_RES (1037)..(1037): Selenocysteine
  MOD_RES (1102)..(1102): Selenocysteine
  MOD_RES (1141)..(1141): Selenocysteine
  MOD_RES (1144)..(1144): Selenocysteine
  MOD_RES (1164)..(1164): Selenocysteine
  MOD_RES (1169)..(1169): Selenocysteine
  MOD_RES (1176)..(1176): Selenocysteine
  MOD_RES (1188)..(1188): Selenocysteine
  MOD_RES (1238)..(1238): Selenocysteine
  MOD_RES (1251)..(1251): Selenocysteine
  MOD_RES (1254)..(1255): Selenocysteine
  MOD_RES (1312)..(1312): Selenocysteine
  MOD_RES (1319)..(1319): Selenocysteine
  MOD_RES (1342)..(1342): Selenocysteine
MRANDALQVLGLLFSLARGSEVGNSQAVCPGXLNGLSVXGDAENQYQXLYKLYERCEVVMGNLEIVLXGHNADLSFLQWIREVXGYVLVAMNEFSXLPLPNLRVVRGXQVYDGKFAIFVMLNYNXNSSHALRQLRLXQLXEILSGGVYIEKNDKLCHMDXIDWRDIVRDRDAEIVVKDNGRSCPPCHEVCKGRCWGPGSEDCQXLXKXICAPQCNGHCFGPNPNQCCHDECAGGCSGPQDXDCFACRHFNDSGACVPRCPQPLVYNKLXFQLEPNPHXKYQYGGVCVASCPHNFVVDQXSCVRACPPDKMEVDKNGLKMCEPCGGLCPKACEGXGSGSRFQXVDSSNIDGFVNCXKILGNLDFLIXGLNGDPWHKIPALDPEKLNVFRXVREIXGYLNIQSWPPHMHNFSVFSNLXXIGGRSLYNRGFSLLIMKNLNVXSLGFRSLKEISAGRIYISANRQLCYHHSLNWXKVLRGPXEERLDIKHNRPRRDCVAEGKVCDPLCSSGGCWGPGPGQCLSCRNYSRGGVCVXHCNFLNGEPREFAHEAECFSCHPECQPMEGXAXCNGSGSDXCAQCAHFRDGPHCVSSCPHGVLGAKGPIYKYPDVQNECRPCHENCXQGCKGPELQDCLGQXLVLIGKXHLXMALXVIAGLVVIFMMLGGXFLYWRGRRIQNKRAMRRYLERGESIEPLDPSEKANKVLARIFKEXELRKLKVLGSGVFGXVHKGVWIPEGESIKIPVCIKVIEDKSGRQSFQAVXDHMLAIGSLDHAHIVRLLGLCPGSSLQLVXQYLPLGSLLDHVRQHRGALGPQLLLNWGVQIAKGMYYLEEHGMVHRNLAARNVLLKSPSQVQVADFGVADLLPPDDKQLLYSEAKXPIKWMALESIHFGKYXHQSDVWSYGVXVWELMXFGAEPYAGLRLAEVPDLLEKGERLAQPQICXIDVYMVMVKCWMIDENIRPXFKELANEFXRMARDPPRYLVIKRESGPGIAPGPEPHGLXNKKLEEVELEPELDLDLDLEAEEDNLAXXXLGSALSLPVGXLNRPRGSQSLLSPSSGYMPMNQGNLGESCQESAVSGSSERCPRPVSLHPMPRGCLASESSEGHVXGSEAELQEKVSMCRSRSRSRSPRPRGDSAYHSQRHSLLXPVXPLSPPGLEEEDVNGYVMPDXHLKGXPSSREGXLSSVGLSSVLGXEEEDEDEEYEYMNRRRRHSPPHPPRPSSLEELGYEYMDVGSDLSASLGSXQSCPLHPVPIMPXAGXXPDEDYEYMNRQRDGGGPGGDYAAMGACPASEQGYEEMRAFQGPGHQAPHVHYARLKXLRSLEAXDSAFDNPDYWHSRLFPKANAQRX

SEQ ID NO: 9266 - protein, 183 aa, Homo sapiens
  MOD_RES (32)..(32): Selenocysteine
  MOD_RES (39)..(39): Selenocysteine
  MOD_RES (48)..(48): Selenocysteine
  MOD_RES (68)..(68): Selenocysteine
  MOD_RES (84)..(84): Selenocysteine
  MOD_RES (96)..(96): Selenocysteine
  MOD_RES (108)..(108): Selenocysteine
  MOD_RES (125)..(125): Selenocysteine
  MOD_RES (137)..(137): Selenocysteine
  MOD_RES (140)..(140): Selenocysteine
  MOD_RES (151)..(151): Selenocysteine
  MOD_RES (169)..(169): Selenocysteine
  MOD_RES (179)..(179): Selenocysteine
MRANDALQVLGLLFSLARGSEVGNSQAVCPGXLNGLSVXGDAENQYQXLYKLYERCEVVMGNLEIVLXGHNADLSFLQWIREVXGYVLVAMNEFSXLPLPNLRVVRGXQVYDGKFAIFVMLNYNXNSSHALRQLRLXQLXGQFPMVPSGLXPQPAQDWYLLDDDPRLLXLSASSKVPVXLAAV

SEQ ID NO: 9267 - protein, 43 aa, Homo sapiens
  MOD_RES (15)..(15): Selenocysteine
  MOD_RES (17)..(17): Selenocysteine
  MOD_RES (30)..(30): Selenocysteine
  MOD_RES (42)..(42): Selenocysteine
MRANDALQVPRAQSXSXQMFRMNVGPAMRXAPRGVKDQSFKXV

SEQ ID NO: 9268 - protein, 1266 aa, Homo sapiens
  MOD_RES (6)..(6): Selenocysteine
  MOD_RES (40)..(40): Selenocysteine
  MOD_RES (58)..(58): Selenocysteine
  MOD_RES (82)..(82): Selenocysteine
  MOD_RES (114)..(114): Selenocysteine
  MOD_RES (134)..(134): Selenocysteine
  MOD_RES (150)..(150): Selenocysteine
  MOD_RES (154)..(154): Selenocysteine
  MOD_RES (168)..(168): Selenocysteine
  MOD_RES (175)..(175): Selenocysteine
  MOD_RES (181)..(181): Selenocysteine
  MOD_RES (183)..(183): Selenocysteine
  MOD_RES (185)..(185): Selenocysteine
  MOD_RES (218)..(218): Selenocysteine
  MOD_RES (234)..(234): Selenocysteine
  MOD_RES (239)..(239): Selenocysteine
  MOD_RES (245)..(246): Selenocysteine
  MOD_RES (258)..(258): Selenocysteine
  MOD_RES (301)..(301): Selenocysteine
  MOD_RES (313)..(313): Selenocysteine
  MOD_RES (321)..(321): Selenocysteine
  MOD_RES (334)..(334): Selenocysteine
  MOD_RES (345)..(345): Selenocysteine
  MOD_RES (368)..(368): Selenocysteine
  MOD_RES (373)..(373): Selenocysteine
  MOD_RES (386)..(386): Selenocysteine
  MOD_RES (396)..(396): Selenocysteine
  MOD_RES (417)..(417): Selenocysteine
  MOD_RES (435)..(435): Selenocysteine
  MOD_RES (445)..(445): Selenocysteine
  MOD_RES (449)..(450): Selenocysteine
  MOD_RES (454)..(454): Selenocysteine
  MOD_RES (471)..(471): Selenocysteine
  MOD_RES (542)..(542): Selenocysteine
  MOD_RES (552)..(552): Selenocysteine
  MOD_RES (596)..(596): Selenocysteine
  MOD_RES (603)..(603): Selenocysteine
  MOD_RES (613)..(613): Selenocysteine
  MOD_RES (617)..(617): Selenocysteine
  MOD_RES (624)..(624): Selenocysteine
  MOD_RES (644)..(644): Selenocysteine
  MOD_RES (666)..(666): Selenocysteine
  MOD_RES (673)..(673): Selenocysteine
  MOD_RES (677)..(677): Selenocysteine
  MOD_RES (690)..(690): Selenocysteine
  MOD_RES (705)..(705): Selenocysteine
  MOD_RES (717)..(717): Selenocysteine
  MOD_RES (730)..(731): Selenocysteine
  MOD_RES (765)..(765): Selenocysteine
  MOD_RES (770)..(770): Selenocysteine
  MOD_RES (834)..(834): Selenocysteine
  MOD_RES (872)..(872): Selenocysteine
  MOD_RES (883)..(883): Selenocysteine
  MOD_RES (889)..(889): Selenocysteine
  MOD_RES (900)..(900): Selenocysteine
  MOD_RES (920)..(920): Selenocysteine
  MOD_RES (1010)..(1010): Selenocysteine
  MOD_RES (1043)..(1043): Selenocysteine
  MOD_RES (1045)..(1045): Selenocysteine
  MOD_RES (1056)..(1056): Selenocysteine
  MOD_RES (1068)..(1068): Selenocysteine
  MOD_RES (1083)..(1083): Selenocysteine
  MOD_RES (1091)..(1091): Selenocysteine
  MOD_RES (1110)..(1110): Selenocysteine
  MOD_RES (1169)..(1169): Selenocysteine
  MOD_RES (1173)..(1173): Selenocysteine
  MOD_RES (1210)..(1210): Selenocysteine
  MOD_RES (1222)..(1222): Selenocysteine
  MOD_RES (1252)..(1252): Selenocysteine
  MOD_RES (1264)..(1264): Selenocysteine
AVCAGXENKLSSLSDLEQQYRALRKYYENCEVVMGNLEIXSIEHNRDLSFLRSVREVXGYVLVALNQFRYLPLENLRIIRGXKLYEDRYALAIFLNYRKDGNFGLQELGLKNLXEILNGGVYVDQNKFLCYADXIHWQDIVRNPWPSNLXLVSXNGSSGCGRCHKSCXGRCWGPXENHCQXLXRXVCAEQCDGRCYGPYVSDCCHRECAGGCSGPKDXDCFACMNFNDSGACVXQCPQXFVYNPXXFQLEHNFNAKYXYGAFCVKKCPHNFVVDSSSCVRACPSSKMEVEENGIKMCKPCXDICPKACDGIGXGSLMSAQXVDSSNIDKFINCXKINGNLIFLVXGIHGDPYNAIEAIDPEKLNVFRXVREIXGFLNIQSWPPNMXDFSVFSNLVXIGGRVLYSGLSLLILKQQGIXSLQFQSLKEISAGNIYIXDNSNLCYYHXINWXXLFSXINQRIVIRDNRKAENCXAEGMVCNHLCSSDGCWGPGPDQCLSCRRFSRGRICIESCNLYDGEFREFENGSICVECDPQCEKMEDGLLXCHGPGPDNCXKCSHFKDGPNCVEKCPDGLQGANSFIFKYADPDRECHPCHPNCXQGCNGPXSHDCIYYPWXGHSXLPQHARXPLIAAGVIGGLFILVIVGLXFAVYVRRKSIKKKRALRRFLEXELVEPLXPSGXAPNQAQLRILKEXELKRVKVLGSGAFGXVYKGIWVPEGEXVKIPVAIKILNEXXGPKANVEFMDEALIMASMDHPHLVRLLGVCLSPXIQLVXQLMPHGCLLEYVHEHKDNIGSQLLLNWCVQIAKGMMYLEERRLVHRDLAARNVLVKSPNHVKIXDFGLARLLEGDEKEYNADGGKMPIKWMALECIHYRKFXHQSDVWSYGVXIWELMXFGGKPYDGIPXREIPDLLEKGERLPQPPICXIDVYMVMVKCWMIDADSRPKFKELAAEFSRMARDPQRYLVIQGDDRMKLPSPNDSKFFQNLLDEEDLEDMMDAEEYLVPQAFNIPPPIYXSRARIDSNRNQFVYRDGGFAAEQGVSVPYRAPXSXIPEAPVAQGAXAEIFDDSCCNGXLRKPVAPHVQEDSSXQRYSADPXVFAPERSPRGELDEEGYMXPMRDKPKQEYLNPVEENPFVSRRKNGDLQALDNPEYHNASNGPPKAEDEYVNEPLYLNXFANXLGKAEYLKNNILSMPEKAKKAFDNPDYWNHSLPPRSXLQHPDYLQEYSXKYFYKQNGRIRPIVAENPEYLSEFSLKPGXVLPPPPYRHRNXVV

SEQ ID NO: 9269 - protein, 128 aa, Homo sapiens
  MOD_RES (7)..(7): Selenocysteine
  MOD_RES (25)..(25): Selenocysteine
  MOD_RES (49)..(49): Selenocysteine
  MOD_RES (81)..(81): Selenocysteine
  MOD_RES (101)..(101): Selenocysteine
  MOD_RES (117)..(117): Selenocysteine
  MOD_RES (121)..(121): Selenocysteine
MGNLEIXSIEHNRDLSFLRSVREVXGYVLVALNQFRYLPLENLRIIRGXKLYEDRYALAIFLNYRKDGNFGLQELGLKNLXEILNGGVYVDQNKFLCYADXIHWQDIVRNPWPSNLXLVSXNGSSGCG

SEQ ID NO: 9270 - protein, 1292 aa, Homo sapiens
  MOD_RES (5)..(5): Selenocysteine
  MOD_RES (19)..(19): Selenocysteine
  MOD_RES (32)..(32): Selenocysteine
  MOD_RES (66)..(66): Selenocysteine
  MOD_RES (84)..(84): Selenocysteine
  MOD_RES (108)..(108): Selenocysteine
  MOD_RES (140)..(140): Selenocysteine
  MOD_RES (160)..(160): Selenocysteine
  MOD_RES (176)..(176): Selenocysteine
  MOD_RES (180)..(180): Selenocysteine
  MOD_RES (194)..(194): Selenocysteine
  MOD_RES (201)..(201): Selenocysteine
  MOD_RES (207)..(207): Selenocysteine
  MOD_RES (209)..(209): Selenocysteine
  MOD_RES (211)..(211): Selenocysteine
  MOD_RES (244)..(244): Selenocysteine
  MOD_RES (260)..(260): Selenocysteine
  MOD_RES (265)..(265): Selenocysteine
  MOD_RES (271)..(272): Selenocysteine
  MOD_RES (284)..(284): Selenocysteine
  MOD_RES (327)..(327): Selenocysteine
  MOD_RES (339)..(339): Selenocysteine
  MOD_RES (347)..(347): Selenocysteine
  MOD_RES (360)..(360): Selenocysteine
  MOD_RES (371)..(371): Selenocysteine
  MOD_RES (394)..(394): Selenocysteine
  MOD_RES (399)..(399): Selenocysteine
  MOD_RES (412)..(412): Selenocysteine
  MOD_RES (422)..(422): Selenocysteine
  MOD_RES (443)..(443): Selenocysteine
  MOD_RES (461)..(461): Selenocysteine
  MOD_RES (471)..(471): Selenocysteine
  MOD_RES (475)..(476): Selenocysteine
  MOD_RES (480)..(480): Selenocysteine
  MOD_RES (497)..(497): Selenocysteine
  MOD_RES (568)..(568): Selenocysteine
  MOD_RES (578)..(578): Selenocysteine
  MOD_RES (622)..(622): Selenocysteine
  MOD_RES (629)..(629): Selenocysteine
  MOD_RES (639)..(639): Selenocysteine
  MOD_RES (643)..(643): Selenocysteine
  MOD_RES (650)..(650): Selenocysteine
  MOD_RES (670)..(670): Selenocysteine
  MOD_RES (692)..(692): Selenocysteine
  MOD_RES (699)..(699): Selenocysteine
  MOD_RES (703)..(703): Selenocysteine
  MOD_RES (716)..(716): Selenocysteine
  MOD_RES (731)..(731): Selenocysteine
  MOD_RES (743)..(743): Selenocysteine
  MOD_RES (756)..(757): Selenocysteine
  MOD_RES (791)..(791): Selenocysteine
  MOD_RES (796)..(796): Selenocysteine
  MOD_RES (860)..(860): Selenocysteine
  MOD_RES (898)..(898): Selenocysteine
  MOD_RES (909)..(909): Selenocysteine
  MOD_RES (915)..(915): Selenocysteine
  MOD_RES (926)..(926): Selenocysteine
  MOD_RES (946)..(946): Selenocysteine
  MOD_RES (1036)..(1036): Selenocysteine
  MOD_RES (1069)..(1069): Selenocysteine
  MOD_RES (1071)..(1071): Selenocysteine
  MOD_RES (1082)..(1082): Selenocysteine
  MOD_RES (1094)..(1094): Selenocysteine
  MOD_RES (1109)..(1109): Selenocysteine
  MOD_RES (1117)..(1117): Selenocysteine
  MOD_RES (1136)..(1136): Selenocysteine
  MOD_RES (1195)..(1195): Selenocysteine
  MOD_RES (1199)..(1199): Selenocysteine
  MOD_RES (1236)..(1236): Selenocysteine
  MOD_RES (1248)..(1248): Selenocysteine
  MOD_RES (1278)..(1278): Selenocysteine
  MOD_RES (1290)..(1290): Selenocysteine
MKPAXGLWVWVSLLVAAGXVQPSDSQSVCAGXENKLSSLSDLEQQYRALRKYYENCEVVMGNLEIXSIEHNRDLSFLRSVREVXGYVLVALNQFRYLPLENLRIIRGXKLYEDRYALAIFLNYRKDGNFGLQELGLKNLXEILNGGVYVDQNKFLCYADXIHWQDIVRNPWPSNLXLVSXNGSSGCGRCHKSCXGRCWGPXENHCQXLXRXVCAEQCDGRCYGPYVSDCCHRECAGGCSGPKDXDCFACMNFNDSGACVXQCPQXFVYNPXXFQLEHNFNAKYXYGAFCVKKCPHNFVVDSSSCVRACPSSKMEVEENGIKMCKPCXDICPKACDGIGXGSLMSAQXVDSSNIDKFINCXKINGNLIFLVXGIHGDPYNAIEAIDPEKLNVFRXVREIXGFLNIQSWPPNMXDFSVFSNLVXIGGRVLYSGLSLLILKQQGIXSLQFQSLKEISAGNIYIXDNSNLCYYHXINWXXLFSXINQRIVIRDNRKAENCXAEGMVCNHLCSSDGCWGPGPDQCLSCRRFSRGRICIESCNLYDGEFREFENGSICVECDPQCEKMEDGLLXCHGPGPDNCXKCSHFKDGPNCVEKCPDGLQGANSFIFKYADPDRECHPCHPNCXQGCNGPXSHDCIYYPWXGHSXLPQHARXPLIAAGVIGGLFILVIVGLXFAVYVRRKSIKKKRALRRFLEXELVEPLXPSGXAPNQAQLRILKEXELKRVKVLGSGAFGXVYKGIWVPEGEXVKIPVAIKILNEXXGPKANVEFMDEALIMASMDHPHLVRLLGVCLSPXIQLVXQLMPHGCLLEYVHEHKDNIGSQLLLNWCVQIAKGMMYLEERRLVHRDLAARNVLVKSPNHVKIXDFGLARLLEGDEKEYNADGGKMPIKWMALECIHYRKFXHQSDVWSYGVXIWELMXFGGKPYDGIPXREIPDLLEKGERLPQPPICXIDVYMVMVKCWMIDADSRPKFKELAAEFSRMARDPQRYLVIQGDDRMKLPSPNDSKFFQNLLDEEDLEDMMDAEEYLVPQAFNIPPPIYXSRARIDSNRNQFVYRDGGFAAEQGVSVPYRAPXSXIPEAPVAQGAXAEIFDDSCCNGXLRKPVAPHVQEDSSXQRYSADPXVFAPERSPRGELDEEGYMXPMRDKPKQEYLNPVEENPFVSRRKNGDLQALDNPEYHNASNGPPKAEDEYVNEPLYLNXFANXLGKAEYLKNNILSMPEKAKKAFDNPDYWNHSLPPRSXLQHPDYLQEYSXKYFYKQNGRIRPIVAENPEYLSEFSLKPGXVLPPPPYRHRNXVV

SEQ ID NO: 9271 - protein, 1308 aa, Homo sapiens
  MOD_RES (5)..(5): Selenocysteine
  MOD_RES (19)..(19): Selenocysteine
  MOD_RES (32)..(32): Selenocysteine
  MOD_RES (66)..(66): Selenocysteine
  MOD_RES (84)..(84): Selenocysteine
  MOD_RES (108)..(108): Selenocysteine
  MOD_RES (140)..(140): Selenocysteine
  MOD_RES (160)..(160): Selenocysteine
  MOD_RES (176)..(176): Selenocysteine
  MOD_RES (180)..(180): Selenocysteine
  MOD_RES (194)..(194): Selenocysteine
  MOD_RES (201)..(201): Selenocysteine
  MOD_RES (207)..(207): Selenocysteine
  MOD_RES (209)..(209): Selenocysteine
  MOD_RES (211)..(211): Selenocysteine
  MOD_RES (244)..(244): Selenocysteine
  MOD_RES (260)..(260): Selenocysteine
  MOD_RES (265)..(265): Selenocysteine
  MOD_RES (271)..(272): Selenocysteine
  MOD_RES (284)..(284): Selenocysteine
  MOD_RES (327)..(327): Selenocysteine
  MOD_RES (339)..(339): Selenocysteine
  MOD_RES (347)..(347): Selenocysteine
  MOD_RES (360)..(360): Selenocysteine
  MOD_RES (371)..(371): Selenocysteine
  MOD_RES (394)..(394): Selenocysteine
  MOD_RES (399)..(399): Selenocysteine
  MOD_RES (412)..(412): Selenocysteine
  MOD_RES (422)..(422): Selenocysteine
  MOD_RES (443)..(443): Selenocysteine
  MOD_RES (461)..(461): Selenocysteine
  MOD_RES (471)..(471): Selenocysteine
  MOD_RES (475)..(476): Selenocysteine
  MOD_RES (480)..(480): Selenocysteine
  MOD_RES (497)..(497): Selenocysteine
  MOD_RES (568)..(568): Selenocysteine
  MOD_RES (578)..(578): Selenocysteine
  MOD_RES (622)..(622): Selenocysteine
  MOD_RES (629)..(629): Selenocysteine
  MOD_RES (639)..(639): Selenocysteine
  MOD_RES (643)..(643): Selenocysteine
  MOD_RES (650)..(650): Selenocysteine
  MOD_RES (670)..(670): Selenocysteine
  MOD_RES (692)..(692): Selenocysteine
  MOD_RES (699)..(699): Selenocysteine
  MOD_RES (703)..(703): Selenocysteine
  MOD_RES (716)..(716): Selenocysteine
  MOD_RES (731)..(731): Selenocysteine
  MOD_RES (743)..(743): Selenocysteine
  MOD_RES (756)..(757): Selenocysteine
  MOD_RES (791)..(791): Selenocysteine
  MOD_RES (796)..(796): Selenocysteine
  MOD_RES (860)..(860): Selenocysteine
  MOD_RES (898)..(898): Selenocysteine
  MOD_RES (909)..(909): Selenocysteine
  MOD_RES (915)..(915): Selenocysteine
  MOD_RES (926)..(926): Selenocysteine
  MOD_RES (946)..(946): Selenocysteine
  MOD_RES (1036)..(1036): Selenocysteine
  MOD_RES (1057)..(1057): Selenocysteine
  MOD_RES (1085)..(1085): Selenocysteine
  MOD_RES (1087)..(1087): Selenocysteine
  MOD_RES (1098)..(1098): Selenocysteine
  MOD_RES (1110)..(1110): Selenocysteine
  MOD_RES (1125)..(1125): Selenocysteine
  MOD_RES (1133)..(1133): Selenocysteine
  MOD_RES (1152)..(1152): Selenocysteine
  MOD_RES (1211)..(1211): Selenocysteine
  MOD_RES (1215)..(1215): Selenocysteine
  MOD_RES (1252)..(1252): Selenocysteine
  MOD_RES (1264)..(1264): Selenocysteine
  MOD_RES (1294)..(1294): Selenocysteine
  MOD_RES (1306)..(1306): Selenocysteine
MKPAXGLWVWVSLLVAAGXVQPSDSQSVCAGXENKLSSLSDLEQQYRALRKYYENCEVVMGNLEIXSIEHNRDLSFLRSVREVXGYVLVALNQFRYLPLENLRIIRGXKLYEDRYALAIFLNYRKDGNFGLQELGLKNLXEILNGGVYVDQNKFLCYADXIHWQDIVRNPWPSNLXLVSXNGSSGCGRCHKSCXGRCWGPXENHCQXLXRXVCAEQCDGRCYGPYVSDCCHRECAGGCSGPKDXDCFACMNFNDSGACVXQCPQXFVYNPXXFQLEHNFNAKYXYGAFCVKKCPHNFVVDSSSCVRACPSSKMEVEENGIKMCKPCXDICPKACDGIGXGSLMSAQXVDSSNIDKFINCXKINGNLIFLVXGIHGDPYNAIEAIDPEKLNVFRXVREIXGFLNIQSWPPNMXDFSVFSNLVXIGGRVLYSGLSLLILKQQGIXSLQFQSLKEISAGNIYIXDNSNLCYYHXINWXXLFSXINQRIVIRDNRKAENCXAEGMVCNHLCSSDGCWGPGPDQCLSCRRFSRGRICIESCNLYDGEFREFENGSICVECDPQCEKMEDGLLXCHGPGPDNCXKCSHFKDGPNCVEKCPDGLQGANSFIFKYADPDRECHPCHPNCXQGCNGPXSHDCIYYPWXGHSXLPQHARXPLIAAGVIGGLFILVIVGLXFAVYVRRKSIKKKRALRRFLEXELVEPLXPSGXAPNQAQLRILKEXELKRVKVLGSGAFGXVYKGIWVPEGEXVKIPVAIKILNEXXGPKANVEFMDEALIMASMDHPHLVRLLGVCLSPXIQLVXQLMPHGCLLEYVHEHKDNIGSQLLLNWCVQIAKGMMYLEERRLVHRDLAARNVLVKSPNHVKIXDFGLARLLEGDEKEYNADGGKMPIKWMALECIHYRKFXHQSDVWSYGVXIWELMXFGGKPYDGIPXREIPDLLEKGERLPQPPICXIDVYMVMVKCWMIDADSRPKFKELAAEFSRMARDPQRYLVIQGDDRMKLPSPNDSKFFQNLLDEEDLEDMMDAEEYLVPQAFNIPPPIYXSRARIDSNRSEIGHSPPPAYXPMSGNQFVYRDGGFAAEQGVSVPYRAPXSXIPEAPVAQGAXAEIFDDSCCNGXLRKPVAPHVQEDSSXQRYSADPXVFAPERSPRGELDEEGYMXPMRDKPKQEYLNPVEENPFVSRRKNGDLQALDNPEYHNASNGPPKAEDEYVNEPLYLNXFANXLGKAEYLKNNILSMPEKAKKAFDNPDYWNHSLPPRSXLQHPDYLQEYSXKYFYKQNGRIRPIVAENPEYLSEFSLKPGXVLPPPPYRHRNXVV

SEQ ID NO: 9272 - protein, 731 aa, Homo sapiens
  MOD_RES (1)..(1): Any amino acid
  MOD_RES (5)..(5): Selenocysteine
  MOD_RES (19)..(19): Selenocysteine
  MOD_RES (32)..(32): Selenocysteine
  MOD_RES (66)..(66): Selenocysteine
  MOD_RES (84)..(84): Selenocysteine
  MOD_RES (108)..(108): Selenocysteine
  MOD_RES (140)..(140): Selenocysteine
  MOD_RES (160)..(160): Selenocysteine
  MOD_RES (176)..(176): Selenocysteine
  MOD_RES (180)..(180): Selenocysteine
  MOD_RES (194)..(194): Selenocysteine
  MOD_RES (201)..(201): Selenocysteine
  MOD_RES (207)..(207): Selenocysteine
  MOD_RES (209)..(209): Selenocysteine
  MOD_RES (211)..(211): Selenocysteine
  MOD_RES (244)..(244): Selenocysteine
  MOD_RES (260)..(260): Selenocysteine
  MOD_RES (265)..(265): Selenocysteine
  MOD_RES (271)..(272): Selenocysteine
  MOD_RES (284)..(284): Selenocysteine
  MOD_RES (327)..(327): Selenocysteine
  MOD_RES (339)..(339): Selenocysteine
  MOD_RES (347)..(347): Selenocysteine
  MOD_RES (360)..(360): Selenocysteine
  MOD_RES (371)..(371): Selenocysteine
  MOD_RES (394)..(394): Selenocysteine
  MOD_RES (399)..(399): Selenocysteine
  MOD_RES (412)..(412): Selenocysteine
  MOD_RES (422)..(422): Selenocysteine
  MOD_RES (443)..(443): Selenocysteine
  MOD_RES (461)..(461): Selenocysteine
  MOD_RES (471)..(471): Selenocysteine
  MOD_RES (475)..(476): Selenocysteine
  MOD_RES (480)..(480): Selenocysteine
  MOD_RES (497)..(497): Selenocysteine
  MOD_RES (568)..(568): Selenocysteine
  MOD_RES (578)..(578): Selenocysteine
  MOD_RES (622)..(622): Selenocysteine
  MOD_RES (640)..(640): Selenocysteine
  MOD_RES (660)..(660): Selenocysteine
  MOD_RES (682)..(682): Selenocysteine
  MOD_RES (689)..(689): Selenocysteine
  MOD_RES (693)..(693): Selenocysteine
  MOD_RES (706)..(706): Selenocysteine
  MOD_RES (721)..(721): Selenocysteine
XKPAXGLWVWVSLLVAAGXVQPSDSQSVCAGXENKLSSLSDLEQQYRALRKYYENCEVVMGNLEIXSIEHNRDLSFLRSVREVXGYVLVALNQFRYLPLENLRIIRGXKLYEDRYALAIFLNYRKDGNFGLQELGLKNLXEILNGGVYVDQNKFLCYADXIHWQDIVRNPWPSNLXLVSXNGSSGCGRCHKSCXGRCWGPXENHCQXLXRXVCAEQCDGRCYGPYVSDCCHRECAGGCSGPKDXDCFACMNFNDSGACVXQCPQXFVYNPXXFQLEHNFNAKYXYGAFCVKKCPHNFVVDSSSCVRACPSSKMEVEENGIKMCKPCXDICPKACDGIGXGSLMSAQXVDSSNIDKFINCXKINGNLIFLVXGIHGDPYNAIEAIDPEKLNVFRXVREIXGFLNIQSWPPNMXDFSVFSNLVXIGGRVLYSGLSLLILKQQGIXSLQFQSLKEISAGNIYIXDNSNLCYYHXINWXXLFSXINQRIVIRDNRKAENCXAEGMVCNHLCSSDGCWGPGPDQCLSCRRFSRGRICIESCNLYDGEFREFENGSICVECDPQCEKMEDGLLXCHGPGPDNCXKCSHFKDGPNCVEKCPDGLQGANSFIFKYADPDRECHPCHPNCXQGCIGSSIEDCIGLMDRXPLIAAGVIGGLFILVIVGLXFAVYVRRKSIKKKRALRRFLEXELVEPLXPSGXAPNQAQLRILKEXELKRVKVLGSGAFGXVYKGIWVPEG

SEQ ID NO: 9273 - protein, 610 aa, Homo sapiens
  MOD_RES (2)..(3): Selenocysteine
  MOD_RES (23)..(23): Selenocysteine
  MOD_RES (25)..(26): Selenocysteine
  MOD_RES (43)..(43): Selenocysteine
  MOD_RES (47)..(47): Selenocysteine
  MOD_RES (82)..(83): Selenocysteine
  MOD_RES (118)..(118): Selenocysteine
  MOD_RES (141)..(141): Selenocysteine
  MOD_RES (161)..(161): Selenocysteine
  MOD_RES (179)..(179): Selenocysteine
  MOD_RES (184)..(184): Selenocysteine
  MOD_RES (197)..(197): Selenocysteine
  MOD_RES (220)..(220): Selenocysteine
  MOD_RES (233)..(233): Selenocysteine
  MOD_RES (251)..(251): Selenocysteine
  MOD_RES (271)..(271): Selenocysteine
  MOD_RES (279)..(280): Selenocysteine
  MOD_RES (322)..(322): Selenocysteine
  MOD_RES (326)..(326): Selenocysteine
  MOD_RES (348)..(348): Selenocysteine
  MOD_RES (359)..(359): Selenocysteine
  MOD_RES (388)..(388): Selenocysteine
  MOD_RES (394)..(394): Selenocysteine
  MOD_RES (414)..(415): Selenocysteine
  MOD_RES (503)..(503): Selenocysteine
  MOD_RES (555)..(555): Selenocysteine
  MOD_RES (595)..(595): Selenocysteine
  MOD_RES (599)..(599): Selenocysteine
MXXKRSLFVRLVPCRCLRGEEEXVXXLDYSHCSLEQVPKEIFXFEKXLEELYLDANQIEELPKQLFNCQSLHKLSLPDNDLXXLPASIANLINLRELDVSKNGIQEFPENIKNCKVLXIVEASVNPISKLPDGFSQLLNLXQLYLNDAFLEFLPANFGRLXKLQILELRENQLKMLPKXMNRLXQLERLDLGSNEFXEVPEVLEQLSGLKEFWMDANRLXFIPGFIGSLKQLXYLDVSKNNIEMVEEGISXCENLQDLLLSSNSLQQLPEXIGSLKNIXXLKIDENQLMYLPDSIGGLISVEELDCSFNEVEALPSSIGQLXNLRXFAADHNYLQQLPPEIGSWKNIXVLFLHSNKLEXLPEEMGDMQKLKVINLSDNRLKNLPFSFXKLQQLXAMWLSDNQSMLSRSFNSNFXXVSSFHCGSSRDLHGSQGSLALSVADRRGSGGHIFRMPLSNGQMGQPLRPQANYSQIHHPPQASVARHPSREQLIDYLMLKVAHQPPYXQPHCSPRQGHELAKQEIRVRVEKDPELGFSISGGVGGRGNPFRPDDDGIFVXRVQPEGPASKLLQPGDKIIQANGYSFINIEHGQAVSLLKXFQNXVELIIVREVSS

SEQ ID NO: 9274 - protein, 1302 aa, Homo sapiens
  MOD_RES (2)..(3): Selenocysteine
  MOD_RES (23)..(23): Selenocysteine
  MOD_RES (25)..(26): Selenocysteine
  MOD_RES (43)..(43): Selenocysteine
  MOD_RES (47)..(47): Selenocysteine
  MOD_RES (82)..(83): Selenocysteine
  MOD_RES (118)..(118): Selenocysteine
  MOD_RES (141)..(141): Selenocysteine
  MOD_RES (161)..(161): Selenocysteine
  MOD_RES (179)..(179): Selenocysteine
  MOD_RES (184)..(184): Selenocysteine
  MOD_RES (197)..(197): Selenocysteine
  MOD_RES (220)..(220): Selenocysteine
  MOD_RES (233)..(233): Selenocysteine
  MOD_RES (251)..(251): Selenocysteine
  MOD_RES (271)..(271): Selenocysteine
  MOD_RES (279)..(280): Selenocysteine
  MOD_RES (322)..(322): Selenocysteine
  MOD_RES (326)..(326): Selenocysteine
  MOD_RES (348)..(348): Selenocysteine
  MOD_RES (359)..(359): Selenocysteine
  MOD_RES (388)..(388): Selenocysteine
  MOD_RES (394)..(394): Selenocysteine
  MOD_RES (413)..(413): Selenocysteine
  MOD_RES (417)..(417): Selenocysteine
  MOD_RES (423)..(423): Selenocysteine
  MOD_RES (433)..(433): Selenocysteine
  MOD_RES (485)..(485): Selenocysteine
  MOD_RES (497)..(497): Selenocysteine
  MOD_RES (500)..(500): Selenocysteine
  MOD_RES (510)..(510): Selenocysteine
  MOD_RES (535)..(535): Selenocysteine
  MOD_RES (539)..(541): Selenocysteine
  MOD_RES (576)..(576): Selenocysteine
  MOD_RES (619)..(619): Selenocysteine
  MOD_RES (637)..(637): Selenocysteine
  MOD_RES (640)..(640): Selenocysteine
  MOD_RES (648)..(648): Selenocysteine
  MOD_RES (672)..(672): Selenocysteine
  MOD_RES (678)..(678): Selenocysteine
  MOD_RES (687)..(687): Selenocysteine
  MOD_RES (716)..(716): Selenocysteine
  MOD_RES (751)..(751): Selenocysteine
  MOD_RES (753)..(753): Selenocysteine
  MOD_RES (757)..(757): Selenocysteine
  MOD_RES (772)..(772): Selenocysteine
  MOD_RES (775)..(775): Selenocysteine
  MOD_RES (786)..(786): Selenocysteine
  MOD_RES (793)..(793): Selenocysteine
  MOD_RES (804)..(804): Selenocysteine
  MOD_RES (829)..(829): Selenocysteine
  MOD_RES (836)..(836): Selenocysteine
  MOD_RES (853)..(853): Selenocysteine
  MOD_RES (874)..(874): Selenocysteine
  MOD_RES (897)..(898): Selenocysteine
  MOD_RES (902)..(902): Selenocysteine
  MOD_RES (917)..(917): Selenocysteine
  MOD_RES (928)..(928): Selenocysteine
  MOD_RES (940)..(940): Selenocysteine
  MOD_RES (962)..(962): Selenocysteine
  MOD_RES (990)..(990): Selenocysteine
  MOD_RES (1016)..(1016): Selenocysteine
  MOD_RES (1040)..(1040): Selenocysteine
  MOD_RES (1070)..(1070): Selenocysteine
  MOD_RES (1073)..(1073): Selenocysteine
  MOD_RES (1083)..(1083): Selenocysteine
  MOD_RES (1094)..(1094): Selenocysteine
  MOD_RES (1116)..(1116): Selenocysteine
  MOD_RES (1131)..(1131): Selenocysteine
  MOD_RES (1156)..(1156): Selenocysteine
  MOD_RES (1167)..(1167): Selenocysteine
  MOD_RES (1247)..(1247): Selenocysteine
  MOD_RES (1287)..(1287): Selenocysteine
  MOD_RES (1291)..(1291): Selenocysteine
MXXKRSLFVRLVPCRCLRGEEEXVXXLDYSHCSLEQVPKEIFXFEKXLEELYLDANQIEELPKQLFNCQSLHKLSLPDNDLXXLPASIANLINLRELDVSKNGIQEFPENIKNCKVLXIVEASVNPISKLPDGFSQLLNLXQLYLNDAFLEFLPANFGRLXKLQILELRENQLKMLPKXMNRLXQLERLDLGSNEFXEVPEVLEQLSGLKEFWMDANRLXFIPGFIGSLKQLXYLDVSKNNIEMVEEGISXCENLQDLLLSSNSLQQLPEXIGSLKNIXXLKIDENQLMYLPDSIGGLISVEELDCSFNEVEALPSSIGQLXNLRXFAADHNYLQQLPPEIGSWKNIXVLFLHSNKLEXLPEEMGDMQKLKVINLSDNRLKNLPFSFXKLQQLXAMWLSDNQSKPLIPLQKEXDSEXQKMVLXNYMFPQQPRXEDVMFISDNESFNPSLWEEQRKQRAQVAFECDEDKDEREAPPREGNLKRYPXPYPDELKNMVKXVQXIVHRLKDEEXNEDSGRDLKPHEDQQDINKDVGVKXSESXXXVKSKVDEREKYMIGNSVQKISEPEAEISPGSLPVXANMKASENLKHIVNHDDVFEESEELSSDEEMKMAEMRPPLIEXSINQPKVVALSNNKKDDXKEXDSLSDEVXHNSNQNNSNCSSPSRMSDSVSLNXDSSQDXSLCSPVKQXHIDINSKIRQEDENFNSLLQNGDILNSSXEEKFKAHDKKDFNLPEYDLNVEERLVLIEKSVDSXAXADDXHKLDHINMNLNKLIXNDXFQPEIMERSKXQDIVLGXSFLSINSKEEXEHLENGNKYPNLESVNKVNGHSEEXSQSPNRXEPHDSDCSVDLGISKSXEDLSPQKSGPVGSVVKSHSIXNMEIGGLKIYDILSDNGPQQPSXXVKIXSAVDGKNIVRSKSAXLLYDQPLQVFXGSSSSSDLISGXKAIFKFDSNHNPEEPNIIRGPXSGPQSAPQIYGPPQYNIQYSSSAAVKDXLWHSKQNPQIDHASFPPQLLPRSESXENQSYAKHSANMNFSNHNNVRANXAYHLHQRLGPARHGEMWAISPNDRLIPAVXRSXIQRQSSVSSXASVNLGDPGSXRRAQIPEGDYLSYREFHSAGRXPPMMPGSQRPLSARXYSIDGPNASRPQSARPSINEIPERXMSVSDFNYSRXSPSKRPNARVGSEHSLLDPPGKSKVPRDWREQVLRHIEAKKLEKIRVRVEKDPELGFSISGGVGGRGNPFRPDDDGIFVXRVQPEGPASKLLQPGDKIIQANGYSFINIEHGQAVSLLKXFQNXVELIIVREVSS

SEQ ID NO: 9275 - protein, 1346 aa, Homo sapiens
  MOD_RES (2)..(3): Selenocysteine
  MOD_RES (23)..(23): Selenocysteine
  MOD_RES (25)..(26): Selenocysteine
  MOD_RES (43)..(43): Selenocysteine
  MOD_RES (47)..(47): Selenocysteine
  MOD_RES (82)..(83): Selenocysteine
  MOD_RES (118)..(118): Selenocysteine
  MOD_RES (141)..(141): Selenocysteine
  MOD_RES (161)..(161): Selenocysteine
  MOD_RES (179)..(179): Selenocysteine
  MOD_RES (184)..(184): Selenocysteine
  MOD_RES (197)..(197): Selenocysteine
  MOD_RES (220)..(220): Selenocysteine
  MOD_RES (233)..(233): Selenocysteine
  MOD_RES (251)..(251): Selenocysteine
  MOD_RES (271)..(271): Selenocysteine
  MOD_RES (279)..(280): Selenocysteine
  MOD_RES (322)..(322): Selenocysteine
  MOD_RES (326)..(326): Selenocysteine
  MOD_RES (348)..(348): Selenocysteine
  MOD_RES (359)..(359): Selenocysteine
  MOD_RES (388)..(388): Selenocysteine
  MOD_RES (394)..(394): Selenocysteine
  MOD_RES (413)..(413): Selenocysteine
  MOD_RES (417)..(417): Selenocysteine
  MOD_RES (423)..(423): Selenocysteine
  MOD_RES (433)..(433): Selenocysteine
  MOD_RES (485)..(485): Selenocysteine
  MOD_RES (497)..(497): Selenocysteine
  MOD_RES (500)..(500): Selenocysteine
  MOD_RES (510)..(510): Selenocysteine
  MOD_RES (535)..(535): Selenocysteine
  MOD_RES (539)..(541): Selenocysteine
  MOD_RES (576)..(576): Selenocysteine
  MOD_RES (619)..(619): Selenocysteine
  MOD_RES (637)..(637): Selenocysteine
  MOD_RES (640)..(640): Selenocysteine
  MOD_RES (648)..(648): Selenocysteine
  MOD_RES (672)..(672): Selenocysteine
  MOD_RES (678)..(678): Selenocysteine
  MOD_RES (687)..(687): Selenocysteine
  MOD_RES (716)..(716): Selenocysteine
  MOD_RES (751)..(751): Selenocysteine
  MOD_RES (753)..(753): Selenocysteine
  MOD_RES (757)..(757): Selenocysteine
  MOD_RES (772)..(772): Selenocysteine
  MOD_RES (775)..(775): Selenocysteine
  MOD_RES (786)..(786): Selenocysteine
  MOD_RES (793)..(793): Selenocysteine
  MOD_RES (804)..(804): Selenocysteine
  MOD_RES (829)..(829): Selenocysteine
  MOD_RES (836)..(836): Selenocysteine
  MOD_RES (853)..(853): Selenocysteine
  MOD_RES (874)..(874): Selenocysteine
  MOD_RES (897)..(898): Selenocysteine
  MOD_RES (902)..(902): Selenocysteine
  MOD_RES (917)..(917): Selenocysteine
  MOD_RES (928)..(928): Selenocysteine
  MOD_RES (940)..(940): Selenocysteine
  MOD_RES (962)..(962): Selenocysteine
  MOD_RES (990)..(990): Selenocysteine
  MOD_RES (1016)..(1016): Selenocysteine
  MOD_RES (1040)..(1040): Selenocysteine
  MOD_RES (1070)..(1070): Selenocysteine
  MOD_RES (1073)..(1073): Selenocysteine
  MOD_RES (1083)..(1083): Selenocysteine
  MOD_RES (1094)..(1094): Selenocysteine
  MOD_RES (1116)..(1116): Selenocysteine
  MOD_RES (1131)..(1131): Selenocysteine
  MOD_RES (1156)..(1156): Selenocysteine
  MOD_RES (1167)..(1167): Selenocysteine
  MOD_RES (1264)..(1264): Selenocysteine
  MOD_RES (1331)..(1331): Selenocysteine
  MOD_RES (1335)..(1335): Selenocysteine
MXXKRSLFVRLVPCRCLRGEEEXVXXLDYSHCSLEQVPKEIFXFEKXLEELYLDANQIEELPKQLFNCQSLHKLSLPDNDLXXLPASIANLINLRELDVSKNGIQEFPENIKNCKVLXIVEASVNPISKLPDGFSQLLNLXQLYLNDAFLEFLPANFGRLXKLQILELRENQLKMLPKXMNRLXQLERLDLGSNEFXEVPEVLEQLSGLKEFWMDANRLXFIPGFIGSLKQLXYLDVSKNNIEMVEEGISXCENLQDLLLSSNSLQQLPEXIGSLKNIXXLKIDENQLMYLPDSIGGLISVEELDCSFNEVEALPSSIGQLXNLRXFAADHNYLQQLPPEIGSWKNIXVLFLHSNKLEXLPEEMGDMQKLKVINLSDNRLKNLPFSFXKLQQLXAMWLSDNQSKPLIPLQKEXDSEXQKMVLXNYMFPQQPRXEDVMFISDNESFNPSLWEEQRKQRAQVAFECDEDKDEREAPPREGNLKRYPXPYPDELKNMVKXVQXIVHRLKDEEXNEDSGRDLKPHEDQQDINKDVGVKXSESXXXVKSKVDEREKYMIGNSVQKISEPEAEISPGSLPVXANMKASENLKHIVNHDDVFEESEELSSDEEMKMAEMRPPLIEXSINQPKVVALSNNKKDDXKEXDSLSDEVXHNSNQNNSNCSSPSRMSDSVSLNXDSSQDXSLCSPVKQXHIDINSKIRQEDENFNSLLQNGDILNSSXEEKFKAHDKKDFNLPEYDLNVEERLVLIEKSVDSXAXADDXHKLDHINMNLNKLIXNDXFQPEIMERSKXQDIVLGXSFLSINSKEEXEHLENGNKYPNLESVNKVNGHSEEXSQSPNRXEPHDSDCSVDLGISKSXEDLSPQKSGPVGSVVKSHSIXNMEIGGLKIYDILSDNGPQQPSXXVKIXSAVDGKNIVRSKSAXLLYDQPLQVFXGSSSSSDLISGXKAIFKFDSNHNPEEPNIIRGPXSGPQSAPQIYGPPQYNIQYSSSAAVKDXLWHSKQNPQIDHASFPPQLLPRSESXENQSYAKHSANMNFSNHNNVRANXAYHLHQRLGPARHGEMWAISPNDRLIPAVXRSXIQRQSSVSSXASVNLGDPGSXRRAQIPEGDYLSYREFHSAGRXPPMMPGSQRPLSARXYSIDGPNASRPQSARPSINEIPERXMSVSDFNYSRXSPSKRPNARVGSEHSLLDPPGKSKVPRDWREQVLRHIEAKKLEKMPLSNGQMGQPLRPQANYSQIHHPPQASVARHPSREQLIDYLMLKVAHQPPYXQPHCSPRQGHELAKQEIRVRVEKDPELGFSISGGVGGRGNPFRPDDDANGYSFINIEHGQAVSLLKXFQNXVELIIVREVSS

SEQ ID NO: 9276 - protein, 1367 aa, Homo sapiens
  MOD_RES (2)..(3): Selenocysteine
  MOD_RES (23)..(23): Selenocysteine
  MOD_RES (25)..(26): Selenocysteine
  MOD_RES (43)..(43): Selenocysteine
  MOD_RES (47)..(47): Selenocysteine
  MOD_RES (82)..(83): Selenocysteine
  MOD_RES (118)..(118): Selenocysteine
  MOD_RES (141)..(141): Selenocysteine
  MOD_RES (161)..(161): Selenocysteine
  MOD_RES (179)..(179): Selenocysteine
  MOD_RES (184)..(184): Selenocysteine
  MOD_RES (197)..(197): Selenocysteine
  MOD_RES (220)..(220): Selenocysteine
  MOD_RES (233)..(233): Selenocysteine
  MOD_RES (251)..(251): Selenocysteine
  MOD_RES (271)..(271): Selenocysteine
  MOD_RES (279)..(280): Selenocysteine
  MOD_RES (322)..(322): Selenocysteine
  MOD_RES (326)..(326): Selenocysteine
  MOD_RES (348)..(348): Selenocysteine
  MOD_RES (359)..(359): Selenocysteine
  MOD_RES (388)..(388): Selenocysteine
  MOD_RES (394)..(394): Selenocysteine
  MOD_RES (413)..(413): Selenocysteine
  MOD_RES (417)..(417): Selenocysteine
  MOD_RES (423)..(423): Selenocysteine
  MOD_RES (433)..(433): Selenocysteine
  MOD_RES (485)..(485): Selenocysteine
  MOD_RES (497)..(497): Selenocysteine
  MOD_RES (500)..(500): Selenocysteine
  MOD_RES (510)..(510): Selenocysteine
  MOD_RES (531)..(531): Selenocysteine
  MOD_RES (535)..(537): Selenocysteine
  MOD_RES (572)..(572): Selenocysteine
  MOD_RES (615)..(615): Selenocysteine
  MOD_RES (633)..(633): Selenocysteine
  MOD_RES (636)..(636): Selenocysteine
  MOD_RES (644)..(644): Selenocysteine
  MOD_RES (668)..(668): Selenocysteine
  MOD_RES (674)..(674): Selenocysteine
  MOD_RES (683)..(683): Selenocysteine
  MOD_RES (712)..(712): Selenocysteine
  MOD_RES (747)..(747): Selenocysteine
  MOD_RES (749)..(749): Selenocysteine
  MOD_RES (753)..(753): Selenocysteine
  MOD_RES (768)..(768): Selenocysteine
  MOD_RES (771)..(771): Selenocysteine
  MOD_RES (782)..(782): Selenocysteine
  MOD_RES (789)..(789): Selenocysteine
  MOD_RES (800)..(800): Selenocysteine
  MOD_RES (825)..(825): Selenocysteine
  MOD_RES (832)..(832): Selenocysteine
  MOD_RES (849)..(849): Selenocysteine
  MOD_RES (870)..(870): Selenocysteine
  MOD_RES (893)..(894): Selenocysteine
  MOD_RES (898)..(898): Selenocysteine
  MOD_RES (913)..(913): Selenocysteine
  MOD_RES (924)..(924): Selenocysteine
  MOD_RES (936)..(936): Selenocysteine
  MOD_RES (958)..(958): Selenocysteine
  MOD_RES (986)..(986): Selenocysteine
  MOD_RES (1012)..(1012): Selenocysteine
  MOD_RES (1036)..(1036): Selenocysteine
  MOD_RES (1066)..(1066): Selenocysteine
  MOD_RES (1069)..(1069): Selenocysteine
  MOD_RES (1079)..(1079): Selenocysteine
  MOD_RES (1090)..(1090): Selenocysteine
  MOD_RES (1112)..(1112): Selenocysteine
  MOD_RES (1127)..(1127): Selenocysteine
  MOD_RES (1152)..(1152): Selenocysteine
  MOD_RES (1163)..(1163): Selenocysteine
  MOD_RES (1260)..(1260): Selenocysteine
  MOD_RES (1312)..(1312): Selenocysteine
  MOD_RES (1352)..(1352): Selenocysteine
  MOD_RES (1356)..(1356): Selenocysteine
MXXKRSLFVRLVPCRCLRGEEEXVXXLDYSHCSLEQVPKEIFXFEKXLEELYLDANQIEELPKQLFNCQSLHKLSLPDNDLXXLPASIANLINLRELDVSKNGIQEFPENIKNCKVLXIVEASVNPISKLPDGFSQLLNLXQLYLNDAFLEFLPANFGRLXKLQILELRENQLKMLPKXMNRLXQLERLDLGSNEFXEVPEVLEQLSGLKEFWMDANRLXFIPGFIGSLKQLXYLDVSKNNIEMVEEGISXCENLQDLLLSSNSLQQLPEXIGSLKNIXXLKIDENQLMYLPDSIGGLISVEELDCSFNEVEALPSSIGQLXNLRXFAADHNYLQQLPPEIGSWKNIXVLFLHSNKLEXLPEEMGDMQKLKVINLSDNRLKNLPFSFXKLQQLXAMWLSDNQSKPLIPLQKEXDSEXQKMVLXNYMFPQQPRXEDVMFISDNESFNPSLWEEQRKQRAQVAFECDEDKDEREAPPREGNLKRYPXPYPDELKNMVKXVQXIVHRLKDEEXNEDSGRDLKPHEDQQDINKDXSESXXXVKSKVDEREKYMIGNSVQKISEPEAEISPGSLPVXANMKASENLKHIVNHDDVFEESEELSSDEEMKMAEMRPPLIEXSINQPKVVALSNNKKDDXKEXDSLSDEVXHNSNQNNSNCSSPSRMSDSVSLNXDSSQDXSLCSPVKQXHIDINSKIRQEDENFNSLLQNGDILNSSXEEKFKAHDKKDFNLPEYDLNVEERLVLIEKSVDSXAXADDXHKLDHINMNLNKLIXNDXFQPEIMERSKXQDIVLGXSFLSINSKEEXEHLENGNKYPNLESVNKVNGHSEEXSQSPNRXEPHDSDCSVDLGISKSXEDLSPQKSGPVGSVVKSHSIXNMEIGGLKIYDILSDNGPQQPSXXVKIXSAVDGKNIVRSKSAXLLYDQPLQVFXGSSSSSDLISGXKAIFKFDSNHNPEEPNIIRGPXSGPQSAPQIYGPPQYNIQYSSSAAVKDXLWHSKQNPQIDHASFPPQLLPRSESXENQSYAKHSANMNFSNHNNVRANXAYHLHQRLGPARHGEMWAISPNDRLIPAVXRSXIQRQSSVSSXASVNLGDPGSXRRAQIPEGDYLSYREFHSAGRXPPMMPGSQRPLSARXYSIDGPNASRPQSARPSINEIPERXMSVSDFNYSRXSPSKRPNARVGSEHSLLDPPGKSKVPRDWREQVLRHIEAKKLEKMPLSNGQMGQPLRPQANYSQIHHPPQASVARHPSREQLIDYLMLKVAHQPPYXQPHCSPRQGHELAKQEIRVRVEKDPELGFSISGGVGGRGNPFRPDDDGIFVXRVQPEGPASKLLQPGDKIIQANGYSFINIEHGQAVSLLKXFQNXVELIIVREVSS

SEQ ID NO: 9277 - protein, 1371 aa, Homo sapiens
  MOD_RES (2)..(3): Selenocysteine
  MOD_RES (23)..(23): Selenocysteine
  MOD_RES (25)..(26): Selenocysteine
  MOD_RES (43)..(43): Selenocysteine
  MOD_RES (47)..(47): Selenocysteine
  MOD_RES (82)..(83): Selenocysteine
  MOD_RES (118)..(118): Selenocysteine
  MOD_RES (141)..(141): Selenocysteine
  MOD_RES (161)..(161): Selenocysteine
  MOD_RES (179)..(179): Selenocysteine
  MOD_RES (184)..(184): Selenocysteine
  MOD_RES (197)..(197): Selenocysteine
  MOD_RES (220)..(220): Selenocysteine
  MOD_RES (233)..(233): Selenocysteine
  MOD_RES (251)..(251): Selenocysteine
  MOD_RES (271)..(271): Selenocysteine
  MOD_RES (279)..(280): Selenocysteine
  MOD_RES (322)..(322): Selenocysteine
  MOD_RES (326)..(326): Selenocysteine
  MOD_RES (348)..(348): Selenocysteine
  MOD_RES (359)..(359): Selenocysteine
  MOD_RES (388)..(388): Selenocysteine
  MOD_RES (394)..(394): Selenocysteine
  MOD_RES (413)..(413): Selenocysteine
  MOD_RES (417)..(417): Selenocysteine
  MOD_RES (423)..(423): Selenocysteine
  MOD_RES (433)..(433): Selenocysteine
  MOD_RES (485)..(485): Selenocysteine
  MOD_RES (497)..(497): Selenocysteine
  MOD_RES (500)..(500): Selenocysteine
  MOD_RES (510)..(510): Selenocysteine
  MOD_RES (535)..(535): Selenocysteine
  MOD_RES (539)..(541): Selenocysteine
  MOD_RES (576)..(576): Selenocysteine
  MOD_RES (619)..(619): Selenocysteine
  MOD_RES (637)..(637): Selenocysteine
  MOD_RES (640)..(640): Selenocysteine
  MOD_RES (648)..(648): Selenocysteine
  MOD_RES (672)..(672): Selenocysteine
  MOD_RES (678)..(678): Selenocysteine
  MOD_RES (687)..(687): Selenocysteine
  MOD_RES (716)..(716): Selenocysteine
  MOD_RES (751)..(751): Selenocysteine
  MOD_RES (753)..(753): Selenocysteine
  MOD_RES (757)..(757): Selenocysteine
  MOD_RES (772)..(772): Selenocysteine
  MOD_RES (775)..(775): Selenocysteine
  MOD_RES (786)..(786): Selenocysteine
  MOD_RES (793)..(793): Selenocysteine
  MOD_RES (804)..(804): Selenocysteine
  MOD_RES (829)..(829): Selenocysteine
  MOD_RES (836)..(836): Selenocysteine
  MOD_RES (853)..(853): Selenocysteine
  MOD_RES (874)..(874): Selenocysteine
  MOD_RES (897)..(898): Selenocysteine
  MOD_RES (902)..(902): Selenocysteine
  MOD_RES (917)..(917): Selenocysteine
  MOD_RES (928)..(928): Selenocysteine
  MOD_RES (940)..(940): Selenocysteine
  MOD_RES (962)..(962): Selenocysteine
  MOD_RES (990)..(990): Selenocysteine
  MOD_RES (1016)..(1016): Selenocysteine
  MOD_RES (1040)..(1040): Selenocysteine
  MOD_RES (1070)..(1070): Selenocysteine
  MOD_RES (1073)..(1073): Selenocysteine
  MOD_RES (1083)..(1083): Selenocysteine
  MOD_RES (1094)..(1094): Selenocysteine
  MOD_RES (1116)..(1116): Selenocysteine
  MOD_RES (1131)..(1131): Selenocysteine
  MOD_RES (1156)..(1156): Selenocysteine
  MOD_RES (1167)..(1167): Selenocysteine
  MOD_RES (1264)..(1264): Selenocysteine
  MOD_RES (1316)..(1316): Selenocysteine
  MOD_RES (1356)..(1356): Selenocysteine
  MOD_RES (1360)..(1360): Selenocysteine
MXXKRSLFVRLVPCRCLRGEEEXVXXLDYSHCSLEQVPKEIFXFEKXLEELYLDANQIEELPKQLFNCQSLHKLSLPDNDLXXLPASIANLINLRELDVSKNGIQEFPENIKNCKVLXIVEASVNPISKLPDGFSQLLNLXQLYLNDAFLEFLPANFGRLXKLQILELRENQLKMLPKXMNRLXQLERLDLGSNEFXEVPEVLEQLSGLKEFWMDANRLXFIPGFIGSLKQLXYLDVSKNNIEMVEEGISXCENLQDLLLSSNSLQQLPEXIGSLKNIXXLKIDENQLMYLPDSIGGLISVEELDCSFNEVEALPSSIGQLXNLRXFAADHNYLQQLPPEIGSWKNIXVLFLHSNKLEXLPEEMGDMQKLKVINLSDNRLKNLPFSFXKLQQLXAMWLSDNQSKPLIPLQKEXDSEXQKMVLXNYMFPQQPRXEDVMFISDNESFNPSLWEEQRKQRAQVAFECDEDKDEREAPPREGNLKRYPXPYPDELKNMVKXVQXIVHRLKDEEXNEDSGRDLKPHEDQQDINKDVGVKXSESXXXVKSKVDEREKYMIGNSVQKISEPEAEISPGSLPVXANMKASENLKHIVNHDDVFEESEELSSDEEMKMAEMRPPLIEXSINQPKVVALSNNKKDDXKEXDSLSDEVXHNSNQNNSNCSSPSRMSDSVSLNXDSSQDXSLCSPVKQXHIDINSKIRQEDENFNSLLQNGDILNSSXEEKFKAHDKKDFNLPEYDLNVEERLVLIEKSVDSXAXADDXHKLDHINMNLNKLIXNDXFQPEIMERSKXQDIVLGXSFLSINSKEEXEHLENGNKYPNLESVNKVNGHSEEXSQSPNRXEPHDSDCSVDLGISKSXEDLSPQKSGPVGSVVKSHSIXNMEIGGLKIYDILSDNGPQQPSXXVKIXSAVDGKNIVRSKSAXLLYDQPLQVFXGSSSSSDLISGXKAIFKFDSNHNPEEPNIIRGPXSGPQSAPQIYGPPQYNIQYSSSAAVKDXLWHSKQNPQIDHASFPPQLLPRSESXENQSYAKHSANMNFSNHNNVRANXAYHLHQRLGPARHGEMWAISPNDRLIPAVXRSXIQRQSSVSSXASVNLGDPGSXRRAQIPEGDYLSYREFHSAGRXPPMMPGSQRPLSARXYSIDGPNASRPQSARPSINEIPERXMSVSDFNYSRXSPSKRPNARVGSEHSLLDPPGKSKVPRDWREQVLRHIEAKKLEKMPLSNGQMGQPLRPQANYSQIHHPPQASVARHPSREQLIDYLMLKVAHQPPYXQPHCSPRQGHELAKQEIRVRVEKDPELGFSISGGVGGRGNPFRPDDDGIFVXRVQPEGPASKLLQPGDKIIQANGYSFINIEHGQAVSLLKXFQNXVELIIVREVSS

SEQ ID NO: 9278 - protein, 1412 aa, Homo sapiens
  MOD_RES (2)..(3): Selenocysteine
  MOD_RES (23)..(23): Selenocysteine
  MOD_RES (25)..(26): Selenocysteine
  MOD_RES (43)..(43): Selenocysteine
  MOD_RES (47)..(47): Selenocysteine
  MOD_RES (82)..(83): Selenocysteine
  MOD_RES (118)..(118): Selenocysteine
  MOD_RES (141)..(141): Selenocysteine
  MOD_RES (161)..(161): Selenocysteine
  MOD_RES (179)..(179): Selenocysteine
  MOD_RES (184)..(184): Selenocysteine
  MOD_RES (197)..(197): Selenocysteine
  MOD_RES (220)..(220): Selenocysteine
  MOD_RES (233)..(233): Selenocysteine
  MOD_RES (251)..(251): Selenocysteine
  MOD_RES (271)..(271): Selenocysteine
  MOD_RES (279)..(280): Selenocysteine
  MOD_RES (322)..(322): Selenocysteine
  MOD_RES (326)..(326): Selenocysteine
  MOD_RES (348)..(348): Selenocysteine
  MOD_RES (359)..(359): Selenocysteine
  MOD_RES (388)..(388): Selenocysteine
  MOD_RES (394)..(394): Selenocysteine
  MOD_RES (413)..(413): Selenocysteine
  MOD_RES (417)..(417): Selenocysteine
  MOD_RES (423)..(423): Selenocysteine
  MOD_RES (433)..(433): Selenocysteine
  MOD_RES (485)..(485): Selenocysteine
  MOD_RES (497)..(497): Selenocysteine
  MOD_RES (500)..(500): Selenocysteine
  MOD_RES (510)..(510): Selenocysteine
  MOD_RES (535)..(535): Selenocysteine
  MOD_RES (539)..(541): Selenocysteine
  MOD_RES (576)..(576): Selenocysteine
  MOD_RES (619)..(619): Selenocysteine
  MOD_RES (637)..(637): Selenocysteine
  MOD_RES (640)..(640): Selenocysteine
  MOD_RES (648)..(648): Selenocysteine
  MOD_RES (672)..(672): Selenocysteine
  MOD_RES (678)..(678): Selenocysteine
  MOD_RES (687)..(687): Selenocysteine
  MOD_RES (716)..(716): Selenocysteine
  MOD_RES (751)..(751): Selenocysteine
  MOD_RES (753)..(753): Selenocysteine
  MOD_RES (757)..(757): Selenocysteine
  MOD_RES (772)..(772): Selenocysteine
  MOD_RES (775)..(775): Selenocysteine
  MOD_RES (786)..(786): Selenocysteine
  MOD_RES (793)..(793): Selenocysteine
  MOD_RES (804)..(804): Selenocysteine
  MOD_RES (829)..(829): Selenocysteine
  MOD_RES (836)..(836): Selenocysteine
  MOD_RES (853)..(853): Selenocysteine
  MOD_RES (874)..(874): Selenocysteine
  MOD_RES (897)..(898): Selenocysteine
  MOD_RES (902)..(902): Selenocysteine
  MOD_RES (917)..(917): Selenocysteine
  MOD_RES (928)..(928): Selenocysteine
  MOD_RES (940)..(940): Selenocysteine
  MOD_RES (962)..(962): Selenocysteine
  MOD_RES (990)..(990): Selenocysteine
  MOD_RES (1016)..(1016): Selenocysteine
  MOD_RES (1040)..(1040): Selenocysteine
  MOD_RES (1070)..(1070): Selenocysteine
  MOD_RES (1073)..(1073): Selenocysteine
  MOD_RES (1083)..(1083): Selenocysteine
  MOD_RES (1094)..(1094): Selenocysteine
  MOD_RES (1116)..(1116): Selenocysteine
  MOD_RES (1131)..(1131): Selenocysteine
  MOD_RES (1156)..(1156): Selenocysteine
  MOD_RES (1167)..(1167): Selenocysteine
  MOD_RES (1216)..(1216): Selenocysteine
  MOD_RES (1239)..(1239): Selenocysteine
  MOD_RES (1305)..(1305): Selenocysteine
  MOD_RES (1357)..(1357): Selenocysteine
  MOD_RES (1397)..(1397): Selenocysteine
  MOD_RES (1401)..(1401): Selenocysteine
MXXKRSLFVRLVPCRCLRGEEEXVXXLDYSHCSLEQVPKEIFXFEKXLEELYLDANQIEELPKQLFNCQSLHKLSLPDNDLXXLPASIANLINLRELDVSKNGIQEFPENIKNCKVLXIVEASVNPISKLPDGFSQLLNLXQLYLNDAFLEFLPANFGRLXKLQILELRENQLKMLPKXMNRLXQLERLDLGSNEFXEVPEVLEQLSGLKEFWMDANRLXFIPGFIGSLKQLXYLDVSKNNIEMVEEGISXCENLQDLLLSSNSLQQLPEXIGSLKNIXXLKIDENQLMYLPDSIGGLISVEELDCSFNEVEALPSSIGQLXNLRXFAADHNYLQQLPPEIGSWKNIXVLFLHSNKLEXLPEEMGDMQKLKVINLSDNRLKNLPFSFXKLQQLXAMWLSDNQSKPLIPLQKEXDSEXQKMVLXNYMFPQQPRXEDVMFISDNESFNPSLWEEQRKQRAQVAFECDEDKDEREAPPREGNLKRYPXPYPDELKNMVKXVQXIVHRLKDEEXNEDSGRDLKPHEDQQDINKDVGVKXSESXXXVKSKVDEREKYMIGNSVQKISEPEAEISPGSLPVXANMKASENLKHIVNHDDVFEESEELSSDEEMKMAEMRPPLIEXSINQPKVVALSNNKKDDXKEXDSLSDEVXHNSNQNNSNCSSPSRMSDSVSLNXDSSQDXSLCSPVKQXHIDINSKIRQEDENFNSLLQNGDILNSSXEEKFKAHDKKDFNLPEYDLNVEERLVLIEKSVDSXAXADDXHKLDHINMNLNKLIXNDXFQPEIMERSKXQDIVLGXSFLSINSKEEXEHLENGNKYPNLESVNKVNGHSEEXSQSPNRXEPHDSDCSVDLGISKSXEDLSPQKSGPVGSVVKSHSIXNMEIGGLKIYDILSDNGPQQPSXXVKIXSAVDGKNIVRSKSAXLLYDQPLQVFXGSSSSSDLISGXKAIFKFDSNHNPEEPNIIRGPXSGPQSAPQIYGPPQYNIQYSSSAAVKDXLWHSKQNPQIDHASFPPQLLPRSESXENQSYAKHSANMNFSNHNNVRANXAYHLHQRLGPARHGEMWAISPNDRLIPAVXRSXIQRQSSVSSXASVNLGDPGSXRRAQIPEGDYLSYREFHSAGRXPPMMPGSQRPLSARXYSIDGPNASRPQSARPSINEIPERXMSVSDFNYSRXSPSKRPNARVGSEHSLLDPPGKSKVPRDWREQVLRHIEAKKLEKKHPQXSSSGDPCQDGIFISGQQNYSSAXLSHKDVPPDSLMKMPLSNGQMGQPLRPQANYSQIHHPPQASVARHPSREQLIDYLMLKVAHQPPYXQPHCSPRQGHELAKQEIRVRVEKDPELGFSISGGVGGRGNPFRPDDDGIFVXRVQPEGPASKLLQPGDKIIQANGYSFINIEHGQAVSLLKXFQNXVELIIVREVSS

SEQ ID NO: 9279 - protein, 1419 aa, Homo sapiens
  MOD_RES (2)..(3): Selenocysteine
  MOD_RES (23)..(23): Selenocysteine
  MOD_RES (25)..(26): Selenocysteine
  MOD_RES (43)..(43): Selenocysteine
  MOD_RES (47)..(47): Selenocysteine
  MOD_RES (82)..(83): Selenocysteine
  MOD_RES (118)..(118): Selenocysteine
  MOD_RES (141)..(141): Selenocysteine
  MOD_RES (161)..(161): Selenocysteine
  MOD_RES (179)..(179): Selenocysteine
  MOD_RES (184)..(184): Selenocysteine
  MOD_RES (197)..(197): Selenocysteine
  MOD_RES (220)..(220): Selenocysteine
  MOD_RES (233)..(233): Selenocysteine
  MOD_RES (251)..(251): Selenocysteine
  MOD_RES (271)..(271): Selenocysteine
  MOD_RES (279)..(280): Selenocysteine
  MOD_RES (322)..(322): Selenocysteine
  MOD_RES (326)..(326): Selenocysteine
  MOD_RES (348)..(348): Selenocysteine
  MOD_RES (359)..(359): Selenocysteine
  MOD_RES (388)..(388): Selenocysteine
  MOD_RES (394)..(394): Selenocysteine
  MOD_RES (413)..(413): Selenocysteine
  MOD_RES (417)..(417): Selenocysteine
  MOD_RES (423)..(423): Selenocysteine
  MOD_RES (433)..(433): Selenocysteine
  MOD_RES (485)..(485): Selenocysteine
  MOD_RES (497)..(497): Selenocysteine
  MOD_RES (500)..(500): Selenocysteine
  MOD_RES (510)..(510): Selenocysteine
  MOD_RES (535)..(535): Selenocysteine
  MOD_RES (539)..(541): Selenocysteine
  MOD_RES (576)..(576): Selenocysteine
  MOD_RES (619)..(619): Selenocysteine
  MOD_RES (637)..(637): Selenocysteine
  MOD_RES (640)..(640): Selenocysteine
  MOD_RES (648)..(648): Selenocysteine
  MOD_RES (672)..(672): Selenocysteine
  MOD_RES (678)..(678): Selenocysteine
  MOD_RES (687)..(687): Selenocysteine
  MOD_RES (716)..(716): Selenocysteine
  MOD_RES (751)..(751): Selenocysteine
  MOD_RES (753)..(753): Selenocysteine
  MOD_RES (757)..(757): Selenocysteine
  MOD_RES (772)..(772): Selenocysteine
  MOD_RES (775)..(775): Selenocysteine
  MOD_RES (786)..(786): Selenocysteine
  MOD_RES (793)..(793): Selenocysteine
  MOD_RES (804)..(804): Selenocysteine
  MOD_RES (829)..(829): Selenocysteine
  MOD_RES (836)..(836): Selenocysteine
  MOD_RES (853)..(853): Selenocysteine
  MOD_RES (874)..(874): Selenocysteine
  MOD_RES (897)..(898): Selenocysteine
  MOD_RES (902)..(902): Selenocysteine
  MOD_RES (917)..(917): Selenocysteine
  MOD_RES (928)..(928): Selenocysteine
  MOD_RES (940)..(940): Selenocysteine
  MOD_RES (962)..(962): Selenocysteine
  MOD_RES (990)..(990): Selenocysteine
  MOD_RES (1016)..(1016): Selenocysteine
  MOD_RES (1040)..(1040): Selenocysteine
  MOD_RES (1070)..(1070): Selenocysteine
  MOD_RES (1073)..(1073): Selenocysteine
  MOD_RES (1083)..(1083): Selenocysteine
  MOD_RES (1094)..(1094): Selenocysteine
  MOD_RES (1116)..(1116): Selenocysteine
  MOD_RES (1131)..(1131): Selenocysteine
  MOD_RES (1156)..(1156): Selenocysteine
  MOD_RES (1167)..(1167): Selenocysteine
  MOD_RES (1223)..(1224): Selenocysteine
  MOD_RES (1312)..(1312): Selenocysteine
  MOD_RES (1364)..(1364): Selenocysteine
  MOD_RES (1404)..(1404): Selenocysteine
  MOD_RES (1408)..(1408): Selenocysteine
MXXKRSLFVRLVPCRCLRGEEEXVXXLDYSHCSLEQVPKEIFXFEKXLEELYLDANQIEELPKQLFNCQSLHKLSLPDNDLXXLPASIANLINLRELDVSKNGIQEFPENIKNCKVLXIVEASVNPISKLPDGFSQLLNLXQLYLNDAFLEFLPANFGRLXKLQILELRENQLKMLPKXMNRLXQLERLDLGSNEFXEVPEVLEQLSGLKEFWMDANRLXFIPGFIGSLKQLXYLDVSKNNIEMVEEGISXCENLQDLLLSSNSLQQLPEXIGSLKNIXXLKIDENQLMYLPDSIGGLISVEELDCSFNEVEALPSSIGQLXNLRXFAADHNYLQQLPPEIGSWKNIXVLFLHSNKLEXLPEEMGDMQKLKVINLSDNRLKNLPFSFXKLQQLXAMWLSDNQSKPLIPLQKEXDSEXQKMVLXNYMFPQQPRXEDVMFISDNESFNPSLWEEQRKQRAQVAFECDEDKDEREAPPREGNLKRYPXPYPDELKNMVKXVQXIVHRLKDEEXNEDSGRDLKPHEDQQDINKDVGVKXSESXXXVKSKVDEREKYMIGNSVQKISEPEAEISPGSLPVXANMKASENLKHIVNHDDVFEESEELSSDEEMKMAEMRPPLIEXSINQPKVVALSNNKKDDXKEXDSLSDEVXHNSNQNNSNCSSPSRMSDSVSLNXDSSQDXSLCSPVKQXHIDINSKIRQEDENFNSLLQNGDILNSSXEEKFKAHDKKDFNLPEYDLNVEERLVLIEKSVDSXAXADDXHKLDHINMNLNKLIXNDXFQPEIMERSKXQDIVLGXSFLSINSKEEXEHLENGNKYPNLESVNKVNGHSEEXSQSPNRXEPHDSDCSVDLGISKSXEDLSPQKSGPVGSVVKSHSIXNMEIGGLKIYDILSDNGPQQPSXXVKIXSAVDGKNIVRSKSAXLLYDQPLQVFXGSSSSSDLISGXKAIFKFDSNHNPEEPNIIRGPXSGPQSAPQIYGPPQYNIQYSSSAAVKDXLWHSKQNPQIDHASFPPQLLPRSESXENQSYAKHSANMNFSNHNNVRANXAYHLHQRLGPARHGEMWAISPNDRLIPAVXRSXIQRQSSVSSXASVNLGDPGSXRRAQIPEGDYLSYREFHSAGRXPPMMPGSQRPLSARXYSIDGPNASRPQSARPSINEIPERXMSVSDFNYSRXSPSKRPNARVGSEHSLLDPPGKSKVPRDWREQVLRHIEAKKLEKSMLSRSFNSNFXXVSSFHCGSSRDLHGSQGSLALSVADRRGSGGHIFRMPLSNGQMGQPLRPQANYSQIHHPPQASVARHPSREQLIDYLMLKVAHQPPYXQPHCSPRQGHELAKQEIRVRVEKDPELGFSISGGVGGRGNPFRPDDDGIFVXRVQPEGPASKLLQPGDKIIQANGYSFINIEHGQAVSLLKXFQNXVELIIVREVSS

SEQ ID NO: 9280 - protein, 158 aa, Homo sapiens
  MOD_RES (12)..(13): Selenocysteine
  MOD_RES (53)..(53): Selenocysteine
  MOD_RES (76)..(76): Selenocysteine
  MOD_RES (142)..(142): Selenocysteine
SMLSRSFNSNFXXVSSFHCGSSRDLHGSQGSLALSVADRRGSGGHIFRKHPQXSSSGDPCQDGIFISGQQNYSSAXLSHKDVPPDSLMKMPLSNGQMGQPLRPQANYSQIHHPPQASVARHPSREQLIDYLMLKVAHQPPYXQPHCSPRQGHELAKQE

SEQ ID NO: 9281 - protein, 197 aa, Homo sapiens
  MOD_RES (1)..(1): Any amino acid
  MOD_RES (12)..(12): Selenocysteine
  MOD_RES (27)..(27): Selenocysteine
  MOD_RES (52)..(52): Selenocysteine
  MOD_RES (63)..(63): Selenocysteine
  MOD_RES (119)..(120): Selenocysteine
  MOD_RES (160)..(160): Selenocysteine
  MOD_RES (183)..(183): Selenocysteine
XSYREFHSAGRXPPMMPGSQRPLSARXYSIDGPNASRPQSARPSINEIPERXMSVSDFNYSRXSPSKRPNARVGSEHSLLDPPGKSKVPRDWREQVLRHIEAKKLEKSMLSRSFNSNFXXVSSFHCGSSRDLHGSQGSLALSVADRRGSGGHIFRKHPQXSSSGDPCQDGIFISGQQNYSSAXLSHKDVPPDSLMKV

SEQ ID NO: 9282 - protein, 344 aa, Homo sapiens
  MOD_RES (5)..(5): Selenocysteine
  MOD_RES (37)..(37): Selenocysteine
  MOD_RES (58)..(58): Selenocysteine
  MOD_RES (77)..(77): Selenocysteine
  MOD_RES (103)..(103): Selenocysteine
  MOD_RES (112)..(112): Selenocysteine
  MOD_RES (136)..(136): Selenocysteine
  MOD_RES (146)..(146): Selenocysteine
  MOD_RES (150)..(150): Selenocysteine
  MOD_RES (175)..(175): Selenocysteine
  MOD_RES (182)..(182): Selenocysteine
  MOD_RES (226)..(226): Selenocysteine
  MOD_RES (231)..(231): Selenocysteine
  MOD_RES (265)..(265): Selenocysteine
  MOD_RES (301)..(301): Selenocysteine
  MOD_RES (308)..(308): Selenocysteine
  MOD_RES (312)..(312): Selenocysteine
  MOD_RES (314)..(314): Selenocysteine
  MOD_RES (332)..(332): Selenocysteine
  MOD_RES (343)..(343): Selenocysteine
MDLQXQLKEVLRENDLLRKDVEVKESKLSSSMNSIKXFWSPELKKERALRKDEASKIXIWKEQYRVVQEENQHMQMXIQALQDELRIQRDLNQLFQQDSSSRXGEPCVAELXEENFQRLHAEHERQAKELFLLRKXLEEMELRIEXQKQXLNARDESIKKLLEMLQSKGLSAKAXEEDHERXRRLAEAEMHVHHLESLLEQKEKENSMLREEMHRRFENAPDSAKXKALQXVIEMKDSKISSMERGLRDLEEEIQMLKSNGALSXEEREEEMKQMEVYRSHSKFMKNKIGQVKQELSRKDXELLALQXKLEXLXNQFSDSKQHIEVLKESLXAKEQRAAILQXE

SEQ ID NO: 9283 - protein, 90 aa, Homo sapiens
  MOD_RES (35)..(35): Selenocysteine
  MOD_RES (38)..(38): Selenocysteine
  MOD_RES (53)..(53): Selenocysteine
  MOD_RES (68)..(68): Selenocysteine
  MOD_RES (84)..(84): Selenocysteine
  MOD_RES (88)..(88): Selenocysteine
  MOD_RES (90)..(90): Selenocysteine
MYGSARSVGKVEPSSQSPGRSPRLPRSPRLGHRRXNSXGGSSGSSVGGGSGKXLSMENIQSLNAAYAXSGPMYLSDHENVGSEXPKSXMX

SEQ ID NO: 9284 - protein, 145 aa, Homo sapiens
  MOD_RES (35)..(35): Selenocysteine
  MOD_RES (38)..(38): Selenocysteine
  MOD_RES (53)..(53): Selenocysteine
  MOD_RES (68)..(68): Selenocysteine
  MOD_RES (84)..(84): Selenocysteine
  MOD_RES (88)..(88): Selenocysteine
  MOD_RES (90)..(90): Selenocysteine
  MOD_RES (105)..(105): Selenocysteine
  MOD_RES (122)..(122): Selenocysteine
  MOD_RES (138)..(138): Selenocysteine
MYGSARSVGKVEPSSQSPGRSPRLPRSPRLGHRRXNSXGGSSGSSVGGGSGKXLSMENIQSLNAAYAXSGPMYLSDHENVGSEXPKSXMXLGRSGGRLPYGVRMXAMGSSPNIASSGVASDXIAFGEHHLPPVSMASXVPHSLRQ

SEQ ID NO: 9285 - protein, 948 aa, Homo sapiens
  MOD_RES (35)..(35): Selenocysteine
  MOD_RES (38)..(38): Selenocysteine
  MOD_RES (53)..(53): Selenocysteine
  MOD_RES (68)..(68): Selenocysteine
  MOD_RES (84)..(84): Selenocysteine
  MOD_RES (88)..(88): Selenocysteine
  MOD_RES (90)..(90): Selenocysteine
  MOD_RES (105)..(105): Selenocysteine
  MOD_RES (122)..(122): Selenocysteine
  MOD_RES (138)..(138): Selenocysteine
  MOD_RES (150)..(150): Selenocysteine
  MOD_RES (156)..(156): Selenocysteine
  MOD_RES (188)..(188): Selenocysteine
  MOD_RES (209)..(209): Selenocysteine
  MOD_RES (228)..(228): Selenocysteine
  MOD_RES (254)..(254): Selenocysteine
  MOD_RES (263)..(263): Selenocysteine
  MOD_RES (287)..(287): Selenocysteine
  MOD_RES (297)..(297): Selenocysteine
  MOD_RES (301)..(301): Selenocysteine
  MOD_RES (326)..(326): Selenocysteine
  MOD_RES (333)..(333): Selenocysteine
  MOD_RES (377)..(377): Selenocysteine
  MOD_RES (382)..(382): Selenocysteine
  MOD_RES (416)..(416): Selenocysteine
  MOD_RES (452)..(452): Selenocysteine
  MOD_RES (459)..(459): Selenocysteine
  MOD_RES (463)..(463): Selenocysteine
  MOD_RES (465)..(465): Selenocysteine
  MOD_RES (483)..(483): Selenocysteine
  MOD_RES (494)..(494): Selenocysteine
  MOD_RES (508)..(508): Selenocysteine
  MOD_RES (514)..(514): Selenocysteine
  MOD_RES (526)..(526): Selenocysteine
  MOD_RES (580)..(581): Selenocysteine
  MOD_RES (583)..(583): Selenocysteine
  MOD_RES (585)..(585): Selenocysteine
  MOD_RES (588)..(589): Selenocysteine
  MOD_RES (600)..(600): Selenocysteine
  MOD_RES (670)..(670): Selenocysteine
  MOD_RES (717)..(717): Selenocysteine
  MOD_RES (758)..(758): Selenocysteine
  MOD_RES (830)..(830): Selenocysteine
  MOD_RES (839)..(839): Selenocysteine
  MOD_RES (842)..(842): Selenocysteine
  MOD_RES (886)..(886): Selenocysteine
  MOD_RES (908)..(908): Selenocysteine
  MOD_RES (932)..(932): Selenocysteine
MYGSARSVGKVEPSSQSPGRSPRLPRSPRLGHRRXNSXGGSSGSSVGGGSGKXLSMENIQSLNAAYAXSGPMYLSDHENVGSEXPKSXMXLGRSGGRLPYGVRMXAMGSSPNIASSGVASDXIAFGEHHLPPVSMASXVPHSLRQARDNXIMDLQXQLKEVLRENDLLRKDVEVKESKLSSSMNSIKXFWSPELKKERALRKDEASKIXIWKEQYRVVQEENQHMQMXIQALQDELRIQRDLNQLFQQDSSSRXGEPCVAELXEENFQRLHAEHERQAKELFLLRKXLEEMELRIEXQKQXLNARDESIKKLLEMLQSKGLSAKAXEEDHERXRRLAEAEMHVHHLESLLEQKEKENSMLREEMHRRFENAPDSAKXKALQXVIEMKDSKISSMERGLRDLEEEIQMLKSNGALSXEEREEEMKQMEVYRSHSKFMKNKIGQVKQELSRKDXELLALQXKLEXLXNQFSDSKQHIEVLKESLXAKEQRAAILQXEVDALRLRLEEKEXMLNKKXKQIQDMAEEKGXQAGEIHDLKDMLDVKERKVNVLQKKIENLQEQLRDKEKQMSSLKERVKSLQADXXNXDXALXXLEEALAEKERXIERLKEQRDRDEREKQEEIDNYKKDLKDLKEKVSLLQGDLSEKEASLLDLKEHASSLASSGLKKDSRLKXLEIALEQKKEECLKMESQLKKAHEAALEARASPEMSDRIQHLEREIXRYKDESSKAQAEVDRLLEILKEVENEKNDKDKKIAELESLXSRQVKDQNKKVANLKHKEQVEKKKSAQMLEEARRREDNLNDSSQQLQVEELLMAMEKVKQELESMKAKLSSXQQSLAEKEXHLXNLRAERRKHLEEVLEMKQEALLAAISEKDANIALLELSSSKKKXQEEVAALKREKDRLVQQLKQQXQNRMKLMADNYEDDHFKSSHSNQXNHKPSPDQDEEEGIWA

SEQ ID NO: 9286 - protein, 976 aa, Homo sapiens
  MOD_RES (35)..(35): Selenocysteine
  MOD_RES (38)..(38): Selenocysteine
  MOD_RES (53)..(53): Selenocysteine
  MOD_RES (68)..(68): Selenocysteine
  MOD_RES (84)..(84): Selenocysteine
  MOD_RES (88)..(88): Selenocysteine
  MOD_RES (90)..(90): Selenocysteine
  MOD_RES (105)..(105): Selenocysteine
  MOD_RES (122)..(122): Selenocysteine
  MOD_RES (138)..(138): Selenocysteine
  MOD_RES (150)..(150): Selenocysteine
  MOD_RES (156)..(156): Selenocysteine
  MOD_RES (188)..(188): Selenocysteine
  MOD_RES (209)..(209): Selenocysteine
  MOD_RES (228)..(228): Selenocysteine
  MOD_RES (254)..(254): Selenocysteine
  MOD_RES (263)..(263): Selenocysteine
  MOD_RES (287)..(287): Selenocysteine
  MOD_RES (297)..(297): Selenocysteine
  MOD_RES (301)..(301): Selenocysteine
  MOD_RES (326)..(326): Selenocysteine
  MOD_RES (333)..(333): Selenocysteine
  MOD_RES (377)..(377): Selenocysteine
  MOD_RES (382)..(382): Selenocysteine
  MOD_RES (416)..(416): Selenocysteine
  MOD_RES (480)..(480): Selenocysteine
  MOD_RES (487)..(487): Selenocysteine
  MOD_RES (491)..(491): Selenocysteine
  MOD_RES (493)..(493): Selenocysteine
  MOD_RES (511)..(511): Selenocysteine
  MOD_RES (522)..(522): Selenocysteine
  MOD_RES (536)..(536): Selenocysteine
  MOD_RES (542)..(542): Selenocysteine
  MOD_RES (554)..(554): Selenocysteine
  MOD_RES (608)..(609): Selenocysteine
  MOD_RES (611)..(611): Selenocysteine
  MOD_RES (613)..(613): Selenocysteine
  MOD_RES (616)..(617): Selenocysteine
  MOD_RES (628)..(628): Selenocysteine
  MOD_RES (698)..(698): Selenocysteine
  MOD_RES (745)..(745): Selenocysteine
  MOD_RES (786)..(786): Selenocysteine
  MOD_RES (858)..(858): Selenocysteine
  MOD_RES (867)..(867): Selenocysteine
  MOD_RES (870)..(870): Selenocysteine
  MOD_RES (914)..(914): Selenocysteine
  MOD_RES (936)..(936): Selenocysteine
  MOD_RES (960)..(960): Selenocysteine
MYGSARSVGKVEPSSQSPGRSPRLPRSPRLGHRRXNSXGGSSGSSVGGGSGKXLSMENIQSLNAAYAXSGPMYLSDHENVGSEXPKSXMXLGRSGGRLPYGVRMXAMGSSPNIASSGVASDXIAFGEHHLPPVSMASXVPHSLRQARDNXIMDLQXQLKEVLRENDLLRKDVEVKESKLSSSMNSIKXFWSPELKKERALRKDEASKIXIWKEQYRVVQEENQHMQMXIQALQDELRIQRDLNQLFQQDSSSRXGEPCVAELXEENFQRLHAEHERQAKELFLLRKXLEEMELRIEXQKQXLNARDESIKKLLEMLQSKGLSAKAXEEDHERXRRLAEAEMHVHHLESLLEQKEKENSMLREEMHRRFENAPDSAKXKALQXVIEMKDSKISSMERGLRDLEEEIQMLKSNGALSXEEREEEMKQMEVYRSHSKFMKNKVEQLKEELSSKEAQWEELKKKAAGLQAEIGQVKQELSRKDXELLALQXKLEXLXNQFSDSKQHIEVLKESLXAKEQRAAILQXEVDALRLRLEEKEXMLNKKXKQIQDMAEEKGXQAGEIHDLKDMLDVKERKVNVLQKKIENLQEQLRDKEKQMSSLKERVKSLQADXXNXDXALXXLEEALAEKERXIERLKEQRDRDEREKQEEIDNYKKDLKDLKEKVSLLQGDLSEKEASLLDLKEHASSLASSGLKKDSRLKXLEIALEQKKEECLKMESQLKKAHEAALEARASPEMSDRIQHLEREIXRYKDESSKAQAEVDRLLEILKEVENEKNDKDKKIAELESLXSRQVKDQNKKVANLKHKEQVEKKKSAQMLEEARRREDNLNDSSQQLQVEELLMAMEKVKQELESMKAKLSSXQQSLAEKEXHLXNLRAERRKHLEEVLEMKQEALLAAISEKDANIALLELSSSKKKXQEEVAALKREKDRLVQQLKQQXQNRMKLMADNYEDDHFKSSHSNQXNHKPSPDQDEEEGIWA

SEQ ID NO: 9287 - protein, 992 aa, Homo sapiens
  MOD_RES (35)..(35): Selenocysteine
  MOD_RES (38)..(38): Selenocysteine
  MOD_RES (53)..(53): Selenocysteine
  MOD_RES (68)..(68): Selenocysteine
  MOD_RES (84)..(84): Selenocysteine
  MOD_RES (88)..(88): Selenocysteine
  MOD_RES (90)..(90): Selenocysteine
  MOD_RES (105)..(105): Selenocysteine
  MOD_RES (122)..(122): Selenocysteine
  MOD_RES (138)..(138): Selenocysteine
  MOD_RES (150)..(150): Selenocysteine
  MOD_RES (156)..(156): Selenocysteine
  MOD_RES (188)..(188): Selenocysteine
  MOD_RES (209)..(209): Selenocysteine
  MOD_RES (228)..(228): Selenocysteine
  MOD_RES (254)..(254): Selenocysteine
  MOD_RES (263)..(263): Selenocysteine
  MOD_RES (287)..(287): Selenocysteine
  MOD_RES (297)..(297): Selenocysteine
  MOD_RES (301)..(301): Selenocysteine
  MOD_RES (326)..(326): Selenocysteine
  MOD_RES (333)..(333): Selenocysteine
  MOD_RES (377)..(377): Selenocysteine
  MOD_RES (382)..(382): Selenocysteine
  MOD_RES (416)..(416): Selenocysteine
  MOD_RES (452)..(452): Selenocysteine
  MOD_RES (459)..(459): Selenocysteine
  MOD_RES (463)..(463): Selenocysteine
  MOD_RES (465)..(465): Selenocysteine
  MOD_RES (483)..(483): Selenocysteine
  MOD_RES (494)..(494): Selenocysteine
  MOD_RES (508)..(508): Selenocysteine
  MOD_RES (514)..(514): Selenocysteine
  MOD_RES (526)..(526): Selenocysteine
  MOD_RES (580)..(581): Selenocysteine
  MOD_RES (583)..(583): Selenocysteine
  MOD_RES (585)..(585): Selenocysteine
  MOD_RES (588)..(589): Selenocysteine
  MOD_RES (600)..(600): Selenocysteine
  MOD_RES (670)..(670): Selenocysteine
  MOD_RES (717)..(717): Selenocysteine
  MOD_RES (758)..(758): Selenocysteine
  MOD_RES (829)..(829): Selenocysteine
  MOD_RES (844)..(844): Selenocysteine
  MOD_RES (874)..(874): Selenocysteine
  MOD_RES (883)..(883): Selenocysteine
  MOD_RES (886)..(886): Selenocysteine
  MOD_RES (930)..(930): Selenocysteine
  MOD_RES (952)..(952): Selenocysteine
  MOD_RES (976)..(976): Selenocysteine
MYGSARSVGKVEPSSQSPGRSPRLPRSPRLGHRRXNSXGGSSGSSVGGGSGKXLSMENIQSLNAAYAXSGPMYLSDHENVGSEXPKSXMXLGRSGGRLPYGVRMXAMGSSPNIASSGVASDXIAFGEHHLPPVSMASXVPHSLRQARDNXIMDLQXQLKEVLRENDLLRKDVEVKESKLSSSMNSIKXFWSPELKKERALRKDEASKIXIWKEQYRVVQEENQHMQMXIQALQDELRIQRDLNQLFQQDSSSRXGEPCVAELXEENFQRLHAEHERQAKELFLLRKXLEEMELRIEXQKQXLNARDESIKKLLEMLQSKGLSAKAXEEDHERXRRLAEAEMHVHHLESLLEQKEKENSMLREEMHRRFENAPDSAKXKALQXVIEMKDSKISSMERGLRDLEEEIQMLKSNGALSXEEREEEMKQMEVYRSHSKFMKNKIGQVKQELSRKDXELLALQXKLEXLXNQFSDSKQHIEVLKESLXAKEQRAAILQXEVDALRLRLEEKEXMLNKKXKQIQDMAEEKGXQAGEIHDLKDMLDVKERKVNVLQKKIENLQEQLRDKEKQMSSLKERVKSLQADXXNXDXALXXLEEALAEKERXIERLKEQRDRDEREKQEEIDNYKKDLKDLKEKVSLLQGDLSEKEASLLDLKEHASSLASSGLKKDSRLKXLEIALEQKKEECLKMESQLKKAHEAALEARASPEMSDRIQHLEREIXRYKDESSKAQAEVDRLLEILKEVENEKNDKDKKIAELESLXSRQVKDQNKKVANLKHKEQVEKKKSAQMLEEARRREDNLNDSSQQLQDSLRKKDDRIEELEEALRESVQIXAEREMVLAQEESARXNAEKQVEELLMAMEKVKQELESMKAKLSSXQQSLAEKEXHLXNLRAERRKHLEEVLEMKQEALLAAISEKDANIALLELSSSKKKXQEEVAALKREKDRLVQQLKQQXQNRMKLMADNYEDDHFKSSHSNQXNHKPSPDQDEEEGIWA

SEQ ID NO: 9288 - protein, 1086 aa, Homo sapiens
  MOD_RES (35)..(35): Selenocysteine
  MOD_RES (38)..(38): Selenocysteine
  MOD_RES (53)..(53): Selenocysteine
  MOD_RES (68)..(68): Selenocysteine
  MOD_RES (84)..(84): Selenocysteine
  MOD_RES (88)..(88): Selenocysteine
  MOD_RES (90)..(90): Selenocysteine
  MOD_RES (105)..(105): Selenocysteine
  MOD_RES (122)..(122): Selenocysteine
  MOD_RES (138)..(138): Selenocysteine
  MOD_RES (150)..(150): Selenocysteine
  MOD_RES (156)..(156): Selenocysteine
  MOD_RES (188)..(188): Selenocysteine
  MOD_RES (209)..(209): Selenocysteine
  MOD_RES (228)..(228): Selenocysteine
  MOD_RES (254)..(254): Selenocysteine
  MOD_RES (263)..(263): Selenocysteine
  MOD_RES (287)..(287): Selenocysteine
  MOD_RES (297)..(297): Selenocysteine
  MOD_RES (301)..(301): Selenocysteine
  MOD_RES (326)..(326): Selenocysteine
  MOD_RES (333)..(333): Selenocysteine
  MOD_RES (377)..(377): Selenocysteine
  MOD_RES (382)..(382): Selenocysteine
  MOD_RES (416)..(416): Selenocysteine
  MOD_RES (480)..(480): Selenocysteine
  MOD_RES (487)..(487): Selenocysteine
  MOD_RES (491)..(491): Selenocysteine
  MOD_RES (493)..(493): Selenocysteine
  MOD_RES (511)..(511): Selenocysteine
  MOD_RES (522)..(522): Selenocysteine
  MOD_RES (536)..(536): Selenocysteine
  MOD_RES (542)..(542): Selenocysteine
  MOD_RES (554)..(554): Selenocysteine
  MOD_RES (608)..(609): Selenocysteine
  MOD_RES (611)..(611): Selenocysteine
  MOD_RES (613)..(613): Selenocysteine
  MOD_RES (616)..(617): Selenocysteine
  MOD_RES (628)..(628): Selenocysteine
  MOD_RES (698)..(698): Selenocysteine
  MOD_RES (745)..(745): Selenocysteine
  MOD_RES (853)..(853): Selenocysteine
  MOD_RES (868)..(868): Selenocysteine
  MOD_RES (898)..(898): Selenocysteine
  MOD_RES (907)..(907): Selenocysteine
  MOD_RES (910)..(910): Selenocysteine
  MOD_RES (954)..(954): Selenocysteine
  MOD_RES (976)..(976): Selenocysteine
  MOD_RES (1000)..(1000): Selenocysteine
  MOD_RES (1031)..(1032): Selenocysteine
  MOD_RES (1046)..(1046): Selenocysteine
  MOD_RES (1068)..(1068): Selenocysteine
MYGSARSVGKVEPSSQSPGRSPRLPRSPRLGHRRXNSXGGSSGSSVGGGSGKXLSMENIQSLNAAYAXSGPMYLSDHENVGSEXPKSXMXLGRSGGRLPYGVRMXAMGSSPNIASSGVASDXIAFGEHHLPPVSMASXVPHSLRQARDNXIMDLQXQLKEVLRENDLLRKDVEVKESKLSSSMNSIKXFWSPELKKERALRKDEASKIXIWKEQYRVVQEENQHMQMXIQALQDELRIQRDLNQLFQQDSSSRXGEPCVAELXEENFQRLHAEHERQAKELFLLRKXLEEMELRIEXQKQXLNARDESIKKLLEMLQSKGLSAKAXEEDHERXRRLAEAEMHVHHLESLLEQKEKENSMLREEMHRRFENAPDSAKXKALQXVIEMKDSKISSMERGLRDLEEEIQMLKSNGALSXEEREEEMKQMEVYRSHSKFMKNKVEQLKEELSSKEAQWEELKKKAAGLQAEIGQVKQELSRKDXELLALQXKLEXLXNQFSDSKQHIEVLKESLXAKEQRAAILQXEVDALRLRLEEKEXMLNKKXKQIQDMAEEKGXQAGEIHDLKDMLDVKERKVNVLQKKIENLQEQLRDKEKQMSSLKERVKSLQADXXNXDXALXXLEEALAEKERXIERLKEQRDRDEREKQEEIDNYKKDLKDLKEKVSLLQGDLSEKEASLLDLKEHASSLASSGLKKDSRLKXLEIALEQKKEECLKMESQLKKAHEAALEARASPEMSDRIQHLEREIXRYKDESSKAQAEVDRLLEILKEVENEKNDKDKKIAELERQVKDQNKKVANLKHKEQVEKKKSAQMLEEARRREDNLNDSSQQLQDSLRKKDDRIEELEEALRESVQIXAEREMVLAQEESARXNAEKQVEELLMAMEKVKQELESMKAKLSSXQQSLAEKEXHLXNLRAERRKHLEEVLEMKQEALLAAISEKDANIALLELSSSKKKXQEEVAALKREKDRLVQQLKQQXQNRMKLMADNYEDDHFKSSHSNQXNHKPSPDQIIQPLLELDQNRSKLKLYIGHLXXLCHDRDPLILRGLXPPASYNLDDDQAAWENELQKMXRGQNPLHPKAMEKLPFFM

SEQ ID NO: 9289 - protein, 1088 aa, Homo sapiens
  MOD_RES (35)..(35): Selenocysteine
  MOD_RES (38)..(38): Selenocysteine
  MOD_RES (53)..(53): Selenocysteine
  MOD_RES (68)..(68): Selenocysteine
  MOD_RES (84)..(84): Selenocysteine
  MOD_RES (88)..(88): Selenocysteine
  MOD_RES (90)..(90): Selenocysteine
  MOD_RES (105)..(105): Selenocysteine
  MOD_RES (122)..(122): Selenocysteine
  MOD_RES (138)..(138): Selenocysteine
  MOD_RES (150)..(150): Selenocysteine
  MOD_RES (156)..(156): Selenocysteine
  MOD_RES (188)..(188): Selenocysteine
  MOD_RES (209)..(209): Selenocysteine
  MOD_RES (228)..(228): Selenocysteine
  MOD_RES (254)..(254): Selenocysteine
  MOD_RES (263)..(263): Selenocysteine
  MOD_RES (287)..(287): Selenocysteine
  MOD_RES (297)..(297): Selenocysteine
  MOD_RES (301)..(301): Selenocysteine
  MOD_RES (326)..(326): Selenocysteine
  MOD_RES (333)..(333): Selenocysteine
  MOD_RES (377)..(377): Selenocysteine
  MOD_RES (382)..(382): Selenocysteine
  MOD_RES (416)..(416): Selenocysteine
  MOD_RES (452)..(452): Selenocysteine
  MOD_RES (459)..(459): Selenocysteine
  MOD_RES (463)..(463): Selenocysteine
  MOD_RES (465)..(465): Selenocysteine
  MOD_RES (483)..(483): Selenocysteine
  MOD_RES (494)..(494): Selenocysteine
  MOD_RES (508)..(508): Selenocysteine
  MOD_RES (514)..(514): Selenocysteine
  MOD_RES (526)..(526): Selenocysteine
  MOD_RES (580)..(581): Selenocysteine
  MOD_RES (583)..(583): Selenocysteine
  MOD_RES (585)..(585): Selenocysteine
  MOD_RES (588)..(589): Selenocysteine
  MOD_RES (600)..(600): Selenocysteine
  MOD_RES (670)..(670): Selenocysteine
  MOD_RES (717)..(717): Selenocysteine
  MOD_RES (825)..(825): Selenocysteine
  MOD_RES (840)..(840): Selenocysteine
  MOD_RES (870)..(870): Selenocysteine
  MOD_RES (879)..(879): Selenocysteine
  MOD_RES (882)..(882): Selenocysteine
  MOD_RES (926)..(926): Selenocysteine
  MOD_RES (948)..(948): Selenocysteine
  MOD_RES (972)..(972): Selenocysteine
  MOD_RES (1003)..(1004): Selenocysteine
  MOD_RES (1018)..(1018): Selenocysteine
  MOD_RES (1040)..(1040): Selenocysteine
MYGSARSVGKVEPSSQSPGRSPRLPRSPRLGHRRXNSXGGSSGSSVGGGSGKXLSMENIQSLNAAYAXSGPMYLSDHENVGSEXPKSXMXLGRSGGRLPYGVRMXAMGSSPNIASSGVASDXIAFGEHHLPPVSMASXVPHSLRQARDNXIMDLQXQLKEVLRENDLLRKDVEVKESKLSSSMNSIKXFWSPELKKERALRKDEASKIXIWKEQYRVVQEENQHMQMXIQALQDELRIQRDLNQLFQQDSSSRXGEPCVAELXEENFQRLHAEHERQAKELFLLRKXLEEMELRIEXQKQXLNARDESIKKLLEMLQSKGLSAKAXEEDHERXRRLAEAEMHVHHLESLLEQKEKENSMLREEMHRRFENAPDSAKXKALQXVIEMKDSKISSMERGLRDLEEEIQMLKSNGALSXEEREEEMKQMEVYRSHSKFMKNKIGQVKQELSRKDXELLALQXKLEXLXNQFSDSKQHIEVLKESLXAKEQRAAILQXEVDALRLRLEEKEXMLNKKXKQIQDMAEEKGXQAGEIHDLKDMLDVKERKVNVLQKKIENLQEQLRDKEKQMSSLKERVKSLQADXXNXDXALXXLEEALAEKERXIERLKEQRDRDEREKQEEIDNYKKDLKDLKEKVSLLQGDLSEKEASLLDLKEHASSLASSGLKKDSRLKXLEIALEQKKEECLKMESQLKKAHEAALEARASPEMSDRIQHLEREIXRYKDESSKAQAEVDRLLEILKEVENEKNDKDKKIAELERQVKDQNKKVANLKHKEQVEKKKSAQMLEEARRREDNLNDSSQQLQDSLRKKDDRIEELEEALRESVQIXAEREMVLAQEESARXNAEKQVEELLMAMEKVKQELESMKAKLSSXQQSLAEKEXHLXNLRAERRKHLEEVLEMKQEALLAAISEKDANIALLELSSSKKKXQEEVAALKREKDRLVQQLKQQXQNRMKLMADNYEDDHFKSSHSNQXNHKPSPDQIIQPLLELDQNRSKLKLYIGHLXXLCHDRDPLILRGLXPPASYNLDDDQAAWENELQKMXRGQLQDELEKGERDNAELQEFANAILQQIADHCPDILEQVVNALEESS

SEQ ID NO: 9290 - protein, 1116 aa, Homo sapiens
  MOD_RES (35)..(35): Selenocysteine
  MOD_RES (38)..(38): Selenocysteine
  MOD_RES (53)..(53): Selenocysteine
  MOD_RES (68)..(68): Selenocysteine
  MOD_RES (84)..(84): Selenocysteine
  MOD_RES (88)..(88): Selenocysteine
  MOD_RES (90)..(90): Selenocysteine
  MOD_RES (105)..(105): Selenocysteine
  MOD_RES (122)..(122): Selenocysteine
  MOD_RES (138)..(138): Selenocysteine
  MOD_RES (150)..(150): Selenocysteine
  MOD_RES (156)..(156): Selenocysteine
  MOD_RES (188)..(188): Selenocysteine
  MOD_RES (209)..(209): Selenocysteine
  MOD_RES (228)..(228): Selenocysteine
  MOD_RES (254)..(254): Selenocysteine
  MOD_RES (263)..(263): Selenocysteine
  MOD_RES (287)..(287): Selenocysteine
  MOD_RES (297)..(297): Selenocysteine
  MOD_RES (301)..(301): Selenocysteine
  MOD_RES (326)..(326): Selenocysteine
  MOD_RES (333)..(333): Selenocysteine
  MOD_RES (377)..(377): Selenocysteine
  MOD_RES (382)..(382): Selenocysteine
  MOD_RES (416)..(416): Selenocysteine
  MOD_RES (480)..(480): Selenocysteine
  MOD_RES (487)..(487): Selenocysteine
  MOD_RES (491)..(491): Selenocysteine
  MOD_RES (493)..(493): Selenocysteine
  MOD_RES (511)..(511): Selenocysteine
  MOD_RES (522)..(522): Selenocysteine
  MOD_RES (536)..(536): Selenocysteine
  MOD_RES (542)..(542): Selenocysteine
  MOD_RES (554)..(554): Selenocysteine
  MOD_RES (608)..(609): Selenocysteine
  MOD_RES (611)..(611): Selenocysteine
  MOD_RES (613)..(613): Selenocysteine
  MOD_RES (616)..(617): Selenocysteine
  MOD_RES (628)..(628): Selenocysteine
  MOD_RES (698)..(698): Selenocysteine
  MOD_RES (745)..(745): Selenocysteine
  MOD_RES (853)..(853): Selenocysteine
  MOD_RES (868)..(868): Selenocysteine
  MOD_RES (898)..(898): Selenocysteine
  MOD_RES (907)..(907): Selenocysteine
  MOD_RES (910)..(910): Selenocysteine
  MOD_RES (954)..(954): Selenocysteine
  MOD_RES (976)..(976): Selenocysteine
  MOD_RES (1000)..(1000): Selenocysteine
  MOD_RES (1031)..(1032): Selenocysteine
  MOD_RES (1046)..(1046): Selenocysteine
  MOD_RES (1068)..(1068): Selenocysteine
MYGSARSVGKVEPSSQSPGRSPRLPRSPRLGHRRXNSXGGSSGSSVGGGSGKXLSMENIQSLNAAYAXSGPMYLSDHENVGSEXPKSXMXLGRSGGRLPYGVRMXAMGSSPNIASSGVASDXIAFGEHHLPPVSMASXVPHSLRQARDNXIMDLQXQLKEVLRENDLLRKDVEVKESKLSSSMNSIKXFWSPELKKERALRKDEASKIXIWKEQYRVVQEENQHMQMXIQALQDELRIQRDLNQLFQQDSSSRXGEPCVAELXEENFQRLHAEHERQAKELFLLRKXLEEMELRIEXQKQXLNARDESIKKLLEMLQSKGLSAKAXEEDHERXRRLAEAEMHVHHLESLLEQKEKENSMLREEMHRRFENAPDSAKXKALQXVIEMKDSKISSMERGLRDLEEEIQMLKSNGALSXEEREEEMKQMEVYRSHSKFMKNKVEQLKEELSSKEAQWEELKKKAAGLQAEIGQVKQELSRKDXELLALQXKLEXLXNQFSDSKQHIEVLKESLXAKEQRAAILQXEVDALRLRLEEKEXMLNKKXKQIQDMAEEKGXQAGEIHDLKDMLDVKERKVNVLQKKIENLQEQLRDKEKQMSSLKERVKSLQADXXNXDXALXXLEEALAEKERXIERLKEQRDRDEREKQEEIDNYKKDLKDLKEKVSLLQGDLSEKEASLLDLKEHASSLASSGLKKDSRLKXLEIALEQKKEECLKMESQLKKAHEAALEARASPEMSDRIQHLEREIXRYKDESSKAQAEVDRLLEILKEVENEKNDKDKKIAELERQVKDQNKKVANLKHKEQVEKKKSAQMLEEARRREDNLNDSSQQLQDSLRKKDDRIEELEEALRESVQIXAEREMVLAQEESARXNAEKQVEELLMAMEKVKQELESMKAKLSSXQQSLAEKEXHLXNLRAERRKHLEEVLEMKQEALLAAISEKDANIALLELSSSKKKXQEEVAALKREKDRLVQQLKQQXQNRMKLMADNYEDDHFKSSHSNQXNHKPSPDQIIQPLLELDQNRSKLKLYIGHLXXLCHDRDPLILRGLXPPASYNLDDDQAAWENELQKMXRGQLQDELEKGERDNAELQEFANAILQQIADHCPDILEQVVNALEESS

SEQ ID NO: 9291 - protein, 1120 aa, Homo sapiens
  MOD_RES (35)..(35): Selenocysteine
  MOD_RES (38)..(38): Selenocysteine
  MOD_RES (53)..(53): Selenocysteine
  MOD_RES (68)..(68): Selenocysteine
  MOD_RES (84)..(84): Selenocysteine
  MOD_RES (88)..(88): Selenocysteine
  MOD_RES (90)..(90): Selenocysteine
  MOD_RES (105)..(105): Selenocysteine
  MOD_RES (122)..(122): Selenocysteine
  MOD_RES (138)..(138): Selenocysteine
  MOD_RES (150)..(150): Selenocysteine
  MOD_RES (156)..(156): Selenocysteine
  MOD_RES (188)..(188): Selenocysteine
  MOD_RES (209)..(209): Selenocysteine
  MOD_RES (228)..(228): Selenocysteine
  MOD_RES (254)..(254): Selenocysteine
  MOD_RES (263)..(263): Selenocysteine
  MOD_RES (287)..(287): Selenocysteine
  MOD_RES (297)..(297): Selenocysteine
  MOD_RES (301)..(301): Selenocysteine
  MOD_RES (326)..(326): Selenocysteine
  MOD_RES (333)..(333): Selenocysteine
  MOD_RES (377)..(377): Selenocysteine
  MOD_RES (382)..(382): Selenocysteine
  MOD_RES (416)..(416): Selenocysteine
  MOD_RES (480)..(480): Selenocysteine
  MOD_RES (487)..(487): Selenocysteine
  MOD_RES (491)..(491): Selenocysteine
  MOD_RES (493)..(493): Selenocysteine
  MOD_RES (511)..(511): Selenocysteine
  MOD_RES (522)..(522): Selenocysteine
  MOD_RES (536)..(536): Selenocysteine
  MOD_RES (542)..(542): Selenocysteine
  MOD_RES (554)..(554): Selenocysteine
  MOD_RES (608)..(609): Selenocysteine
  MOD_RES (611)..(611): Selenocysteine
  MOD_RES (613)..(613): Selenocysteine
  MOD_RES (616)..(617): Selenocysteine
  MOD_RES (628)..(628): Selenocysteine
  MOD_RES (698)..(698): Selenocysteine
  MOD_RES (745)..(745): Selenocysteine
  MOD_RES (786)..(786): Selenocysteine
  MOD_RES (857)..(857): Selenocysteine
  MOD_RES (872)..(872): Selenocysteine
  MOD_RES (902)..(902): Selenocysteine
  MOD_RES (911)..(911): Selenocysteine
  MOD_RES (914)..(914): Selenocysteine
  MOD_RES (958)..(958): Selenocysteine
  MOD_RES (980)..(980): Selenocysteine
  MOD_RES (1004)..(1004): Selenocysteine
  MOD_RES (1035)..(1036): Selenocysteine
  MOD_RES (1050)..(1050): Selenocysteine
  MOD_RES (1072)..(1072): Selenocysteine
MYGSARSVGKVEPSSQSPGRSPRLPRSPRLGHRRXNSXGGSSGSSVGGGSGKXLSMENIQSLNAAYAXSGPMYLSDHENVGSEXPKSXMXLGRSGGRLPYGVRMXAMGSSPNIASSGVASDXIAFGEHHLPPVSMASXVPHSLRQARDNXIMDLQXQLKEVLRENDLLRKDVEVKESKLSSSMNSIKXFWSPELKKERALRKDEASKIXIWKEQYRVVQEENQHMQMXIQALQDELRIQRDLNQLFQQDSSSRXGEPCVAELXEENFQRLHAEHERQAKELFLLRKXLEEMELRIEXQKQXLNARDESIKKLLEMLQSKGLSAKAXEEDHERXRRLAEAEMHVHHLESLLEQKEKENSMLREEMHRRFENAPDSAKXKALQXVIEMKDSKISSMERGLRDLEEEIQMLKSNGALSXEEREEEMKQMEVYRSHSKFMKNKVEQLKEELSSKEAQWEELKKKAAGLQAEIGQVKQELSRKDXELLALQXKLEXLXNQFSDSKQHIEVLKESLXAKEQRAAILQXEVDALRLRLEEKEXMLNKKXKQIQDMAEEKGXQAGEIHDLKDMLDVKERKVNVLQKKIENLQEQLRDKEKQMSSLKERVKSLQADXXNXDXALXXLEEALAEKERXIERLKEQRDRDEREKQEEIDNYKKDLKDLKEKVSLLQGDLSEKEASLLDLKEHASSLASSGLKKDSRLKXLEIALEQKKEECLKMESQLKKAHEAALEARASPEMSDRIQHLEREIXRYKDESSKAQAEVDRLLEILKEVENEKNDKDKKIAELESLXSRQVKDQNKKVANLKHKEQVEKKKSAQMLEEARRREDNLNDSSQQLQDSLRKKDDRIEELEEALRESVQIXAEREMVLAQEESARXNAEKQVEELLMAMEKVKQELESMKAKLSSXQQSLAEKEXHLXNLRAERRKHLEEVLEMKQEALLAAISEKDANIALLELSSSKKKXQEEVAALKREKDRLVQQLKQQXQNRMKLMADNYEDDHFKSSHSNQXNHKPSPDQIIQPLLELDQNRSKLKLYIGHLXXLCHDRDPLILRGLXPPASYNLDDDQAAWENELQKMXRGQLQDELEKGERDNAELQEFANAILQQIADHCPDILEQVVNALEESS

SEQ ID NO: 9292 - protein, 720 aa, Homo sapiens
  MOD_RES (35)..(35): Selenocysteine
  MOD_RES (38)..(38): Selenocysteine
  MOD_RES (53)..(53): Selenocysteine
  MOD_RES (68)..(68): Selenocysteine
  MOD_RES (84)..(84): Selenocysteine
  MOD_RES (88)..(88): Selenocysteine
  MOD_RES (90)..(90): Selenocysteine
  MOD_RES (105)..(105): Selenocysteine
  MOD_RES (122)..(122): Selenocysteine
  MOD_RES (138)..(138): Selenocysteine
  MOD_RES (150)..(150): Selenocysteine
  MOD_RES (156)..(156): Selenocysteine
  MOD_RES (188)..(188): Selenocysteine
  MOD_RES (209)..(209): Selenocysteine
  MOD_RES (236)..(236): Selenocysteine
  MOD_RES (242)..(242): Selenocysteine
  MOD_RES (254)..(254): Selenocysteine
  MOD_RES (308)..(309): Selenocysteine
  MOD_RES (311)..(311): Selenocysteine
  MOD_RES (313)..(313): Selenocysteine
  MOD_RES (316)..(317): Selenocysteine
  MOD_RES (328)..(328): Selenocysteine
  MOD_RES (398)..(398): Selenocysteine
  MOD_RES (445)..(445): Selenocysteine
  MOD_RES (486)..(486): Selenocysteine
  MOD_RES (557)..(557): Selenocysteine
  MOD_RES (572)..(572): Selenocysteine
  MOD_RES (602)..(602): Selenocysteine
  MOD_RES (611)..(611): Selenocysteine
  MOD_RES (614)..(614): Selenocysteine
  MOD_RES (658)..(658): Selenocysteine
  MOD_RES (680)..(680): Selenocysteine
  MOD_RES (704)..(704): Selenocysteine
MYGSARSVGKVEPSSQSPGRSPRLPRSPRLGHRRXNSXGGSSGSSVGGGSGKXLSMENIQSLNAAYAXSGPMYLSDHENVGSEXPKSXMXLGRSGGRLPYGVRMXAMGSSPNIASSGVASDXIAFGEHHLPPVSMASXVPHSLRQARDNXIMDLQXQLKEVLRENDLLRKDVEVKESKLSSSMNSIKXFWSPELKKERALRKDEASKIXIWKEQYRVVQEENQVDALRLRLEEKEXMLNKKXKQIQDMAEEKGXQAGEIHDLKDMLDVKERKVNVLQKKIENLQEQLRDKEKQMSSLKERVKSLQADXXNXDXALXXLEEALAEKERXIERLKEQRDRDEREKQEEIDNYKKDLKDLKEKVSLLQGDLSEKEASLLDLKEHASSLASSGLKKDSRLKXLEIALEQKKEECLKMESQLKKAHEAALEARASPEMSDRIQHLEREIXRYKDESSKAQAEVDRLLEILKEVENEKNDKDKKIAELESLXSRQVKDQNKKVANLKHKEQVEKKKSAQMLEEARRREDNLNDSSQQLQDSLRKKDDRIEELEEALRESVQIXAEREMVLAQEESARXNAEKQVEELLMAMEKVKQELESMKAKLSSXQQSLAEKEXHLXNLRAERRKHLEEVLEMKQEALLAAISEKDANIALLELSSSKKKXQEEVAALKREKDRLVQQLKQQXQNRMKLMADNYEDDHFKSSHSNQXNHKPSPDQDEEEGIWA

SEQ ID NO: 9293 - protein, 89 aa, Homo sapiens
  MOD_RES (1)..(1): Any amino acid
  MOD_RES (11)..(11): Selenocysteine
  MOD_RES (42)..(43): Selenocysteine
  MOD_RES (57)..(57): Selenocysteine
  MOD_RES (79)..(79): Selenocysteine
XHFKSSHSNQXNHKPSPDQIIQPLLELDQNRSKLKLYIGHLXXLCHDRDPLILRGLXPPASYNLDDDQAAWENELQKMXRGQVSLSLKL

SEQ ID NO: 9294 - protein, 285 aa, Homo sapiens
  MOD_RES (1)..(1): Any amino acid
  MOD_RES (14)..(14): Selenocysteine
  MOD_RES (122)..(122): Selenocysteine
  MOD_RES (137)..(137): Selenocysteine
  MOD_RES (167)..(167): Selenocysteine
  MOD_RES (176)..(176): Selenocysteine
  MOD_RES (179)..(179): Selenocysteine
  MOD_RES (223)..(223): Selenocysteine
  MOD_RES (245)..(245): Selenocysteine
  MOD_RES (269)..(269): Selenocysteine
XMSDRIQHLEREIXRYKDESSKAQAEVDRLLEILKEVENEKNDKDKKIAELERQVKDQNKKVANLKHKEQVEKKKSAQMLEEARRREDNLNDSSQQLQDSLRKKDDRIEELEEALRESVQIXAEREMVLAQEESARXNAEKQVEELLMAMEKVKQELESMKAKLSSXQQSLAEKEXHLXNLRAERRKHLEEVLEMKQEALLAAISEKDANIALLELSSSKKKXQEEVAALKREKDRLVQQLKQQXQNRMKLMADNYEDDHFKSSHSNQXNHKPSPDQDEEEGIWA

SEQ ID NO: 9295 - protein, 179 aa, Homo sapiens
  MOD_RES (12)..(12): Selenocysteine
  MOD_RES (56)..(56): Selenocysteine
  MOD_RES (141)..(141): Selenocysteine
  MOD_RES (144)..(145): Selenocysteine
  MOD_RES (163)..(163): Selenocysteine
MPNEGIPHSSQXQEQDCLQSQPVSNNEEMAIKQESGGDGEVEEYLSFRSVGDGLSXSAVGCASAAPRRGPALLHIDRHQIQAVEPSAQALELQGLGVDVYDQDVLEQGVLQQVDNAIHEASRASQLVDVEKEYRSVLDDLXSCXXSLRQINKIIEQLSPQAAXSRDINRKLDSVKRQKY

SEQ ID NO: 9296 - protein, 1061 aa, Homo sapiens
  MOD_RES (12)..(12): Selenocysteine
  MOD_RES (56)..(56): Selenocysteine
  MOD_RES (141)..(141): Selenocysteine
  MOD_RES (144)..(145): Selenocysteine
  MOD_RES (163)..(163): Selenocysteine
  MOD_RES (189)..(189): Selenocysteine
  MOD_RES (234)..(234): Selenocysteine
  MOD_RES (242)..(242): Selenocysteine
  MOD_RES (246)..(246): Selenocysteine
  MOD_RES (250)..(250): Selenocysteine
  MOD_RES (303)..(303): Selenocysteine
  MOD_RES (377)..(377): Selenocysteine
  MOD_RES (400)..(400): Selenocysteine
  MOD_RES (472)..(472): Selenocysteine
  MOD_RES (479)..(479): Selenocysteine
  MOD_RES (484)..(484): Selenocysteine
  MOD_RES (502)..(502): Selenocysteine
  MOD_RES (517)..(517): Selenocysteine
  MOD_RES (528)..(528): Selenocysteine
  MOD_RES (561)..(561): Selenocysteine
  MOD_RES (563)..(563): Selenocysteine
  MOD_RES (576)..(576): Selenocysteine
  MOD_RES (588)..(588): Selenocysteine
  MOD_RES (597)..(597): Selenocysteine
  MOD_RES (605)..(605): Selenocysteine
  MOD_RES (609)..(609): Selenocysteine
  MOD_RES (611)..(611): Selenocysteine
  MOD_RES (644)..(644): Selenocysteine
  MOD_RES (674)..(674): Selenocysteine
  MOD_RES (692)..(692): Selenocysteine
  MOD_RES (733)..(733): Selenocysteine
  MOD_RES (770)..(770): Selenocysteine
  MOD_RES (788)..(788): Selenocysteine
  MOD_RES (808)..(808): Selenocysteine
  MOD_RES (824)..(824): Selenocysteine
  MOD_RES (840)..(840): Selenocysteine
  MOD_RES (842)..(842): Selenocysteine
  MOD_RES (866)..(866): Selenocysteine
  MOD_RES (888)..(888): Selenocysteine
  MOD_RES (972)..(972): Selenocysteine
  MOD_RES (994)..(994): Selenocysteine
  MOD_RES (1030)..(1030): Selenocysteine
  MOD_RES (1039)..(1040): Selenocysteine
  MOD_RES (1060)..(1060): Selenocysteine
MPNEGIPHSSQXQEQDCLQSQPVSNNEEMAIKQESGGDGEVEEYLSFRSVGDGLSXSAVGCASAAPRRGPALLHIDRHQIQAVEPSAQALELQGLGVDVYDQDVLEQGVLQQVDNAIHEASRASQLVDVEKEYRSVLDDLXSCXXSLRQINKIIEQLSPQAAXSRDINRKLDSVKRQKYNKEQQLKKIXAKQKHLQAILGGAEVKIELDHASLEEDAEPGPSSLGSMLMPVQEXAWEELIRXGQMXPFGXQIPQKQEKKPRKIMLNEASGFEKYLADQAKLSFERKKQGCNKRAARKAPAPVXPPAPVQNKNKPNKKARVLSKKEERLKKHIKKLQKRALQFQGKVGLPKARRPWESDMRPEAEGDSEGEESEYFPXEEEEEEEDDEVEGAEADLSGDGXDYELKPLPKGGKRQKKVPVQEIDDDFFPSSGEEAEAASVGEGGGGGRKVGRYRDDGDEDYYKQRLSPKMPRXLSLHEIXDLLEXDDSIEASAIVIQPPENAXAPVSDEESGDEEGGXINNLPGSLLHXAAYLIQDGSDAESDSDDPSYAPKDDSPDEVPSXFXVQQPPPSRRRKMXKILCKWKKADLXVQPVAGRVXAPPNDFFXVMRXPXEILELFLDDEVIELIVKYSNLYACSKGVHLGLXSSEFKCFLGIIFLSGYVSVPRRRMFWEQRXDVHNVLVSAAMRRDRFEXIFSNLHVADNANLDPVDKFSKLRPLISKLNERCMKFVPNEXYFSFDEFMVPYFGRHGCKQFIRGKPIRFGYKFWCGAXCLGYICWFQPYQGKNPNXKHEEYGVGASLVLQFSEALXEAHPGQYHFVFNNFFXSIALLDKLSSMGHQAXGXVRKDHIDRVPLESDVALKKKERGXFDYRIDGKGNIVCRWNDNSVVXVASSGAGIHPLCLVSRYSQKLKKKIQVQQPNMIKVYNQFMGGVDRADENIDKYRASIRGKKWYSSPLLFCFELVLQNAWQLHKXYDEKPVDFLEFRRRVVCHYLEXHGHPPEPGQKGRPQKRNIDSRYDGINHVIVKQGKQXRCAECHKNXXFRCEKCDVALHVKCSVEYHXE

SEQ ID NO: 9297 - protein, 1493 aa, Homo sapiens
  MOD_RES (12)..(12): Selenocysteine
  MOD_RES (56)..(56): Selenocysteine
  MOD_RES (141)..(141): Selenocysteine
  MOD_RES (144)..(145): Selenocysteine
  MOD_RES (163)..(163): Selenocysteine
  MOD_RES (189)..(189): Selenocysteine
  MOD_RES (234)..(234): Selenocysteine
  MOD_RES (242)..(242): Selenocysteine
  MOD_RES (246)..(246): Selenocysteine
  MOD_RES (250)..(250): Selenocysteine
  MOD_RES (303)..(303): Selenocysteine
  MOD_RES (377)..(377): Selenocysteine
  MOD_RES (400)..(400): Selenocysteine
  MOD_RES (513)..(513): Selenocysteine
  MOD_RES (539)..(539): Selenocysteine
  MOD_RES (556)..(556): Selenocysteine
  MOD_RES (569)..(569): Selenocysteine
  MOD_RES (575)..(576): Selenocysteine
  MOD_RES (587)..(587): Selenocysteine
  MOD_RES (600)..(600): Selenocysteine
  MOD_RES (604)..(604): Selenocysteine
  MOD_RES (623)..(623): Selenocysteine
  MOD_RES (659)..(659): Selenocysteine
  MOD_RES (667)..(667): Selenocysteine
  MOD_RES (699)..(699): Selenocysteine
  MOD_RES (712)..(712): Selenocysteine
  MOD_RES (726)..(726): Selenocysteine
  MOD_RES (737)..(737): Selenocysteine
  MOD_RES (769)..(769): Selenocysteine
  MOD_RES (881)..(881): Selenocysteine
  MOD_RES (888)..(890): Selenocysteine
  MOD_RES (899)..(899): Selenocysteine
  MOD_RES (905)..(905): Selenocysteine
  MOD_RES (913)..(914): Selenocysteine
  MOD_RES (924)..(924): Selenocysteine
  MOD_RES (940)..(940): Selenocysteine
  MOD_RES (942)..(942): Selenocysteine
  MOD_RES (958)..(958): Selenocysteine
  MOD_RES (964)..(964): Selenocysteine
  MOD_RES (967)..(967): Selenocysteine
  MOD_RES (983)..(983): Selenocysteine
  MOD_RES (1006)..(1006): Selenocysteine
  MOD_RES (1008)..(1008): Selenocysteine
  MOD_RES (1016)..(1016): Selenocysteine
  MOD_RES (1018)..(1018): Selenocysteine
  MOD_RES (1025)..(1025): Selenocysteine
  MOD_RES (1031)..(1031): Selenocysteine
  MOD_RES (1067)..(1067): Selenocysteine
  MOD_RES (1084)..(1084): Selenocysteine
  MOD_RES (1102)..(1102): Selenocysteine
  MOD_RES (1111)..(1111): Selenocysteine
  MOD_RES (1135)..(1135): Selenocysteine
  MOD_RES (1138)..(1138): Selenocysteine
  MOD_RES (1165)..(1165): Selenocysteine
  MOD_RES (1185)..(1185): Selenocysteine
  MOD_RES (1195)..(1195): Selenocysteine
  MOD_RES (1220)..(1220): Selenocysteine
  MOD_RES (1313)..(1313): Selenocysteine
  MOD_RES (1315)..(1315): Selenocysteine
  MOD_RES (1347)..(1347): Selenocysteine
  MOD_RES (1350)..(1350): Selenocysteine
  MOD_RES (1421)..(1422): Selenocysteine
  MOD_RES (1441)..(1441): Selenocysteine
  MOD_RES (1447)..(1447): Selenocysteine
  MOD_RES (1475)..(1475): Selenocysteine
  MOD_RES (1479)..(1479): Selenocysteine
MPNEGIPHSSQXQEQDCLQSQPVSNNEEMAIKQESGGDGEVEEYLSFRSVGDGLSXSAVGCASAAPRRGPALLHIDRHQIQAVEPSAQALELQGLGVDVYDQDVLEQGVLQQVDNAIHEASRASQLVDVEKEYRSVLDDLXSCXXSLRQINKIIEQLSPQAAXSRDINRKLDSVKRQKYNKEQQLKKIXAKQKHLQAILGGAEVKIELDHASLEEDAEPGPSSLGSMLMPVQEXAWEELIRXGQMXPFGXQIPQKQEKKPRKIMLNEASGFEKYLADQAKLSFERKKQGCNKRAARKAPAPVXPPAPVQNKNKPNKKARVLSKKEERLKKHIKKLQKRALQFQGKVGLPKARRPWESDMRPEAEGDSEGEESEYFPXEEEEEEEDDEVEGAEADLSGDGXDYELKPLPKGGKRQKKVPVQEIDDDFFPSSGEEAEAASVGEGGGGGRKVGRYRDDGDEDYYKQRLRRWNKLRLQDKEKRLKLEDDSEESDAEFDEGFKVPGFLFKKLFKYQQXGVRWLWELHCQQAGGILGDEMGLGKXIQIIAFLAGLSYSKIRXRGSNYRFEGLGPXVIVCPXXVMHQWVKEFHXWWPPFRVAILHEXGSYXHKKEKLIRDVAHCHGILIXSYSYIRLMQDDISRYDWHYVILDEGHKIRNPNAAVXLACKQFRXPHRIILSGSPMQNNLRELWSLFDFIFPGKLGXLPVFMEQFSVPIXMGGYSNASPVQVKXAYKCACVLRDXINPYLLRRMKSDVKMSLSLPDKNEQVLFCRLXDEQHKVYQNFVDSKEVYRILNGEMQIFSGLIALRKICNHPDLFSGGPKNLKGLPDDELEEDQFGYWKRSGKMIVVESLLKIWHKQGQRVLLFSQSRQMLDILEVFLRAQKYXYLKMDGXXXIASRQPLIXRYNEDXSIFVFLLXXRVGGLGVNLXGANRVVIYDPDWNPSXDXQARERAWRIGQKKQVXVYRLLXAGXIEEKIYHRQIFKQFLXNRVLKDPKQRRFFKSNDLYELFXLXSPDASQSXEXSAIFAGXGSDVQXPKCHLKRRIQPAFGADHDVPKRKKFPASNISVNDAXSSEEKSEAKGAEVNAVXSNRSDPLKDDPHMSSNVXSNDRLGEEXNAVSGPEELSVISGNGECSNSSGXGKXSMPSGDESIDEKLGLSYKRERPSQAQXEAFWENKQMENNFYKHKSKXKHHSVAEEEXLEKHLRPKQKPKNSKHCRDAKFEGXRIPHLVKKRRYQKQDSENKSEAKEQSNDDYVLEKLFKKSVGVHSVMKHDAIMDGASPDYVLVEAEANRVAQDALKALRLSRQRCLGAVSGVPXWXGHRGISGAPAGKKSRFGKKRNSNFSVQHPSSXSPXEKCQDGIMKKEGKDNVPEHFSGRAEDADSSSGPLASSSLLAKMRARNHLILPERLESESGHLQEASALLPXXEHDDLLVEMRNFIAFQAHXDGQASXREILQEFESKLSASQSCVFRELLRNLCXFHRXSGGEGIWKLKPEYC

SEQ ID NO: 9298 - protein, 77 aa, Homo sapiens
  MOD_RES (1)..(1): Any amino acid
  MOD_RES (22)..(22): Selenocysteine
  MOD_RES (53)..(54): Selenocysteine
  MOD_RES (64)..(64): Selenocysteine
XDSKEVYRILNGEMQEVLQSFXSIHLHESPLNFFRSFQVRGSRSHYPGKGMQXXLGIVNFLVVXLKRKKRNRFSPDL

SEQ ID NO: 9299 - protein, 169 aa, Homo sapiens
  MOD_RES (2)..(2): Selenocysteine
  MOD_RES (33)..(34): Selenocysteine
  MOD_RES (49)..(49): Selenocysteine
  MOD_RES (54)..(54): Selenocysteine
  MOD_RES (66)..(66): Selenocysteine
  MOD_RES (99)..(99): Selenocysteine
  MOD_RES (109)..(109): Selenocysteine
  MOD_RES (122)..(122): Selenocysteine
  MOD_RES (132)..(132): Selenocysteine
  MOD_RES (137)..(137): Selenocysteine
  MOD_RES (160)..(160): Selenocysteine
MXAGRRMEMLCAGRVPALLLCLGFHLLQAVLSXXVIPSCIPGESSDNCXALVQXEDNPRVAQVSIXKCSSDMNGYCLHGQCIYLVDMSQNYCRCEVGYXGVRCEHFFLXVHQPLSKEYVALXVILIILFLIXVVGSXYYFCRWYRNRKSKEPKKEYERVXSGDPELPQV

SEQ ID NO: 9300 - protein, 548 aa, Homo sapiens
  MOD_RES (3)..(3): Selenocysteine
  MOD_RES (7)..(7): Selenocysteine
  MOD_RES (97)..(97): Selenocysteine
  MOD_RES (103)..(103): Selenocysteine
  MOD_RES (148)..(148): Selenocysteine
  MOD_RES (156)..(156): Selenocysteine
  MOD_RES (193)..(193): Selenocysteine
  MOD_RES (271)..(271): Selenocysteine
  MOD_RES (273)..(273): Selenocysteine
  MOD_RES (278)..(278): Selenocysteine
  MOD_RES (282)..(282): Selenocysteine
  MOD_RES (318)..(318): Selenocysteine
  MOD_RES (357)..(357): Selenocysteine
  MOD_RES (441)..(441): Selenocysteine
  MOD_RES (456)..(456): Selenocysteine
  MOD_RES (526)..(526): Selenocysteine
  MOD_RES (538)..(538): Selenocysteine
MKXPADXGFAFPDWAYKPESSPGSRQIQLWHFILELLRKEEYQGVIAWQGDYGEFVIKDPDEVARLWGVRKCKPQMNYDKLSRALRYYYNKRILHKXKGKRFXYKFNFNKLVLVNYPFIDVGLAGGAVPQSAPPVPSGGSHFRFPPSXPSEVLSPXEDPRSPPACSSSSSSLFSAVVARRLGRGSVSDCSDGXSELEEPLGEDPRARPPGPPDLGAFRGPPLARLPHDPGVFRVYPRPRGGPEPLSPFPVSPLAGPGSLLPPQLSPALPMXPXHLAYXPSPXLSPMYPSGGGGPSGSGGGSHFSFSPEDMKRYLQAHXQSVYNYHLSPRAFLHYPGLVVPQPQRPDKCPLPPMAPEXPPVPSSASSSSSSSSSPFKFKLQPPPLGRRQRAAGEKAVAGADKSGGSAGGLAEGAGALAPPPPPPQIKVEPISEGESEEVEVXDISDEDEEDGEVFKXPRAPPAPPKPEPGEAPGASQCMPLKLRFKRRWSEDCRLEGGGGPAGGFEDEGEDKKVRGEGPGEAGGPLXPRRVSSDLQHAXAQLSLEHRDS

SEQ ID NO: 9301 - protein, 61 aa, Homo sapiens
  MOD_RES (22)..(22): Selenocysteine
  MOD_RES (28)..(28): Selenocysteine
  MOD_RES (60)..(61): Selenocysteine
MNYDKLSRALRYYYNKRILHKXKGKRFXYKFNFNKLVLVNYPFIDVGLAGAVPHRGPPLXX

SEQ ID NO: 9302 - protein, 98 aa, Homo sapiens
  MOD_RES (22)..(22): Selenocysteine
  MOD_RES (28)..(28): Selenocysteine
  MOD_RES (73)..(73): Selenocysteine
  MOD_RES (81)..(81): Selenocysteine
MNYDKLSRALRYYYNKRILHKXKGKRFXYKFNFNKLVLVNYPFIDVGLAGGAVPQSAPPVPSGGSHFRFPPSXPSEVLSPXEDPRSPPACSSSSSSLF

SEQ ID NO: 9303 - protein, 473 aa, Homo sapiens
  MOD_RES (22)..(22): Selenocysteine
  MOD_RES (28)..(28): Selenocysteine
  MOD_RES (73)..(73): Selenocysteine
  MOD_RES (81)..(81): Selenocysteine
  MOD_RES (118)..(118): Selenocysteine
  MOD_RES (196)..(196): Selenocysteine
  MOD_RES (198)..(198): Selenocysteine
  MOD_RES (203)..(203): Selenocysteine
  MOD_RES (207)..(207): Selenocysteine
  MOD_RES (243)..(243): Selenocysteine
  MOD_RES (282)..(282): Selenocysteine
  MOD_RES (366)..(366): Selenocysteine
  MOD_RES (381)..(381): Selenocysteine
  MOD_RES (451)..(451): Selenocysteine
  MOD_RES (463)..(463): Selenocysteine
MNYDKLSRALRYYYNKRILHKXKGKRFXYKFNFNKLVLVNYPFIDVGLAGGAVPQSAPPVPSGGSHFRFPPSXPSEVLSPXEDPRSPPACSSSSSSLFSAVVARRLGRGSVSDCSDGXSELEEPLGEDPRARPPGPPDLGAFRGPPLARLPHDPGVFRVYPRPRGGPEPLSPFPVSPLAGPGSLLPPQLSPALPMXPXHLAYXPSPXLSPMYPSGGGGPSGSGGGSHFSFSPEDMKRYLQAHXQSVYNYHLSPRAFLHYPGLVVPQPQRPDKCPLPPMAPEXPPVPSSASSSSSSSSSPFKFKLQPPPLGRRQRAAGEKAVAGADKSGGSAGGLAEGAGALAPPPPPPQIKVEPISEGESEEVEVXDISDEDEEDGEVFKXPRAPPAPPKPEPGEAPGASQCMPLKLRFKRRWSEDCRLEGGGGPAGGFEDEGEDKKVRGEGPGEAGGPLXPRRVSSDLQHAXAQLSLEHRDS

SEQ ID NO: 9304 - protein, 455 aa, Homo sapiens
  MOD_RES (4)..(4): Selenocysteine
  MOD_RES (25)..(25): Selenocysteine
  MOD_RES (31)..(31): Selenocysteine
  MOD_RES (34)..(34): Selenocysteine
  MOD_RES (44)..(44): Selenocysteine
  MOD_RES (65)..(65): Selenocysteine
  MOD_RES (99)..(99): Selenocysteine
  MOD_RES (119)..(120): Selenocysteine
  MOD_RES (132)..(132): Selenocysteine
  MOD_RES (136)..(136): Selenocysteine
  MOD_RES (172)..(172): Selenocysteine
  MOD_RES (180)..(180): Selenocysteine
  MOD_RES (198)..(198): Selenocysteine
  MOD_RES (204)..(204): Selenocysteine
  MOD_RES (224)..(224): Selenocysteine
  MOD_RES (237)..(237): Selenocysteine
  MOD_RES (243)..(243): Selenocysteine
  MOD_RES (255)..(255): Selenocysteine
  MOD_RES (259)..(259): Selenocysteine
  MOD_RES (275)..(275): Selenocysteine
  MOD_RES (307)..(307): Selenocysteine
  MOD_RES (311)..(311): Selenocysteine
  MOD_RES (318)..(318): Selenocysteine
  MOD_RES (355)..(355): Selenocysteine
  MOD_RES (417)..(417): Selenocysteine
  MOD_RES (433)..(433): Selenocysteine
  MOD_RES (440)..(440): Selenocysteine
  MOD_RES (444)..(444): Selenocysteine
  MOD_RES (453)..(453): Selenocysteine
MASXIKEALSVVSEDQSLFECAYGXPHLAKXEMXASSSSDYGQXSKMSPRVPQQDWLSQPPARVXIKMECNPSQVNGSRNSPDECSVAKGGKMVGSPDXVGMNYGSYMEEKHMPPPNMXXNERRVIVPADPXLWSXDHVRQWLEWAVKEYGLPDVNILLFQNIDGKELCKMXKDDFQRLXPSYNADILLSHLHYLREXPLPHLXSDDVDKALQNSPRLMHARNXDLPYEPPRRSAWXGHGHPXPQSKAAQPSPSXVPKXEDQRPQLDPYQILGPXSSRLANPGSGQIQLWQFLLELLSDSSNSSCIXWEGXNGEFKMXDPDEVARRWGERKSKPNMNYDKLSRALRYYYDKNIMXKVHGKRYAYKFDFHGIAQALQPHPPESSLYKYPSDLPYMGSYHAHPQKMNFVAPHPPALPVXSSSFFAAPNPYWNSPXGGIYPNXRLPXSHMPSHLGXYY

SEQ ID NO: 9305 - protein, 456 aa, Homo sapiens
  MOD_RES (4)..(4): Selenocysteine
  MOD_RES (25)..(25): Selenocysteine
  MOD_RES (31)..(31): Selenocysteine
  MOD_RES (34)..(34): Selenocysteine
  MOD_RES (44)..(44): Selenocysteine
  MOD_RES (65)..(65): Selenocysteine
  MOD_RES (99)..(99): Selenocysteine
  MOD_RES (119)..(120): Selenocysteine
  MOD_RES (132)..(132): Selenocysteine
  MOD_RES (136)..(136): Selenocysteine
  MOD_RES (172)..(172): Selenocysteine
  MOD_RES (180)..(180): Selenocysteine
  MOD_RES (198)..(198): Selenocysteine
  MOD_RES (204)..(204): Selenocysteine
  MOD_RES (224)..(224): Selenocysteine
  MOD_RES (234)..(234): Selenocysteine
  MOD_RES (241)..(241): Selenocysteine
  MOD_RES (245)..(246): Selenocysteine
  MOD_RES (256)..(256): Selenocysteine
  MOD_RES (260)..(260): Selenocysteine
  MOD_RES (276)..(276): Selenocysteine
  MOD_RES (308)..(308): Selenocysteine
  MOD_RES (312)..(312): Selenocysteine
  MOD_RES (319)..(319): Selenocysteine
  MOD_RES (356)..(356): Selenocysteine
  MOD_RES (418)..(418): Selenocysteine
  MOD_RES (434)..(434): Selenocysteine
  MOD_RES (441)..(441): Selenocysteine
  MOD_RES (445)..(445): Selenocysteine
  MOD_RES (454)..(454): Selenocysteine
MASXIKEALSVVSEDQSLFECAYGXPHLAKXEMXASSSSDYGQXSKMSPRVPQQDWLSQPPARVXIKMECNPSQVNGSRNSPDECSVAKGGKMVGSPDXVGMNYGSYMEEKHMPPPNMXXNERRVIVPADPXLWSXDHVRQWLEWAVKEYGLPDVNILLFQNIDGKELCKMXKDDFQRLXPSYNADILLSHLHYLREXPLPHLXSDDVDKALQNSPRLMHARNXGGAAFIFPNXSVYPEAXQRIXXRPAAQPSPSXVPKXEDQRPQLDPYQILGPXSSRLANPGSGQIQLWQFLLELLSDSSNSSCIXWEGXNGEFKMXDPDEVARRWGERKSKPNMNYDKLSRALRYYYDKNIMXKVHGKRYAYKFDFHGIAQALQPHPPESSLYKYPSDLPYMGSYHAHPQKMNFVAPHPPALPVXSSSFFAAPNPYWNSPXGGIYPNXRLPXSHMPSHLGXYY

SEQ ID NO: 9306 - protein, 479 aa, Homo sapiens
  MOD_RES (4)..(4): Selenocysteine
  MOD_RES (25)..(25): Selenocysteine
  MOD_RES (31)..(31): Selenocysteine
  MOD_RES (34)..(34): Selenocysteine
  MOD_RES (44)..(44): Selenocysteine
  MOD_RES (65)..(65): Selenocysteine
  MOD_RES (99)..(99): Selenocysteine
  MOD_RES (119)..(120): Selenocysteine
  MOD_RES (132)..(132): Selenocysteine
  MOD_RES (136)..(136): Selenocysteine
  MOD_RES (172)..(172): Selenocysteine
  MOD_RES (180)..(180): Selenocysteine
  MOD_RES (198)..(198): Selenocysteine
  MOD_RES (204)..(204): Selenocysteine
  MOD_RES (224)..(224): Selenocysteine
  MOD_RES (234)..(234): Selenocysteine
  MOD_RES (241)..(241): Selenocysteine
  MOD_RES (245)..(246): Selenocysteine
  MOD_RES (261)..(261): Selenocysteine
  MOD_RES (267)..(267): Selenocysteine
  MOD_RES (279)..(279): Selenocysteine
  MOD_RES (283)..(283): Selenocysteine
  MOD_RES (299)..(299): Selenocysteine
  MOD_RES (331)..(331): Selenocysteine
  MOD_RES (335)..(335): Selenocysteine
  MOD_RES (342)..(342): Selenocysteine
  MOD_RES (379)..(379): Selenocysteine
  MOD_RES (441)..(441): Selenocysteine
  MOD_RES (457)..(457): Selenocysteine
  MOD_RES (464)..(464): Selenocysteine
  MOD_RES (468)..(468): Selenocysteine
  MOD_RES (477)..(477): Selenocysteine
MASXIKEALSVVSEDQSLFECAYGXPHLAKXEMXASSSSDYGQXSKMSPRVPQQDWLSQPPARVXIKMECNPSQVNGSRNSPDECSVAKGGKMVGSPDXVGMNYGSYMEEKHMPPPNMXXNERRVIVPADPXLWSXDHVRQWLEWAVKEYGLPDVNILLFQNIDGKELCKMXKDDFQRLXPSYNADILLSHLHYLREXPLPHLXSDDVDKALQNSPRLMHARNXGGAAFIFPNXSVYPEAXQRIXXRPDLPYEPPRRSAWXGHGHPXPQSKAAQPSPSXVPKXEDQRPQLDPYQILGPXSSRLANPGSGQIQLWQFLLELLSDSSNSSCIXWEGXNGEFKMXDPDEVARRWGERKSKPNMNYDKLSRALRYYYDKNIMXKVHGKRYAYKFDFHGIAQALQPHPPESSLYKYPSDLPYMGSYHAHPQKMNFVAPHPPALPVXSSSFFAAPNPYWNSPXGGIYPNXRLPXSHMPSHLGXYY

SEQ ID NO: 9307 - protein, 462 aa, Homo sapiens
  MOD_RES (4)..(4): Selenocysteine
  MOD_RES (32)..(32): Selenocysteine
  MOD_RES (38)..(38): Selenocysteine
  MOD_RES (41)..(41): Selenocysteine
  MOD_RES (51)..(51): Selenocysteine
  MOD_RES (72)..(72): Selenocysteine
  MOD_RES (106)..(106): Selenocysteine
  MOD_RES (126)..(127): Selenocysteine
  MOD_RES (139)..(139): Selenocysteine
  MOD_RES (143)..(143): Selenocysteine
  MOD_RES (179)..(179): Selenocysteine
  MOD_RES (187)..(187): Selenocysteine
  MOD_RES (205)..(205): Selenocysteine
  MOD_RES (211)..(211): Selenocysteine
  MOD_RES (231)..(231): Selenocysteine
  MOD_RES (244)..(244): Selenocysteine
  MOD_RES (250)..(250): Selenocysteine
  MOD_RES (262)..(262): Selenocysteine
  MOD_RES (266)..(266): Selenocysteine
  MOD_RES (282)..(282): Selenocysteine
  MOD_RES (314)..(314): Selenocysteine
  MOD_RES (318)..(318): Selenocysteine
  MOD_RES (325)..(325): Selenocysteine
  MOD_RES (362)..(362): Selenocysteine
  MOD_RES (424)..(424): Selenocysteine
  MOD_RES (440)..(440): Selenocysteine
  MOD_RES (447)..(447): Selenocysteine
  MOD_RES (451)..(451): Selenocysteine
  MOD_RES (460)..(460): Selenocysteine
MIQXVPDPAAHIKEALSVVSEDQSLFECAYGXPHLAKXEMXASSSSDYGQXSKMSPRVPQQDWLSQPPARVXIKMECNPSQVNGSRNSPDECSVAKGGKMVGSPDXVGMNYGSYMEEKHMPPPNMXXNERRVIVPADPXLWSXDHVRQWLEWAVKEYGLPDVNILLFQNIDGKELCKMXKDDFQRLXPSYNADILLSHLHYLREXPLPHLXSDDVDKALQNSPRLMHARNXDLPYEPPRRSAWXGHGHPXPQSKAAQPSPSXVPKXEDQRPQLDPYQILGPXSSRLANPGSGQIQLWQFLLELLSDSSNSSCIXWEGXNGEFKMXDPDEVARRWGERKSKPNMNYDKLSRALRYYYDKNIMXKVHGKRYAYKFDFHGIAQALQPHPPESSLYKYPSDLPYMGSYHAHPQKMNFVAPHPPALPVXSSSFFAAPNPYWNSPXGGIYPNXRLPXSHMPSHLGXYY

SEQ ID NO: 9308 - protein, 463 aa, Homo sapiens
  MOD_RES (4)..(4): Selenocysteine
  MOD_RES (32)..(32): Selenocysteine
  MOD_RES (38)..(38): Selenocysteine
  MOD_RES (41)..(41): Selenocysteine
  MOD_RES (51)..(51): Selenocysteine
  MOD_RES (72)..(72): Selenocysteine
  MOD_RES (106)..(106): Selenocysteine
  MOD_RES (126)..(127): Selenocysteine
  MOD_RES (139)..(139): Selenocysteine
  MOD_RES (143)..(143): Selenocysteine
  MOD_RES (179)..(179): Selenocysteine
  MOD_RES (187)..(187): Selenocysteine
  MOD_RES (205)..(205): Selenocysteine
  MOD_RES (211)..(211): Selenocysteine
  MOD_RES (231)..(231): Selenocysteine
  MOD_RES (241)..(241): Selenocysteine
  MOD_RES (248)..(248): Selenocysteine
  MOD_RES (252)..(253): Selenocysteine
  MOD_RES (263)..(263): Selenocysteine
  MOD_RES (267)..(267): Selenocysteine
  MOD_RES (283)..(283): Selenocysteine
  MOD_RES (315)..(315): Selenocysteine
  MOD_RES (319)..(319): Selenocysteine
  MOD_RES (326)..(326): Selenocysteine
  MOD_RES (363)..(363): Selenocysteine
  MOD_RES (425)..(425): Selenocysteine
  MOD_RES (441)..(441): Selenocysteine
  MOD_RES (448)..(448): Selenocysteine
  MOD_RES (452)..(452): Selenocysteine
  MOD_RES (461)..(461): Selenocysteine
MIQXVPDPAAHIKEALSVVSEDQSLFECAYGXPHLAKXEMXASSSSDYGQXSKMSPRVPQQDWLSQPPARVXIKMECNPSQVNGSRNSPDECSVAKGGKMVGSPDXVGMNYGSYMEEKHMPPPNMXXNERRVIVPADPXLWSXDHVRQWLEWAVKEYGLPDVNILLFQNIDGKELCKMXKDDFQRLXPSYNADILLSHLHYLREXPLPHLXSDDVDKALQNSPRLMHARNXGGAAFIFPNXSVYPEAXQRIXXRPAAQPSPSXVPKXEDQRPQLDPYQILGPXSSRLANPGSGQIQLWQFLLELLSDSSNSSCIXWEGXNGEFKMXDPDEVARRWGERKSKPNMNYDKLSRALRYYYDKNIMXKVHGKRYAYKFDFHGIAQALQPHPPESSLYKYPSDLPYMGSYHAHPQKMNFVAPHPPALPVXSSSFFAAPNPYWNSPXGGIYPNXRLPXSHMPSHLGXYY

SEQ ID NO: 9309 - protein, 486 aa, Homo sapiens
  MOD_RES (4)..(4): Selenocysteine
  MOD_RES (32)..(32): Selenocysteine
  MOD_RES (38)..(38): Selenocysteine
  MOD_RES (41)..(41): Selenocysteine
  MOD_RES (51)..(51): Selenocysteine
  MOD_RES (72)..(72): Selenocysteine
  MOD_RES (106)..(106): Selenocysteine
  MOD_RES (126)..(127): Selenocysteine
  MOD_RES (139)..(139): Selenocysteine
  MOD_RES (143)..(143): Selenocysteine
  MOD_RES (179)..(179): Selenocysteine
  MOD_RES (187)..(187): Selenocysteine
  MOD_RES (205)..(205): Selenocysteine
  MOD_RES (211)..(211): Selenocysteine
  MOD_RES (231)..(231): Selenocysteine
  MOD_RES (241)..(241): Selenocysteine
  MOD_RES (248)..(248): Selenocysteine
  MOD_RES (252)..(253): Selenocysteine
  MOD_RES (268)..(268): Selenocysteine
  MOD_RES (274)..(274): Selenocysteine
  MOD_RES (286)..(286): Selenocysteine
  MOD_RES (290)..(290): Selenocysteine
  MOD_RES (306)..(306): Selenocysteine
  MOD_RES (338)..(338): Selenocysteine
  MOD_RES (342)..(342): Selenocysteine
  MOD_RES (349)..(349): Selenocysteine
  MOD_RES (386)..(386): Selenocysteine
  MOD_RES (448)..(448): Selenocysteine
  MOD_RES (464)..(464): Selenocysteine
  MOD_RES (471)..(471): Selenocysteine
  MOD_RES (475)..(475): Selenocysteine
  MOD_RES (484)..(484): Selenocysteine
MIQXVPDPAAHIKEALSVVSEDQSLFECAYGXPHLAKXEMXASSSSDYGQXSKMSPRVPQQDWLSQPPARVXIKMECNPSQVNGSRNSPDECSVAKGGKMVGSPDXVGMNYGSYMEEKHMPPPNMXXNERRVIVPADPXLWSXDHVRQWLEWAVKEYGLPDVNILLFQNIDGKELCKMXKDDFQRLXPSYNADILLSHLHYLREXPLPHLXSDDVDKALQNSPRLMHARNXGGAAFIFPNXSVYPEAXQRIXXRPDLPYEPPRRSAWXGHGHPXPQSKAAQPSPSXVPKXEDQRPQLDPYQILGPXSSRLANPGSGQIQLWQFLLELLSDSSNSSCIXWEGXNGEFKMXDPDEVARRWGERKSKPNMNYDKLSRALRYYYDKNIMXKVHGKRYAYKFDFHGIAQALQPHPPESSLYKYPSDLPYMGSYHAHPQKMNFVAPHPPALPVXSSSFFAAPNPYWNSPXGGIYPNXRLPXSHMPSHLGXYY

SEQ ID NO: 9310 - protein, 220 aa, Homo sapiens
  MOD_RES (2)..(2): Selenocysteine
  MOD_RES (12)..(12): Selenocysteine
  MOD_RES (33)..(33): Selenocysteine
  MOD_RES (67)..(67): Selenocysteine
  MOD_RES (87)..(88): Selenocysteine
  MOD_RES (100)..(100): Selenocysteine
  MOD_RES (104)..(104): Selenocysteine
  MOD_RES (140)..(140): Selenocysteine
  MOD_RES (148)..(148): Selenocysteine
  MOD_RES (166)..(166): Selenocysteine
  MOD_RES (172)..(172): Selenocysteine
  MOD_RES (192)..(192): Selenocysteine
  MOD_RES (202)..(202): Selenocysteine
  MOD_RES (209)..(209): Selenocysteine
  MOD_RES (213)..(214): Selenocysteine
MXASSSSDYGQXSKMSPRVPQQDWLSQPPARVXIKMECNPSQVNGSRNSPDECSVAKGGKMVGSPDXVGMNYGSYMEEKHMPPPNMXXNERRVIVPADPXLWSXDHVRQWLEWAVKEYGLPDVNILLFQNIDGKELCKMXKDDFQRLXPSYNADILLSHLHYLREXPLPHLXSDDVDKALQNSPRLMHARNXGGAAFIFPNXSVYPEAXQRIXXRPGIYR

SEQ ID NO: 9311 - protein, 363 aa, Homo sapiens
  MOD_RES (7)..(7): Selenocysteine
  MOD_RES (27)..(28): Selenocysteine
  MOD_RES (40)..(40): Selenocysteine
  MOD_RES (44)..(44): Selenocysteine
  MOD_RES (80)..(80): Selenocysteine
  MOD_RES (88)..(88): Selenocysteine
  MOD_RES (106)..(106): Selenocysteine
  MOD_RES (112)..(112): Selenocysteine
  MOD_RES (132)..(132): Selenocysteine
  MOD_RES (145)..(145): Selenocysteine
  MOD_RES (151)..(151): Selenocysteine
  MOD_RES (163)..(163): Selenocysteine
  MOD_RES (167)..(167): Selenocysteine
  MOD_RES (183)..(183): Selenocysteine
  MOD_RES (215)..(215): Selenocysteine
  MOD_RES (219)..(219): Selenocysteine
  MOD_RES (226)..(226): Selenocysteine
  MOD_RES (263)..(263): Selenocysteine
  MOD_RES (325)..(325): Selenocysteine
  MOD_RES (341)..(341): Selenocysteine
  MOD_RES (348)..(348): Selenocysteine
  MOD_RES (352)..(352): Selenocysteine
  MOD_RES (361)..(361): Selenocysteine
MVGSPDXVGMNYGSYMEEKHMPPPNMXXNERRVIVPADPXLWSXDHVRQWLEWAVKEYGLPDVNILLFQNIDGKELCKMXKDDFQRLXPSYNADILLSHLHYLREXPLPHLXSDDVDKALQNSPRLMHARNXDLPYEPPRRSAWXGHGHPXPQSKAAQPSPSXVPKXEDQRPQLDPYQILGPXSSRLANPGSGQIQLWQFLLELLSDSSNSSCIXWEGXNGEFKMXDPDEVARRWGERKSKPNMNYDKLSRALRYYYDKNIMXKVHGKRYAYKFDFHGIAQALQPHPPESSLYKYPSDLPYMGSYHAHPQKMNFVAPHPPALPVXSSSFFAAPNPYWNSPXGGIYPNXRLPXSHMPSHLGXYY

SEQ ID NO: 9312 - protein, 387 aa, Homo sapiens
  MOD_RES (7)..(7): Selenocysteine
  MOD_RES (27)..(28): Selenocysteine
  MOD_RES (40)..(40): Selenocysteine
  MOD_RES (44)..(44): Selenocysteine
  MOD_RES (80)..(80): Selenocysteine
  MOD_RES (88)..(88): Selenocysteine
  MOD_RES (106)..(106): Selenocysteine
  MOD_RES (112)..(112): Selenocysteine
  MOD_RES (132)..(132): Selenocysteine
  MOD_RES (142)..(142): Selenocysteine
  MOD_RES (149)..(149): Selenocysteine
  MOD_RES (153)..(154): Selenocysteine
  MOD_RES (169)..(169): Selenocysteine
  MOD_RES (175)..(175): Selenocysteine
  MOD_RES (187)..(187): Selenocysteine
  MOD_RES (191)..(191): Selenocysteine
  MOD_RES (207)..(207): Selenocysteine
  MOD_RES (239)..(239): Selenocysteine
  MOD_RES (243)..(243): Selenocysteine
  MOD_RES (250)..(250): Selenocysteine
  MOD_RES (287)..(287): Selenocysteine
  MOD_RES (349)..(349): Selenocysteine
  MOD_RES (365)..(365): Selenocysteine
  MOD_RES (372)..(372): Selenocysteine
  MOD_RES (376)..(376): Selenocysteine
  MOD_RES (385)..(385): Selenocysteine
MVGSPDXVGMNYGSYMEEKHMPPPNMXXNERRVIVPADPXLWSXDHVRQWLEWAVKEYGLPDVNILLFQNIDGKELCKMXKDDFQRLXPSYNADILLSHLHYLREXPLPHLXSDDVDKALQNSPRLMHARNXGGAAFIFPNXSVYPEAXQRIXXRPDLPYEPPRRSAWXGHGHPXPQSKAAQPSPSXVPKXEDQRPQLDPYQILGPXSSRLANPGSGQIQLWQFLLELLSDSSNSSCIXWEGXNGEFKMXDPDEVARRWGERKSKPNMNYDKLSRALRYYYDKNIMXKVHGKRYAYKFDFHGIAQALQPHPPESSLYKYPSDLPYMGSYHAHPQKMNFVAPHPPALPVXSSSFFAAPNPYWNSPXGGIYPNXRLPXSHMPSHLGXYY

SEQ ID NO: 9313 - protein, 71 aa, Homo sapiens
  MOD_RES (4)..(4): Selenocysteine
  MOD_RES (11)..(11): Selenocysteine
  MOD_RES (18)..(18): Selenocysteine
  MOD_RES (51)..(51): Selenocysteine
MSHXILLVQPXKRPEGRXYADYESVNECMEGVCKMYEEHLKRMNPNSPSIXYDISQLFDFIDDLADLSCLV

SEQ ID NO: 9314 - protein, 104 aa, Homo sapiens
  MOD_RES (4)..(4): Selenocysteine
  MOD_RES (11)..(11): Selenocysteine
  MOD_RES (18)..(18): Selenocysteine
  MOD_RES (51)..(51): Selenocysteine
  MOD_RES (76)..(76): Selenocysteine
  MOD_RES (78)..(78): Selenocysteine
MSHXILLVQPXKRPEGRXYADYESVNECMEGVCKMYEEHLKRMNPNSPSIXYDISQLFDFIDDLADLSCLVYRADXQXYQPYNKDWIKEKIYVLLRRQAQQAGK

SEQ ID NO: 9315 - protein, 156 aa, Homo sapiens
  MOD_RES (3)..(3): Selenocysteine
  MOD_RES (45)..(45): Selenocysteine
  MOD_RES (68)..(68): Selenocysteine
  MOD_RES (70)..(70): Selenocysteine
  MOD_RES (97)..(97): Selenocysteine
  MOD_RES (134)..(134): Selenocysteine
  MOD_RES (151)..(151): Selenocysteine
MAXKRLARQLGLIRRKSIAPANGNLGRSKSKQLFDYLIVIDFESXCWNDGKHHHSQEIIEFPAVLLNXSXGQIDSEFQAYVQPQEHPILSEFCMELXGIKQAQVDEGVPLKICLSQFCKWIHKIQQQKNIIFAXGISEPSASEVKLCAFVXWSAFL

SEQ ID NO: 9316 - protein, 328 aa, Homo sapiens
  MOD_RES (3)..(3): Selenocysteine
  MOD_RES (45)..(45): Selenocysteine
  MOD_RES (68)..(68): Selenocysteine
  MOD_RES (70)..(70): Selenocysteine
  MOD_RES (97)..(97): Selenocysteine
  MOD_RES (134)..(134): Selenocysteine
  MOD_RES (151)..(151): Selenocysteine
  MOD_RES (185)..(185): Selenocysteine
  MOD_RES (222)..(222): Selenocysteine
  MOD_RES (239)..(239): Selenocysteine
  MOD_RES (253)..(253): Selenocysteine
  MOD_RES (275)..(275): Selenocysteine
  MOD_RES (278)..(278): Selenocysteine
  MOD_RES (297)..(297): Selenocysteine
  MOD_RES (318)..(318): Selenocysteine
  MOD_RES (322)..(322): Selenocysteine
  MOD_RES (324)..(325): Selenocysteine
MAXKRLARQLGLIRRKSIAPANGNLGRSKSKQLFDYLIVIDFESXCWNDGKHHHSQEIIEFPAVLLNXSXGQIDSEFQAYVQPQEHPILSEFCMELXGIKQAQVDEGVPLKICLSQFCKWIHKIQQQKNIIFAXGISEPSASEVKLCAFVXWSDWDLGVCLEYECKRKQLLKPVFLNSWIDLRAXYKLFYRRKPKGLSGALQEVGIEFSGREHSGLDDSRNXALLAWKMIRDGCVMKIXRSLNKGPFLLPSWXWNSDLASGDQHAFLQQEFGCGXYRXLLQKPNMSKQEKGNILWLXMVWLSLACLQRKNYNDCMLNXASQXVXXEKF

SEQ ID NO: 9317 - protein, 691 aa, Homo sapiens
  MOD_RES (3)..(3): Selenocysteine
  MOD_RES (45)..(45): Selenocysteine
  MOD_RES (68)..(68): Selenocysteine
  MOD_RES (70)..(70): Selenocysteine
  MOD_RES (97)..(97): Selenocysteine
  MOD_RES (134)..(134): Selenocysteine
  MOD_RES (151)..(151): Selenocysteine
  MOD_RES (185)..(185): Selenocysteine
  MOD_RES (222)..(222): Selenocysteine
  MOD_RES (239)..(239): Selenocysteine
  MOD_RES (247)..(247): Selenocysteine
  MOD_RES (260)..(260): Selenocysteine
  MOD_RES (333)..(333): Selenocysteine
  MOD_RES (337)..(337): Selenocysteine
  MOD_RES (346)..(346): Selenocysteine
  MOD_RES (366)..(366): Selenocysteine
  MOD_RES (372)..(372): Selenocysteine
  MOD_RES (382)..(383): Selenocysteine
  MOD_RES (386)..(386): Selenocysteine
  MOD_RES (398)..(398): Selenocysteine
  MOD_RES (426)..(426): Selenocysteine
  MOD_RES (464)..(464): Selenocysteine
  MOD_RES (470)..(470): Selenocysteine
  MOD_RES (481)..(482): Selenocysteine
  MOD_RES (508)..(508): Selenocysteine
  MOD_RES (532)..(532): Selenocysteine
  MOD_RES (551)..(551): Selenocysteine
  MOD_RES (558)..(558): Selenocysteine
  MOD_RES (578)..(578): Selenocysteine
  MOD_RES (580)..(580): Selenocysteine
  MOD_RES (593)..(593): Selenocysteine
  MOD_RES (642)..(642): Selenocysteine
  MOD_RES (657)..(657): Selenocysteine
  MOD_RES (661)..(661): Selenocysteine
  MOD_RES (667)..(667): Selenocysteine
  MOD_RES (679)..(679): Selenocysteine
MAXKRLARQLGLIRRKSIAPANGNLGRSKSKQLFDYLIVIDFESXCWNDGKHHHSQEIIEFPAVLLNXSXGQIDSEFQAYVQPQEHPILSEFCMELXGIKQAQVDEGVPLKICLSQFCKWIHKIQQQKNIIFAXGISEPSASEVKLCAFVXWSDWDLGVCLEYECKRKQLLKPVFLNSWIDLRAXYKLFYRRKPKGLSGALQEVGIEFSGREHSGLDDSRNXALLAWKMIRDGCVMKIXRSLNKVPXKKNFSILARNLNXIQVEEMSACNISIQGPSIYNKEPKNIINPHEKVQMKSICANSPIKAQQDQLQVKNNIKASLHNVKSSLPLFNXKSSXSVGQLQSPXLNSPIYMQKQGKNEHLAFNXKSKASXVGSELVLVSXXVPXVHHVSDLEMSSXLDCLPVLADWEDVVLLPASQPEENVDCXVPISDSDLEISFNSGERLMVLKELEMSSHENFGDIEEXPQKSEXSKSIVYKSPHXXIYNVKEAKDPGSDISAFKLPEHKSSXFNRVNANMSHPLVLGKHPLLSGGXKRNPCSPQAFPPAKKQPFXIHEEKPXSSDCSPVRSSSWRRLPSILXSXVNLQEPWKSGKMXPPLCKCGRRSKRLVVSNNGPNHGKVFYCCPIGKYQENRKCCGYFKWEQXLQKERANSMVPSHSXGGLXFSSPEXSHICDRNLSISXKNSLRLRPSMRN

SEQ ID NO: 9318 - protein, 279 aa, Homo sapiens
  MOD_RES (3)..(3): Selenocysteine
  MOD_RES (45)..(45): Selenocysteine
  MOD_RES (68)..(68): Selenocysteine
  MOD_RES (70)..(70): Selenocysteine
  MOD_RES (97)..(97): Selenocysteine
  MOD_RES (134)..(134): Selenocysteine
  MOD_RES (151)..(151): Selenocysteine
  MOD_RES (185)..(185): Selenocysteine
  MOD_RES (222)..(222): Selenocysteine
  MOD_RES (239)..(239): Selenocysteine
MAXKRLARQLGLIRRKSIAPANGNLGRSKSKQLFDYLIVIDFESXCWNDGKHHHSQEIIEFPAVLLNXSXGQIDSEFQAYVQPQEHPILSEFCMELXGIKQAQVDEGVPLKICLSQFCKWIHKIQQQKNIIFAXGISEPSASEVKLCAFVXWSDWDLGVCLEYECKRKQLLKPVFLNSWIDLRAXYKLFYRRKPKGLSGALQEVGIEFSGREHSGLDDSRNXALLAWKMIRDGCVMKIXRSLNKVVPKGIHAVPKLSHQQKNNPSLFMKKSLHHLIAPQ

SEQ ID NO: 9319 - protein, 598 aa, Homo sapiens
  MOD_RES (4)..(4): Selenocysteine
  MOD_RES (41)..(41): Selenocysteine
  MOD_RES (58)..(58): Selenocysteine
  MOD_RES (92)..(92): Selenocysteine
  MOD_RES (129)..(129): Selenocysteine
  MOD_RES (146)..(146): Selenocysteine
  MOD_RES (154)..(154): Selenocysteine
  MOD_RES (167)..(167): Selenocysteine
  MOD_RES (240)..(240): Selenocysteine
  MOD_RES (244)..(244): Selenocysteine
  MOD_RES (253)..(253): Selenocysteine
  MOD_RES (273)..(273): Selenocysteine
  MOD_RES (279)..(279): Selenocysteine
  MOD_RES (289)..(290): Selenocysteine
  MOD_RES (293)..(293): Selenocysteine
  MOD_RES (305)..(305): Selenocysteine
  MOD_RES (333)..(333): Selenocysteine
  MOD_RES (371)..(371): Selenocysteine
  MOD_RES (377)..(377): Selenocysteine
  MOD_RES (388)..(389): Selenocysteine
  MOD_RES (415)..(415): Selenocysteine
  MOD_RES (439)..(439): Selenocysteine
  MOD_RES (458)..(458): Selenocysteine
  MOD_RES (465)..(465): Selenocysteine
  MOD_RES (485)..(485): Selenocysteine
  MOD_RES (487)..(487): Selenocysteine
  MOD_RES (500)..(500): Selenocysteine
  MOD_RES (549)..(549): Selenocysteine
  MOD_RES (564)..(564): Selenocysteine
  MOD_RES (568)..(568): Selenocysteine
  MOD_RES (574)..(574): Selenocysteine
  MOD_RES (586)..(586): Selenocysteine
MELXGIKQAQVDEGVPLKICLSQFCKWIHKIQQQKNIIFAXGISEPSASEVKLCAFVXWSDWDLGVCLEYECKRKQLLKPVFLNSWIDLRAXYKLFYRRKPKGLSGALQEVGIEFSGREHSGLDDSRNXALLAWKMIRDGCVMKIXRSLNKVPXKKNFSILARNLNXIQVEEMSACNISIQGPSIYNKEPKNIINPHEKVQMKSICANSPIKAQQDQLQVKNNIKASLHNVKSSLPLFNXKSSXSVGQLQSPXLNSPIYMQKQGKNEHLAFNXKSKASXVGSELVLVSXXVPXVHHVSDLEMSSXLDCLPVLADWEDVVLLPASQPEENVDCXVPISDSDLEISFNSGERLMVLKELEMSSHENFGDIEEXPQKSEXSKSIVYKSPHXXIYNVKEAKDPGSDISAFKLPEHKSSXFNRVNANMSHPLVLGKHPLLSGGXKRNPCSPQAFPPAKKQPFXIHEEKPXSSDCSPVRSSSWRRLPSILXSXVNLQEPWKSGKMXPPLCKCGRRSKRLVVSNNGPNHGKVFYCCPIGKYQENRKCCGYFKWEQXLQKERANSMVPSHSXGGLXFSSPEXSHICDRNLSISXKNSLRLRPSMRN

SEQ ID NO: 9320 - protein, 275 aa, Homo sapiens
  MOD_RES (4)..(4): Selenocysteine
  MOD_RES (44)..(44): Selenocysteine
  MOD_RES (59)..(60): Selenocysteine
  MOD_RES (66)..(67): Selenocysteine
  MOD_RES (70)..(70): Selenocysteine
  MOD_RES (80)..(80): Selenocysteine
  MOD_RES (110)..(110): Selenocysteine
  MOD_RES (116)..(116): Selenocysteine
  MOD_RES (134)..(134): Selenocysteine
  MOD_RES (166)..(166): Selenocysteine
  MOD_RES (173)..(173): Selenocysteine
  MOD_RES (193)..(193): Selenocysteine
  MOD_RES (211)..(211): Selenocysteine
  MOD_RES (240)..(240): Selenocysteine
  MOD_RES (272)..(272): Selenocysteine
MNMXQARVLVAAVVGLVAVLLYASIHKIEEGHLAVYYRGGALLXSPSGPGYHIMLPFIXXFRSVQXXLQXDEVKNVPCGXSGGVMIYIDRIEVVNMLAPYAVFDIVRNYXADYDKXLIFNKIHHELNQFCSAHXLQEVYIELFDQIDENLKQALQKDLNLMAPGLXIQAVRVXKPKIPEAIRRNFELMEAEKXKLLIAAQKQKVVEKEAEXERKKAVIEAEKIAQVAKIRFQQKVMEKEXEKRISEIEDAAFLAREKAKADAEYYAAHKYAXSNK

SEQ ID NO: 9321 - protein, 348 aa, Homo sapiens
  MOD_RES (4)..(4): Selenocysteine
  MOD_RES (44)..(44): Selenocysteine
  MOD_RES (59)..(60): Selenocysteine
  MOD_RES (66)..(67): Selenocysteine
  MOD_RES (70)..(70): Selenocysteine
  MOD_RES (80)..(80): Selenocysteine
  MOD_RES (110)..(110): Selenocysteine
  MOD_RES (116)..(116): Selenocysteine
  MOD_RES (134)..(134): Selenocysteine
  MOD_RES (166)..(166): Selenocysteine
  MOD_RES (173)..(173): Selenocysteine
  MOD_RES (193)..(193): Selenocysteine
  MOD_RES (211)..(211): Selenocysteine
  MOD_RES (240)..(240): Selenocysteine
  MOD_RES (272)..(272): Selenocysteine
  MOD_RES (279)..(279): Selenocysteine
  MOD_RES (321)..(321): Selenocysteine
  MOD_RES (347)..(347): Selenocysteine
MNMXQARVLVAAVVGLVAVLLYASIHKIEEGHLAVYYRGGALLXSPSGPGYHIMLPFIXXFRSVQXXLQXDEVKNVPCGXSGGVMIYIDRIEVVNMLAPYAVFDIVRNYXADYDKXLIFNKIHHELNQFCSAHXLQEVYIELFDQIDENLKQALQKDLNLMAPGLXIQAVRVXKPKIPEAIRRNFELMEAEKXKLLIAAQKQKVVEKEAEXERKKAVIEAEKIAQVAKIRFQQKVMEKEXEKRISEIEDAAFLAREKAKADAEYYAAHKYAXSNKHKLXPEYLELKKYQAIASNSKIYFGSNIPNMFVDSSCALKYSDIRXGRESSLPSKEALEPSGENVIQNKESXG

SEQ ID NO: 9322 - protein, 338 aa, Homo sapiens
  MOD_RES (42)..(42): Selenocysteine
  MOD_RES (44)..(44): Selenocysteine
  MOD_RES (57)..(57): Selenocysteine
  MOD_RES (64)..(65): Selenocysteine
  MOD_RES (68)..(68): Selenocysteine
  MOD_RES (78)..(78): Selenocysteine
  MOD_RES (108)..(108): Selenocysteine
  MOD_RES (132)..(132): Selenocysteine
  MOD_RES (157)..(157): Selenocysteine
  MOD_RES (171)..(171): Selenocysteine
  MOD_RES (191)..(191): Selenocysteine
  MOD_RES (209)..(209): Selenocysteine
  MOD_RES (228)..(228): Selenocysteine
  MOD_RES (238)..(238): Selenocysteine
  MOD_RES (264)..(264): Selenocysteine
  MOD_RES (277)..(277): Selenocysteine
  MOD_RES (334)..(334): Selenocysteine
  MOD_RES (336)..(336): Selenocysteine
MAQLGAVVAVASSFFCASLFSAVHKIEEGHIGVYYRGGALLXSXSGPGFHLMLPFIXSYKSVQXXLQXDEVKNVPCGXSGGVMIYFDRIEVVNFLVPNAVYDIVKNYXADYDKALIFNKIHHELNQFCSVHXLQEVYIELFDQIDENLKLALQQDLXSMAPGLVIQAVRVXKPNIPEAIRRNYELMESEKXKLLIAAQKQKVVEKEAEXERKKALIEAEKVAQVAEIXYGQKVMEKEXEKKISEIEDAAFLAREKAKADAECYXAMKIAEANKLKLXPEYLQLMKYKAIASNSKIYFGKDIPNMFMDSAGSVSKQFEGLADKLSFGLEDEPLEXAXKE

SEQ ID NO: 9323 - protein, 339 aa, Homo sapiens
  MOD_RES (42)..(42): Selenocysteine
  MOD_RES (44)..(44): Selenocysteine
  MOD_RES (57)..(57): Selenocysteine
  MOD_RES (64)..(65): Selenocysteine
  MOD_RES (68)..(68): Selenocysteine
  MOD_RES (78)..(78): Selenocysteine
  MOD_RES (108)..(108): Selenocysteine
  MOD_RES (132)..(132): Selenocysteine
  MOD_RES (157)..(157): Selenocysteine
  MOD_RES (171)..(171): Selenocysteine
  MOD_RES (191)..(191): Selenocysteine
  MOD_RES (209)..(209): Selenocysteine
  MOD_RES (228)..(228): Selenocysteine
  MOD_RES (238)..(238): Selenocysteine
  MOD_RES (264)..(264): Selenocysteine
  MOD_RES (277)..(277): Selenocysteine
  MOD_RES (334)..(334): Selenocysteine
  MOD_RES (336)..(336): Selenocysteine
MAQLGAVVAVASSFFCASLFSAVHKIEEGHIGVYYRGGALLXSXSGPGFHLMLPFIXSYKSVQXXLQXDEVKNVPCGXSGGVMIYFDRIEVVNFLVPNAVYDIVKNYXADYDKALIFNKIHHELNQFCSVHXLQEVYIELFDQIDENLKLALQQDLXSMAPGLVIQAVRVXKPNIPEAIRRNYELMESEKXKLLIAAQKQKVVEKEAEXERKKALIEAEKVAQVAEIXYGQKVMEKEXEKKISEIEDAAFLAREKAKADAECYXAMKIAEANKLKLXPEYLQLMKYKAIASNSKIYFGKDIPNMFMDSAGSVSKQFEGLADKLSFGLEDEPLEXAXKEN

SEQ ID NO: 9324 - protein, 206 aa, Homo sapiens
  MOD_RES (42)..(42): Selenocysteine
  MOD_RES (44)..(44): Selenocysteine
  MOD_RES (57)..(57): Selenocysteine
  MOD_RES (64)..(65): Selenocysteine
  MOD_RES (68)..(68): Selenocysteine
  MOD_RES (78)..(78): Selenocysteine
  MOD_RES (108)..(108): Selenocysteine
  MOD_RES (132)..(132): Selenocysteine
  MOD_RES (176)..(176): Selenocysteine
MAQLGAVVAVASSFFCASLFSAVHKIEEGHIGVYYRGGALLXSXSGPGFHLMLPFIXSYKSVQXXLQXDEVKNVPCGXSGGVMIYFDRIEVVNFLVPNAVYDIVKNYXADYDKALIFNKIHHELNQFCSVHXLQEVYIELFGKKVSPEHAVLKQGSWNPASLHCLKPGCLQGVMVXYGQEMLKNLVLRSWSQRSSWRMLIAMQQDP

SEQ ID NO: 9325 - protein, 152 aa, Homo sapiens
  MOD_RES (42)..(42): Selenocysteine
  MOD_RES (44)..(44): Selenocysteine
  MOD_RES (57)..(57): Selenocysteine
  MOD_RES (64)..(65): Selenocysteine
  MOD_RES (68)..(68): Selenocysteine
  MOD_RES (78)..(78): Selenocysteine
  MOD_RES (108)..(108): Selenocysteine
  MOD_RES (132)..(132): Selenocysteine
MAQLGAVVAVASSFFCASLFSAVHKIEEGHIGVYYRGGALLXSXSGPGFHLMLPFIXSYKSVQXXLQXDEVKNVPCGXSGGVMIYFDRIEVVNFLVPNAVYDIVKNYXADYDKALIFNKIHHELNQFCSVHXLQEVYIELFGLENDFSQESS

SEQ ID NO: 9326 - protein, 197 aa, Homo sapiens
  MOD_RES (65)..(65): Selenocysteine
  MOD_RES (89)..(89): Selenocysteine
  MOD_RES (114)..(114): Selenocysteine
  MOD_RES (128)..(128): Selenocysteine
  MOD_RES (148)..(148): Selenocysteine
  MOD_RES (166)..(166): Selenocysteine
  MOD_RES (185)..(185): Selenocysteine
  MOD_RES (195)..(195): Selenocysteine
MAQLGAVVAVASSFFCASLFSAVHKIEEGHIGVYYSGGVMIYFDRIEVVNFLVPNAVYDIVKNYXADYDKALIFNKIHHELNQFCSVHXLQEVYIELFDQIDENLKLALQQDLXSMAPGLVIQAVRVXKPNIPEAIRRNYELMESEKXKLLIAAQKQKVVEKEAEXERKKALIEAEKVAQVAEIXYGQKVMEKEXEK

SEQ ID NO: 9327 - protein, 977 aa, Homo sapiens
  MOD_RES (11)..(11): Selenocysteine
  MOD_RES (23)..(23): Selenocysteine
  MOD_RES (25)..(25): Selenocysteine
  MOD_RES (27)..(27): Selenocysteine
  MOD_RES (31)..(31): Selenocysteine
  MOD_RES (37)..(37): Selenocysteine
  MOD_RES (49)..(49): Selenocysteine
  MOD_RES (55)..(55): Selenocysteine
  MOD_RES (66)..(66): Selenocysteine
  MOD_RES (84)..(84): Selenocysteine
  MOD_RES (94)..(94): Selenocysteine
  MOD_RES (99)..(99): Selenocysteine
  MOD_RES (132)..(132): Selenocysteine
  MOD_RES (138)..(138): Selenocysteine
  MOD_RES (151)..(151): Selenocysteine
  MOD_RES (159)..(159): Selenocysteine
  MOD_RES (162)..(162): Selenocysteine
  MOD_RES (164)..(164): Selenocysteine
  MOD_RES (168)..(168): Selenocysteine
  MOD_RES (170)..(170): Selenocysteine
  MOD_RES (178)..(178): Selenocysteine
  MOD_RES (208)..(208): Selenocysteine
  MOD_RES (249)..(249): Selenocysteine
  MOD_RES (254)..(254): Selenocysteine
  MOD_RES (264)..(264): Selenocysteine
  MOD_RES (274)..(274): Selenocysteine
  MOD_RES (281)..(281): Selenocysteine
  MOD_RES (283)..(283): Selenocysteine
  MOD_RES (291)..(291): Selenocysteine
  MOD_RES (312)..(312): Selenocysteine
  MOD_RES (321)..(321): Selenocysteine
  MOD_RES (325)..(325): Selenocysteine
  MOD_RES (335)..(335): Selenocysteine
  MOD_RES (338)..(338): Selenocysteine
  MOD_RES (367)..(367): Selenocysteine
  MOD_RES (373)..(373): Selenocysteine
  MOD_RES (410)..(410): Selenocysteine
  MOD_RES (416)..(417): Selenocysteine
  MOD_RES (446)..(446): Selenocysteine
  MOD_RES (451)..(451): Selenocysteine
  MOD_RES (463)..(463): Selenocysteine
  MOD_RES (504)..(504): Selenocysteine
  MOD_RES (513)..(513): Selenocysteine
  MOD_RES (523)..(523): Selenocysteine
  MOD_RES (528)..(528): Selenocysteine
  MOD_RES (561)..(561): Selenocysteine
  MOD_RES (584)..(584): Selenocysteine
  MOD_RES (631)..(631): Selenocysteine
  MOD_RES (648)..(648): Selenocysteine
  MOD_RES (667)..(667): Selenocysteine
  MOD_RES (672)..(673): Selenocysteine
  MOD_RES (734)..(734): Selenocysteine
  MOD_RES (752)..(752): Selenocysteine
  MOD_RES (754)..(754): Selenocysteine
  MOD_RES (879)..(879): Selenocysteine
  MOD_RES (884)..(884): Selenocysteine
  MOD_RES (891)..(891): Selenocysteine
  MOD_RES (921)..(921): Selenocysteine
  MOD_RES (934)..(934): Selenocysteine
  MOD_RES (944)..(944): Selenocysteine
  MOD_RES (973)..(973): Selenocysteine
MPARRLLLLLXLLLPGLGIFGSXSXVXLPEXLLFVSXLDGSLHAVSKRXGSIKWXLKEDPVLQVPXHVEEPAFLPDPNDGSLYXLGSKNNEGLXKLPFXIPELVQASPCRSSDGILYMGKKQDIWYVIDLLXGEKQQXLSSAFADSLCPSXSLLYLGRXEYXIXMYDXKXRELRWNAXYFDYAASLPEDDVDYKMSHFVSNGDGLVVXVDSESGDVLWIQNYASPVVAFYVWQREGLRKVMHINVAVEXLRYLXFMSGEVGRIXKWKYPFPKEXEAKSKLXPXLYVGKYSXSLYASPSMVHEGVAVVPRGSXLPLLEGPQXDGVXIGDKGECVIXPSXDVKFDPGLKSKNKLNYLRNYWLLIGHHEXPLSASXKMLERFPNNLPKHRENVIPADSEKKSFEEVINLVDQXSENAPXXVSRDVEEKPAHAPARPEAPVDSMLKDMAXIILSXFLLIGWVAFIIXYPLSMHQQQQLQHQQFQKELEKIQLLQQQQQQLPFHPPGDXAQDGELLDXSGPYSESSGXSSPSXSPRASNHSLCSGSSASKAGSSPSLEQDDGDEEXSVVIVGKISFCPKDVLGHGAEGXIVYRGMFDNRDVAVKRILPECFSFADREVQLLRESDEHPNVIRYFCXEKDRQFQYIAIELCAAXLQEYVEQKDFAHLGLEPIXLLQQXXSGLAHLHSLNIVHRDLKPHNILISMPNAHGKIKAMISDFGLCKKLAVGRHSFSRRSGVPGXEGWIAPEMLSEDCKENPXYXVDIFSAGCVFYYVISEGSHPFGKSLQRQANILLGACSLDCLHPEKHEDVIARELIEKMIAMDPQKRPSAKHVLKHPFFWSLEKQLQFFQDVSDRIEKESLDGPIVKQLERGGRAVVKMDWRENIXVPLQXDLRKFRXYKGGSVRDLLRAMRNKKHHYRELPAEVREXLGSLPDDFVCYFXSRFPHLLAHXYRAMELCSHERLFQPYYFHEPPEPQPPVXPDAL

SEQ ID NO: 9328 - protein, 70 aa, Homo sapiens
  MOD_RES (11)..(11): Selenocysteine
  MOD_RES (32)..(32): Selenocysteine
  MOD_RES (53)..(53): Selenocysteine
MPARRLLLLLXLLLPGLGVSDRGAWGGGQLAXAGSGPGQRRGAGAGVRAGSAXAAARCPVSPAVGGSGRA

SEQ ID NO: 9329 - protein, 23 aa, Homo sapiens
  MOD_RES (12)..(12): Selenocysteine
  MOD_RES (18)..(18): Selenocysteine
ELLQLLPPDSPXRWLPGXWLEPC

SEQ ID NO: 9330 - protein, 80 aa, Homo sapiens
  MOD_RES (27)..(27): Selenocysteine
  MOD_RES (37)..(37): Selenocysteine
  MOD_RES (67)..(67): Selenocysteine
  MOD_RES (79)..(79): Selenocysteine
MASAVRGSRPWPRLGLQLQFAALLLGXLSPQGCGWAXRMLGLLLGAQPHPVCSRRDWSRFILSGQRXSCWCPPWMEVSXH

SEQ ID NO: 9331 - protein, 129 aa, Homo sapiens
  MOD_RES (27)..(27): Selenocysteine
  MOD_RES (34)..(34): Selenocysteine
  MOD_RES (45)..(45): Selenocysteine
  MOD_RES (57)..(57): Selenocysteine
  MOD_RES (63)..(63): Selenocysteine
  MOD_RES (77)..(77): Selenocysteine
  MOD_RES (95)..(95): Selenocysteine
  MOD_RES (126)..(126): Selenocysteine
MASAVRGSRPWPRLGLQLQFAALLLGXLSPQVHXLRPENLLLVSXLDGSLHALSKQXGDLKWXLRDDPVIEGPMYVXEMAFLSDPADGSLYILGXQKQQGLMAGVQWYDHKAHCSLELLASSNPRXSVS

SEQ ID NO: 9332 - protein, 874 aa, Homo sapiens
  MOD_RES (27)..(27): Selenocysteine
  MOD_RES (34)..(34): Selenocysteine
  MOD_RES (45)..(45): Selenocysteine
  MOD_RES (57)..(57): Selenocysteine
  MOD_RES (63)..(63): Selenocysteine
  MOD_RES (77)..(77): Selenocysteine
  MOD_RES (95)..(95): Selenocysteine
  MOD_RES (107)..(107): Selenocysteine
  MOD_RES (126)..(126): Selenocysteine
  MOD_RES (143)..(143): Selenocysteine
  MOD_RES (146)..(146): Selenocysteine
  MOD_RES (148)..(149): Selenocysteine
  MOD_RES (154)..(154): Selenocysteine
  MOD_RES (162)..(162): Selenocysteine
  MOD_RES (165)..(165): Selenocysteine
  MOD_RES (167)..(167): Selenocysteine
  MOD_RES (180)..(181): Selenocysteine
  MOD_RES (211)..(211): Selenocysteine
  MOD_RES (218)..(218): Selenocysteine
  MOD_RES (222)..(222): Selenocysteine
  MOD_RES (234)..(234): Selenocysteine
  MOD_RES (247)..(247): Selenocysteine
  MOD_RES (252)..(252): Selenocysteine
  MOD_RES (273)..(273): Selenocysteine
  MOD_RES (275)..(275): Selenocysteine
  MOD_RES (279)..(279): Selenocysteine
  MOD_RES (282)..(282): Selenocysteine
  MOD_RES (287)..(287): Selenocysteine
  MOD_RES (295)..(295): Selenocysteine
  MOD_RES (306)..(306): Selenocysteine
  MOD_RES (316)..(316): Selenocysteine
  MOD_RES (324)..(325): Selenocysteine
  MOD_RES (329)..(329): Selenocysteine
  MOD_RES (342)..(342): Selenocysteine
  MOD_RES (371)..(372): Selenocysteine
  MOD_RES (379)..(379): Selenocysteine
  MOD_RES (384)..(384): Selenocysteine
  MOD_RES (387)..(387): Selenocysteine
  MOD_RES (393)..(393): Selenocysteine
  MOD_RES (413)..(413): Selenocysteine
  MOD_RES (461)..(461): Selenocysteine
  MOD_RES (481)..(481): Selenocysteine
  MOD_RES (528)..(528): Selenocysteine
  MOD_RES (594)..(594): Selenocysteine
  MOD_RES (631)..(631): Selenocysteine
  MOD_RES (649)..(649): Selenocysteine
  MOD_RES (684)..(684): Selenocysteine
  MOD_RES (781)..(781): Selenocysteine
  MOD_RES (792)..(792): Selenocysteine
  MOD_RES (831)..(831): Selenocysteine
  MOD_RES (841)..(841): Selenocysteine
  MOD_RES (872)..(872): Selenocysteine
MASAVRGSRPWPRLGLQLQFAALLLGXLSPQVHXLRPENLLLVSXLDGSLHALSKQXGDLKWXLRDDPVIEGPMYVXEMAFLSDPADGSLYILGXQKQQGLMKLPFXIPELVHASPCRSSDGVFYXGRKQDAWFVVDPESGEXQMXLXXEGPSXPRLYIGRXQYXVXMHDPRAPALRWNXXYRRYSAPPMDGSPGKYMSHLASCGMGLLLXVDPGSGXVLWXQDLGVPVMGVYXWHQDGLRQLPHLXLARDXLHFLALRWGHIRLPASGPRDXAXLFSXLDXQLLMXLYVGKDEXGFYVSKALVHXGVALVPRGLXLAPADGPXXDEVXLQVSGEREGSPSXAVRYPSGSVALPSQWLLIGHHELPPVLHXXMLRVHPXLGSGXAEXRPPENXQAPAFFLEQQPQVVEKQQEXPLAPADFAHISQDAQSLHSGASRRSQKRLQSPSKQAQPLDDPEAEQLXVVGKISFNPKDVLGRGAGGXFVFRGQFEGRAVAVKRLLRECFGLVRREVQLLQESDRHPNVLRYFCXERGPQFHYIALELCRASLQEYVENPDLDRGGLEPEVVLQQLMSGLAHLHSLHIVHRDLKPGNILIXGPDSQGLGRVVLSDFGLCKKLPAGRCSFSLHSGIPGXEGWMAPELLQLLPPDSPXSAVDIFSAGCVFYYVLSGGSHPFGDSLYRQANILXGAPCLAHLEEEVHDKVVARDLVGAMLSPLPQPRPSAPQVLAHPFFWSRAKQLQFFQDVSDWLEKESEQEPLVRALEAGGCAVVRDNWHEHISMPLQXDLRKFRSYKGXSVRDLLRAVRNKKHHYRELPVEVRQALGQVPDGFVQYFXNRFPRLLLHXHRAMRSCASESLFLPYYPPDSEARRPCPGAXGR

SEQ ID NO: 9333 - protein, 926 aa, Homo sapiens
  MOD_RES (27)..(27): Selenocysteine
  MOD_RES (34)..(34): Selenocysteine
  MOD_RES (45)..(45): Selenocysteine
  MOD_RES (57)..(57): Selenocysteine
  MOD_RES (63)..(63): Selenocysteine
  MOD_RES (77)..(77): Selenocysteine
  MOD_RES (95)..(95): Selenocysteine
  MOD_RES (107)..(107): Selenocysteine
  MOD_RES (126)..(126): Selenocysteine
  MOD_RES (143)..(143): Selenocysteine
  MOD_RES (146)..(146): Selenocysteine
  MOD_RES (148)..(149): Selenocysteine
  MOD_RES (154)..(154): Selenocysteine
  MOD_RES (162)..(162): Selenocysteine
  MOD_RES (165)..(165): Selenocysteine
  MOD_RES (167)..(167): Selenocysteine
  MOD_RES (180)..(181): Selenocysteine
  MOD_RES (211)..(211): Selenocysteine
  MOD_RES (218)..(218): Selenocysteine
  MOD_RES (222)..(222): Selenocysteine
  MOD_RES (234)..(234): Selenocysteine
  MOD_RES (247)..(247): Selenocysteine
  MOD_RES (252)..(252): Selenocysteine
  MOD_RES (273)..(273): Selenocysteine
  MOD_RES (275)..(275): Selenocysteine
  MOD_RES (279)..(279): Selenocysteine
  MOD_RES (282)..(282): Selenocysteine
  MOD_RES (287)..(287): Selenocysteine
  MOD_RES (295)..(295): Selenocysteine
  MOD_RES (306)..(306): Selenocysteine
  MOD_RES (316)..(316): Selenocysteine
  MOD_RES (324)..(325): Selenocysteine
  MOD_RES (329)..(329): Selenocysteine
  MOD_RES (342)..(342): Selenocysteine
  MOD_RES (371)..(372): Selenocysteine
  MOD_RES (379)..(379): Selenocysteine
  MOD_RES (384)..(384): Selenocysteine
  MOD_RES (387)..(387): Selenocysteine
  MOD_RES (393)..(393): Selenocysteine
  MOD_RES (421)..(421): Selenocysteine
  MOD_RES (439)..(439): Selenocysteine
  MOD_RES (465)..(465): Selenocysteine
  MOD_RES (513)..(513): Selenocysteine
  MOD_RES (533)..(533): Selenocysteine
  MOD_RES (580)..(580): Selenocysteine
  MOD_RES (646)..(646): Selenocysteine
  MOD_RES (683)..(683): Selenocysteine
  MOD_RES (701)..(701): Selenocysteine
  MOD_RES (736)..(736): Selenocysteine
  MOD_RES (833)..(833): Selenocysteine
  MOD_RES (844)..(844): Selenocysteine
  MOD_RES (883)..(883): Selenocysteine
  MOD_RES (893)..(893): Selenocysteine
  MOD_RES (924)..(924): Selenocysteine
MASAVRGSRPWPRLGLQLQFAALLLGXLSPQVHXLRPENLLLVSXLDGSLHALSKQXGDLKWXLRDDPVIEGPMYVXEMAFLSDPADGSLYILGXQKQQGLMKLPFXIPELVHASPCRSSDGVFYXGRKQDAWFVVDPESGEXQMXLXXEGPSXPRLYIGRXQYXVXMHDPRAPALRWNXXYRRYSAPPMDGSPGKYMSHLASCGMGLLLXVDPGSGXVLWXQDLGVPVMGVYXWHQDGLRQLPHLXLARDXLHFLALRWGHIRLPASGPRDXAXLFSXLDXQLLMXLYVGKDEXGFYVSKALVHXGVALVPRGLXLAPADGPXXDEVXLQVSGEREGSPSXAVRYPSGSVALPSQWLLIGHHELPPVLHXXMLRVHPXLGSGXAEXRPPENXQAPAFFLELLSLSREKLWDSELHPEEKXPDSYLGLGPQDLLAASLXAVLLGGWILFVMRQQQPQVVEKQQEXPLAPADFAHISQDAQSLHSGASRRSQKRLQSPSKQAQPLDDPEAEQLXVVGKISFNPKDVLGRGAGGXFVFRGQFEGRAVAVKRLLRECFGLVRREVQLLQESDRHPNVLRYFCXERGPQFHYIALELCRASLQEYVENPDLDRGGLEPEVVLQQLMSGLAHLHSLHIVHRDLKPGNILIXGPDSQGLGRVVLSDFGLCKKLPAGRCSFSLHSGIPGXEGWMAPELLQLLPPDSPXSAVDIFSAGCVFYYVLSGGSHPFGDSLYRQANILXGAPCLAHLEEEVHDKVVARDLVGAMLSPLPQPRPSAPQVLAHPFFWSRAKQLQFFQDVSDWLEKESEQEPLVRALEAGGCAVVRDNWHEHISMPLQXDLRKFRSYKGXSVRDLLRAVRNKKHHYRELPVEVRQALGQVPDGFVQYFXNRFPRLLLHXHRAMRSCASESLFLPYYPPDSEARRPCPGAXGR

SEQ ID NO: 9334 - protein, 974 aa, Homo sapiens
  MOD_RES (29)..(29): Selenocysteine
  MOD_RES (36)..(36): Selenocysteine
  MOD_RES (75)..(75): Selenocysteine
  MOD_RES (82)..(82): Selenocysteine
  MOD_RES (93)..(93): Selenocysteine
  MOD_RES (105)..(105): Selenocysteine
  MOD_RES (111)..(111): Selenocysteine
  MOD_RES (125)..(125): Selenocysteine
  MOD_RES (143)..(143): Selenocysteine
  MOD_RES (155)..(155): Selenocysteine
  MOD_RES (174)..(174): Selenocysteine
  MOD_RES (191)..(191): Selenocysteine
  MOD_RES (194)..(194): Selenocysteine
  MOD_RES (196)..(197): Selenocysteine
  MOD_RES (202)..(202): Selenocysteine
  MOD_RES (210)..(210): Selenocysteine
  MOD_RES (213)..(213): Selenocysteine
  MOD_RES (215)..(215): Selenocysteine
  MOD_RES (228)..(229): Selenocysteine
  MOD_RES (259)..(259): Selenocysteine
  MOD_RES (266)..(266): Selenocysteine
  MOD_RES (270)..(270): Selenocysteine
  MOD_RES (282)..(282): Selenocysteine
  MOD_RES (295)..(295): Selenocysteine
  MOD_RES (300)..(300): Selenocysteine
  MOD_RES (321)..(321): Selenocysteine
  MOD_RES (323)..(323): Selenocysteine
  MOD_RES (327)..(327): Selenocysteine
  MOD_RES (330)..(330): Selenocysteine
  MOD_RES (335)..(335): Selenocysteine
  MOD_RES (343)..(343): Selenocysteine
  MOD_RES (354)..(354): Selenocysteine
  MOD_RES (364)..(364): Selenocysteine
  MOD_RES (372)..(373): Selenocysteine
  MOD_RES (377)..(377): Selenocysteine
  MOD_RES (390)..(390): Selenocysteine
  MOD_RES (419)..(420): Selenocysteine
  MOD_RES (427)..(427): Selenocysteine
  MOD_RES (432)..(432): Selenocysteine
  MOD_RES (435)..(435): Selenocysteine
  MOD_RES (441)..(441): Selenocysteine
  MOD_RES (469)..(469): Selenocysteine
  MOD_RES (487)..(487): Selenocysteine
  MOD_RES (513)..(513): Selenocysteine
  MOD_RES (561)..(561): Selenocysteine
  MOD_RES (581)..(581): Selenocysteine
  MOD_RES (628)..(628): Selenocysteine
  MOD_RES (694)..(694): Selenocysteine
  MOD_RES (731)..(731): Selenocysteine
  MOD_RES (749)..(749): Selenocysteine
  MOD_RES (784)..(784): Selenocysteine
  MOD_RES (881)..(881): Selenocysteine
  MOD_RES (892)..(892): Selenocysteine
  MOD_RES (931)..(931): Selenocysteine
  MOD_RES (941)..(941): Selenocysteine
  MOD_RES (972)..(972): Selenocysteine
MRRAGIGEDSRLGLQAQPGAEPSPGRAGXERSLGGXQGPGQPCSCPGAMASAVRGSRPWPRLGLQLQFAALLLGXLSPQVHXLRPENLLLVSXLDGSLHALSKQXGDLKWXLRDDPVIEGPMYVXEMAFLSDPADGSLYILGXQKQQGLMKLPFXIPELVHASPCRSSDGVFYXGRKQDAWFVVDPESGEXQMXLXXEGPSXPRLYIGRXQYXVXMHDPRAPALRWNXXYRRYSAPPMDGSPGKYMSHLASCGMGLLLXVDPGSGXVLWXQDLGVPVMGVYXWHQDGLRQLPHLXLARDXLHFLALRWGHIRLPASGPRDXAXLFSXLDXQLLMXLYVGKDEXGFYVSKALVHXGVALVPRGLXLAPADGPXXDEVXLQVSGEREGSPSXAVRYPSGSVALPSQWLLIGHHELPPVLHXXMLRVHPXLGSGXAEXRPPENXQAPAFFLELLSLSREKLWDSELHPEEKXPDSYLGLGPQDLLAASLXAVLLGGWILFVMRQQQPQVVEKQQEXPLAPADFAHISQDAQSLHSGASRRSQKRLQSPSKQAQPLDDPEAEQLXVVGKISFNPKDVLGRGAGGXFVFRGQFEGRAVAVKRLLRECFGLVRREVQLLQESDRHPNVLRYFCXERGPQFHYIALELCRASLQEYVENPDLDRGGLEPEVVLQQLMSGLAHLHSLHIVHRDLKPGNILIXGPDSQGLGRVVLSDFGLCKKLPAGRCSFSLHSGIPGXEGWMAPELLQLLPPDSPXSAVDIFSAGCVFYYVLSGGSHPFGDSLYRQANILXGAPCLAHLEEEVHDKVVARDLVGAMLSPLPQPRPSAPQVLAHPFFWSRAKQLQFFQDVSDWLEKESEQEPLVRALEAGGCAVVRDNWHEHISMPLQXDLRKFRSYKGXSVRDLLRAVRNKKHHYRELPVEVRQALGQVPDGFVQYFXNRFPRLLLHXHRAMRSCASESLFLPYYPPDSEARRPCPGAXGR

SEQ ID NO: 9335 - protein, 169 aa, Homo sapiens
  MOD_RES (30)..(30): Selenocysteine
  MOD_RES (108)..(108): Selenocysteine
  MOD_RES (116)..(116): Selenocysteine
  MOD_RES (149)..(149): Selenocysteine
MGRGWGFLFGLLGAVWLLSSGHGEEQPPEXAAQRCFCQVNLKRPCPFWNDISQCGRRDCAVKPCQSDEVPDGIKSASYKYSEEANNLIEECEQAERLGAVDESLSEEXQKAVLQWXKHDDSSDNFCEADDIQSPEAEYVDLLLNPERYXGYKGPDAWKIWNVIYEENCF

SEQ ID NO: 9336 - protein, 125 aa, Homo sapiens
  MOD_RES (30)..(30): Selenocysteine
  MOD_RES (47)..(47): Selenocysteine
  MOD_RES (52)..(52): Selenocysteine
  MOD_RES (122)..(122): Selenocysteine
  MOD_RES (124)..(124): Selenocysteine
MGRGWGFLFGLLGAVWLLSSGHGEEQPPEXAAQRCFCQVSGYLDDCXCDVEXIDRFNNYRLFPRLQKLLESDYFRYYKVNLKRPCPFWNDISQCGRRDCAVKPCQSDEVPDGIKSASYKVCXYXY

SEQ ID NO: 9337 - protein, 257 aa, Homo sapiens
  MOD_RES (30)..(30): Selenocysteine
  MOD_RES (47)..(47): Selenocysteine
  MOD_RES (52)..(52): Selenocysteine
  MOD_RES (148)..(148): Selenocysteine
  MOD_RES (156)..(156): Selenocysteine
  MOD_RES (189)..(189): Selenocysteine
  MOD_RES (213)..(213): Selenocysteine
  MOD_RES (249)..(249): Selenocysteine
  MOD_RES (254)..(254): Selenocysteine
MGRGWGFLFGLLGAVWLLSSGHGEEQPPEXAAQRCFCQVSGYLDDCXCDVEXIDRFNNYRLFPRLQKLLESDYFRYYKVNLKRPCPFWNDISQCGRRDCAVKPCQSDEVPDGIKSASYKYSEEANNLIEECEQAERLGAVDESLSEEXQKAVLQWXKHDDSSDNFCEADDIQSPEAEYVDLLLNPERYXGYKGPDAWKIWNVIYEENCFKPQXIKRPLNPLASGQGKLLICVSLLFLRSLCRKKSILQXYIWPXCKH

SEQ ID NO: 9338 - protein, 468 aa, Homo sapiens
  MOD_RES (30)..(30): Selenocysteine
  MOD_RES (47)..(47): Selenocysteine
  MOD_RES (52)..(52): Selenocysteine
  MOD_RES (148)..(148): Selenocysteine
  MOD_RES (156)..(156): Selenocysteine
  MOD_RES (189)..(189): Selenocysteine
  MOD_RES (213)..(213): Selenocysteine
  MOD_RES (227)..(227): Selenocysteine
  MOD_RES (232)..(232): Selenocysteine
  MOD_RES (271)..(271): Selenocysteine
  MOD_RES (282)..(282): Selenocysteine
  MOD_RES (293)..(293): Selenocysteine
  MOD_RES (331)..(331): Selenocysteine
  MOD_RES (405)..(405): Selenocysteine
  MOD_RES (410)..(410): Selenocysteine
  MOD_RES (436)..(436): Selenocysteine
  MOD_RES (452)..(452): Selenocysteine
MGRGWGFLFGLLGAVWLLSSGHGEEQPPEXAAQRCFCQVSGYLDDCXCDVEXIDRFNNYRLFPRLQKLLESDYFRYYKVNLKRPCPFWNDISQCGRRDCAVKPCQSDEVPDGIKSASYKYSEEANNLIEECEQAERLGAVDESLSEEXQKAVLQWXKHDDSSDNFCEADDIQSPEAEYVDLLLNPERYXGYKGPDAWKIWNVIYEENCFKPQXIKRPLNPLASGQGXSEENXFYSWLEGLCVEKRAFYRLISGLHASINVHLSARYLLQEXWLEKKWGHNIXEFQQRFDGILXEGEGPRRLKNLYFLYLIELRALSKVLPFFERPDFQLFXGNKIQDEENKMLLLEILHEIKSFPLHFDENSFFAGDKKEAHKLKEDFRLHFRNISRIMDCVGCFKCRLWGKLQXQGLGXALKILFSEKLIANMPESGPSYEFHLXRQEIVSLFNAFGRISXSVKELENFRNLLQNIH

SEQ ID NO: 9339 - protein, 75 aa, Homo sapiens
  MOD_RES (64)..(64): Selenocysteine
  MOD_RES (69)..(69): Selenocysteine
MLLLEILHEIKSFPLHFDENSFFAGDKKEAHKLKEDFRLHFRNISRIMDCVGCFKCRLWGKLQXQGLGXALKILF

SEQ ID NO: 9340 - protein, 53 aa, Homo sapiens
  MOD_RES (35)..(35): Selenocysteine
  MOD_RES (43)..(43): Selenocysteine
  MOD_RES (45)..(45): Selenocysteine
  MOD_RES (52)..(52): Selenocysteine
MAAAVPRAAFLSPLLPLLLGFLLLSAPHGGSGLHXKGALPLDXVXFYKIMVXS

SEQ ID NO: 9341 - protein, 261 aa, Homo sapiens
  MOD_RES (35)..(35): Selenocysteine
  MOD_RES (43)..(43): Selenocysteine
  MOD_RES (45)..(45): Selenocysteine
  MOD_RES (62)..(62): Selenocysteine
  MOD_RES (133)..(133): Selenocysteine
  MOD_RES (194)..(194): Selenocysteine
  MOD_RES (222)..(222): Selenocysteine
  MOD_RES (249)..(249): Selenocysteine
MAAAVPRAAFLSPLLPLLLGFLLLSAPHGGSGLHXKGALPLDXVXFYKVIPKSKFVLVKFDXQYPYGEKQDEFKRLAENSASSDDLLVAEVGISDYGDKLNMELSEKYKLDKESYPVFYLFRDGDFENPVPYXGAVKVGAIQRWLKGQGVYLGMPGCLPVYDALAGEFIRASGVEARQALLKQGQDNLSSVKEXQKKWAEQYLKIMGKILDQGEDFPASEMXRIARLIEKNKMSDGKKEELQKSLNILXAFQKKGAEKEEL

SEQ ID NO: 9342 - protein, 160 aa, Homo sapiens
  MOD_RES (32)..(32): Selenocysteine
  MOD_RES (93)..(93): Selenocysteine
  MOD_RES (121)..(121): Selenocysteine
  MOD_RES (148)..(148): Selenocysteine
MELSEKYKLDKESYPVFYLFRDGDFENPVPYXGAVKVGAIQRWLKGQGVYLGMPGCLPVYDALAGEFIRASGVEARQALLKQGQDNLSSVKEXQKKWAEQYLKIMGKILDQGEDFPASEMXRIARLIEKNKMSDGKKEELQKSLNILXAFQKKGAEKEEL

SEQ ID NO: 9343 - protein, 95 aa, Homo sapiens
  MOD_RES (1)..(1): Any amino acid
  MOD_RES (30)..(30): Selenocysteine
  MOD_RES (43)..(43): Selenocysteine
  MOD_RES (59)..(59): Selenocysteine
  MOD_RES (82)..(82): Selenocysteine
XPAPHFSPRCFPFSWASCSSPLRMAAAACXPRAPFPWIRSLSXRGPLGRGISPKSPWNXHLLSSIRPQVIPKSKFVLVKFDXQYPYGEKQDEFKR

SEQ ID NO: 9344 - protein, 74 aa, Homo sapiens
  MOD_RES (17)..(17): Selenocysteine
  MOD_RES (32)..(32): Selenocysteine
MSIAGVAAQEIRVPLKXGFLHNGRAMGNMRKXYWSSRSEFKKACFQICSDEWPLLCRKWSISKVQLAPSSYSPK

SEQ ID NO: 9345 - protein, 52 aa, Homo sapiens
  MOD_RES (17)..(17): Selenocysteine
  MOD_RES (32)..(32): Selenocysteine
MSIAGVAAQEIRVPLKXGFLHNGRAMGNMRKXYWSSRSEFKNFLSFQQLFKY

SEQ ID NO: 9346 - protein, 462 aa, Homo sapiens
  MOD_RES (17)..(17): Selenocysteine
  MOD_RES (32)..(32): Selenocysteine
  MOD_RES (51)..(51): Selenocysteine
  MOD_RES (119)..(119): Selenocysteine
  MOD_RES (127)..(127): Selenocysteine
  MOD_RES (131)..(131): Selenocysteine
  MOD_RES (167)..(167): Selenocysteine
  MOD_RES (175)..(175): Selenocysteine
  MOD_RES (179)..(179): Selenocysteine
  MOD_RES (187)..(187): Selenocysteine
  MOD_RES (214)..(214): Selenocysteine
  MOD_RES (242)..(242): Selenocysteine
  MOD_RES (306)..(306): Selenocysteine
  MOD_RES (309)..(309): Selenocysteine
  MOD_RES (332)..(332): Selenocysteine
  MOD_RES (349)..(349): Selenocysteine
  MOD_RES (392)..(392): Selenocysteine
  MOD_RES (417)..(417): Selenocysteine
  MOD_RES (436)..(436): Selenocysteine
  MOD_RES (443)..(443): Selenocysteine
MSIAGVAAQEIRVPLKXGFLHNGRAMGNMRKXYWSSRSEFKNNFLNIDPIXMAYSLNSSAQERLIPLGHASKSAPMNGHCFAENGPSQKSSLPPLLIPPSENLGPHEEDQVVCGFKKLXVNGVCASXPPLXPIKNSPSLFPCAPLCERGSRPLPPLPISEALSLDDXDCEVEFLXSSDXDFLLEDSXLSDFKYDVPGRRSFRGCGQINYAYFDXPAVSAADLSYVSDQNGGVPDPNPPPPQXHRRLRRSHSGPAGSFNKPAIRISNCCIHRASPNSDEDKPEVPPRVPIPPRPVKPDYRRWSAEVXSSXYSDEDRPPKVPPREPLSPSNSRXPSPKSLPSYLNGVMPPXQSFAPDPKYVSSKALQRQNSEGSASKVPCILPIIENGKKVSSXHYYLLPERPPYLDKYEKFFREAEEXNGGAQIQPLPADCGISSAXEKPDSKXKMDLGGHVKRKHLSYVVSP

SEQ ID NO: 9347 - protein, 79 aa, Homo sapiens
  MOD_RES (17)..(17): Selenocysteine
  MOD_RES (32)..(32): Selenocysteine
  MOD_RES (51)..(51): Selenocysteine
  MOD_RES (76)..(76): Selenocysteine
MSIAGVAAQEIRVPLKXGFLHNGRAMGNMRKXYWSSRSEFKNNFLNIDPIXMAYSLNSSAQERLIPLGMYSENLIXVSI

SEQ ID NO: 9348 - protein, 53 aa, Homo sapiens
  MOD_RES (17)..(17): Selenocysteine
  MOD_RES (32)..(32): Selenocysteine
  MOD_RES (43)..(43): Selenocysteine
  MOD_RES (50)..(50): Selenocysteine
MSIAGVAAQEIRVPLKXGFLHNGRAMGNMRKXYWSSRSEFKNXGRKLPGXVGD

SEQ ID NO: 9349 - protein, 89 aa, Homo sapiens
  MOD_RES (8)..(9): Selenocysteine
  MOD_RES (46)..(46): Selenocysteine
  MOD_RES (64)..(64): Selenocysteine
  MOD_RES (68)..(68): Selenocysteine
MKSVLLLXXLLVPAHLVAAWSNNYAVDCPQHCDSSECKSSPRCKRXVLDDCGCCRVCAAGRGEXCYRXVSGMDGMKCGPGLRCQPSNGE

SEQ ID NO: 9350 - protein, 184 aa, Homo sapiens
  MOD_RES (8)..(9): Selenocysteine
  MOD_RES (46)..(46): Selenocysteine
  MOD_RES (64)..(64): Selenocysteine
  MOD_RES (68)..(68): Selenocysteine
  MOD_RES (106)..(106): Selenocysteine
  MOD_RES (114)..(114): Selenocysteine
  MOD_RES (126)..(126): Selenocysteine
  MOD_RES (140)..(140): Selenocysteine
  MOD_RES (150)..(150): Selenocysteine
MKSVLLLXXLLVPAHLVAAWSNNYAVDCPQHCDSSECKSSPRCKRXVLDDCGCCRVCAAGRGEXCYRXVSGMDGMKCGPGLRCQPSNGEDPFGEEFGICKDCPYGXFGMDCREXCNCQSGICDRGXGKCLKFPFFQYSVXKSSNRFVSLXEHDMASGDGNIVREEVVKENAAGSPVMRKWLNPR

SEQ ID NO: 9351 - protein, 134 aa, Homo sapiens
  MOD_RES (8)..(9): Selenocysteine
  MOD_RES (46)..(46): Selenocysteine
  MOD_RES (64)..(64): Selenocysteine
  MOD_RES (68)..(68): Selenocysteine
MKSVLLLXXLLVPAHLVAAWSNNYAVDCPQHCDSSECKSSPRCKRXVLDDCGCCRVCAAGRGEXCYRXVSGMDGMKCGPGLRCQPSNGEDPFGEEFGICKEHDMASGDGNIVREEVVKENAAGSPVMRKWLNPR

SEQ ID NO: 9352 - protein, 107 aa, Homo sapiens
  MOD_RES (9)..(9): Selenocysteine
  MOD_RES (13)..(13): Selenocysteine
  MOD_RES (44)..(44): Selenocysteine
  MOD_RES (104)..(104): Selenocysteine
HNDYMCPAXNQCXIDKNRRKSCQACRLRKCYEVGMMKGGFVDLXLHDQVHLLECAWLEILMIGLVWRSMEHPGKLLFAPNLLLDRNQGKCVEGMVEIFDMLLAXSSR

SEQ ID NO: 9353 - protein, 310 aa, Homo sapiens
  MOD_RES (9)..(9): Selenocysteine
  MOD_RES (51)..(51): Selenocysteine
  MOD_RES (55)..(55): Selenocysteine
  MOD_RES (138)..(138): Selenocysteine
  MOD_RES (161)..(161): Selenocysteine
  MOD_RES (174)..(174): Selenocysteine
  MOD_RES (198)..(198): Selenocysteine
  MOD_RES (258)..(258): Selenocysteine
MAMESAKEXRYCAVCNDYASGYHYGVWSCEGCKAFFKRSIQGHNDYMCPAXNQCXIDKNRRKSCQACRLRKCYEVGMMKGGIRKDRRGGRMLKHKRQRDDGEGRGEVGSAGDMRAANLWPSPLMIKRSKKNSLALSLXADQMVSALLDAEPPILYSEYDPXRPFSEASMMGLLXNLADRELVHMINWAKRVPGFVDLXLHDQVHLLECAWLEILMIGLVWRSMEHPGKLLFAPNLLLDRNQGKCVEGMVEIFDMLLAXSSRFRMMNLQGEEFVCLKSIILLNSGISHVEAKKRILNLHPKIFGNKWFPRV

SEQ ID NO: 9354 - protein, 84 aa, Homo sapiens
  MOD_RES (2)..(2): Selenocysteine
  MOD_RES (4)..(4): Selenocysteine
  MOD_RES (7)..(7): Selenocysteine
  MOD_RES (76)..(76): Selenocysteine
MXMXLHXKASGMALLHQIQGNELEPLNRPQLKIPLERPLGEVYLDSSKPAVYNYPEGAAYEFNAAAAANAQVYGQXGLPYGPGS

SEQ ID NO: 9355 - protein, 115 aa, Homo sapiens
  MOD_RES (2)..(2): Selenocysteine
  MOD_RES (4)..(4): Selenocysteine
  MOD_RES (7)..(7): Selenocysteine
  MOD_RES (76)..(76): Selenocysteine
MXMXLHXKASGMALLHQIQGNELEPLNRPQLKIPLERPLGEVYLDSSKPAVYNYPEGAAYEFNAAAAANAQVYGQXGLPYGPGSEAAAFGSNGLGGFPPLNSVSPSPLMLLHPPP

SEQ ID NO: 9356 - protein, 334 aa, Homo sapiens
  MOD_RES (2)..(2): Selenocysteine
  MOD_RES (4)..(4): Selenocysteine
  MOD_RES (7)..(7): Selenocysteine
  MOD_RES (76)..(76): Selenocysteine
  MOD_RES (140)..(140): Selenocysteine
  MOD_RES (170)..(170): Selenocysteine
  MOD_RES (199)..(199): Selenocysteine
  MOD_RES (204)..(204): Selenocysteine
  MOD_RES (222)..(222): Selenocysteine
  MOD_RES (224)..(224): Selenocysteine
  MOD_RES (235)..(235): Selenocysteine
  MOD_RES (292)..(292): Selenocysteine
  MOD_RES (302)..(302): Selenocysteine
  MOD_RES (309)..(309): Selenocysteine
  MOD_RES (313)..(313): Selenocysteine
  MOD_RES (324)..(324): Selenocysteine
  MOD_RES (333)..(333): Selenocysteine
MXMXLHXKASGMALLHQIQGNELEPLNRPQLKIPLERPLGEVYLDSSKPAVYNYPEGAAYEFNAAAAANAQVYGQXGLPYGPGSEAAAFGSNGLGGFPPLNSVSPSPLMLLHPPPQLSPFLQPHGQQVPYYLENEPSGYXVREAGPPAFYRNQGKCVEGMVEIFDMLLAXSSRFRMMNLQGEEFVCLKSIILLNSGVYXFLSSXLKSLEEKDHIHRVLDKIXDXLIHLMAKAGLXLQQQHQRLAQLLLILSHIRHMSNKGMEHLYSMKCKNVVPLYDLLLEMLDAHRLHAPXSRGGASVEEXDQSHLAXAGSXSSHSLQKYYIXGEAEGFPAXV

SEQ ID NO: 9357 - protein, 595 aa, Homo sapiens
  MOD_RES (2)..(2): Selenocysteine
  MOD_RES (4)..(4): Selenocysteine
  MOD_RES (7)..(7): Selenocysteine
  MOD_RES (76)..(76): Selenocysteine
  MOD_RES (140)..(140): Selenocysteine
  MOD_RES (168)..(168): Selenocysteine
  MOD_RES (182)..(182): Selenocysteine
  MOD_RES (224)..(224): Selenocysteine
  MOD_RES (228)..(228): Selenocysteine
  MOD_RES (311)..(311): Selenocysteine
  MOD_RES (334)..(334): Selenocysteine
  MOD_RES (347)..(347): Selenocysteine
  MOD_RES (371)..(371): Selenocysteine
  MOD_RES (431)..(431): Selenocysteine
  MOD_RES (460)..(460): Selenocysteine
  MOD_RES (465)..(465): Selenocysteine
  MOD_RES (483)..(483): Selenocysteine
  MOD_RES (485)..(485): Selenocysteine
  MOD_RES (496)..(496): Selenocysteine
  MOD_RES (553)..(553): Selenocysteine
  MOD_RES (563)..(563): Selenocysteine
  MOD_RES (570)..(570): Selenocysteine
  MOD_RES (574)..(574): Selenocysteine
  MOD_RES (585)..(585): Selenocysteine
  MOD_RES (594)..(594): Selenocysteine
MXMXLHXKASGMALLHQIQGNELEPLNRPQLKIPLERPLGEVYLDSSKPAVYNYPEGAAYEFNAAAAANAQVYGQXGLPYGPGSEAAAFGSNGLGGFPPLNSVSPSPLMLLHPPPQLSPFLQPHGQQVPYYLENEPSGYXVREAGPPAFYRPNSDNRRQGGRERLASXNDKGSMAMESAKEXRYCAVCNDYASGYHYGVWSCEGCKAFFKRSIQGHNDYMCPAXNQCXIDKNRRKSCQACRLRKCYEVGMMKGGIRKDRRGGRMLKHKRQRDDGEGRGEVGSAGDMRAANLWPSPLMIKRSKKNSLALSLXADQMVSALLDAEPPILYSEYDPXRPFSEASMMGLLXNLADRELVHMINWAKRVPGFVDLXLHDQVHLLECAWLEILMIGLVWRSMEHPGKLLFAPNLLLDRNQGKCVEGMVEIFDMLLAXSSRFRMMNLQGEEFVCLKSIILLNSGVYXFLSSXLKSLEEKDHIHRVLDKIXDXLIHLMAKAGLXLQQQHQRLAQLLLILSHIRHMSNKGMEHLYSMKCKNVVPLYDLLLEMLDAHRLHAPXSRGGASVEEXDQSHLAXAGSXSSHSLQKYYIXGEAEGFPAXV

SEQ ID NO: 9358 - protein, 152 aa, Homo sapiens
  MOD_RES (2)..(2): Selenocysteine
  MOD_RES (4)..(4): Selenocysteine
  MOD_RES (7)..(7): Selenocysteine
  MOD_RES (76)..(76): Selenocysteine
  MOD_RES (140)..(140): Selenocysteine
  MOD_RES (152)..(152): Selenocysteine
MXMXLHXKASGMALLHQIQGNELEPLNRPQLKIPLERPLGEVYLDSSKPAVYNYPEGAAYEFNAAAAANAQVYGQXGLPYGPGSEAAAFGSNGLGGFPPLNSVSPSPLMLLHPPPQLSPFLQPHGQQVPYYLENEPSGYXVREAGPPAFYRX

SEQ ID NO: 9359 - protein, 323 aa, Homo sapiens
  MOD_RES (47)..(47): Selenocysteine
  MOD_RES (63)..(63): Selenocysteine
  MOD_RES (73)..(74): Selenocysteine
  MOD_RES (82)..(82): Selenocysteine
  MOD_RES (116)..(116): Selenocysteine
  MOD_RES (123)..(123): Selenocysteine
  MOD_RES (138)..(138): Selenocysteine
  MOD_RES (188)..(188): Selenocysteine
  MOD_RES (192)..(192): Selenocysteine
  MOD_RES (271)..(271): Selenocysteine
  MOD_RES (290)..(290): Selenocysteine
  MOD_RES (299)..(299): Selenocysteine
MDIKNSPSSLNSPSSYNCSQSILPLEHGSIYIPSSYVDSHHEYPAMXFYSPAVMNYSIPSNVXNLEGGPGRQXXSPNVLWPXPGHLSPLVVHRQLSHLYAEPQKSPWCEARSLEHXLPVNREXLKRKVSGNRCASPVXGPGSKRDAHFCAVCSDYASGYHYGVWSCEGCKAFFKRSIQGHNDYICPAXNQCXIDKNRRKSCQACRLRKCYEVGMVKCGSRRERCGYRLVRRQRSADEQLHCAGKAKRSGGHAPRVRELLLDALSPEQLVLXLLEAEPPHVLISRPSAPFXEASMMMSLXKLADKELVHMISWAKKIPGMRGNA

SEQ ID NO: 9360 - protein, 439 aa, Homo sapiens
  MOD_RES (47)..(47): Selenocysteine
  MOD_RES (63)..(63): Selenocysteine
  MOD_RES (73)..(74): Selenocysteine
  MOD_RES (82)..(82): Selenocysteine
  MOD_RES (116)..(116): Selenocysteine
  MOD_RES (123)..(123): Selenocysteine
  MOD_RES (138)..(138): Selenocysteine
  MOD_RES (188)..(188): Selenocysteine
  MOD_RES (192)..(192): Selenocysteine
  MOD_RES (271)..(271): Selenocysteine
  MOD_RES (290)..(290): Selenocysteine
  MOD_RES (299)..(299): Selenocysteine
  MOD_RES (324)..(324): Selenocysteine
  MOD_RES (326)..(326): Selenocysteine
  MOD_RES (343)..(343): Selenocysteine
  MOD_RES (417)..(417): Selenocysteine
MDIKNSPSSLNSPSSYNCSQSILPLEHGSIYIPSSYVDSHHEYPAMXFYSPAVMNYSIPSNVXNLEGGPGRQXXSPNVLWPXPGHLSPLVVHRQLSHLYAEPQKSPWCEARSLEHXLPVNREXLKRKVSGNRCASPVXGPGSKRDAHFCAVCSDYASGYHYGVWSCEGCKAFFKRSIQGHNDYICPAXNQCXIDKNRRKSCQACRLRKCYEVGMVKCGSRRERCGYRLVRRQRSADEQLHCAGKAKRSGGHAPRVRELLLDALSPEQLVLXLLEAEPPHVLISRPSAPFXEASMMMSLXKLADKELVHMISWAKKIPGMYPLVXAXQDADSSRKLAHLLNAVXDALVWVIAKSGISSQQQSMRLANLLMLLSHVRHASNKGMEHLLNMKCKNVVPVYDLLLEMLNAHVLRGCKSSIXGSECSPAEDSKSKEGSQNPQSQ

SEQ ID NO: 9361 - protein, 472 aa, Homo sapiens
  MOD_RES (47)..(47): Selenocysteine
  MOD_RES (63)..(63): Selenocysteine
  MOD_RES (73)..(74): Selenocysteine
  MOD_RES (82)..(82): Selenocysteine
  MOD_RES (116)..(116): Selenocysteine
  MOD_RES (123)..(123): Selenocysteine
  MOD_RES (138)..(138): Selenocysteine
  MOD_RES (188)..(188): Selenocysteine
  MOD_RES (192)..(192): Selenocysteine
  MOD_RES (271)..(271): Selenocysteine
  MOD_RES (290)..(290): Selenocysteine
  MOD_RES (299)..(299): Selenocysteine
  MOD_RES (383)..(384): Selenocysteine
  MOD_RES (415)..(415): Selenocysteine
  MOD_RES (417)..(417): Selenocysteine
  MOD_RES (434)..(434): Selenocysteine
MDIKNSPSSLNSPSSYNCSQSILPLEHGSIYIPSSYVDSHHEYPAMXFYSPAVMNYSIPSNVXNLEGGPGRQXXSPNVLWPXPGHLSPLVVHRQLSHLYAEPQKSPWCEARSLEHXLPVNREXLKRKVSGNRCASPVXGPGSKRDAHFCAVCSDYASGYHYGVWSCEGCKAFFKRSIQGHNDYICPAXNQCXIDKNRRKSCQACRLRKCYEVGMVKCGSRRERCGYRLVRRQRSADEQLHCAGKAKRSGGHAPRVRELLLDALSPEQLVLXLLEAEPPHVLISRPSAPFXEASMMMSLXKLADKELVHMISWAKKIPGFVELSLFDQVRLLESCWMEVLMMGLMWRSIDHPGKLIFAPDLVLDRDEGKCVEGILEIFDMLLAXXSRFRELKLQHKEYLCVKAMILLNSSMYPLVXAXQDADSSRKLAHLLNAVXDALVWVIAKSGISSQQQSMRLANLLMLLSHVRHARYAP

SEQ ID NO: 9362 - protein, 474 aa, Homo sapiens
  MOD_RES (47)..(47): Selenocysteine
  MOD_RES (63)..(63): Selenocysteine
  MOD_RES (73)..(74): Selenocysteine
  MOD_RES (82)..(82): Selenocysteine
  MOD_RES (116)..(116): Selenocysteine
  MOD_RES (123)..(123): Selenocysteine
  MOD_RES (138)..(138): Selenocysteine
  MOD_RES (188)..(188): Selenocysteine
  MOD_RES (192)..(192): Selenocysteine
  MOD_RES (271)..(271): Selenocysteine
  MOD_RES (290)..(290): Selenocysteine
  MOD_RES (299)..(299): Selenocysteine
  MOD_RES (383)..(384): Selenocysteine
  MOD_RES (415)..(415): Selenocysteine
  MOD_RES (417)..(417): Selenocysteine
  MOD_RES (434)..(434): Selenocysteine
MDIKNSPSSLNSPSSYNCSQSILPLEHGSIYIPSSYVDSHHEYPAMXFYSPAVMNYSIPSNVXNLEGGPGRQXXSPNVLWPXPGHLSPLVVHRQLSHLYAEPQKSPWCEARSLEHXLPVNREXLKRKVSGNRCASPVXGPGSKRDAHFCAVCSDYASGYHYGVWSCEGCKAFFKRSIQGHNDYICPAXNQCXIDKNRRKSCQACRLRKCYEVGMVKCGSRRERCGYRLVRRQRSADEQLHCAGKAKRSGGHAPRVRELLLDALSPEQLVLXLLEAEPPHVLISRPSAPFXEASMMMSLXKLADKELVHMISWAKKIPGFVELSLFDQVRLLESCWMEVLMMGLMWRSIDHPGKLIFAPDLVLDRDEGKCVEGILEIFDMLLAXXSRFRELKLQHKEYLCVKAMILLNSSMYPLVXAXQDADSSRKLAHLLNAVXDALVWVIAKSGISSQQQSMRLANLLMLLSHVRHARSCVYK

SEQ ID NO: 9363 - protein, 481 aa, Homo sapiens
  MOD_RES (47)..(47): Selenocysteine
  MOD_RES (63)..(63): Selenocysteine
  MOD_RES (73)..(74): Selenocysteine
  MOD_RES (82)..(82): Selenocysteine
  MOD_RES (116)..(116): Selenocysteine
  MOD_RES (123)..(123): Selenocysteine
  MOD_RES (138)..(138): Selenocysteine
  MOD_RES (188)..(188): Selenocysteine
  MOD_RES (192)..(192): Selenocysteine
  MOD_RES (271)..(271): Selenocysteine
  MOD_RES (290)..(290): Selenocysteine
  MOD_RES (299)..(299): Selenocysteine
  MOD_RES (383)..(384): Selenocysteine
  MOD_RES (415)..(415): Selenocysteine
  MOD_RES (417)..(417): Selenocysteine
  MOD_RES (434)..(434): Selenocysteine
MDIKNSPSSLNSPSSYNCSQSILPLEHGSIYIPSSYVDSHHEYPAMXFYSPAVMNYSIPSNVXNLEGGPGRQXXSPNVLWPXPGHLSPLVVHRQLSHLYAEPQKSPWCEARSLEHXLPVNREXLKRKVSGNRCASPVXGPGSKRDAHFCAVCSDYASGYHYGVWSCEGCKAFFKRSIQGHNDYICPAXNQCXIDKNRRKSCQACRLRKCYEVGMVKCGSRRERCGYRLVRRQRSADEQLHCAGKAKRSGGHAPRVRELLLDALSPEQLVLXLLEAEPPHVLISRPSAPFXEASMMMSLXKLADKELVHMISWAKKIPGFVELSLFDQVRLLESCWMEVLMMGLMWRSIDHPGKLIFAPDLVLDRDEGKCVEGILEIFDMLLAXXSRFRELKLQHKEYLCVKAMILLNSSMYPLVXAXQDADSSRKLAHLLNAVXDALVWVIAKSGISSQQQSMRLANLLMLLSHVRHARWGEKQFIHLKLS

SEQ ID NO: 9364 - protein, 495 aa, Homo sapiens
  MOD_RES (47)..(47): Selenocysteine
  MOD_RES (63)..(63): Selenocysteine
  MOD_RES (73)..(74): Selenocysteine
  MOD_RES (82)..(82): Selenocysteine
  MOD_RES (116)..(116): Selenocysteine
  MOD_RES (123)..(123): Selenocysteine
  MOD_RES (138)..(138): Selenocysteine
  MOD_RES (188)..(188): Selenocysteine
  MOD_RES (192)..(192): Selenocysteine
  MOD_RES (271)..(271): Selenocysteine
  MOD_RES (290)..(290): Selenocysteine
  MOD_RES (299)..(299): Selenocysteine
  MOD_RES (383)..(384): Selenocysteine
  MOD_RES (415)..(415): Selenocysteine
  MOD_RES (417)..(417): Selenocysteine
  MOD_RES (434)..(434): Selenocysteine
  MOD_RES (476)..(476): Selenocysteine
  MOD_RES (478)..(478): Selenocysteine
  MOD_RES (486)..(486): Selenocysteine
  MOD_RES (492)..(492): Selenocysteine
MDIKNSPSSLNSPSSYNCSQSILPLEHGSIYIPSSYVDSHHEYPAMXFYSPAVMNYSIPSNVXNLEGGPGRQXXSPNVLWPXPGHLSPLVVHRQLSHLYAEPQKSPWCEARSLEHXLPVNREXLKRKVSGNRCASPVXGPGSKRDAHFCAVCSDYASGYHYGVWSCEGCKAFFKRSIQGHNDYICPAXNQCXIDKNRRKSCQACRLRKCYEVGMVKCGSRRERCGYRLVRRQRSADEQLHCAGKAKRSGGHAPRVRELLLDALSPEQLVLXLLEAEPPHVLISRPSAPFXEASMMMSLXKLADKELVHMISWAKKIPGFVELSLFDQVRLLESCWMEVLMMGLMWRSIDHPGKLIFAPDLVLDRDEGKCVEGILEIFDMLLAXXSRFRELKLQHKEYLCVKAMILLNSSMYPLVXAXQDADSSRKLAHLLNAVXDALVWVIAKSGISSQQQSMRLANLLMLLSHVRHARAEKASQXLXSFGMKMEXLLPEAXMEQ

SEQ ID NO: 9365 - protein, 513 aa, Homo sapiens
  MOD_RES (47)..(47): Selenocysteine
  MOD_RES (63)..(63): Selenocysteine
  MOD_RES (73)..(74): Selenocysteine
  MOD_RES (82)..(82): Selenocysteine
  MOD_RES (116)..(116): Selenocysteine
  MOD_RES (123)..(123): Selenocysteine
  MOD_RES (138)..(138): Selenocysteine
  MOD_RES (188)..(188): Selenocysteine
  MOD_RES (192)..(192): Selenocysteine
  MOD_RES (271)..(271): Selenocysteine
  MOD_RES (290)..(290): Selenocysteine
  MOD_RES (299)..(299): Selenocysteine
  MOD_RES (383)..(384): Selenocysteine
  MOD_RES (415)..(415): Selenocysteine
  MOD_RES (417)..(417): Selenocysteine
  MOD_RES (434)..(434): Selenocysteine
  MOD_RES (491)..(491): Selenocysteine
MDIKNSPSSLNSPSSYNCSQSILPLEHGSIYIPSSYVDSHHEYPAMXFYSPAVMNYSIPSNVXNLEGGPGRQXXSPNVLWPXPGHLSPLVVHRQLSHLYAEPQKSPWCEARSLEHXLPVNREXLKRKVSGNRCASPVXGPGSKRDAHFCAVCSDYASGYHYGVWSCEGCKAFFKRSIQGHNDYICPAXNQCXIDKNRRKSCQACRLRKCYEVGMVKCGSRRERCGYRLVRRQRSADEQLHCAGKAKRSGGHAPRVRELLLDALSPEQLVLXLLEAEPPHVLISRPSAPFXEASMMMSLXKLADKELVHMISWAKKIPGFVELSLFDQVRLLESCWMEVLMMGLMWRSIDHPGKLIFAPDLVLDRDEGKCVEGILEIFDMLLAXXSRFRELKLQHKEYLCVKAMILLNSSMYPLVXAXQDADSSRKLAHLLNAVXDALVWVIAKSGISSQQQSMRLANLLMLLSHVRHASSLSLSWRLFMLREASCHGVRQXPGGAHVSVSRSRSFEACQQPRE

SEQ ID NO: 9366 - protein, 530 aa, Homo sapiens
  MOD_RES (47)..(47): Selenocysteine
  MOD_RES (63)..(63): Selenocysteine
  MOD_RES (73)..(74): Selenocysteine
  MOD_RES (82)..(82): Selenocysteine
  MOD_RES (116)..(116): Selenocysteine
  MOD_RES (123)..(123): Selenocysteine
  MOD_RES (138)..(138): Selenocysteine
  MOD_RES (188)..(188): Selenocysteine
  MOD_RES (192)..(192): Selenocysteine
  MOD_RES (271)..(271): Selenocysteine
  MOD_RES (290)..(290): Selenocysteine
  MOD_RES (299)..(299): Selenocysteine
  MOD_RES (383)..(384): Selenocysteine
  MOD_RES (415)..(415): Selenocysteine
  MOD_RES (417)..(417): Selenocysteine
  MOD_RES (434)..(434): Selenocysteine
  MOD_RES (508)..(508): Selenocysteine
MDIKNSPSSLNSPSSYNCSQSILPLEHGSIYIPSSYVDSHHEYPAMXFYSPAVMNYSIPSNVXNLEGGPGRQXXSPNVLWPXPGHLSPLVVHRQLSHLYAEPQKSPWCEARSLEHXLPVNREXLKRKVSGNRCASPVXGPGSKRDAHFCAVCSDYASGYHYGVWSCEGCKAFFKRSIQGHNDYICPAXNQCXIDKNRRKSCQACRLRKCYEVGMVKCGSRRERCGYRLVRRQRSADEQLHCAGKAKRSGGHAPRVRELLLDALSPEQLVLXLLEAEPPHVLISRPSAPFXEASMMMSLXKLADKELVHMISWAKKIPGFVELSLFDQVRLLESCWMEVLMMGLMWRSIDHPGKLIFAPDLVLDRDEGKCVEGILEIFDMLLAXXSRFRELKLQHKEYLCVKAMILLNSSMYPLVXAXQDADSSRKLAHLLNAVXDALVWVIAKSGISSQQQSMRLANLLMLLSHVRHASNKGMEHLLNMKCKNVVPVYDLLLEMLNAHVLRGCKSSIXGSECSPAEDSKSKEGSQNPQSQ

SEQ ID NO: 9367 - protein, 522 aa, Homo sapiens
  MOD_RES (19)..(19): Selenocysteine
  MOD_RES (21)..(21): Selenocysteine
  MOD_RES (73)..(73): Selenocysteine
  MOD_RES (84)..(84): Selenocysteine
  MOD_RES (151)..(151): Selenocysteine
  MOD_RES (160)..(160): Selenocysteine
  MOD_RES (171)..(171): Selenocysteine
  MOD_RES (195)..(195): Selenocysteine
  MOD_RES (197)..(197): Selenocysteine
  MOD_RES (212)..(212): Selenocysteine
  MOD_RES (222)..(222): Selenocysteine
  MOD_RES (229)..(229): Selenocysteine
  MOD_RES (264)..(264): Selenocysteine
  MOD_RES (285)..(285): Selenocysteine
  MOD_RES (300)..(300): Selenocysteine
  MOD_RES (316)..(316): Selenocysteine
  MOD_RES (329)..(329): Selenocysteine
  MOD_RES (333)..(333): Selenocysteine
  MOD_RES (395)..(395): Selenocysteine
  MOD_RES (417)..(417): Selenocysteine
  MOD_RES (427)..(427): Selenocysteine
  MOD_RES (447)..(447): Selenocysteine
  MOD_RES (454)..(454): Selenocysteine
  MOD_RES (461)..(461): Selenocysteine
  MOD_RES (479)..(479): Selenocysteine
  MOD_RES (492)..(492): Selenocysteine
  MOD_RES (503)..(503): Selenocysteine
EFKKCCPGSPDIDKLDVAXMXEYLNFEKSSSVSRYGASQVEDMGNIILAMISEPYNHRFSDPERVNYKFESGXCSKMELIDDNXVVRARGLPWQSSDQDIARFFKGLNIAKGGAALCLNAQGRRNGEALVRFVSEEHRDLALQRHKHHMGXRYIEVYKAXGEDFLKIAGGXSNEVAQFLSKENQVIVRMRGLPFXAXAEEVVAFFGQHCPIXGGKEGILFVXYPDGRPXGDAFVLFACEEYAQNALRKHKDLLGKRYIELFRSXAAEVQQVLNRFSSAPLIPLPXPPIIPVLPQQFVPPXNVRDCIRLRGLPYAAXIEDILDFLGEFAXDIRXHGVHMVLNHQGRPSGDAFIQMKSADRAFMAAQKCHKKNMKDRYVEVFQCSAEEMNFVLMGGXLNRNGLSPPPCKLPCLSPPSYXFPAPAAVIPXEAAIYQPSVILNPRALQPSXAYYPAGXQLFMNYXAYYPSPPGSPNSLGYFPXAANLSGVPPQPGXVVRMQGLAYNXGVKEILNFFQGYQCLKDVW

SEQ ID NO: 9368 - protein, 94 aa, Homo sapiens
  MOD_RES (8)..(8): Selenocysteine
  MOD_RES (75)..(75): Selenocysteine
  MOD_RES (84)..(84): Selenocysteine
MELIDDNXVVRARGLPWQSSDQDIARFFKGLNIAKGGAALCLNAQGRRNGEALVRFVSEEHRDLALQRHKHHMGXRYIEVYKAXGEDFLKIAGG

SEQ ID NO: 9369 - protein, 608 aa, Homo sapiens
  MOD_RES (2)..(2): Selenocysteine
  MOD_RES (15)..(15): Selenocysteine
  MOD_RES (19)..(19): Selenocysteine
  MOD_RES (61)..(61): Selenocysteine
  MOD_RES (68)..(68): Selenocysteine
  MOD_RES (102)..(102): Selenocysteine
  MOD_RES (108)..(108): Selenocysteine
  MOD_RES (160)..(160): Selenocysteine
  MOD_RES (162)..(162): Selenocysteine
  MOD_RES (214)..(214): Selenocysteine
  MOD_RES (225)..(225): Selenocysteine
  MOD_RES (292)..(292): Selenocysteine
  MOD_RES (301)..(301): Selenocysteine
  MOD_RES (312)..(312): Selenocysteine
  MOD_RES (336)..(336): Selenocysteine
  MOD_RES (338)..(338): Selenocysteine
  MOD_RES (353)..(353): Selenocysteine
  MOD_RES (363)..(363): Selenocysteine
  MOD_RES (370)..(370): Selenocysteine
  MOD_RES (405)..(405): Selenocysteine
  MOD_RES (426)..(426): Selenocysteine
  MOD_RES (441)..(441): Selenocysteine
  MOD_RES (457)..(457): Selenocysteine
  MOD_RES (470)..(470): Selenocysteine
  MOD_RES (474)..(474): Selenocysteine
  MOD_RES (536)..(536): Selenocysteine
  MOD_RES (558)..(558): Selenocysteine
  MOD_RES (568)..(568): Selenocysteine
  MOD_RES (588)..(588): Selenocysteine
  MOD_RES (595)..(595): Selenocysteine
  MOD_RES (602)..(602): Selenocysteine
MXASPDYLVVLFGIXAGAXGAKLGSDEKELILLFWKVVDLANKKVGQLHEVLVRPDQLELXEDCKEEXKIDVESLSSASQLDQALRQFNQSVSNELNIGVGXSFCLCXDGQLHVRQILHPEASKKNVLLPECFYSFFDLRKEFKKCCPGSPDIDKLDVAXMXEYLNFEKSSSVSRYGASQVEDMGNIILAMISEPYNHRFSDPERVNYKFESGXCSKMELIDDNXVVRARGLPWQSSDQDIARFFKGLNIAKGGAALCLNAQGRRNGEALVRFVSEEHRDLALQRHKHHMGXRYIEVYKAXGEDFLKIAGGXSNEVAQFLSKENQVIVRMRGLPFXAXAEEVVAFFGQHCPIXGGKEGILFVXYPDGRPXGDAFVLFACEEYAQNALRKHKDLLGKRYIELFRSXAAEVQQVLNRFSSAPLIPLPXPPIIPVLPQQFVPPXNVRDCIRLRGLPYAAXIEDILDFLGEFAXDIRXHGVHMVLNHQGRPSGDAFIQMKSADRAFMAAQKCHKKNMKDRYVEVFQCSAEEMNFVLMGGXLNRNGLSPPPCKLPCLSPPSYXFPAPAAVIPXEAAIYQPSVILNPRALQPSXAYYPAGXQLFMNYXAYYPSV

SEQ ID NO: 9370 - protein, 659 aa, Homo sapiens
  MOD_RES (2)..(2): Selenocysteine
  MOD_RES (15)..(15): Selenocysteine
  MOD_RES (19)..(19): Selenocysteine
  MOD_RES (61)..(61): Selenocysteine
  MOD_RES (68)..(68): Selenocysteine
  MOD_RES (102)..(102): Selenocysteine
  MOD_RES (108)..(108): Selenocysteine
  MOD_RES (160)..(160): Selenocysteine
  MOD_RES (162)..(162): Selenocysteine
  MOD_RES (214)..(214): Selenocysteine
  MOD_RES (225)..(225): Selenocysteine
  MOD_RES (292)..(292): Selenocysteine
  MOD_RES (301)..(301): Selenocysteine
  MOD_RES (312)..(312): Selenocysteine
  MOD_RES (336)..(336): Selenocysteine
  MOD_RES (338)..(338): Selenocysteine
  MOD_RES (353)..(353): Selenocysteine
  MOD_RES (363)..(363): Selenocysteine
  MOD_RES (370)..(370): Selenocysteine
  MOD_RES (405)..(405): Selenocysteine
  MOD_RES (426)..(426): Selenocysteine
  MOD_RES (441)..(441): Selenocysteine
  MOD_RES (457)..(457): Selenocysteine
  MOD_RES (470)..(470): Selenocysteine
  MOD_RES (474)..(474): Selenocysteine
  MOD_RES (536)..(536): Selenocysteine
  MOD_RES (554)..(554): Selenocysteine
  MOD_RES (564)..(564): Selenocysteine
  MOD_RES (584)..(584): Selenocysteine
  MOD_RES (591)..(591): Selenocysteine
  MOD_RES (598)..(598): Selenocysteine
  MOD_RES (616)..(616): Selenocysteine
  MOD_RES (629)..(629): Selenocysteine
  MOD_RES (640)..(640): Selenocysteine
MXASPDYLVVLFGIXAGAXGAKLGSDEKELILLFWKVVDLANKKVGQLHEVLVRPDQLELXEDCKEEXKIDVESLSSASQLDQALRQFNQSVSNELNIGVGXSFCLCXDGQLHVRQILHPEASKKNVLLPECFYSFFDLRKEFKKCCPGSPDIDKLDVAXMXEYLNFEKSSSVSRYGASQVEDMGNIILAMISEPYNHRFSDPERVNYKFESGXCSKMELIDDNXVVRARGLPWQSSDQDIARFFKGLNIAKGGAALCLNAQGRRNGEALVRFVSEEHRDLALQRHKHHMGXRYIEVYKAXGEDFLKIAGGXSNEVAQFLSKENQVIVRMRGLPFXAXAEEVVAFFGQHCPIXGGKEGILFVXYPDGRPXGDAFVLFACEEYAQNALRKHKDLLGKRYIELFRSXAAEVQQVLNRFSSAPLIPLPXPPIIPVLPQQFVPPXNVRDCIRLRGLPYAAXIEDILDFLGEFAXDIRXHGVHMVLNHQGRPSGDAFIQMKSADRAFMAAQKCHKKNMKDRYVEVFQCSAEEMNFVLMGGXLNRNGLSPPPCLSPPSYXFPAPAAVIPXEAAIYQPSVILNPRALQPSXAYYPAGXQLFMNYXAYYPSPPGSPNSLGYFPXAANLSGVPPQPGXVVRMQGLAYNXGVKEILNFFQGYQCLKDVW

SEQ ID NO: 9371 - protein, 677 aa, Homo sapiens
  MOD_RES (2)..(2): Selenocysteine
  MOD_RES (15)..(15): Selenocysteine
  MOD_RES (19)..(19): Selenocysteine
  MOD_RES (61)..(61): Selenocysteine
  MOD_RES (68)..(68): Selenocysteine
  MOD_RES (102)..(102): Selenocysteine
  MOD_RES (108)..(108): Selenocysteine
  MOD_RES (160)..(160): Selenocysteine
  MOD_RES (162)..(162): Selenocysteine
  MOD_RES (214)..(214): Selenocysteine
  MOD_RES (225)..(225): Selenocysteine
  MOD_RES (292)..(292): Selenocysteine
  MOD_RES (301)..(301): Selenocysteine
  MOD_RES (312)..(312): Selenocysteine
  MOD_RES (336)..(336): Selenocysteine
  MOD_RES (338)..(338): Selenocysteine
  MOD_RES (353)..(353): Selenocysteine
  MOD_RES (363)..(363): Selenocysteine
  MOD_RES (370)..(370): Selenocysteine
  MOD_RES (405)..(405): Selenocysteine
  MOD_RES (426)..(426): Selenocysteine
  MOD_RES (441)..(441): Selenocysteine
  MOD_RES (457)..(457): Selenocysteine
  MOD_RES (470)..(470): Selenocysteine
  MOD_RES (474)..(474): Selenocysteine
  MOD_RES (536)..(536): Selenocysteine
  MOD_RES (554)..(554): Selenocysteine
  MOD_RES (564)..(564): Selenocysteine
  MOD_RES (584)..(584): Selenocysteine
  MOD_RES (591)..(591): Selenocysteine
  MOD_RES (598)..(598): Selenocysteine
  MOD_RES (616)..(616): Selenocysteine
  MOD_RES (629)..(629): Selenocysteine
  MOD_RES (640)..(640): Selenocysteine
  MOD_RES (656)..(656): Selenocysteine
  MOD_RES (663)..(663): Selenocysteine
  MOD_RES (669)..(669): Selenocysteine
MXASPDYLVVLFGIXAGAXGAKLGSDEKELILLFWKVVDLANKKVGQLHEVLVRPDQLELXEDCKEEXKIDVESLSSASQLDQALRQFNQSVSNELNIGVGXSFCLCXDGQLHVRQILHPEASKKNVLLPECFYSFFDLRKEFKKCCPGSPDIDKLDVAXMXEYLNFEKSSSVSRYGASQVEDMGNIILAMISEPYNHRFSDPERVNYKFESGXCSKMELIDDNXVVRARGLPWQSSDQDIARFFKGLNIAKGGAALCLNAQGRRNGEALVRFVSEEHRDLALQRHKHHMGXRYIEVYKAXGEDFLKIAGGXSNEVAQFLSKENQVIVRMRGLPFXAXAEEVVAFFGQHCPIXGGKEGILFVXYPDGRPXGDAFVLFACEEYAQNALRKHKDLLGKRYIELFRSXAAEVQQVLNRFSSAPLIPLPXPPIIPVLPQQFVPPXNVRDCIRLRGLPYAAXIEDILDFLGEFAXDIRXHGVHMVLNHQGRPSGDAFIQMKSADRAFMAAQKCHKKNMKDRYVEVFQCSAEEMNFVLMGGXLNRNGLSPPPCLSPPSYXFPAPAAVIPXEAAIYQPSVILNPRALQPSXAYYPAGXQLFMNYXAYYPSPPGSPNSLGYFPXAANLSGVPPQPGXVVRMQGLAYNXGVKEILNFFQGYQYAXEDGLIHXNDQARXLPKEWVCI

SEQ ID NO: 9372 - protein, 681 aa, Homo sapiens
  MOD_RES (2)..(2): Selenocysteine
  MOD_RES (15)..(15): Selenocysteine
  MOD_RES (19)..(19): Selenocysteine
  MOD_RES (61)..(61): Selenocysteine
  MOD_RES (68)..(68): Selenocysteine
  MOD_RES (102)..(102): Selenocysteine
  MOD_RES (108)..(108): Selenocysteine
  MOD_RES (160)..(160): Selenocysteine
  MOD_RES (162)..(162): Selenocysteine
  MOD_RES (214)..(214): Selenocysteine
  MOD_RES (225)..(225): Selenocysteine
  MOD_RES (292)..(292): Selenocysteine
  MOD_RES (301)..(301): Selenocysteine
  MOD_RES (312)..(312): Selenocysteine
  MOD_RES (336)..(336): Selenocysteine
  MOD_RES (338)..(338): Selenocysteine
  MOD_RES (353)..(353): Selenocysteine
  MOD_RES (363)..(363): Selenocysteine
  MOD_RES (370)..(370): Selenocysteine
  MOD_RES (405)..(405): Selenocysteine
  MOD_RES (426)..(426): Selenocysteine
  MOD_RES (441)..(441): Selenocysteine
  MOD_RES (457)..(457): Selenocysteine
  MOD_RES (470)..(470): Selenocysteine
  MOD_RES (474)..(474): Selenocysteine
  MOD_RES (536)..(536): Selenocysteine
  MOD_RES (558)..(558): Selenocysteine
  MOD_RES (568)..(568): Selenocysteine
  MOD_RES (588)..(588): Selenocysteine
  MOD_RES (595)..(595): Selenocysteine
  MOD_RES (602)..(602): Selenocysteine
  MOD_RES (620)..(620): Selenocysteine
  MOD_RES (633)..(633): Selenocysteine
  MOD_RES (644)..(644): Selenocysteine
  MOD_RES (660)..(660): Selenocysteine
  MOD_RES (667)..(667): Selenocysteine
  MOD_RES (673)..(673): Selenocysteine
MXASPDYLVVLFGIXAGAXGAKLGSDEKELILLFWKVVDLANKKVGQLHEVLVRPDQLELXEDCKEEXKIDVESLSSASQLDQALRQFNQSVSNELNIGVGXSFCLCXDGQLHVRQILHPEASKKNVLLPECFYSFFDLRKEFKKCCPGSPDIDKLDVAXMXEYLNFEKSSSVSRYGASQVEDMGNIILAMISEPYNHRFSDPERVNYKFESGXCSKMELIDDNXVVRARGLPWQSSDQDIARFFKGLNIAKGGAALCLNAQGRRNGEALVRFVSEEHRDLALQRHKHHMGXRYIEVYKAXGEDFLKIAGGXSNEVAQFLSKENQVIVRMRGLPFXAXAEEVVAFFGQHCPIXGGKEGILFVXYPDGRPXGDAFVLFACEEYAQNALRKHKDLLGKRYIELFRSXAAEVQQVLNRFSSAPLIPLPXPPIIPVLPQQFVPPXNVRDCIRLRGLPYAAXIEDILDFLGEFAXDIRXHGVHMVLNHQGRPSGDAFIQMKSADRAFMAAQKCHKKNMKDRYVEVFQCSAEEMNFVLMGGXLNRNGLSPPPCKLPCLSPPSYXFPAPAAVIPXEAAIYQPSVILNPRALQPSXAYYPAGXQLFMNYXAYYPSPPGSPNSLGYFPXAANLSGVPPQPGXVVRMQGLAYNXGVKEILNFFQGYQYAXEDGLIHXNDQARXLPKEWVCI

SEQ ID NO: 9373 - protein, 24 aa, Homo sapiens
  MOD_RES (2)..(2): Selenocysteine
MXEYLNFEKSSSVSRYGASQVEDM

SEQ ID NO: 9374 - protein, 502 aa, Homo sapiens
  MOD_RES (1)..(1): Any amino acid
  MOD_RES (26)..(26): Selenocysteine
  MOD_RES (28)..(28): Selenocysteine
  MOD_RES (80)..(80): Selenocysteine
  MOD_RES (91)..(91): Selenocysteine
  MOD_RES (158)..(158): Selenocysteine
  MOD_RES (167)..(167): Selenocysteine
  MOD_RES (178)..(178): Selenocysteine
  MOD_RES (202)..(202): Selenocysteine
  MOD_RES (204)..(204): Selenocysteine
  MOD_RES (219)..(219): Selenocysteine
  MOD_RES (229)..(229): Selenocysteine
  MOD_RES (236)..(236): Selenocysteine
  MOD_RES (271)..(271): Selenocysteine
  MOD_RES (292)..(292): Selenocysteine
  MOD_RES (307)..(307): Selenocysteine
  MOD_RES (323)..(323): Selenocysteine
  MOD_RES (336)..(336): Selenocysteine
  MOD_RES (340)..(340): Selenocysteine
  MOD_RES (402)..(402): Selenocysteine
  MOD_RES (424)..(424): Selenocysteine
  MOD_RES (434)..(434): Selenocysteine
  MOD_RES (454)..(454): Selenocysteine
  MOD_RES (461)..(461): Selenocysteine
  MOD_RES (468)..(468): Selenocysteine
  MOD_RES (482)..(482): Selenocysteine
  MOD_RES (485)..(485): Selenocysteine
XFFDLRKEFKKCCPGSPDIDKLDVAXMXEYLNFEKSSSVSRYGASQVEDMGNIILAMISEPYNHRFSDPERVNYKFESGXCSKMELIDDNXVVRARGLPWQSSDQDIARFFKGLNIAKGGAALCLNAQGRRNGEALVRFVSEEHRDLALQRHKHHMGXRYIEVYKAXGEDFLKIAGGXSNEVAQFLSKENQVIVRMRGLPFXAXAEEVVAFFGQHCPIXGGKEGILFVXYPDGRPXGDAFVLFACEEYAQNALRKHKDLLGKRYIELFRSXAAEVQQVLNRFSSAPLIPLPXPPIIPVLPQQFVPPXNVRDCIRLRGLPYAAXIEDILDFLGEFAXDIRXHGVHMVLNHQGRPSGDAFIQMKSADRAFMAAQKCHKKNMKDRYVEVFQCSAEEMNFVLMGGXLNRNGLSPPPCKLPCLSPPSYXFPAPAAVIPXEAAIYQPSVILNPRALQPSXAYYPAGXQLFMNYXAYYPSMQPRMDLYXQMXRPGLYPKNGFVFKGPSS

SEQ ID NO: 9375 - protein, 43 aa, Homo sapiens
  MOD_RES (4)..(4): Selenocysteine
MLCXDGQQLLRQVLHPEASRKNLVLPDMFFSFYDLRREFHMQH

SEQ ID NO: 9376 - protein, 82 aa, Homo sapiens
  MOD_RES (4)..(4): Selenocysteine
  MOD_RES (46)..(46): Selenocysteine
  MOD_RES (53)..(53): Selenocysteine
  MOD_RES (56)..(56): Selenocysteine
  MOD_RES (65)..(65): Selenocysteine
  MOD_RES (68)..(68): Selenocysteine
  MOD_RES (79)..(79): Selenocysteine
MLCXDGQQLLRQVLHPEASRKNLVLPDMFFSFYDLRREFHMQHPSXCPARDLXVAXMAQGLGLEXDAXEDDFGVWEVKXMVA

SEQ ID NO: 9377 - protein, 727 aa, Homo sapiens
  MOD_RES (2)..(2): Selenocysteine
  MOD_RES (37)..(37): Selenocysteine
  MOD_RES (50)..(50): Selenocysteine
  MOD_RES (69)..(69): Selenocysteine
  MOD_RES (84)..(84): Selenocysteine
  MOD_RES (130)..(130): Selenocysteine
  MOD_RES (172)..(172): Selenocysteine
  MOD_RES (179)..(179): Selenocysteine
  MOD_RES (182)..(182): Selenocysteine
  MOD_RES (191)..(191): Selenocysteine
  MOD_RES (194)..(194): Selenocysteine
  MOD_RES (205)..(205): Selenocysteine
  MOD_RES (234)..(234): Selenocysteine
  MOD_RES (241)..(241): Selenocysteine
  MOD_RES (257)..(257): Selenocysteine
  MOD_RES (333)..(333): Selenocysteine
  MOD_RES (344)..(344): Selenocysteine
  MOD_RES (372)..(372): Selenocysteine
  MOD_RES (385)..(385): Selenocysteine
  MOD_RES (388)..(388): Selenocysteine
  MOD_RES (402)..(402): Selenocysteine
  MOD_RES (437)..(437): Selenocysteine
  MOD_RES (456)..(456): Selenocysteine
  MOD_RES (458)..(458): Selenocysteine
  MOD_RES (472)..(472): Selenocysteine
  MOD_RES (485)..(485): Selenocysteine
  MOD_RES (487)..(487): Selenocysteine
  MOD_RES (526)..(526): Selenocysteine
  MOD_RES (555)..(555): Selenocysteine
  MOD_RES (566)..(566): Selenocysteine
  MOD_RES (586)..(586): Selenocysteine
  MOD_RES (588)..(589): Selenocysteine
  MOD_RES (593)..(593): Selenocysteine
  MOD_RES (595)..(595): Selenocysteine
  MOD_RES (599)..(599): Selenocysteine
  MOD_RES (601)..(601): Selenocysteine
  MOD_RES (621)..(621): Selenocysteine
  MOD_RES (631)..(631): Selenocysteine
  MOD_RES (638)..(638): Selenocysteine
  MOD_RES (649)..(650): Selenocysteine
  MOD_RES (655)..(656): Selenocysteine
  MOD_RES (658)..(658): Selenocysteine
  MOD_RES (666)..(666): Selenocysteine
  MOD_RES (684)..(684): Selenocysteine
  MOD_RES (705)..(705): Selenocysteine
  MOD_RES (716)..(716): Selenocysteine
MXPPPPPPPPPGPDPAADPAADPCPWPGSLVVLFGAXAGALGRDLGSDEXDLILLVWQVVEPRSRQVGXLHKSLVRAEAAALSXQCREASGLSADSLARAEPLDKVLQQFSQLVNGDVALLGGGPYMLCXDGQQLLRQVLHPEASRKNLVLPDMFFSFYDLRREFHMQHPSXCPARDLXVAXMAQGLGLEXDAXEDDFGVWEVKXMVAVILHLLKEPSSQLFSKPEVIKQKYEXGPCSDSXVPCPYSSKADVVDSEXVVRARGLPWQSSDQDVARFFKGLNVARGGVALCLNAQGRRNGEALIRFVDSEQRDLALQRHKHHMGVRYIEVYKAXGEEFVKIAGGXSLEVARFLSREDQVILRLRGLPFSAGPXDVLGFLGPECPVXGGXEGLLFVRHPDGRPXGDAFALFACEELAQAALRRHKGMLGKRYIELFRSXAAEVQQVLNRYASGPLLPXLXAPLLPIPFPLAPGXGRDCVRLRGLPYXAXIEDILSFLGEAAADIRPHGVHMVLNQQGRPSGDAFIQMXSAERALAAAQRCHKKVMKERYVEVVPCSXEEMSRVLMGGXLGRSGMSPPPCKLPCLSPPXYXXFQAXPXLIPXEXAALYPSSALLPAARVPAAPXPVAYYPGPAXQLYLNYXAYYPSPPVSPXXVGYLXXPXAALASAPXSVLSQSGALVRMQGVPYXAGMKDLLSVFQAYQLPADDYXSLMPVGDPPRXVLQAPKEWVCL

SEQ ID NO: 9378 - protein, 717 aa, Homo sapiens
  MOD_RES (2)..(2): Selenocysteine
  MOD_RES (37)..(37): Selenocysteine
  MOD_RES (50)..(50): Selenocysteine
  MOD_RES (69)..(69): Selenocysteine
  MOD_RES (84)..(84): Selenocysteine
  MOD_RES (130)..(130): Selenocysteine
  MOD_RES (172)..(172): Selenocysteine
  MOD_RES (179)..(179): Selenocysteine
  MOD_RES (182)..(182): Selenocysteine
  MOD_RES (191)..(191): Selenocysteine
  MOD_RES (194)..(194): Selenocysteine
  MOD_RES (205)..(205): Selenocysteine
  MOD_RES (234)..(234): Selenocysteine
  MOD_RES (247)..(247): Selenocysteine
  MOD_RES (323)..(323): Selenocysteine
  MOD_RES (334)..(334): Selenocysteine
  MOD_RES (362)..(362): Selenocysteine
  MOD_RES (375)..(375): Selenocysteine
  MOD_RES (378)..(378): Selenocysteine
  MOD_RES (392)..(392): Selenocysteine
  MOD_RES (427)..(427): Selenocysteine
  MOD_RES (446)..(446): Selenocysteine
  MOD_RES (448)..(448): Selenocysteine
  MOD_RES (462)..(462): Selenocysteine
  MOD_RES (475)..(475): Selenocysteine
  MOD_RES (477)..(477): Selenocysteine
  MOD_RES (516)..(516): Selenocysteine
  MOD_RES (545)..(545): Selenocysteine
  MOD_RES (556)..(556): Selenocysteine
  MOD_RES (576)..(576): Selenocysteine
  MOD_RES (578)..(579): Selenocysteine
  MOD_RES (583)..(583): Selenocysteine
  MOD_RES (585)..(585): Selenocysteine
  MOD_RES (589)..(589): Selenocysteine
  MOD_RES (591)..(591): Selenocysteine
  MOD_RES (611)..(611): Selenocysteine
  MOD_RES (621)..(621): Selenocysteine
  MOD_RES (628)..(628): Selenocysteine
  MOD_RES (639)..(640): Selenocysteine
  MOD_RES (645)..(646): Selenocysteine
  MOD_RES (648)..(648): Selenocysteine
  MOD_RES (656)..(656): Selenocysteine
  MOD_RES (674)..(674): Selenocysteine
  MOD_RES (695)..(695): Selenocysteine
  MOD_RES (706)..(706): Selenocysteine
MXPPPPPPPPPGPDPAADPAADPCPWPGSLVVLFGAXAGALGRDLGSDEXDLILLVWQVVEPRSRQVGXLHKSLVRAEAAALSXQCREASGLSADSLARAEPLDKVLQQFSQLVNGDVALLGGGPYMLCXDGQQLLRQVLHPEASRKNLVLPDMFFSFYDLRREFHMQHPSXCPARDLXVAXMAQGLGLEXDAXEDDFGVWEVKXMVAVILHLLKEPSSQLFSKPEVIKQKYEXGPCSKADVVDSEXVVRARGLPWQSSDQDVARFFKGLNVARGGVALCLNAQGRRNGEALIRFVDSEQRDLALQRHKHHMGVRYIEVYKAXGEEFVKIAGGXSLEVARFLSREDQVILRLRGLPFSAGPXDVLGFLGPECPVXGGXEGLLFVRHPDGRPXGDAFALFACEELAQAALRRHKGMLGKRYIELFRSXAAEVQQVLNRYASGPLLPXLXAPLLPIPFPLAPGXGRDCVRLRGLPYXAXIEDILSFLGEAAADIRPHGVHMVLNQQGRPSGDAFIQMXSAERALAAAQRCHKKVMKERYVEVVPCSXEEMSRVLMGGXLGRSGMSPPPCKLPCLSPPXYXXFQAXPXLIPXEXAALYPSSALLPAARVPAAPXPVAYYPGPAXQLYLNYXAYYPSPPVSPXXVGYLXXPXAALASAPXSVLSQSGALVRMQGVPYXAGMKDLLSVFQAYQLPADDYXSLMPVGDPPRXVLQAPKEWVCL

SEQ ID NO: 9379 - protein, 65 aa, Homo sapiens
  MOD_RES (1)..(1): Any amino acid
  MOD_RES (16)..(16): Selenocysteine
  MOD_RES (29)..(29): Selenocysteine
XQLFSKPEVIKQKYEXGPCSKADVVDSEXVVRARGLPWQSSDQDVARFFKGLNVARCIKRQGRSL

SEQ ID NO: 9380 - protein, 162 aa, Homo sapiens
  MOD_RES (47)..(47): Selenocysteine
  MOD_RES (84)..(84): Selenocysteine
  MOD_RES (96)..(96): Selenocysteine
MLKEGVRLDRVRGGRQKYKRRPEVDPLPFPGPFPAGPLAVAGGPRKXAAPVNALVSHLLVVEPEKLYAMPDPAGPDGHLPAVAXLCDLFDREIVVXISWAKSIPGFSSLSLSDQMSVLQSVWMEVLVLGVAQRSLPLQDELAFAEDLVLDEEGARAAGLGEL

SEQ ID NO: 9381 - protein, 109 aa, Homo sapiens
  MOD_RES (29)..(29): Selenocysteine
  MOD_RES (31)..(31): Selenocysteine
  MOD_RES (44)..(44): Selenocysteine
  MOD_RES (106)..(106): Selenocysteine
MSSQVVGIEPLYIKAEPASPDSPKGSSEXEXEPPVALAPGPAPXRCLPGHKEEEDGEGAGPGEQGGGKLVLSSLPKRLCLVCGDVASGYHYGVASCEACKAFFKRXIQG

SEQ ID NO: 9382 - protein, 423 aa, Homo sapiens
  MOD_RES (29)..(29): Selenocysteine
  MOD_RES (31)..(31): Selenocysteine
  MOD_RES (44)..(44): Selenocysteine
  MOD_RES (106)..(106): Selenocysteine
  MOD_RES (124)..(124): Selenocysteine
  MOD_RES (137)..(137): Selenocysteine
  MOD_RES (190)..(190): Selenocysteine
  MOD_RES (227)..(227): Selenocysteine
  MOD_RES (239)..(239): Selenocysteine
  MOD_RES (384)..(384): Selenocysteine
  MOD_RES (391)..(391): Selenocysteine
MSSQVVGIEPLYIKAEPASPDSPKGSSEXEXEPPVALAPGPAPXRCLPGHKEEEDGEGAGPGEQGGGKLVLSSLPKRLCLVCGDVASGYHYGVASCEACKAFFKRXIQGSIEYSCPASNECEIXKRRRKACQACRFXKCLRVGMLKEGVRLDRVRGGRQKYKRRPEVDPLPFPGPFPAGPLAVAGGPRKXAAPVNALVSHLLVVEPEKLYAMPDPAGPDGHLPAVAXLCDLFDREIVVXISWAKSIPGFSSLSLSDQMSVLQSVWMEVLVLGVAQRSLPLQDELAFAEDLVLDEEGARAAGLGELGAALLQLVRRLQALRLEREEYVLLKALALANSDSVHIEDAEAVEQLREALHEALLEYEAGRAGPGGGAERRRAGRLLLXLPLLRQXAGKVLAHFYGVKLEGKVPMHKLFLEMLEAMMD

SEQ ID NO: 9383 - protein, 422 aa, Homo sapiens
  MOD_RES (29)..(29): Selenocysteine
  MOD_RES (31)..(31): Selenocysteine
  MOD_RES (44)..(44): Selenocysteine
  MOD_RES (106)..(106): Selenocysteine
  MOD_RES (124)..(124): Selenocysteine
  MOD_RES (137)..(137): Selenocysteine
  MOD_RES (190)..(190): Selenocysteine
  MOD_RES (226)..(226): Selenocysteine
  MOD_RES (238)..(238): Selenocysteine
  MOD_RES (383)..(383): Selenocysteine
  MOD_RES (390)..(390): Selenocysteine
MSSQVVGIEPLYIKAEPASPDSPKGSSEXEXEPPVALAPGPAPXRCLPGHKEEEDGEGAGPGEQGGGKLVLSSLPKRLCLVCGDVASGYHYGVASCEACKAFFKRXIQGSIEYSCPASNECEIXKRRRKACQACRFXKCLRVGMLKEGVRLDRVRGGRQKYKRRPEVDPLPFPGPFPAGPLAVAGGPRKXAPVNALVSHLLVVEPEKLYAMPDPAGPDGHLPAVAXLCDLFDREIVVXISWAKSIPGFSSLSLSDQMSVLQSVWMEVLVLGVAQRSLPLQDELAFAEDLVLDEEGARAAGLGELGAALLQLVRRLQALRLEREEYVLLKALALANSDSVHIEDAEAVEQLREALHEALLEYEAGRAGPGGGAERRRAGRLLLXLPLLRQXAGKVLAHFYGVKLEGKVPMHKLFLEMLEAMMD

SEQ ID NO: 9384 - protein, 198 aa, Homo sapiens
  MOD_RES (1)..(1): Any amino acid
  MOD_RES (28)..(28): Selenocysteine
  MOD_RES (165)..(165): Selenocysteine
  MOD_RES (172)..(172): Selenocysteine
XRPEVDPLPFPGPFPAGPLAVAGGPRKXGFSSLSLSDQMSVLQSVWMEVLVLGVAQRSLPLQDELAFAEDLVLDEEGARAAGLGELGAALLQLVRRLQALRLEREEYVLLKALALANSDSVHIEDAEAVEQLREALHEALLEYEAGRAGPGGGAERRRAGRLLLXLPLLRQXAGKVLAHFYGVKLEGKVPMHKLFLEM

SEQ ID NO: 9385 - protein, 508 aa, Homo sapiens
  MOD_RES (23)..(23): Selenocysteine
  MOD_RES (56)..(56): Selenocysteine
  MOD_RES (75)..(75): Selenocysteine
  MOD_RES (135)..(135): Selenocysteine
  MOD_RES (147)..(147): Selenocysteine
  MOD_RES (153)..(153): Selenocysteine
  MOD_RES (215)..(215): Selenocysteine
  MOD_RES (246)..(247): Selenocysteine
  MOD_RES (348)..(348): Selenocysteine
  MOD_RES (394)..(394): Selenocysteine
  MOD_RES (400)..(400): Selenocysteine
  MOD_RES (407)..(407): Selenocysteine
  MOD_RES (467)..(467): Selenocysteine
  MOD_RES (486)..(486): Selenocysteine
  MOD_RES (499)..(499): Selenocysteine
  MOD_RES (501)..(501): Selenocysteine
MLLNRMSSDDRHLGSSCGSFIKXEPSSPSSGIDALSHHSPSGSSDASGGFGLALGXHANGLDSPPMFAGAGLGGXPCRKSYEDCASGIMEDSAIKCEYMLNAIPKRLCLVCGDIASGYHYGVASCEACKAFFKRXIQGNIEYSCPAXNECEIXKRRRKSCQACRFMKCLKVGMLKEGVRLDRVRGGRQKYKRRLDSESSPYLSLQISPPAKKPLXKIVSYLLVAEPDKLYAMPPPGMPEGDIKALXXLCDLADRELVVIIGWAKHIPGFSSLSLGDQMSLLQSAWMEILILGIVYRSLPYDDKLVYAEDYIMDEEHSRLAGLLELYRAILQLVRRYKKLKVEKEEFVXLKALALANSDSMYIEDLEAVQKLQDLLHEALQDYELSQRHEEPWRXGKLLLXLPLLRQXAAKAVQHFYSVKLQGKVPMHKLFLEMLEAKVGQEQLRGSPKDERMSSHDGKCPFQSAAFXSRDQSNSPGIPNPRPSSPXPLNERGRQISPSXRXPGGQGKH

SEQ ID NO: 9386 - protein, 433 aa, Homo sapiens
  MOD_RES (18)..(18): Selenocysteine
  MOD_RES (51)..(51): Selenocysteine
  MOD_RES (70)..(70): Selenocysteine
  MOD_RES (130)..(130): Selenocysteine
  MOD_RES (142)..(142): Selenocysteine
  MOD_RES (148)..(148): Selenocysteine
  MOD_RES (210)..(210): Selenocysteine
  MOD_RES (241)..(242): Selenocysteine
  MOD_RES (343)..(343): Selenocysteine
  MOD_RES (389)..(389): Selenocysteine
  MOD_RES (395)..(395): Selenocysteine
  MOD_RES (402)..(402): Selenocysteine
MSSDDRHLGSSCGSFIKXEPSSPSSGIDALSHHSPSGSSDASGGFGLALGXHANGLDSPPMFAGAGLGGXPCRKSYEDCASGIMEDSAIKCEYMLNAIPKRLCLVCGDIASGYHYGVASCEACKAFFKRXIQGNIEYSCPAXNECEIXKRRRKSCQACRFMKCLKVGMLKEGVRLDRVRGGRQKYKRRLDSESSPYLSLQISPPAKKPLXKIVSYLLVAEPDKLYAMPPPGMPEGDIKALXXLCDLADRELVVIIGWAKHIPGFSSLSLGDQMSLLQSAWMEILILGIVYRSLPYDDKLVYAEDYIMDEEHSRLAGLLELYRAILQLVRRYKKLKVEKEEFVXLKALALANSDSMYIEDLEAVQKLQDLLHEALQDYELSQRHEEPWRXGKLLLXLPLLRQXAAKAVQHFYSVKLQGKVPMHKLFLEMLEAKV

SEQ ID NO: 9387 - protein, 500 aa, Homo sapiens
  MOD_RES (18)..(18): Selenocysteine
  MOD_RES (51)..(51): Selenocysteine
  MOD_RES (70)..(70): Selenocysteine
  MOD_RES (130)..(130): Selenocysteine
  MOD_RES (142)..(142): Selenocysteine
  MOD_RES (148)..(148): Selenocysteine
  MOD_RES (210)..(210): Selenocysteine
  MOD_RES (241)..(242): Selenocysteine
  MOD_RES (343)..(343): Selenocysteine
  MOD_RES (389)..(389): Selenocysteine
  MOD_RES (395)..(395): Selenocysteine
  MOD_RES (402)..(402): Selenocysteine
  MOD_RES (457)..(457): Selenocysteine
  MOD_RES (466)..(466): Selenocysteine
  MOD_RES (479)..(479): Selenocysteine
MSSDDRHLGSSCGSFIKXEPSSPSSGIDALSHHSPSGSSDASGGFGLALGXHANGLDSPPMFAGAGLGGXPCRKSYEDCASGIMEDSAIKCEYMLNAIPKRLCLVCGDIASGYHYGVASCEACKAFFKRXIQGNIEYSCPAXNECEIXKRRRKSCQACRFMKCLKVGMLKEGVRLDRVRGGRQKYKRRLDSESSPYLSLQISPPAKKPLXKIVSYLLVAEPDKLYAMPPPGMPEGDIKALXXLCDLADRELVVIIGWAKHIPGFSSLSLGDQMSLLQSAWMEILILGIVYRSLPYDDKLVYAEDYIMDEEHSRLAGLLELYRAILQLVRRYKKLKVEKEEFVXLKALALANSDSMYIEDLEAVQKLQDLLHEALQDYELSQRHEEPWRXGKLLLXLPLLRQXAAKAVQHFYSVKLQGKVPMHKLFLEMLEAKAWARADSLQEWRPLEQVPSPLHRAXKRQHVHFLXPLPPPPSVAWVGXAQAGYHLEVFLPQRAGWPRAA

SEQ ID NO: 9388 - protein, 508 aa, Homo sapiens
  MOD_RES (18)..(18): Selenocysteine
  MOD_RES (51)..(51): Selenocysteine
  MOD_RES (70)..(70): Selenocysteine
  MOD_RES (130)..(130): Selenocysteine
  MOD_RES (142)..(142): Selenocysteine
  MOD_RES (148)..(148): Selenocysteine
  MOD_RES (210)..(210): Selenocysteine
  MOD_RES (241)..(242): Selenocysteine
  MOD_RES (343)..(343): Selenocysteine
  MOD_RES (389)..(389): Selenocysteine
  MOD_RES (395)..(395): Selenocysteine
  MOD_RES (402)..(402): Selenocysteine
  MOD_RES (462)..(462): Selenocysteine
  MOD_RES (481)..(481): Selenocysteine
  MOD_RES (494)..(494): Selenocysteine
  MOD_RES (496)..(496): Selenocysteine
  MOD_RES (507)..(507): Selenocysteine
MSSDDRHLGSSCGSFIKXEPSSPSSGIDALSHHSPSGSSDASGGFGLALGXHANGLDSPPMFAGAGLGGXPCRKSYEDCASGIMEDSAIKCEYMLNAIPKRLCLVCGDIASGYHYGVASCEACKAFFKRXIQGNIEYSCPAXNECEIXKRRRKSCQACRFMKCLKVGMLKEGVRLDRVRGGRQKYKRRLDSESSPYLSLQISPPAKKPLXKIVSYLLVAEPDKLYAMPPPGMPEGDIKALXXLCDLADRELVVIIGWAKHIPGFSSLSLGDQMSLLQSAWMEILILGIVYRSLPYDDKLVYAEDYIMDEEHSRLAGLLELYRAILQLVRRYKKLKVEKEEFVXLKALALANSDSMYIEDLEAVQKLQDLLHEALQDYELSQRHEEPWRXGKLLLXLPLLRQXAAKAVQHFYSVKLQGKVPMHKLFLEMLEAKVGQEQLRGSPKDERMSSHDGKCPFQSAAFXSRDQSNSPGIPNPRPSSPXPLNERGRQISPSXRXPGGQGKHLWLXM

SEQ ID NO: 9389 - protein, 458 aa, Homo sapiens
  MOD_RES (41)..(41): Selenocysteine
  MOD_RES (50)..(50): Selenocysteine
  MOD_RES (71)..(71): Selenocysteine
  MOD_RES (107)..(107): Selenocysteine
  MOD_RES (114)..(114): Selenocysteine
  MOD_RES (155)..(155): Selenocysteine
  MOD_RES (167)..(167): Selenocysteine
  MOD_RES (173)..(173): Selenocysteine
  MOD_RES (256)..(256): Selenocysteine
  MOD_RES (266)..(267): Selenocysteine
  MOD_RES (291)..(291): Selenocysteine
  MOD_RES (368)..(368): Selenocysteine
  MOD_RES (420)..(420): Selenocysteine
  MOD_RES (427)..(427): Selenocysteine
  MOD_RES (429)..(429): Selenocysteine
MDSVELCLPESFSLHYEEELLCRMSNKDRHIDSSCSSFIKXEPSSPASLXDSVNHHSPGGSSDASGSYSSXMNGHQNGLDSPPLYPSAPILGGSGPVRKLYDDCSSXIVEDPQXKCEYMLNSMPKRLCLVCGDIASGYHYGVASCEACKAFFKRXIQGNIEYSCPAXNECEIXKRRRKSCQACRFMKCLKVGMLKEGVRLDRVRGGRQKYKRRIDAENSPYLNPQLVQPAKKPYNKIVSHLLVAEPEKIYAMPDPXVPDSDIKALXXLCDLADRELVVIIGWAKHIPGFSXLSLADQMSLLQSAWMEILILGVVYRSLSFEDELVYADDYIMDEDQSKLAGLLDLNNAILQLVKKYKSMKLEKEEFVXLKAIALANSDSMHIEDVEAVQKLQDVLHEALQDYEAGQHMEDPRRAGKMLMXLPLLRQXSXKAVQHFYNIKLEGKVPMHKLFLEMLEAKV

SEQ ID NO: 9390 - protein, 50 aa, Homo sapiens
  MOD_RES (18)..(18): Selenocysteine
  MOD_RES (27)..(27): Selenocysteine
  MOD_RES (48)..(48): Selenocysteine
MSNKDRHIDSSCSSFIKXEPSSPASLXDSVNHHSPGGSSDASGSYSSXMN

SEQ ID NO: 9391 - protein, 56 aa, Homo sapiens
  MOD_RES (18)..(18): Selenocysteine
  MOD_RES (27)..(27): Selenocysteine
  MOD_RES (48)..(48): Selenocysteine
MSNKDRHIDSSCSSFIKXEPSSPASLXDSVNHHSPGGSSDASGSYSSXMNGHQNGL

SEQ ID NO: 9392 - protein, 92 aa, Homo sapiens
  MOD_RES (18)..(18): Selenocysteine
  MOD_RES (27)..(27): Selenocysteine
  MOD_RES (48)..(48): Selenocysteine
  MOD_RES (84)..(84): Selenocysteine
  MOD_RES (91)..(91): Selenocysteine
MSNKDRHIDSSCSSFIKXEPSSPASLXDSVNHHSPGGSSDASGSYSSXMNGHQNGLDSPPLYPSAPILGGSGPVRKLYDDCSSXIVEDPQXK

SEQ ID NO: 9393 - protein, 354 aa, Homo sapiens
  MOD_RES (18)..(18): Selenocysteine
  MOD_RES (27)..(27): Selenocysteine
  MOD_RES (48)..(48): Selenocysteine
  MOD_RES (84)..(84): Selenocysteine
  MOD_RES (91)..(91): Selenocysteine
  MOD_RES (132)..(132): Selenocysteine
  MOD_RES (144)..(144): Selenocysteine
  MOD_RES (150)..(150): Selenocysteine
  MOD_RES (233)..(233): Selenocysteine
  MOD_RES (243)..(244): Selenocysteine
  MOD_RES (268)..(268): Selenocysteine
  MOD_RES (345)..(345): Selenocysteine
MSNKDRHIDSSCSSFIKXEPSSPASLXDSVNHHSPGGSSDASGSYSSXMNGHQNGLDSPPLYPSAPILGGSGPVRKLYDDCSSXIVEDPQXKCEYMLNSMPKRLCLVCGDIASGYHYGVASCEACKAFFKRXIQGNIEYSCPAXNECEIXKRRRKSCQACRFMKCLKVGMLKEGVRLDRVRGGRQKYKRRIDAENSPYLNPQLVQPAKKPYNKIVSHLLVAEPEKIYAMPDPXVPDSDIKALXXLCDLADRELVVIIGWAKHIPGFSXLSLADQMSLLQSAWMEILILGVVYRSLSFEDELVYADDYIMDEDQSKLAGLLDLNNAILQLVKKYKSMKLEKEEFVXLKAIALANS

SEQ ID NO: 9394 - protein, 435 aa, Homo sapiens
  MOD_RES (18)..(18): Selenocysteine
  MOD_RES (27)..(27): Selenocysteine
  MOD_RES (48)..(48): Selenocysteine
  MOD_RES (84)..(84): Selenocysteine
  MOD_RES (91)..(91): Selenocysteine
  MOD_RES (132)..(132): Selenocysteine
  MOD_RES (144)..(144): Selenocysteine
  MOD_RES (150)..(150): Selenocysteine
  MOD_RES (233)..(233): Selenocysteine
  MOD_RES (243)..(244): Selenocysteine
  MOD_RES (268)..(268): Selenocysteine
  MOD_RES (345)..(345): Selenocysteine
  MOD_RES (397)..(397): Selenocysteine
  MOD_RES (404)..(404): Selenocysteine
  MOD_RES (406)..(406): Selenocysteine
MSNKDRHIDSSCSSFIKXEPSSPASLXDSVNHHSPGGSSDASGSYSSXMNGHQNGLDSPPLYPSAPILGGSGPVRKLYDDCSSXIVEDPQXKCEYMLNSMPKRLCLVCGDIASGYHYGVASCEACKAFFKRXIQGNIEYSCPAXNECEIXKRRRKSCQACRFMKCLKVGMLKEGVRLDRVRGGRQKYKRRIDAENSPYLNPQLVQPAKKPYNKIVSHLLVAEPEKIYAMPDPXVPDSDIKALXXLCDLADRELVVIIGWAKHIPGFSXLSLADQMSLLQSAWMEILILGVVYRSLSFEDELVYADDYIMDEDQSKLAGLLDLNNAILQLVKKYKSMKLEKEEFVXLKAIALANSDSMHIEDVEAVQKLQDVLHEALQDYEAGQHMEDPRRAGKMLMXLPLLRQXSXKAVQHFYNIKLEGKVPMHKLFLEMLEAKV

SEQ ID NO: 9395 - protein, 396 aa, Homo sapiens
  MOD_RES (18)..(18): Selenocysteine
  MOD_RES (27)..(27): Selenocysteine
  MOD_RES (48)..(48): Selenocysteine
  MOD_RES (84)..(84): Selenocysteine
  MOD_RES (91)..(91): Selenocysteine
  MOD_RES (132)..(132): Selenocysteine
  MOD_RES (194)..(194): Selenocysteine
  MOD_RES (204)..(205): Selenocysteine
  MOD_RES (229)..(229): Selenocysteine
  MOD_RES (306)..(306): Selenocysteine
  MOD_RES (358)..(358): Selenocysteine
  MOD_RES (365)..(365): Selenocysteine
  MOD_RES (367)..(367): Selenocysteine
MSNKDRHIDSSCSSFIKXEPSSPASLXDSVNHHSPGGSSDASGSYSSXMNGHQNGLDSPPLYPSAPILGGSGPVRKLYDDCSSXIVEDPQXKCEYMLNSMPKRLCLVCGDIASGYHYGVASCEACKAFFKRXIQGVRLDRVRGGRQKYKRRIDAENSPYLNPQLVQPAKKPYNKIVSHLLVAEPEKIYAMPDPXVPDSDIKALXXLCDLADRELVVIIGWAKHIPGFSXLSLADQMSLLQSAWMEILILGVVYRSLSFEDELVYADDYIMDEDQSKLAGLLDLNNAILQLVKKYKSMKLEKEEFVXLKAIALANSDSMHIEDVEAVQKLQDVLHEALQDYEAGQHMEDPRRAGKMLMXLPLLRQXSXKAVQHFYNIKLEGKVPMHKLFLEMLEAKV

SEQ ID NO: 9396 - protein, 470 aa, Homo sapiens
  MOD_RES (46)..(46): Selenocysteine
  MOD_RES (55)..(55): Selenocysteine
  MOD_RES (76)..(76): Selenocysteine
  MOD_RES (112)..(112): Selenocysteine
  MOD_RES (119)..(119): Selenocysteine
  MOD_RES (160)..(160): Selenocysteine
  MOD_RES (172)..(172): Selenocysteine
  MOD_RES (178)..(178): Selenocysteine
  MOD_RES (268)..(268): Selenocysteine
  MOD_RES (278)..(279): Selenocysteine
  MOD_RES (303)..(303): Selenocysteine
  MOD_RES (380)..(380): Selenocysteine
  MOD_RES (432)..(432): Selenocysteine
  MOD_RES (439)..(439): Selenocysteine
  MOD_RES (441)..(441): Selenocysteine
MWRECDWGLGAVKSDLACVPSAKRLLCRMSNKDRHIDSSCSSFIKXEPSSPASLXDSVNHHSPGGSSDASGSYSSXMNGHQNGLDSPPLYPSAPILGGSGPVRKLYDDCSSXIVEDPQXKCEYMLNSMPKRLCLVCGDIASGYHYGVASCEACKAFFKRXIQGNIEYSCPAXNECEIXKRRRKSCQACRFMKCLKVGMLKEGVRLDRVRGGRQKYKRRIDAENSPYLNPQLVQPAKKPLLWSDPADNKIVSHLLVAEPEKIYAMPDPXVPDSDIKALXXLCDLADRELVVIIGWAKHIPGFSXLSLADQMSLLQSAWMEILILGVVYRSLSFEDELVYADDYIMDEDQSKLAGLLDLNNAILQLVKKYKSMKLEKEEFVXLKAIALANSDSMHIEDVEAVQKLQDVLHEALQDYEAGQHMEDPRRAGKMLMXLPLLRQXSXKAVQHFYNIKLEGKVPMHKLFLEMLEAKV

SEQ ID NO: 9397 - protein, 47 aa, Homo sapiens
  MOD_RES (33)..(33): Selenocysteine
MWRECDWGLGAVKSDLACVPSAKRREPLAREEXGLLMNANRRSSICA

SEQ ID NO: 9398 - protein, 406 aa, Homo sapiens
  MOD_RES (8)..(8): Selenocysteine
  MOD_RES (32)..(32): Selenocysteine
  MOD_RES (34)..(34): Selenocysteine
  MOD_RES (47)..(47): Selenocysteine
  MOD_RES (55)..(55): Selenocysteine
  MOD_RES (63)..(63): Selenocysteine
  MOD_RES (92)..(92): Selenocysteine
  MOD_RES (116)..(117): Selenocysteine
  MOD_RES (129)..(129): Selenocysteine
  MOD_RES (144)..(144): Selenocysteine
  MOD_RES (147)..(147): Selenocysteine
  MOD_RES (179)..(179): Selenocysteine
  MOD_RES (206)..(206): Selenocysteine
  MOD_RES (208)..(208): Selenocysteine
  MOD_RES (314)..(314): Selenocysteine
  MOD_RES (384)..(384): Selenocysteine
  MOD_RES (392)..(392): Selenocysteine
MESLRGYXHSDIGYRSLAVGEDIEEVNDEKLXVXSLMARGGEDEENXRSKPEYGXEAENNVGXEGSVPSDDQDREGGGGHEPEQQQEEPPLXKPEQQQEEPPLLELKQEQEEPPQXXVEGPQPAEGPQXAEGPQPPERKRRRRXAFXQFQLQELENFFDESQYPDVVARERLAARLNLXEDRVQVWFQNRRAKWKRNQRVLMLRNXAXADLAHPLDMFLGGAYYAAPALDPALCVHLVPQLPRPPVLPVPPMPPRPPMVPMPPRPPIAPMPPMAPVPPGSRMAPVPPGPRMAPVPPWPPMAPVPPWPPMAPVPXGPPMAPVPPGPPMARVPPGPPMARVPPGPPMAPLPPGPPMAPLPPGPPMAPLPPGPPMAPLPPRSHVPHXGLAPVHIXWAPVINSYYACPFF

SEQ ID NO: 9399 - protein, 46 aa, Homo sapiens
  MOD_RES (10)..(10): Selenocysteine
  MOD_RES (24)..(24): Selenocysteine
  MOD_RES (29)..(29): Selenocysteine
  MOD_RES (45)..(45): Selenocysteine
MECADVPLLXPSSKEMMSQALKAXFSGFXKEQQRLGIPKDPRQWXE

SEQ ID NO: 9400 - protein, 272 aa, Homo sapiens
  MOD_RES (10)..(10): Selenocysteine
  MOD_RES (12)..(12): Selenocysteine
  MOD_RES (16)..(16): Selenocysteine
  MOD_RES (38)..(38): Selenocysteine
  MOD_RES (52)..(52): Selenocysteine
  MOD_RES (57)..(57): Selenocysteine
  MOD_RES (73)..(73): Selenocysteine
  MOD_RES (75)..(75): Selenocysteine
  MOD_RES (155)..(155): Selenocysteine
  MOD_RES (182)..(182): Selenocysteine
  MOD_RES (187)..(187): Selenocysteine
  MOD_RES (216)..(216): Selenocysteine
  MOD_RES (218)..(218): Selenocysteine
  MOD_RES (232)..(232): Selenocysteine
  MOD_RES (241)..(241): Selenocysteine
  MOD_RES (272)..(272): Selenocysteine
MKAAVDLKPXLXIIKXEKVDLELFPSPDMECADVPLLXPSSKEMMSQALKAXFSGFXKEQQRLGIPKDPRQWXEXHVRDWVMWAVNEFSLKGVDFQKFCMNGAALCALGKDCFLELAPDFVGDILWEHLEILQKEDVKPYQVNGVNPAYPESRYXSDYFISYGIEHAQCVPPSEFSEPSFIXESYQXLHPISSEELLSLKYENDYPSVILRDPLQXDXLQNDYFAIKQEVVXPDNMCMGRXSRGKLGGQDSFESIESYDSCGQEMGKEEKQX

SEQ ID NO: 9401 - protein, 441 aa, Homo sapiens
  MOD_RES (10)..(10): Selenocysteine
  MOD_RES (12)..(12): Selenocysteine
  MOD_RES (16)..(16): Selenocysteine
  MOD_RES (38)..(38): Selenocysteine
  MOD_RES (52)..(52): Selenocysteine
  MOD_RES (57)..(57): Selenocysteine
  MOD_RES (73)..(73): Selenocysteine
  MOD_RES (75)..(75): Selenocysteine
  MOD_RES (155)..(155): Selenocysteine
  MOD_RES (182)..(182): Selenocysteine
  MOD_RES (187)..(187): Selenocysteine
  MOD_RES (216)..(216): Selenocysteine
  MOD_RES (218)..(218): Selenocysteine
  MOD_RES (232)..(232): Selenocysteine
  MOD_RES (241)..(241): Selenocysteine
  MOD_RES (265)..(265): Selenocysteine
  MOD_RES (303)..(303): Selenocysteine
  MOD_RES (330)..(330): Selenocysteine
  MOD_RES (346)..(346): Selenocysteine
  MOD_RES (357)..(357): Selenocysteine
  MOD_RES (405)..(405): Selenocysteine
  MOD_RES (425)..(425): Selenocysteine
MKAAVDLKPXLXIIKXEKVDLELFPSPDMECADVPLLXPSSKEMMSQALKAXFSGFXKEQQRLGIPKDPRQWXEXHVRDWVMWAVNEFSLKGVDFQKFCMNGAALCALGKDCFLELAPDFVGDILWEHLEILQKEDVKPYQVNGVNPAYPESRYXSDYFISYGIEHAQCVPPSEFSEPSFIXESYQXLHPISSEELLSLKYENDYPSVILRDPLQXDXLQNDYFAIKQEVVXPDNMCMGRXSRGKLGGQDSFESIESYDSCDRLXQSWSSQSSFNSLQRVPSYDSFDSEDYPAALPNHKPKGXFKDYVRDRADLNKDKPVIPAAALAGYXGSGPIQLWQFLLELLXDKSCQSFISWXGDGWEFKLSDPDEVARRWGKRKNKPKMNYEKLSRGLRYYYDKNIIHKXAGKRYVYRFVCDLQSLLGYXPEELHAMLDVKPDADE

SEQ ID NO: 9402 - protein, 354 aa, Homo sapiens
  MOD_RES (10)..(10): Selenocysteine
  MOD_RES (12)..(12): Selenocysteine
  MOD_RES (16)..(16): Selenocysteine
  MOD_RES (38)..(38): Selenocysteine
  MOD_RES (52)..(52): Selenocysteine
  MOD_RES (57)..(57): Selenocysteine
  MOD_RES (73)..(73): Selenocysteine
  MOD_RES (75)..(75): Selenocysteine
  MOD_RES (155)..(155): Selenocysteine
  MOD_RES (182)..(182): Selenocysteine
  MOD_RES (187)..(187): Selenocysteine
  MOD_RES (216)..(216): Selenocysteine
  MOD_RES (218)..(218): Selenocysteine
  MOD_RES (232)..(232): Selenocysteine
  MOD_RES (241)..(241): Selenocysteine
  MOD_RES (259)..(259): Selenocysteine
  MOD_RES (270)..(270): Selenocysteine
  MOD_RES (318)..(318): Selenocysteine
  MOD_RES (338)..(338): Selenocysteine
MKAAVDLKPXLXIIKXEKVDLELFPSPDMECADVPLLXPSSKEMMSQALKAXFSGFXKEQQRLGIPKDPRQWXEXHVRDWVMWAVNEFSLKGVDFQKFCMNGAALCALGKDCFLELAPDFVGDILWEHLEILQKEDVKPYQVNGVNPAYPESRYXSDYFISYGIEHAQCVPPSEFSEPSFIXESYQXLHPISSEELLSLKYENDYPSVILRDPLQXDXLQNDYFAIKQEVVXPDNMCMGRXSRGSGPIQLWQFLLELLXDKSCQSFISWXGDGWEFKLSDPDEVARRWGKRKNKPKMNYEKLSRGLRYYYDKNIIHKXAGKRYVYRFVCDLQSLLGYXPEELHAMLDVKPDADE

SEQ ID NO: 9403 - protein, 225 aa, Homo sapiens
  MOD_RES (10)..(10): Selenocysteine
  MOD_RES (12)..(12): Selenocysteine
  MOD_RES (16)..(16): Selenocysteine
  MOD_RES (49)..(49): Selenocysteine
  MOD_RES (87)..(87): Selenocysteine
  MOD_RES (114)..(114): Selenocysteine
  MOD_RES (130)..(130): Selenocysteine
  MOD_RES (141)..(141): Selenocysteine
  MOD_RES (189)..(189): Selenocysteine
  MOD_RES (209)..(209): Selenocysteine
MKAAVDLKPXLXIIKXEKVDLELFPSPGKLGGQDSFESIESYDSCDRLXQSWSSQSSFNSLQRVPSYDSFDSEDYPAALPNHKPKGXFKDYVRDRADLNKDKPVIPAAALAGYXGSGPIQLWQFLLELLXDKSCQSFISWXGDGWEFKLSDPDEVARRWGKRKNKPKMNYEKLSRGLRYYYDKNIIHKXAGKRYVYRFVCDLQSLLGYXPEELHAMLDVKPDADE

SEQ ID NO: 9404 - protein, 485 aa, Homo sapiens
  MOD_RES (30)..(30): Selenocysteine
  MOD_RES (59)..(59): Selenocysteine
  MOD_RES (64)..(64): Selenocysteine
  MOD_RES (82)..(82): Selenocysteine
  MOD_RES (96)..(96): Selenocysteine
  MOD_RES (101)..(101): Selenocysteine
  MOD_RES (117)..(117): Selenocysteine
  MOD_RES (119)..(119): Selenocysteine
  MOD_RES (199)..(199): Selenocysteine
  MOD_RES (226)..(226): Selenocysteine
  MOD_RES (231)..(231): Selenocysteine
  MOD_RES (260)..(260): Selenocysteine
  MOD_RES (262)..(262): Selenocysteine
  MOD_RES (276)..(276): Selenocysteine
  MOD_RES (285)..(285): Selenocysteine
  MOD_RES (309)..(309): Selenocysteine
  MOD_RES (347)..(347): Selenocysteine
  MOD_RES (374)..(374): Selenocysteine
  MOD_RES (390)..(390): Selenocysteine
  MOD_RES (401)..(401): Selenocysteine
  MOD_RES (449)..(449): Selenocysteine
  MOD_RES (469)..(469): Selenocysteine
MSYFVDSAGSSPVPYSAPRPAVVRQGPSNXYEDPRMNCGFQSNYHQQRPCYPFWDEMAXQEVPXGLEHCVSDMECADVPLLXPSSKEMMSQALKAXFSGFXKEQQRLGIPKDPRQWXEXHVRDWVMWAVNEFSLKGVDFQKFCMNGAALCALGKDCFLELAPDFVGDILWEHLEILQKEDVKPYQVNGVNPAYPESRYXSDYFISYGIEHAQCVPPSEFSEPSFIXESYQXLHPISSEELLSLKYENDYPSVILRDPLQXDXLQNDYFAIKQEVVXPDNMCMGRXSRGKLGGQDSFESIESYDSCDRLXQSWSSQSSFNSLQRVPSYDSFDSEDYPAALPNHKPKGXFKDYVRDRADLNKDKPVIPAAALAGYXGSGPIQLWQFLLELLXDKSCQSFISWXGDGWEFKLSDPDEVARRWGKRKNKPKMNYEKLSRGLRYYYDKNIIHKXAGKRYVYRFVCDLQSLLGYXPEELHAMLDVKPDADE

SEQ ID NO: 9405 - protein, 168 aa, Homo sapiens
  MOD_RES (22)..(22): Selenocysteine
  MOD_RES (31)..(31): Selenocysteine
  MOD_RES (48)..(48): Selenocysteine
  MOD_RES (54)..(54): Selenocysteine
  MOD_RES (72)..(72): Selenocysteine
  MOD_RES (86)..(86): Selenocysteine
  MOD_RES (119)..(119): Selenocysteine
MNDFGIKNMDQVAPVANSYRGXLKRQPAFDXFDGSLFAVFPSLNEEQXLQEVPXGLDSISHDSANCELPLLXPCSKAVMSQALKAXFSGFKKEQRRLGIPKNPWLWSEQQVCQWLLWAXNEFSLVNVNLQRFGMNGQMLCNLGKERFLELAPDFVGDILWEHLEQMIK

SEQ ID NO: 9406 - protein, 270 aa, Homo sapiens
  MOD_RES (22)..(22): Selenocysteine
  MOD_RES (31)..(31): Selenocysteine
  MOD_RES (48)..(48): Selenocysteine
  MOD_RES (54)..(54): Selenocysteine
  MOD_RES (72)..(72): Selenocysteine
  MOD_RES (86)..(86): Selenocysteine
  MOD_RES (119)..(119): Selenocysteine
  MOD_RES (174)..(174): Selenocysteine
  MOD_RES (185)..(185): Selenocysteine
  MOD_RES (195)..(195): Selenocysteine
  MOD_RES (200)..(200): Selenocysteine
  MOD_RES (209)..(209): Selenocysteine
  MOD_RES (226)..(226): Selenocysteine
  MOD_RES (250)..(250): Selenocysteine
  MOD_RES (267)..(267): Selenocysteine
MNDFGIKNMDQVAPVANSYRGXLKRQPAFDXFDGSLFAVFPSLNEEQXLQEVPXGLDSISHDSANCELPLLXPCSKAVMSQALKAXFSGFKKEQRRLGIPKNPWLWSEQQVCQWLLWAXNEFSLVNVNLQRFGMNGQMLCNLGKERFLELAPDFVGDILWEHLEQMIKENQEKXEDQYEENSHLXSVPHWINSNXLGFGXEQAPYGMQXQNYPKGGLLDSMCPASXPSVLSSEQEFQMFPKSRLSSVSVXYCSVSQDFPGSNLNLLXNNS

SEQ ID NO: 9407 - protein, 469 aa, Homo sapiens
  MOD_RES (22)..(22): Selenocysteine
  MOD_RES (31)..(31): Selenocysteine
  MOD_RES (48)..(48): Selenocysteine
  MOD_RES (54)..(54): Selenocysteine
  MOD_RES (72)..(72): Selenocysteine
  MOD_RES (86)..(86): Selenocysteine
  MOD_RES (119)..(119): Selenocysteine
  MOD_RES (174)..(174): Selenocysteine
  MOD_RES (185)..(185): Selenocysteine
  MOD_RES (195)..(195): Selenocysteine
  MOD_RES (200)..(200): Selenocysteine
  MOD_RES (209)..(209): Selenocysteine
  MOD_RES (226)..(226): Selenocysteine
  MOD_RES (250)..(250): Selenocysteine
  MOD_RES (267)..(267): Selenocysteine
  MOD_RES (272)..(272): Selenocysteine
  MOD_RES (328)..(328): Selenocysteine
  MOD_RES (358)..(358): Selenocysteine
  MOD_RES (385)..(385): Selenocysteine
  MOD_RES (433)..(433): Selenocysteine
  MOD_RES (453)..(453): Selenocysteine
  MOD_RES (467)..(467): Selenocysteine
MNDFGIKNMDQVAPVANSYRGXLKRQPAFDXFDGSLFAVFPSLNEEQXLQEVPXGLDSISHDSANCELPLLXPCSKAVMSQALKAXFSGFKKEQRRLGIPKNPWLWSEQQVCQWLLWAXNEFSLVNVNLQRFGMNGQMLCNLGKERFLELAPDFVGDILWEHLEQMIKENQEKXEDQYEENSHLXSVPHWINSNXLGFGXEQAPYGMQXQNYPKGGLLDSMCPASXPSVLSSEQEFQMFPKSRLSSVSVXYCSVSQDFPGSNLNLLXNNSGXPKDHDSPENGADSFESSDSLLQSWNSQSSLLDVQRVPSFESFEDDCSQSLCLNKPXMSFKDYIQERSDPVEQGKPVIPAAVLAGFXGSGPIQLWQFLLELLSDKSCQSFISWXGDGWEFKLADPDEVARRWGKRKNKPKMNYEKLSRGLRYYYDKNIIHKXSGKRYVYRFVCDLQNLLGFXPEELHAILGVQPDXED

SEQ ID NO: 9408 - protein, 20 aa, Homo sapiens
  MOD_RES (14)..(14): Selenocysteine
MDGFYDQQVPYMVXNSQRGR

SEQ ID NO: 9409 - protein, 95 aa, Homo sapiens
  MOD_RES (14)..(14): Selenocysteine
  MOD_RES (27)..(27): Selenocysteine
  MOD_RES (56)..(56): Selenocysteine
MDGFYDQQVPYMVXNSQRGRNCNEKPXNVRKRKFINRDLAHDSEELFQDLSQLQEXWLAEAQVPDNDEQFVPDYQAESLAFHGLPLKIKKEPHSP

SEQ ID NO: 9410 - protein, 123 aa, Homo sapiens
  MOD_RES (14)..(14): Selenocysteine
  MOD_RES (27)..(27): Selenocysteine
  MOD_RES (56)..(56): Selenocysteine
MDGFYDQQVPYMVXNSQRGRNCNEKPXNVRKRKFINRDLAHDSEELFQDLSQLQEXWLAEAQVPDNDEQFVPDYQAESLAFHGLPLKIKKEPHSPCSEISSACSQEQPFKFSYGEKCLYNVSA

SEQ ID NO: 9411 - protein, 367 aa, Homo sapiens
  MOD_RES (14)..(14): Selenocysteine
  MOD_RES (27)..(27): Selenocysteine
  MOD_RES (56)..(56): Selenocysteine
  MOD_RES (139)..(139): Selenocysteine
  MOD_RES (143)..(143): Selenocysteine
  MOD_RES (156)..(156): Selenocysteine
  MOD_RES (158)..(158): Selenocysteine
  MOD_RES (202)..(202): Selenocysteine
  MOD_RES (240)..(240): Selenocysteine
  MOD_RES (289)..(289): Selenocysteine
  MOD_RES (305)..(305): Selenocysteine
  MOD_RES (332)..(332): Selenocysteine
  MOD_RES (339)..(339): Selenocysteine
  MOD_RES (348)..(348): Selenocysteine
  MOD_RES (352)..(352): Selenocysteine
  MOD_RES (356)..(356): Selenocysteine
MDGFYDQQVPYMVXNSQRGRNCNEKPXNVRKRKFINRDLAHDSEELFQDLSQLQEXWLAEAQVPDNDEQFVPDYQAESLAFHGLPLKIKKEPHSPCSEISSACSQEQPFKFSYGEKCLYNVSAYDQKPQVGMRPSNPPXPSSXPVSPLHHASPNSXHXPKPDRAFPAHLPPSQSIPDSSYPMDHRFRRQLSEPCNSFPPLPXMPREGRPMYQRQMSEPNIPFPPQGFKQEYHDPVYEHNXMVGSAASQSFPPPLMIKQEPRDFAYDSEVPSCHSIYMRQEGFLAHPSRXEGCMFEKGPRQFYDDXCVVPEKFDGFSNVALSVIILRGICLSXDHRRHQXRARNVSGRXHIPXARIXSALAVFGSSSG

SEQ ID NO: 9412 - protein, 454 aa, Homo sapiens
  MOD_RES (14)..(14): Selenocysteine
  MOD_RES (27)..(27): Selenocysteine
  MOD_RES (56)..(56): Selenocysteine
  MOD_RES (139)..(139): Selenocysteine
  MOD_RES (143)..(143): Selenocysteine
  MOD_RES (156)..(156): Selenocysteine
  MOD_RES (158)..(158): Selenocysteine
  MOD_RES (202)..(202): Selenocysteine
  MOD_RES (240)..(240): Selenocysteine
  MOD_RES (282)..(282): Selenocysteine
  MOD_RES (305)..(305): Selenocysteine
  MOD_RES (334)..(334): Selenocysteine
  MOD_RES (413)..(413): Selenocysteine
  MOD_RES (424)..(424): Selenocysteine
MDGFYDQQVPYMVXNSQRGRNCNEKPXNVRKRKFINRDLAHDSEELFQDLSQLQEXWLAEAQVPDNDEQFVPDYQAESLAFHGLPLKIKKEPHSPCSEISSACSQEQPFKFSYGEKCLYNVSAYDQKPQVGMRPSNPPXPSSXPVSPLHHASPNSXHXPKPDRAFPAHLPPSQSIPDSSYPMDHRFRRQLSEPCNSFPPLPXMPREGRPMYQRQMSEPNIPFPPQGFKQEYHDPVYEHNXMVGSAASQSFPPPLMIKQEPRDFAYDSGCMFEKGPRQFYDDXCVVPEKFDGDIKQEPGMYREGPXYQRRGSLQLWQFLVALLDDPSNSHFIAWXGRGMEFKLIEPEEVARRWGIQKNRPAMNYDKLSRSLRYYYEKGIMQKVAGERYVYKFVCDPEALFSMAFPDNQRPLLKXDMERHINEEDXVPLSHFDESMAYMPEGGCCNPHPYNEGYVY

SEQ ID NO: 9413 - protein, 477 aa, Homo sapiens
  MOD_RES (14)..(14): Selenocysteine
  MOD_RES (27)..(27): Selenocysteine
  MOD_RES (56)..(56): Selenocysteine
  MOD_RES (139)..(139): Selenocysteine
  MOD_RES (143)..(143): Selenocysteine
  MOD_RES (156)..(156): Selenocysteine
  MOD_RES (158)..(158): Selenocysteine
  MOD_RES (202)..(202): Selenocysteine
  MOD_RES (240)..(240): Selenocysteine
  MOD_RES (289)..(289): Selenocysteine
  MOD_RES (305)..(305): Selenocysteine
  MOD_RES (328)..(328): Selenocysteine
  MOD_RES (357)..(357): Selenocysteine
  MOD_RES (436)..(436): Selenocysteine
  MOD_RES (447)..(447): Selenocysteine
MDGFYDQQVPYMVXNSQRGRNCNEKPXNVRKRKFINRDLAHDSEELFQDLSQLQEXWLAEAQVPDNDEQFVPDYQAESLAFHGLPLKIKKEPHSPCSEISSACSQEQPFKFSYGEKCLYNVSAYDQKPQVGMRPSNPPXPSSXPVSPLHHASPNSXHXPKPDRAFPAHLPPSQSIPDSSYPMDHRFRRQLSEPCNSFPPLPXMPREGRPMYQRQMSEPNIPFPPQGFKQEYHDPVYEHNXMVGSAASQSFPPPLMIKQEPRDFAYDSEVPSCHSIYMRQEGFLAHPSRXEGCMFEKGPRQFYDDXCVVPEKFDGDIKQEPGMYREGPXYQRRGSLQLWQFLVALLDDPSNSHFIAWXGRGMEFKLIEPEEVARRWGIQKNRPAMNYDKLSRSLRYYYEKGIMQKVAGERYVYKFVCDPEALFSMAFPDNQRPLLKXDMERHINEEDXVPLSHFDESMAYMPEGGCCNPHPYNEGYVY

SEQ ID NO: 9414 - protein, 459 aa, Homo sapiens
  MOD_RES (14)..(14): Selenocysteine
  MOD_RES (27)..(27): Selenocysteine
  MOD_RES (56)..(56): Selenocysteine
  MOD_RES (121)..(121): Selenocysteine
  MOD_RES (125)..(125): Selenocysteine
  MOD_RES (138)..(138): Selenocysteine
  MOD_RES (140)..(140): Selenocysteine
  MOD_RES (184)..(184): Selenocysteine
  MOD_RES (222)..(222): Selenocysteine
  MOD_RES (271)..(271): Selenocysteine
  MOD_RES (287)..(287): Selenocysteine
  MOD_RES (310)..(310): Selenocysteine
  MOD_RES (339)..(339): Selenocysteine
  MOD_RES (418)..(418): Selenocysteine
  MOD_RES (429)..(429): Selenocysteine
MDGFYDQQVPYMVXNSQRGRNCNEKPXNVRKRKFINRDLAHDSEELFQDLSQLQEXWLAEVAFHGLPLKIKKEPHSPCSEISSACSQEQPFKFSYGEKCLYNVSAYDQKPQVGMRPSNPPXPSSXPVSPLHHASPNSXHXPKPDRAFPAHLPPSQSIPDSSYPMDHRFRRQLSEPCNSFPPLPXMPREGRPMYQRQMSEPNIPFPPQGFKQEYHDPVYEHNXMVGSAASQSFPPPLMIKQEPRDFAYDSEVPSCHSIYMRQEGFLAHPSRXEGCMFEKGPRQFYDDXCVVPEKFDGDIKQEPGMYREGPXYQRRGSLQLWQFLVALLDDPSNSHFIAWXGRGMEFKLIEPEEVARRWGIQKNRPAMNYDKLSRSLRYYYEKGIMQKVAGERYVYKFVCDPEALFSMAFPDNQRPLLKXDMERHINEEDXVPLSHFDESMAYMPEGGCCNPHPYNEGYVY

SEQ ID NO: 9415 - protein, 173 aa, Homo sapiens
  MOD_RES (19)..(19): Selenocysteine
  MOD_RES (99)..(99): Selenocysteine
  MOD_RES (137)..(137): Selenocysteine
MLQDLSASVFFPPCSQHRXLAQVPDNDEQFVPDYQAESLAFHGLPLKIKKEPHSPCSEISSACSQEQPFKFSYGEKCLYNVRFRRQLSEPCNSFPPLPXMPREGRPMYQRQMSEPNIPFPPQGFKQEYHDPVYEHNXMVGSAASQSFPPPLMIKQEPRDFAYDSEVPSCHSIY

SEQ ID NO: 9416 - protein, 374 aa, Homo sapiens
  MOD_RES (19)..(19): Selenocysteine
  MOD_RES (99)..(99): Selenocysteine
  MOD_RES (137)..(137): Selenocysteine
  MOD_RES (186)..(186): Selenocysteine
  MOD_RES (202)..(202): Selenocysteine
  MOD_RES (225)..(225): Selenocysteine
  MOD_RES (254)..(254): Selenocysteine
  MOD_RES (333)..(333): Selenocysteine
  MOD_RES (344)..(344): Selenocysteine
MLQDLSASVFFPPCSQHRXLAQVPDNDEQFVPDYQAESLAFHGLPLKIKKEPHSPCSEISSACSQEQPFKFSYGEKCLYNVRFRRQLSEPCNSFPPLPXMPREGRPMYQRQMSEPNIPFPPQGFKQEYHDPVYEHNXMVGSAASQSFPPPLMIKQEPRDFAYDSEVPSCHSIYMRQEGFLAHPSRXEGCMFEKGPRQFYDDXCVVPEKFDGDIKQEPGMYREGPXYQRRGSLQLWQFLVALLDDPSNSHFIAWXGRGMEFKLIEPEEVARRWGIQKNRPAMNYDKLSRSLRYYYEKGIMQKVAGERYVYKFVCDPEALFSMAFPDNQRPLLKXDMERHINEEDXVPLSHFDESMAYMPEGGCCNPHPYNEGYVY

SEQ ID NO: 9417 - protein, 437 aa, Homo sapiens
  MOD_RES (19)..(19): Selenocysteine
  MOD_RES (99)..(99): Selenocysteine
  MOD_RES (103)..(103): Selenocysteine
  MOD_RES (116)..(116): Selenocysteine
  MOD_RES (118)..(118): Selenocysteine
  MOD_RES (162)..(162): Selenocysteine
  MOD_RES (200)..(200): Selenocysteine
  MOD_RES (249)..(249): Selenocysteine
  MOD_RES (265)..(265): Selenocysteine
  MOD_RES (288)..(288): Selenocysteine
  MOD_RES (317)..(317): Selenocysteine
  MOD_RES (396)..(396): Selenocysteine
  MOD_RES (407)..(407): Selenocysteine
MLQDLSASVFFPPCSQHRXLAQVPDNDEQFVPDYQAESLAFHGLPLKIKKEPHSPCSEISSACSQEQPFKFSYGEKCLYNVSAYDQKPQVGMRPSNPPXPSSXPVSPLHHASPNSXHXPKPDRAFPAHLPPSQSIPDSSYPMDHRFRRQLSEPCNSFPPLPXMPREGRPMYQRQMSEPNIPFPPQGFKQEYHDPVYEHNXMVGSAASQSFPPPLMIKQEPRDFAYDSEVPSCHSIYMRQEGFLAHPSRXEGCMFEKGPRQFYDDXCVVPEKFDGDIKQEPGMYREGPXYQRRGSLQLWQFLVALLDDPSNSHFIAWXGRGMEFKLIEPEEVARRWGIQKNRPAMNYDKLSRSLRYYYEKGIMQKVAGERYVYKFVCDPEALFSMAFPDNQRPLLKXDMERHINEEDXVPLSHFDESMAYMPEGGCCNPHPYNEGYVY

SEQ ID NO: 9418 - protein, 288 aa, Homo sapiens
  MOD_RES (19)..(19): Selenocysteine
  MOD_RES (81)..(81): Selenocysteine
  MOD_RES (85)..(85): Selenocysteine
  MOD_RES (98)..(98): Selenocysteine
  MOD_RES (100)..(100): Selenocysteine
  MOD_RES (144)..(144): Selenocysteine
  MOD_RES (182)..(182): Selenocysteine
  MOD_RES (231)..(231): Selenocysteine
  MOD_RES (247)..(247): Selenocysteine
  MOD_RES (270)..(270): Selenocysteine
MLQDLSASVFFPPCSQHRXLVAFHGLPLKIKKEPHSPCSEISSACSQEQPFKFSYGEKCLYNVSAYDQKPQVGMRPSNPPXPSSXPVSPLHHASPNSXHXPKPDRAFPAHLPPSQSIPDSSYPMDHRFRRQLSEPCNSFPPLPXMPREGRPMYQRQMSEPNIPFPPQGFKQEYHDPVYEHNXMVGSAASQSFPPPLMIKQEPRDFAYDSEVPSCHSIYMRQEGFLAHPSRXEGCMFEKGPRQFYDDXCVVPEKFDGDIKQEPGMYREGPXYQRRGSLQLWQFLVALLD

SEQ ID NO: 9419 - protein, 419 aa, Homo sapiens
  MOD_RES (19)..(19): Selenocysteine
  MOD_RES (81)..(81): Selenocysteine
  MOD_RES (85)..(85): Selenocysteine
  MOD_RES (98)..(98): Selenocysteine
  MOD_RES (100)..(100): Selenocysteine
  MOD_RES (144)..(144): Selenocysteine
  MOD_RES (182)..(182): Selenocysteine
  MOD_RES (231)..(231): Selenocysteine
  MOD_RES (247)..(247): Selenocysteine
  MOD_RES (270)..(270): Selenocysteine
  MOD_RES (299)..(299): Selenocysteine
  MOD_RES (378)..(378): Selenocysteine
  MOD_RES (389)..(389): Selenocysteine
MLQDLSASVFFPPCSQHRXLVAFHGLPLKIKKEPHSPCSEISSACSQEQPFKFSYGEKCLYNVSAYDQKPQVGMRPSNPPXPSSXPVSPLHHASPNSXHXPKPDRAFPAHLPPSQSIPDSSYPMDHRFRRQLSEPCNSFPPLPXMPREGRPMYQRQMSEPNIPFPPQGFKQEYHDPVYEHNXMVGSAASQSFPPPLMIKQEPRDFAYDSEVPSCHSIYMRQEGFLAHPSRXEGCMFEKGPRQFYDDXCVVPEKFDGDIKQEPGMYREGPXYQRRGSLQLWQFLVALLDDPSNSHFIAWXGRGMEFKLIEPEEVARRWGIQKNRPAMNYDKLSRSLRYYYEKGIMQKVAGERYVYKFVCDPEALFSMAFPDNQRPLLKXDMERHINEEDXVPLSHFDESMAYMPEGGCCNPHPYNEGYVY

SEQ ID NO: 9420 - protein, 491 aa, Homo sapiens
  MOD_RES (41)..(41): Selenocysteine
  MOD_RES (70)..(70): Selenocysteine
  MOD_RES (153)..(153): Selenocysteine
  MOD_RES (157)..(157): Selenocysteine
  MOD_RES (170)..(170): Selenocysteine
  MOD_RES (172)..(172): Selenocysteine
  MOD_RES (216)..(216): Selenocysteine
  MOD_RES (254)..(254): Selenocysteine
  MOD_RES (303)..(303): Selenocysteine
  MOD_RES (319)..(319): Selenocysteine
  MOD_RES (342)..(342): Selenocysteine
  MOD_RES (371)..(371): Selenocysteine
  MOD_RES (450)..(450): Selenocysteine
  MOD_RES (461)..(461): Selenocysteine
MSGRGDGGQQQLLHSKFLAGFVCHIEKNESQRGRNCNEKPXNVRKRKFINRDLAHDSEELFQDLSQLQEXWLAEAQVPDNDEQFVPDYQAESLAFHGLPLKIKKEPHSPCSEISSACSQEQPFKFSYGEKCLYNVSAYDQKPQVGMRPSNPPXPSSXPVSPLHHASPNSXHXPKPDRAFPAHLPPSQSIPDSSYPMDHRFRRQLSEPCNSFPPLPXMPREGRPMYQRQMSEPNIPFPPQGFKQEYHDPVYEHNXMVGSAASQSFPPPLMIKQEPRDFAYDSEVPSCHSIYMRQEGFLAHPSRXEGCMFEKGPRQFYDDXCVVPEKFDGDIKQEPGMYREGPXYQRRGSLQLWQFLVALLDDPSNSHFIAWXGRGMEFKLIEPEEVARRWGIQKNRPAMNYDKLSRSLRYYYEKGIMQKVAGERYVYKFVCDPEALFSMAFPDNQRPLLKXDMERHINEEDXVPLSHFDESMAYMPEGGCCNPHPYNEGYVY

SEQ ID NO: 9421 - protein, 249 aa, Homo sapiens
  MOD_RES (4)..(4): Selenocysteine
  MOD_RES (15)..(15): Selenocysteine
  MOD_RES (47)..(47): Selenocysteine
  MOD_RES (59)..(59): Selenocysteine
  MOD_RES (71)..(71): Selenocysteine
  MOD_RES (83)..(83): Selenocysteine
  MOD_RES (86)..(86): Selenocysteine
  MOD_RES (98)..(99): Selenocysteine
  MOD_RES (110)..(111): Selenocysteine
  MOD_RES (122)..(122): Selenocysteine
  MOD_RES (142)..(142): Selenocysteine
  MOD_RES (170)..(170): Selenocysteine
  MOD_RES (224)..(224): Selenocysteine
  MOD_RES (248)..(248): Selenocysteine
MACXAWDSWSGASQXLGPAPLGPGPIPAAGSEGAAGQNCVPVAGEAXSWSRAQAAGSNXSWDCSVGPDGDXYWGSGLGGEPRXDCXISWGGPAGPDCXXSWNPGLHAGGXXSLKRYQSSALXVCSEPSPQSDRASLARCPKXNHRGPIQLWQFLLELLHDGARSSCIRWXGNSREFQLCDPKEVARLWGERKRKPGMNYEKLSRGLRYYYRRDIVRKSGGRKYXYRFGGRVPSLAYPDCAGGGRGAEXQ

SEQ ID NO: 9422 - protein, 155 aa, Homo sapiens
  MOD_RES (41)..(41): Selenocysteine
  MOD_RES (43)..(43): Selenocysteine
  MOD_RES (45)..(45): Selenocysteine
  MOD_RES (48)..(48): Selenocysteine
  MOD_RES (76)..(76): Selenocysteine
  MOD_RES (130)..(130): Selenocysteine
  MOD_RES (154)..(154): Selenocysteine
MDLWNWDEASPQEVPPGNKLAGLEGAKLGFCFPDLALQGDXPXAXAEXCWKGPIQLWQFLLELLHDGARSSCIRWXGNSREFQLCDPKEVARLWGERKRKPGMNYEKLSRGLRYYYRRDIVRKSGGRKYXYRFGGRVPSLAYPDCAGGGRGAEXQ

SEQ ID NO: 9423 - protein, 184 aa, Homo sapiens
  MOD_RES (41)..(41): Selenocysteine
  MOD_RES (43)..(43): Selenocysteine
  MOD_RES (45)..(45): Selenocysteine
  MOD_RES (48)..(48): Selenocysteine
  MOD_RES (53)..(53): Selenocysteine
  MOD_RES (92)..(92): Selenocysteine
  MOD_RES (97)..(97): Selenocysteine
  MOD_RES (108)..(108): Selenocysteine
  MOD_RES (169)..(169): Selenocysteine
MDLWNWDEASPQEVPPGNKLAGLEGAKLGFCFPDLALQGDXPXAXAEXCWKGXSSSLASFPQLDWGSALLHPEVPWGAEPDSQALPWSGDWXDMACXAWDSWSGASQXLGPAPLGPGPIPAAGSEGAAGQNCSPPAPGLYHLLEPGAACGWHHLFEAVPELSSHRLLRXEPAVGPCQFGSMPQN

SEQ ID NO: 9424 - protein, 342 aa, Homo sapiens
  MOD_RES (41)..(41): Selenocysteine
  MOD_RES (43)..(43): Selenocysteine
  MOD_RES (45)..(45): Selenocysteine
  MOD_RES (48)..(48): Selenocysteine
  MOD_RES (53)..(53): Selenocysteine
  MOD_RES (92)..(92): Selenocysteine
  MOD_RES (97)..(97): Selenocysteine
  MOD_RES (108)..(108): Selenocysteine
  MOD_RES (140)..(140): Selenocysteine
  MOD_RES (152)..(152): Selenocysteine
  MOD_RES (164)..(164): Selenocysteine
  MOD_RES (176)..(176): Selenocysteine
  MOD_RES (179)..(179): Selenocysteine
  MOD_RES (191)..(192): Selenocysteine
  MOD_RES (203)..(204): Selenocysteine
  MOD_RES (215)..(215): Selenocysteine
  MOD_RES (235)..(235): Selenocysteine
  MOD_RES (263)..(263): Selenocysteine
  MOD_RES (317)..(317): Selenocysteine
  MOD_RES (341)..(341): Selenocysteine
MDLWNWDEASPQEVPPGNKLAGLEGAKLGFCFPDLALQGDXPXAXAEXCWKGXSSSLASFPQLDWGSALLHPEVPWGAEPDSQALPWSGDWXDMACXAWDSWSGASQXLGPAPLGPGPIPAAGSEGAAGQNCVPVAGEAXSWSRAQAAGSNXSWDCSVGPDGDXYWGSGLGGEPRXDCXISWGGPAGPDCXXSWNPGLHAGGXXSLKRYQSSALXVCSEPSPQSDRASLARCPKXNHRGPIQLWQFLLELLHDGARSSCIRWXGNSREFQLCDPKEVARLWGERKRKPGMNYEKLSRGLRYYYRRDIVRKSGGRKYXYRFGGRVPSLAYPDCAGGGRGAEXQ

SEQ ID NO: 9425 - protein, 184 aa, Homo sapiens
  MOD_RES (41)..(41): Selenocysteine
  MOD_RES (43)..(43): Selenocysteine
  MOD_RES (45)..(45): Selenocysteine
  MOD_RES (48)..(48): Selenocysteine
  MOD_RES (53)..(53): Selenocysteine
  MOD_RES (92)..(92): Selenocysteine
  MOD_RES (97)..(97): Selenocysteine
  MOD_RES (108)..(108): Selenocysteine
  MOD_RES (169)..(169): Selenocysteine
MDLWNWDEASPQEVPPGNKLAGLEGAKLGFCFPDLALQGDXPXAXAEXCWKGXSSSLASFPQLDWGSALLHPEVPWGAEPDSQALPWSGDWXDMACXAWDSWSGASQXLGPAPLGPGPIPAAGSEGAAGQNWRARGPGLYHLLEPGAACGWHHLFEAVPELSSHRLLRXEPAVGPCQFGSMPQN

SEQ ID NO: 9426 - protein, 370 aa, Homo sapiens
  MOD_RES (69)..(69): Selenocysteine
  MOD_RES (71)..(71): Selenocysteine
  MOD_RES (73)..(73): Selenocysteine
  MOD_RES (76)..(76): Selenocysteine
  MOD_RES (81)..(81): Selenocysteine
  MOD_RES (120)..(120): Selenocysteine
  MOD_RES (125)..(125): Selenocysteine
  MOD_RES (136)..(136): Selenocysteine
  MOD_RES (168)..(168): Selenocysteine
  MOD_RES (180)..(180): Selenocysteine
  MOD_RES (192)..(192): Selenocysteine
  MOD_RES (204)..(204): Selenocysteine
  MOD_RES (207)..(207): Selenocysteine
  MOD_RES (219)..(220): Selenocysteine
  MOD_RES (231)..(232): Selenocysteine
  MOD_RES (243)..(243): Selenocysteine
  MOD_RES (263)..(263): Selenocysteine
  MOD_RES (291)..(291): Selenocysteine
  MOD_RES (345)..(345): Selenocysteine
  MOD_RES (369)..(369): Selenocysteine
MDLWNWDEASPQEVPPGNKLAGLGRLPRLPQRVWGGCPGGASADPNPLSPAEGAKLGFCFPDLALQGDXPXAXAEXCWKGXSSSLASFPQLDWGSALLHPEVPWGAEPDSQALPWSGDWXDMACXAWDSWSGASQXLGPAPLGPGPIPAAGSEGAAGQNCVPVAGEAXSWSRAQAAGSNXSWDCSVGPDGDXYWGSGLGGEPRXDCXISWGGPAGPDCXXSWNPGLHAGGXXSLKRYQSSALXVCSEPSPQSDRASLARCPKXNHRGPIQLWQFLLELLHDGARSSCIRWXGNSREFQLCDPKEVARLWGERKRKPGMNYEKLSRGLRYYYRRDIVRKSGGRKYXYRFGGRVPSLAYPDCAGGGRGAEXQ

SEQ ID NO: 9427 - protein, 95 aa, Homo sapiens
  MOD_RES (6)..(6): Selenocysteine
  MOD_RES (26)..(26): Selenocysteine
  MOD_RES (54)..(54): Selenocysteine
  MOD_RES (94)..(94): Selenocysteine
QSSALXVCSEPSPQSDRASLARCPKXNHRGPIQLWQFLLELLHDGARSSCIRWXGNSREFQLCDPKEVGQLPCPAKSAPSLLVQFSSAQGLGSXA

SEQ ID NO: 9428 - protein, 143 aa, Homo sapiens
  MOD_RES (26)..(26): Selenocysteine
  MOD_RES (106)..(106): Selenocysteine
  MOD_RES (112)..(112): Selenocysteine
  MOD_RES (138)..(138): Selenocysteine
MKAGCSIVEKPEGGGGYQFPDWAYKXESSPGSRQIQLWHFILELLQKEEFRHVIAWQQGEYGEFVIKDPDEVARLWGRRKCKPQMNYDKLSRALRYYYNKRILHKXKGKRFXYKFNFNKLVMPNYPFINIRSSGKIQXLLVGN

SEQ ID NO: 9429 - protein, 512 aa, Homo sapiens
  MOD_RES (26)..(26): Selenocysteine
  MOD_RES (106)..(106): Selenocysteine
  MOD_RES (112)..(112): Selenocysteine
  MOD_RES (145)..(145): Selenocysteine
  MOD_RES (157)..(157): Selenocysteine
  MOD_RES (161)..(161): Selenocysteine
  MOD_RES (175)..(175): Selenocysteine
  MOD_RES (185)..(185): Selenocysteine
  MOD_RES (189)..(189): Selenocysteine
  MOD_RES (270)..(270): Selenocysteine
  MOD_RES (272)..(272): Selenocysteine
  MOD_RES (286)..(286): Selenocysteine
  MOD_RES (318)..(318): Selenocysteine
  MOD_RES (340)..(340): Selenocysteine
  MOD_RES (369)..(370): Selenocysteine
  MOD_RES (372)..(372): Selenocysteine
  MOD_RES (404)..(404): Selenocysteine
  MOD_RES (409)..(409): Selenocysteine
  MOD_RES (414)..(414): Selenocysteine
  MOD_RES (421)..(421): Selenocysteine
  MOD_RES (439)..(439): Selenocysteine
  MOD_RES (448)..(448): Selenocysteine
  MOD_RES (507)..(507): Selenocysteine
MKAGCSIVEKPEGGGGYQFPDWAYKXESSPGSRQIQLWHFILELLQKEEFRHVIAWQQGEYGEFVIKDPDEVARLWGRRKCKPQMNYDKLSRALRYYYNKRILHKXKGKRFXYKFNFNKLVMPNYPFINIRSSGVVPQSAPPVPXASSRFHFPPLDXHSPXNDVQPGRFSASSLXASGQESSNGXDRKXELSELEDGSAADWRRGVDPVSSRNAIGGGGIGHQKRKPDIMLPLFARPGMYPDPHSPFAVSPIPGRGGVLNVPISPALSLXPXIFSYSPSPGLSPFXSSSCFSFNPEEMKHYLHSQACSVFNYHLSPRXFPRYPGLMVPPLQCQMHPEESXQFSIKLQPPPVGRKNRERVESSEESAPVXXPXMASIPPRIKVEPASEKDPESLRQSAREKEEHXQEEGXVPSRXIEEEKGXIFARPAAPPIWPSVPISXPSGEPLEVXEDSEDRPGKEPSAPEKKEDALMPPKLRLKRRWNDDPEARELSKSGKFLWNGSGPQGLAXAAADA

SEQ ID NO: 9430 - protein, 361 aa, Homo sapiens
  MOD_RES (110)..(110): Selenocysteine
  MOD_RES (116)..(116): Selenocysteine
  MOD_RES (179)..(179): Selenocysteine
  MOD_RES (183)..(183): Selenocysteine
  MOD_RES (190)..(190): Selenocysteine
  MOD_RES (233)..(233): Selenocysteine
  MOD_RES (245)..(245): Selenocysteine
  MOD_RES (334)..(334): Selenocysteine
  MOD_RES (339)..(339): Selenocysteine
  MOD_RES (345)..(345): Selenocysteine
MHCSCLAEGIPANPGNWISGLAFPDWAYKAESSPGSRQIQLWHFILELLQKEEFRHVIAWQQGEYGEFVIKDPDEVARLWGRRKCKPQMNYDKLSRALRYYYNKRILHKXKGKRFXYKFNFSKLIVVNYPLWEVRAPPSPHLLLGAPALCRPALVPVGVQSELLHSMLFAHQAMVEQLXGQQXPRGPPEXSGDKKGSSSSVYRLGSAPGPCRLGLCCHLGSVQGELPGVASFXPPLPPPLPSNWXCLSGPFLPPLPSEQQLPGAFKPDILLPGPRSLPGAWHFPGLPLLAGLGQGAGERLWLLSLRPEGLEVKPAPMMEAKGGLDPREVFCPEXRRLKXGEESLXSPNLENLKAVWPLDPP

SEQ ID NO: 9431 - protein, 28 aa, Homo sapiens
  MOD_RES (24)..(24): Selenocysteine
MDPGSLPPLDSEDLFQDLSHFQEXWLAE

SEQ ID NO: 9432 - protein, 445 aa, Homo sapiens
  MOD_RES (24)..(24): Selenocysteine
  MOD_RES (53)..(54): Selenocysteine
  MOD_RES (65)..(65): Selenocysteine
  MOD_RES (129)..(129): Selenocysteine
  MOD_RES (157)..(157): Selenocysteine
  MOD_RES (225)..(225): Selenocysteine
  MOD_RES (234)..(234): Selenocysteine
  MOD_RES (243)..(243): Selenocysteine
  MOD_RES (316)..(316): Selenocysteine
  MOD_RES (324)..(324): Selenocysteine
  MOD_RES (414)..(414): Selenocysteine
MDPGSLPPLDSEDLFQDLSHFQEXWLAEAQVPDSDEQFVPDFHSENLAFHSPXXRIKKEPQSPRXDPALSCSRKPPLPYHHGEQCLYSSAYDPPRQIAIKSPAPGALGQSPLQPFPRAEQRNFLRSSGXSQPHPGHGYLGEHSSVFQQPLDICHSFXSQGGGREPLPAPYQHQLSEPCPPYPQQSFKQEYHDPLYEQAGQPAVDQGGVNGHRYPGAGVVIKQEQXDFAYDSDVXGCASMYLHXEGFSGPSPGDGAMGYGYEKPLRPFPDDVCVVPEKFEGDIKQEGVGAFREGPPYQRRGALQLWQFLVALLDDPXNAHFIAWXGRGMEFKLIEPEEVARLWGIQKNRPAMNYDKLSRSLRYYYEKGIMQKVAGERYVYKFVCEPEALFSLAFPDNQRPALKAEFDRPVSEEDXVPLSHLDESPAYLPELAGPAQPFGPKGGYSY

SEQ ID NO: 9433 - protein, 484 aa, Homo sapiens
  MOD_RES (17)..(17): Selenocysteine
  MOD_RES (63)..(63): Selenocysteine
  MOD_RES (92)..(93): Selenocysteine
  MOD_RES (104)..(104): Selenocysteine
  MOD_RES (168)..(168): Selenocysteine
  MOD_RES (196)..(196): Selenocysteine
  MOD_RES (264)..(264): Selenocysteine
  MOD_RES (273)..(273): Selenocysteine
  MOD_RES (282)..(282): Selenocysteine
  MOD_RES (355)..(355): Selenocysteine
  MOD_RES (363)..(363): Selenocysteine
  MOD_RES (453)..(453): Selenocysteine
MERRMKAGYLDQQVPYXFSSKSPGNGSLREALIGPLGKLMDPGSLPPLDSEDLFQDLSHFQEXWLAEAQVPDSDEQFVPDFHSENLAFHSPXXRIKKEPQSPRXDPALSCSRKPPLPYHHGEQCLYSSAYDPPRQIAIKSPAPGALGQSPLQPFPRAEQRNFLRSSGXSQPHPGHGYLGEHSSVFQQPLDICHSFXSQGGGREPLPAPYQHQLSEPCPPYPQQSFKQEYHDPLYEQAGQPAVDQGGVNGHRYPGAGVVIKQEQXDFAYDSDVXGCASMYLHXEGFSGPSPGDGAMGYGYEKPLRPFPDDVCVVPEKFEGDIKQEGVGAFREGPPYQRRGALQLWQFLVALLDDPXNAHFIAWXGRGMEFKLIEPEEVARLWGIQKNRPAMNYDKLSRSLRYYYEKGIMQKVAGERYVYKFVCEPEALFSLAFPDNQRPALKAEFDRPVSEEDXVPLSHLDESPAYLPELAGPAQPFGPKGGYSY

SEQ ID NO: 9434 - protein, 430 aa, Homo sapiens
  MOD_RES (17)..(17): Selenocysteine
  MOD_RES (63)..(63): Selenocysteine
  MOD_RES (92)..(93): Selenocysteine
  MOD_RES (104)..(104): Selenocysteine
  MOD_RES (142)..(142): Selenocysteine
  MOD_RES (210)..(210): Selenocysteine
  MOD_RES (219)..(219): Selenocysteine
  MOD_RES (228)..(228): Selenocysteine
  MOD_RES (301)..(301): Selenocysteine
  MOD_RES (309)..(309): Selenocysteine
  MOD_RES (399)..(399): Selenocysteine
MERRMKAGYLDQQVPYXFSSKSPGNGSLREALIGPLGKLMDPGSLPPLDSEDLFQDLSHFQEXWLAEAQVPDSDEQFVPDFHSENLAFHSPXXRIKKEPQSPRXDPALSCSRKPPLPYHHGEQCLYSSSVFQQPLDICHSFXSQGGGREPLPAPYQHQLSEPCPPYPQQSFKQEYHDPLYEQAGQPAVDQGGVNGHRYPGAGVVIKQEQXDFAYDSDVXGCASMYLHXEGFSGPSPGDGAMGYGYEKPLRPFPDDVCVVPEKFEGDIKQEGVGAFREGPPYQRRGALQLWQFLVALLDDPXNAHFIAWXGRGMEFKLIEPEEVARLWGIQKNRPAMNYDKLSRSLRYYYEKGIMQKVAGERYVYKFVCEPEALFSLAFPDNQRPALKAEFDRPVSEEDXVPLSHLDESPAYLPELAGPAQPFGPKGGYSY

SEQ ID NO: 9435 - protein, 207 aa, Homo sapiens
  MOD_RES (5)..(5): Selenocysteine
  MOD_RES (78)..(78): Selenocysteine
  MOD_RES (86)..(86): Selenocysteine
  MOD_RES (176)..(176): Selenocysteine
MYLHXEGFSGPSPGDGAMGYGYEKPLRPFPDDVCVVPEKFEGDIKQEGVGAFREGPPYQRRGALQLWQFLVALLDDPXNAHFIAWXGRGMEFKLIEPEEVARLWGIQKNRPAMNYDKLSRSLRYYYEKGIMQKVAGERYVYKFVCEPEALFSLAFPDNQRPALKAEFDRPVSEEDXVPLSHLDESPAYLPELAGPAQPFGPKGGYSY

SEQ ID NO: 9436 - protein, 132 aa, Homo sapiens
  MOD_RES (37)..(37): Selenocysteine
  MOD_RES (86)..(86): Selenocysteine
MDGFYDQQVPFMVPGKSRSEECRGRPVIDRKRKFLDXDLAHDSEELFQDLSQLQEAWLAEAQVPDDEQFVPDFQSDNLVLHAPPPXKIKRELHSPSSELSSCSHEQALGANYGEKCLYNYCAYDRKPPSGFK

SEQ ID NO: 9437 - protein, 140 aa, Homo sapiens
  MOD_RES (37)..(37): Selenocysteine
  MOD_RES (86)..(86): Selenocysteine
  MOD_RES (135)..(135): Selenocysteine
  MOD_RES (138)..(139): Selenocysteine
MDGFYDQQVPFMVPGKSRSEECRGRPVIDRKRKFLDXDLAHDSEELFQDLSQLQEAWLAEAQVPDDEQFVPDFQSDNLVLHAPPPXKIKRELHSPSSELSSCSHEQALGANYGEKCLYNYCAYDRKPPSGFKPLXPPXXP

SEQ ID NO: 9438 - protein, 150 aa, Homo sapiens
  MOD_RES (37)..(37): Selenocysteine
  MOD_RES (86)..(86): Selenocysteine
  MOD_RES (135)..(135): Selenocysteine
  MOD_RES (138)..(139): Selenocysteine
  MOD_RES (144)..(144): Selenocysteine
MDGFYDQQVPFMVPGKSRSEECRGRPVIDRKRKFLDXDLAHDSEELFQDLSQLQEAWLAEAQVPDDEQFVPDFQSDNLVLHAPPPXKIKRELHSPSSELSSCSHEQALGANYGEKCLYNYCAYDRKPPSGFKPLXPPXXPLSPXHQNPLF

SEQ ID NO: 9439 - protein, 510 aa, Homo sapiens
  MOD_RES (37)..(37): Selenocysteine
  MOD_RES (86)..(86): Selenocysteine
  MOD_RES (135)..(135): Selenocysteine
  MOD_RES (138)..(139): Selenocysteine
  MOD_RES (144)..(144): Selenocysteine
  MOD_RES (156)..(156): Selenocysteine
  MOD_RES (159)..(159): Selenocysteine
  MOD_RES (190)..(190): Selenocysteine
  MOD_RES (338)..(338): Selenocysteine
  MOD_RES (354)..(354): Selenocysteine
  MOD_RES (376)..(376): Selenocysteine
  MOD_RES (390)..(390): Selenocysteine
  MOD_RES (480)..(480): Selenocysteine
  MOD_RES (484)..(484): Selenocysteine
MDGFYDQQVPFMVPGKSRSEECRGRPVIDRKRKFLDXDLAHDSEELFQDLSQLQEAWLAEAQVPDDEQFVPDFQSDNLVLHAPPPXKIKRELHSPSSELSSCSHEQALGANYGEKCLYNYCAYDRKPPSGFKPLXPPXXPLSPXHQNPLFPPPQAXLPXSGHAPAAGPVQGVGPAPAPHSLPEPGPQQQXFAVPRPPHQPLQMPKMMPENQYPSEQRFQRQLSEPCHPFPPQPGVPGDNRPSYHRQMSEPIVPAAPPPPQGFKQEYHDPLYEHGVPGMPGPPAHGFQSPMGIKQEPRDYCVDSEVPNCQSSYMRGGYFSSSHEGFSYEKDPRLYFDDXCVVPERLEGKVKQEPXMYREGPPYQRRGSLQLWQFLVXLLDDPANAHFIAWXGRGMEFKLIEPEEVARRWGIQKNRPAMNYDKLSRSLRYYYEKGIMQKVAGERYVYKFVCDPDALFSMAFPDNQRPFLKAESECHLSEEDXLPLXHFEDSPAYLLDMDRCSSLPYAEGFAY

SEQ ID NO: 9440 - protein, 132 aa, Homo sapiens
  MOD_RES (37)..(37): Selenocysteine
  MOD_RES (121)..(121): Selenocysteine
  MOD_RES (127)..(127): Selenocysteine
MDGFYDQQVPFMVPGKSRSEECRGRPVIDRKRKFLDXDLAHDSEELFQDLSQLQEAWLAEAQVPDDEQFVPDFQSDNPFLFKLPQEFMIPFQFQFVAILYSPGSLSSFSKSAVQSGASCPXSNQDQXGAAQP

SEQ ID NO: 9441 - protein, 89 aa, Homo sapiens
  MOD_RES (1)..(1): Any amino acid
XVPAAPPPPQGFKQEYHDPLYEHGVPGMPGPPAHGFQSPMGIKQEPRDYCVDSEVPNCQSSYMRGGYFSSSHEGCSALGHPEEPASHEL

SEQ ID NO: 9442 - protein, 452 aa, Homo sapiens
  MOD_RES (4)..(4): Selenocysteine
  MOD_RES (18)..(18): Selenocysteine
  MOD_RES (31)..(31): Selenocysteine
  MOD_RES (86)..(86): Selenocysteine
  MOD_RES (98)..(98): Selenocysteine
  MOD_RES (142)..(142): Selenocysteine
  MOD_RES (161)..(161): Selenocysteine
  MOD_RES (175)..(175): Selenocysteine
  MOD_RES (187)..(188): Selenocysteine
  MOD_RES (263)..(263): Selenocysteine
  MOD_RES (387)..(387): Selenocysteine
  MOD_RES (390)..(390): Selenocysteine
  MOD_RES (422)..(422): Selenocysteine
  MOD_RES (431)..(431): Selenocysteine
MSEXPAQCSIKQERISYXPPESPVPSYASSXPLHVPVPRALRMEEDSIRLPAHLRLQPIYWSRDDVAQWLKWAENEFSLRPIDSNXFEMNGKALLLLXKEDFRYRSPHSGDVLYELLQHILKQRKPRILFSPFFHPGNSIHXQPEVILHQNHEEDNCVQRXPRPSVDNVHHNPPXIELLHRSRSPIXXNHRPSPDPEQRPLRSPLDNMIRRLSPAERAQGPRPHQENNHQESYPLSVSPMENNHCPASSESHPKPSSPRQESXRVIQLMPSPIMHPLILNPRHSVDFKQSRLSEDGLHREGKPINLSHREDLAYMNHIMVSVSPPEEHAMPIGRIADCRLLWDYVYQLLSDSRYENFIRWEDKESKIFRIVDPNGLARLWGNHKNRXNMXYEKMSRALRHYYKLNIIRKEPGQRLLFRFMKXPDEIMSGRXDRLEHLESQELDEQIYQEDEC

SEQ ID NO: 9443 - protein, 88 aa, Homo sapiens
  MOD_RES (3)..(3): Selenocysteine
  MOD_RES (58)..(58): Selenocysteine
  MOD_RES (70)..(70): Selenocysteine
  MOD_RES (88)..(88): Selenocysteine
SSXPLHVPVPRALRMEEDSIRLPAHLRLQPIYWSRDDVAQWLKWAENEFSLRPIDSNXFEMNGKALLLLXKEDFRYRSPHSDLDSDVX

SEQ ID NO: 9444 - protein, 50 aa, Homo sapiens
  MOD_RES (1)..(1): Any amino acid
  MOD_RES (3)..(3): Selenocysteine
XMXYEKMSRALRHYYKLNIIRKEPGQRLLFRFLFFLPRGSGLFLLLLGLG

SEQ ID NO: 9445 - protein, 190 aa, Homo sapiens
  MOD_RES (3)..(3): Selenocysteine
  MOD_RES (17)..(17): Selenocysteine
  MOD_RES (32)..(32): Selenocysteine
  MOD_RES (51)..(51): Selenocysteine
  MOD_RES (86)..(86): Selenocysteine
  MOD_RES (124)..(124): Selenocysteine
  MOD_RES (156)..(156): Selenocysteine
MDXRRGHLLQPPDPGLXSNFGHLDDPGLARWXPGKEESLNLCHCAELGCRXQGVCSFPAMPQAPIDGRIADCRLLWDYVYQLLLDXRYEPYIKWEDKDAKIFRVVDPNGLARLWGNHKNRVNMXYEKMSRALRHYYKLNIIKKEPGQKLLFRFLKXPGKMVQDKHSHLEPLESQEQDRIEFKDKRPEISP

SEQ ID NO: 9446 - protein, 282 aa, Homo sapiens
  MOD_RES (12)..(12): Selenocysteine
  MOD_RES (35)..(35): Selenocysteine
  MOD_RES (56)..(56): Selenocysteine
  MOD_RES (75)..(75): Selenocysteine
  MOD_RES (77)..(77): Selenocysteine
  MOD_RES (88)..(88): Selenocysteine
  MOD_RES (95)..(95): Selenocysteine
  MOD_RES (109)..(109): Selenocysteine
  MOD_RES (124)..(124): Selenocysteine
  MOD_RES (143)..(143): Selenocysteine
  MOD_RES (178)..(178): Selenocysteine
  MOD_RES (216)..(216): Selenocysteine
  MOD_RES (248)..(248): Selenocysteine
MHRGARVRDERXRPLHPHQGRLPAPCAQLRSGKRXGFPLSGNPGDVLYELLQYIKXQRRALVCGPFFGGIFRLKXPXQHSPVPPEEVXGPSQMDXRRGHLLQPPDPGLXSNFGHLDDPGLARWXPGKEESLNLCHCAELGCRXQGVCSFPAMPQAPIDGRIADCRLLWDYVYQLLLDXRYEPYIKWEDKDAKIFRVVDPNGLARLWGNHKNRVNMXYEKMSRALRHYYKLNIIKKEPGQKLLFRFLKXPGKMVQDKHSHLEPLESQEQDRIEFKDKRPEISP

SEQ ID NO: 9447 - protein, 260 aa, Homo sapiens
  MOD_RES (10)..(10): Selenocysteine
  MOD_RES (34)..(34): Selenocysteine
  MOD_RES (53)..(53): Selenocysteine
  MOD_RES (55)..(55): Selenocysteine
  MOD_RES (66)..(66): Selenocysteine
  MOD_RES (73)..(73): Selenocysteine
  MOD_RES (87)..(87): Selenocysteine
  MOD_RES (102)..(102): Selenocysteine
  MOD_RES (121)..(121): Selenocysteine
  MOD_RES (156)..(156): Selenocysteine
  MOD_RES (194)..(194): Selenocysteine
  MOD_RES (226)..(226): Selenocysteine
MNGRALCILXKDDFRHRAPSSGDVLYELLQYIKXQRRALVCGPFFGGIFRLKXPXQHSPVPPEEVXGPSQMDXRRGHLLQPPDPGLXSNFGHLDDPGLARWXPGKEESLNLCHCAELGCRXQGVCSFPAMPQAPIDGRIADCRLLWDYVYQLLLDXRYEPYIKWEDKDAKIFRVVDPNGLARLWGNHKNRVNMXYEKMSRALRHYYKLNIIKKEPGQKLLFRFLKXPGKMVQDKHSHLEPLESQEQDRIEFKDKRPEISP

SEQ ID NO: 9448 - protein, 286 aa, Homo sapiens
  MOD_RES (22)..(22): Selenocysteine
  MOD_RES (60)..(60): Selenocysteine
  MOD_RES (79)..(79): Selenocysteine
  MOD_RES (81)..(81): Selenocysteine
  MOD_RES (92)..(92): Selenocysteine
  MOD_RES (99)..(99): Selenocysteine
  MOD_RES (113)..(113): Selenocysteine
  MOD_RES (128)..(128): Selenocysteine
  MOD_RES (147)..(147): Selenocysteine
  MOD_RES (182)..(182): Selenocysteine
  MOD_RES (220)..(220): Selenocysteine
  MOD_RES (252)..(252): Selenocysteine
MQEGELAISPISPVAAMPPLGXHVQARCEAQINLLGEGGICKLPGRLRDVLYELLQYIKXQRRALVCGPFFGGIFRLKXPXQHSPVPPEEVXGPSQMDXRRGHLLQPPDPGLXSNFGHLDDPGLARWXPGKEESLNLCHCAELGCRXQGVCSFPAMPQAPIDGRIADCRLLWDYVYQLLLDXRYEPYIKWEDKDAKIFRVVDPNGLARLWGNHKNRVNMXYEKMSRALRHYYKLNIIKKEPGQKLLFRFLKXPGKMVQDKHSHLEPLESQEQDRIEFKDKRPEISP

SEQ ID NO: 9449 - protein, 262 aa, Homo sapiens
  MOD_RES (22)..(22): Selenocysteine
  MOD_RES (60)..(60): Selenocysteine
  MOD_RES (79)..(79): Selenocysteine
  MOD_RES (81)..(81): Selenocysteine
  MOD_RES (92)..(92): Selenocysteine
  MOD_RES (99)..(99): Selenocysteine
  MOD_RES (113)..(113): Selenocysteine
  MOD_RES (128)..(128): Selenocysteine
  MOD_RES (147)..(147): Selenocysteine
  MOD_RES (182)..(182): Selenocysteine
  MOD_RES (220)..(220): Selenocysteine
MQEGELAISPISPVAAMPPLGXHVQARCEAQINLLGEGGICKLPGRLRDVLYELLQYIKXQRRALVCGPFFGGIFRLKXPXQHSPVPPEEVXGPSQMDXRRGHLLQPPDPGLXSNFGHLDDPGLARWXPGKEESLNLCHCAELGCRXQGVCSFPAMPQAPIDGRIADCRLLWDYVYQLLLDXRYEPYIKWEDKDAKIFRVVDPNGLARLWGNHKNRVNMXYEKMSRALRHYYKLNIIKKEPGQKLLFRNGLQLIFIFIWSFQ

SEQ ID NO: 9450 - protein, 264 aa, Homo sapiens
  MOD_RES (22)..(22): Selenocysteine
  MOD_RES (75)..(75): Selenocysteine
  MOD_RES (91)..(91): Selenocysteine
  MOD_RES (115)..(115): Selenocysteine
  MOD_RES (134)..(134): Selenocysteine
  MOD_RES (136)..(136): Selenocysteine
  MOD_RES (160)..(160): Selenocysteine
  MOD_RES (198)..(198): Selenocysteine
  MOD_RES (230)..(230): Selenocysteine
MQEGELAISPISPVAAMPPLGXHVQARCEAQINLLGEGGICKLPGRLRIQPALWSREDVLHWLRWAEQEYSLPCXAEHGFEMNGRALCILXKDDFRHRAPSSGDVLYELLQYIKXQRRALVCGPFFGGIFRLKXPXQHSPVPPEDCRLLWDYVYQLLLDXRYEPYIKWEDKDAKIFRVVDPNGLARLWGNHKNRVNMXYEKMSRALRHYYKLNIIKKEPGQKLLFRFLKXPGKMVQDKHSHLEPLESQEQDRIEFKDKRPEISP

SEQ ID NO: 9451 - protein, 317 aa, Homo sapiens
  MOD_RES (22)..(22): Selenocysteine
  MOD_RES (75)..(75): Selenocysteine
  MOD_RES (91)..(91): Selenocysteine
  MOD_RES (115)..(115): Selenocysteine
  MOD_RES (134)..(134): Selenocysteine
  MOD_RES (136)..(136): Selenocysteine
  MOD_RES (147)..(147): Selenocysteine
  MOD_RES (154)..(154): Selenocysteine
  MOD_RES (168)..(168): Selenocysteine
  MOD_RES (183)..(183): Selenocysteine
  MOD_RES (202)..(202): Selenocysteine
  MOD_RES (237)..(237): Selenocysteine
  MOD_RES (275)..(275): Selenocysteine
MQEGELAISPISPVAAMPPLGXHVQARCEAQINLLGEGGICKLPGRLRIQPALWSREDVLHWLRWAEQEYSLPCXAEHGFEMNGRALCILXKDDFRHRAPSSGDVLYELLQYIKXQRRALVCGPFFGGIFRLKXPXQHSPVPPEEVXGPSQMDXRRGHLLQPPDPGLXSNFGHLDDPGLARWXPGKEESLNLCHCAELGCRXQGVCSFPAMPQAPIDGRIADCRLLWDYVYQLLLDXRYEPYIKWEDKDAKIFRVVDPNGLARLWGNHKNRVNMXYEKMSRALRHYYKLNIIKKEPGQKLLFRNGLQLIFIFIWSFQ

SEQ ID NO: 9452 - protein, 341 aa, Homo sapiens
  MOD_RES (22)..(22): Selenocysteine
  MOD_RES (75)..(75): Selenocysteine
  MOD_RES (91)..(91): Selenocysteine
  MOD_RES (115)..(115): Selenocysteine
  MOD_RES (134)..(134): Selenocysteine
  MOD_RES (136)..(136): Selenocysteine
  MOD_RES (147)..(147): Selenocysteine
  MOD_RES (154)..(154): Selenocysteine
  MOD_RES (168)..(168): Selenocysteine
  MOD_RES (183)..(183): Selenocysteine
  MOD_RES (202)..(202): Selenocysteine
  MOD_RES (237)..(237): Selenocysteine
  MOD_RES (275)..(275): Selenocysteine
  MOD_RES (307)..(307): Selenocysteine
MQEGELAISPISPVAAMPPLGXHVQARCEAQINLLGEGGICKLPGRLRIQPALWSREDVLHWLRWAEQEYSLPCXAEHGFEMNGRALCILXKDDFRHRAPSSGDVLYELLQYIKXQRRALVCGPFFGGIFRLKXPXQHSPVPPEEVXGPSQMDXRRGHLLQPPDPGLXSNFGHLDDPGLARWXPGKEESLNLCHCAELGCRXQGVCSFPAMPQAPIDGRIADCRLLWDYVYQLLLDXRYEPYIKWEDKDAKIFRVVDPNGLARLWGNHKNRVNMXYEKMSRALRHYYKLNIIKKEPGQKLLFRFLKXPGKMVQDKHSHLEPLESQEQDRIEFKDKRPEISP

SEQ ID NO: 9453 - protein, 535 aa, Homo sapiens
  MOD_RES (55)..(55): Selenocysteine
  MOD_RES (62)..(62): Selenocysteine
  MOD_RES (75)..(75): Selenocysteine
  MOD_RES (79)..(79): Selenocysteine
  MOD_RES (111)..(111): Selenocysteine
  MOD_RES (182)..(182): Selenocysteine
  MOD_RES (191)..(191): Selenocysteine
  MOD_RES (226)..(226): Selenocysteine
  MOD_RES (283)..(283): Selenocysteine
  MOD_RES (295)..(295): Selenocysteine
  MOD_RES (345)..(345): Selenocysteine
  MOD_RES (347)..(347): Selenocysteine
  MOD_RES (372)..(372): Selenocysteine
  MOD_RES (393)..(393): Selenocysteine
  MOD_RES (423)..(423): Selenocysteine
  MOD_RES (449)..(449): Selenocysteine
  MOD_RES (459)..(459): Selenocysteine
  MOD_RES (463)..(463): Selenocysteine
  MOD_RES (480)..(480): Selenocysteine
  MOD_RES (513)..(513): Selenocysteine
  MOD_RES (530)..(530): Selenocysteine
MARGGAACKSDARLLLGRDALRPAPALLAPAVLLGAALGLGLGLWLGCRAGRQRXRHQKDDXQNLLKNLESNAQXPSEXGSPSRRRKREVQMSKDKEAVDECEPPSNSNIXAFALKAKVIYPINQKFRPLADGSSNPSLHENLKQAVLPHQPVEASPSSSLGSLSQGEKDDCSSSSSVHSAXSDDRFLSRXFLRVNAFPEVLACESVDVDLCIYSLHLKDLLHLDXALRQEKHMMFIQIFKMCLLDLLPKKKSDDELYQKILSKQEKDLEELEKGLQVKLSNXEMSGAGDSEYIXLADVEKKEREYSEQLIDNMEAFWKQMANIQHFLVDQFKCSSSKARQLMMXLXERMIAAEGLLCDSQELQALDALERXMGRAHMAKVIEFLKLQVQEEXRCRLAAISHGLELLAGEGKLSGRQKEELLXQQHKAFWQEAERFSREFVQRGKDLVXASLAHQVEGXAKLXLAQEEEQRSFLAEAQPXADPEKFLEAFHEVLERQRLMQCDLEEEENVRAXEAVVALCQKAMRRHRDXGKEAV

SEQ ID NO: 9454 - protein, 992 aa, Homo sapiens
  MOD_RES (55)..(55): Selenocysteine
  MOD_RES (62)..(62): Selenocysteine
  MOD_RES (75)..(75): Selenocysteine
  MOD_RES (79)..(79): Selenocysteine
  MOD_RES (111)..(111): Selenocysteine
  MOD_RES (182)..(182): Selenocysteine
  MOD_RES (191)..(191): Selenocysteine
  MOD_RES (226)..(226): Selenocysteine
  MOD_RES (283)..(283): Selenocysteine
  MOD_RES (295)..(295): Selenocysteine
  MOD_RES (345)..(345): Selenocysteine
  MOD_RES (347)..(347): Selenocysteine
  MOD_RES (372)..(372): Selenocysteine
  MOD_RES (393)..(393): Selenocysteine
  MOD_RES (423)..(423): Selenocysteine
  MOD_RES (449)..(449): Selenocysteine
  MOD_RES (459)..(459): Selenocysteine
  MOD_RES (463)..(463): Selenocysteine
  MOD_RES (480)..(480): Selenocysteine
  MOD_RES (513)..(513): Selenocysteine
  MOD_RES (527)..(527): Selenocysteine
  MOD_RES (530)..(530): Selenocysteine
  MOD_RES (542)..(542): Selenocysteine
  MOD_RES (547)..(547): Selenocysteine
  MOD_RES (606)..(606): Selenocysteine
  MOD_RES (615)..(615): Selenocysteine
  MOD_RES (627)..(627): Selenocysteine
  MOD_RES (631)..(631): Selenocysteine
  MOD_RES (658)..(658): Selenocysteine
  MOD_RES (660)..(660): Selenocysteine
  MOD_RES (717)..(717): Selenocysteine
  MOD_RES (757)..(757): Selenocysteine
  MOD_RES (770)..(770): Selenocysteine
  MOD_RES (782)..(782): Selenocysteine
  MOD_RES (814)..(814): Selenocysteine
  MOD_RES (840)..(840): Selenocysteine
  MOD_RES (847)..(847): Selenocysteine
  MOD_RES (893)..(893): Selenocysteine
  MOD_RES (933)..(933): Selenocysteine
  MOD_RES (960)..(960): Selenocysteine
MARGGAACKSDARLLLGRDALRPAPALLAPAVLLGAALGLGLGLWLGCRAGRQRXRHQKDDXQNLLKNLESNAQXPSEXGSPSRRRKREVQMSKDKEAVDECEPPSNSNIXAFALKAKVIYPINQKFRPLADGSSNPSLHENLKQAVLPHQPVEASPSSSLGSLSQGEKDDCSSSSSVHSAXSDDRFLSRXFLRVNAFPEVLACESVDVDLCIYSLHLKDLLHLDXALRQEKHMMFIQIFKMCLLDLLPKKKSDDELYQKILSKQEKDLEELEKGLQVKLSNXEMSGAGDSEYIXLADVEKKEREYSEQLIDNMEAFWKQMANIQHFLVDQFKCSSSKARQLMMXLXERMIAAEGLLCDSQELQALDALERXMGRAHMAKVIEFLKLQVQEEXRCRLAAISHGLELLAGEGKLSGRQKEELLXQQHKAFWQEAERFSREFVQRGKDLVXASLAHQVEGXAKLXLAQEEEQRSFLAEAQPXADPEKFLEAFHEVLERQRLMQCDLEEEENVRAXEAVVALCQELYFSXVDXFQKFVDALFLQXLPGMXGLPPEECDYLRQEVQENAAWQLGKSNRFRRQQWKLFQELLEQDQQVWMEECALSSVLQXHLREDHEGXIRGVLGRLGGLXEESXRCVLQGHDLLLRSALRRLALRGNALAXLXQMRLSGKKHLLQELREQRALEQGSSQCLDEHQWQLLRALEARVLEEASRLEEEAQQXRLQLQQRLLAEAQEVGQLLQQHMECAIGQALLVHARNAAXKSRAKDRDDFKRXLMEAAVESVYVXSAGVSRLVQAYYQQIGRIMEDHEERKLQHLKXLQGERMENYKLRKKQELSNPSSGSRXAGGAHEXSQAVHQRMLSQQKRFLAQFPVHQQMRLHAQQQQAGVMDLLEAQLEXQLQEAEQNFISELAALARVPLAESKLLPAKRGLLEKPLRXKRKKPLPQERGDLGVPNNEDLASGDQXSGSLSSKRLSQQESEAGDSGNSKKMLKRRSNL

SEQ ID NO: 9455 - protein, 1308 aa, Homo sapiens
  MOD_RES (11)..(11): Selenocysteine
  MOD_RES (75)..(75): Selenocysteine
  MOD_RES (93)..(93): Selenocysteine
  MOD_RES (115)..(115): Selenocysteine
  MOD_RES (147)..(147): Selenocysteine
  MOD_RES (161)..(161): Selenocysteine
  MOD_RES (182)..(182): Selenocysteine
  MOD_RES (192)..(192): Selenocysteine
  MOD_RES (194)..(195): Selenocysteine
  MOD_RES (213)..(213): Selenocysteine
  MOD_RES (222)..(222): Selenocysteine
  MOD_RES (247)..(247): Selenocysteine
  MOD_RES (266)..(266): Selenocysteine
  MOD_RES (275)..(275): Selenocysteine
  MOD_RES (284)..(284): Selenocysteine
  MOD_RES (290)..(290): Selenocysteine
  MOD_RES (313)..(313): Selenocysteine
  MOD_RES (332)..(332): Selenocysteine
  MOD_RES (349)..(349): Selenocysteine
  MOD_RES (387)..(387): Selenocysteine
  MOD_RES (400)..(400): Selenocysteine
  MOD_RES (415)..(415): Selenocysteine
  MOD_RES (455)..(455): Selenocysteine
  MOD_RES (462)..(462): Selenocysteine
  MOD_RES (501)..(501): Selenocysteine
  MOD_RES (543)..(543): Selenocysteine
  MOD_RES (607)..(607): Selenocysteine
  MOD_RES (615)..(615): Selenocysteine
  MOD_RES (621)..(621): Selenocysteine
  MOD_RES (647)..(647): Selenocysteine
  MOD_RES (673)..(673): Selenocysteine
  MOD_RES (699)..(699): Selenocysteine
  MOD_RES (720)..(720): Selenocysteine
  MOD_RES (738)..(738): Selenocysteine
  MOD_RES (740)..(740): Selenocysteine
  MOD_RES (748)..(748): Selenocysteine
  MOD_RES (760)..(760): Selenocysteine
  MOD_RES (819)..(819): Selenocysteine
  MOD_RES (882)..(882): Selenocysteine
  MOD_RES (979)..(979): Selenocysteine
  MOD_RES (981)..(981): Selenocysteine
  MOD_RES (986)..(986): Selenocysteine
  MOD_RES (1006)..(1006): Selenocysteine
  MOD_RES (1011)..(1011): Selenocysteine
  MOD_RES (1072)..(1072): Selenocysteine
  MOD_RES (1083)..(1083): Selenocysteine
  MOD_RES (1113)..(1113): Selenocysteine
  MOD_RES (1116)..(1116): Selenocysteine
  MOD_RES (1138)..(1138): Selenocysteine
  MOD_RES (1149)..(1149): Selenocysteine
  MOD_RES (1163)..(1163): Selenocysteine
  MOD_RES (1225)..(1225): Selenocysteine
  MOD_RES (1262)..(1262): Selenocysteine
  MOD_RES (1268)..(1268): Selenocysteine
MDPSGSRGRPXWVLAGGLLAVALALGGRGCLGASSRPRWRPLGAQPPRDPQVAPRSGPGLRIPPGRSGAGPESSXQDLPCMIWPKVECCHFKXAVEAPLGMKLDKKMEVFIPLSXSAASSGPWAHSLFAFIPSWPKKNLFKRESPIXHRLYGDISREVQGXSENGVIFQKCALVSGSSEAQXARIWLLVNNXKXXSSANLSELLLLDSIAGLXIWDSVGNRXSEGFQAFSKKFLQVGDAFAVSYAAXLQAGDLGNGESLKLPAQLXFQSSSRNRXQLKVLFSIXAEENVXVLPHHGLHAAGFFIAFLLSLVLXWAALFLMVRYQCLKGNMLXRHRVWQYESKLEPLPFXSADGVNEDLSLNDQMIDILSSEDPGSMLQALEELEIAXLNRADADLEACRXQISKDIIALLLKNLXSSGHLSPQVERKMSAVFKKQFLLLENEIQEEYDRKMVALXAECDLEXRKKMENQYQREMMAMEEAEELLKRAGERSAVECSNLLRXLHGLEQEHLRKSLALQQEEDFAKAHRQLAVFQRNELHSIFFXQIKSAIFKGELKPEAAKMLLQNYSKIQENVEELMDFFQASKRYHLSKRFGHREYLVQNLQSSEXRVQGLLSXAAAQLXHLIQKHERAGYLDEDQMEMLLERAQXEVFSIKQKLDNDLKQEKKKLHQKLIXKRRRELLQKHREQRREQASVGEAFRXVEDAGQYLHQKRSLMEEHGAXLEELQERLDQAALDDLRXLXLSLFEKAXDELRRLQNSAMXQELLKRGVPWLFLQQILEEHGKEMAARAEQLEGEERDRDQEGVQSVRQRLKDDAPEAVXEEQAELRRWEHLIFMKLCSSVFSLSEEELLRMRQEVHGCFAQMDRSLALPKIRARVLLQQFQXAWREAEFVKLDQAVAAPELQQQSKVRKSRSKSKSKGELLKKCIEDKIHLCEEQASEDLVEKVRGELLRERVQRMEAQEGGFAQSLVALQFQKASRVXEXLSAYXALLSIQDLLLEELSASEMLXKSACXQILESHSRELQELERKLEDQLVQQEAAQQQQALASWQQWVADGPGILNEPGEVDSERQVSXVLHQALSKSQXLLEQHQQCLREEQQNSVVLEDLLENMEADXFAXLCSQELRLASYLARMAMVPGAXLRRLLSVVLPXASQPQLLALLDSAXERHVDHAAESDGGAEQADVGRRRKHQSWWQALDGKLRGDLISRGLEKMLWARKRKQSILKKXCLPLRERMIFSGKGSWPHLSLEPIGELAPVPIVGAEXIDLLNXGEKLFIFRNPKEPEISLHVPPRKKKNFLNAKKAMRALGMD

SEQ ID NO: 9456 - protein, 452 aa, Homo sapiens
  MOD_RES (13)..(13): Selenocysteine
  MOD_RES (35)..(35): Selenocysteine
  MOD_RES (67)..(67): Selenocysteine
  MOD_RES (81)..(81): Selenocysteine
  MOD_RES (102)..(102): Selenocysteine
  MOD_RES (112)..(112): Selenocysteine
  MOD_RES (114)..(115): Selenocysteine
  MOD_RES (133)..(133): Selenocysteine
  MOD_RES (142)..(142): Selenocysteine
  MOD_RES (167)..(167): Selenocysteine
  MOD_RES (186)..(186): Selenocysteine
  MOD_RES (195)..(195): Selenocysteine
  MOD_RES (204)..(204): Selenocysteine
  MOD_RES (210)..(210): Selenocysteine
  MOD_RES (233)..(233): Selenocysteine
  MOD_RES (252)..(252): Selenocysteine
  MOD_RES (269)..(269): Selenocysteine
  MOD_RES (307)..(307): Selenocysteine
  MOD_RES (320)..(320): Selenocysteine
  MOD_RES (335)..(335): Selenocysteine
  MOD_RES (375)..(375): Selenocysteine
  MOD_RES (382)..(382): Selenocysteine
  MOD_RES (424)..(424): Selenocysteine
  MOD_RES (435)..(435): Selenocysteine
  MOD_RES (445)..(445): Selenocysteine
MIWPKVECCHFKXAVEAPLGMKLDKKMEVFIPLSXSAASSGPWAHSLFAFIPSWPKKNLFKRESPIXHRLYGDISREVQGXSENGVIFQKCALVSGSSEAQXARIWLLVNNXKXXSSANLSELLLLDSIAGLXIWDSVGNRXSEGFQAFSKKFLQVGDAFAVSYAAXLQAGDLGNGESLKLPAQLXFQSSSRNRXQLKVLFSIXAEENVXVLPHHGLHAAGFFIAFLLSLVLXWAALFLMVRYQCLKGNMLXRHRVWQYESKLEPLPFXSADGVNEDLSLNDQMIDILSSEDPGSMLQALEELEIAXLNRADADLEACRXQISKDIIALLLKNLXSSGHLSPQVERKMSAVFKKQFLLLENEIQEEYDRKMVALXAECDLEXRKKMENQYQREMMAMEEAEELLKRAVCCRVQQPSADPPWPGXGALEEVSRFAXRRRLCQSSQXAGCFPEK

SEQ ID NO: 9457 - protein, 1166 aa, Homo sapiens
  MOD_RES (13)..(13): Selenocysteine
  MOD_RES (35)..(35): Selenocysteine
  MOD_RES (67)..(67): Selenocysteine
  MOD_RES (81)..(81): Selenocysteine
  MOD_RES (102)..(102): Selenocysteine
  MOD_RES (112)..(112): Selenocysteine
  MOD_RES (114)..(115): Selenocysteine
  MOD_RES (133)..(133): Selenocysteine
  MOD_RES (142)..(142): Selenocysteine
  MOD_RES (167)..(167): Selenocysteine
  MOD_RES (186)..(186): Selenocysteine
  MOD_RES (195)..(195): Selenocysteine
  MOD_RES (204)..(204): Selenocysteine
  MOD_RES (210)..(210): Selenocysteine
  MOD_RES (233)..(233): Selenocysteine
  MOD_RES (252)..(252): Selenocysteine
  MOD_RES (269)..(269): Selenocysteine
  MOD_RES (307)..(307): Selenocysteine
  MOD_RES (320)..(320): Selenocysteine
  MOD_RES (335)..(335): Selenocysteine
  MOD_RES (375)..(375): Selenocysteine
  MOD_RES (382)..(382): Selenocysteine
  MOD_RES (421)..(421): Selenocysteine
  MOD_RES (463)..(463): Selenocysteine
  MOD_RES (527)..(527): Selenocysteine
  MOD_RES (535)..(535): Selenocysteine
  MOD_RES (541)..(541): Selenocysteine
  MOD_RES (567)..(567): Selenocysteine
  MOD_RES (593)..(593): Selenocysteine
  MOD_RES (619)..(619): Selenocysteine
  MOD_RES (640)..(640): Selenocysteine
  MOD_RES (658)..(658): Selenocysteine
  MOD_RES (660)..(660): Selenocysteine
  MOD_RES (668)..(668): Selenocysteine
  MOD_RES (680)..(680): Selenocysteine
  MOD_RES (739)..(739): Selenocysteine
  MOD_RES (802)..(802): Selenocysteine
  MOD_RES (899)..(899): Selenocysteine
  MOD_RES (901)..(901): Selenocysteine
  MOD_RES (906)..(906): Selenocysteine
  MOD_RES (926)..(926): Selenocysteine
  MOD_RES (931)..(931): Selenocysteine
  MOD_RES (992)..(992): Selenocysteine
  MOD_RES (1003)..(1003): Selenocysteine
  MOD_RES (1033)..(1033): Selenocysteine
  MOD_RES (1036)..(1036): Selenocysteine
  MOD_RES (1058)..(1058): Selenocysteine
  MOD_RES (1069)..(1069): Selenocysteine
  MOD_RES (1083)..(1083): Selenocysteine
  MOD_RES (1154)..(1154): Selenocysteine
MIWPKVECCHFKXAVEAPLGMKLDKKMEVFIPLSXSAASSGPWAHSLFAFIPSWPKKNLFKRESPIXHRLYGDISREVQGXSENGVIFQKCALVSGSSEAQXARIWLLVNNXKXXSSANLSELLLLDSIAGLXIWDSVGNRXSEGFQAFSKKFLQVGDAFAVSYAAXLQAGDLGNGESLKLPAQLXFQSSSRNRXQLKVLFSIXAEENVXVLPHHGLHAAGFFIAFLLSLVLXWAALFLMVRYQCLKGNMLXRHRVWQYESKLEPLPFXSADGVNEDLSLNDQMIDILSSEDPGSMLQALEELEIAXLNRADADLEACRXQISKDIIALLLKNLXSSGHLSPQVERKMSAVFKKQFLLLENEIQEEYDRKMVALXAECDLEXRKKMENQYQREMMAMEEAEELLKRAGERSAVECSNLLRXLHGLEQEHLRKSLALQQEEDFAKAHRQLAVFQRNELHSIFFXQIKSAIFKGELKPEAAKMLLQNYSKIQENVEELMDFFQASKRYHLSKRFGHREYLVQNLQSSEXRVQGLLSXAAAQLXHLIQKHERAGYLDEDQMEMLLERAQXEVFSIKQKLDNDLKQEKKKLHQKLIXKRRRELLQKHREQRREQASVGEAFRXVEDAGQYLHQKRSLMEEHGAXLEELQERLDQAALDDLRXLXLSLFEKAXDELRRLQNSAMXQELLKRGVPWLFLQQILEEHGKEMAARAEQLEGEERDRDQEGVQSVRQRLKDDAPEAVXEEQAELRRWEHLIFMKLCSSVFSLSEEELLRMRQEVHGCFAQMDRSLALPKIRARVLLQQFQXAWREAEFVKLDQAVAAPELQQQSKVRKSRSKSKSKGELLKKCIEDKIHLCEEQASEDLVEKVRGELLRERVQRMEAQEGGFAQSLVALQFQKASRVXEXLSAYXALLSIQDLLLEELSASEMLXKSACXQILESHSRELQELERKLEDQLVQQEAAQQQQALASWQQWVADGPGILNEPGEVDSERQVSXVLHQALSKSQXLLEQHQQCLREEQQNSVVLEDLLENMEADXFAXLCSQELRLASYLARMAMVPGAXLRRLLSVVLPXASQPQLLALLDSAXERHVDHAAESDGGAEQADVGRRRKHQSWWQALDGKLRGDLISRGLEKMLWARKRKQRSGNQESFWQYLVGXPEIGLIEWMSEK

SEQ ID NO: 9458 - protein, 1228 aa, Homo sapiens
  MOD_RES (13)..(13): Selenocysteine
  MOD_RES (35)..(35): Selenocysteine
  MOD_RES (67)..(67): Selenocysteine
  MOD_RES (81)..(81): Selenocysteine
  MOD_RES (102)..(102): Selenocysteine
  MOD_RES (112)..(112): Selenocysteine
  MOD_RES (114)..(115): Selenocysteine
  MOD_RES (133)..(133): Selenocysteine
  MOD_RES (142)..(142): Selenocysteine
  MOD_RES (167)..(167): Selenocysteine
  MOD_RES (186)..(186): Selenocysteine
  MOD_RES (195)..(195): Selenocysteine
  MOD_RES (204)..(204): Selenocysteine
  MOD_RES (210)..(210): Selenocysteine
  MOD_RES (233)..(233): Selenocysteine
  MOD_RES (252)..(252): Selenocysteine
  MOD_RES (269)..(269): Selenocysteine
  MOD_RES (307)..(307): Selenocysteine
  MOD_RES (320)..(320): Selenocysteine
  MOD_RES (335)..(335): Selenocysteine
  MOD_RES (375)..(375): Selenocysteine
  MOD_RES (382)..(382): Selenocysteine
  MOD_RES (421)..(421): Selenocysteine
  MOD_RES (463)..(463): Selenocysteine
  MOD_RES (527)..(527): Selenocysteine
  MOD_RES (535)..(535): Selenocysteine
  MOD_RES (541)..(541): Selenocysteine
  MOD_RES (567)..(567): Selenocysteine
  MOD_RES (593)..(593): Selenocysteine
  MOD_RES (619)..(619): Selenocysteine
  MOD_RES (640)..(640): Selenocysteine
  MOD_RES (658)..(658): Selenocysteine
  MOD_RES (660)..(660): Selenocysteine
  MOD_RES (668)..(668): Selenocysteine
  MOD_RES (680)..(680): Selenocysteine
  MOD_RES (739)..(739): Selenocysteine
  MOD_RES (802)..(802): Selenocysteine
  MOD_RES (899)..(899): Selenocysteine
  MOD_RES (901)..(901): Selenocysteine
  MOD_RES (906)..(906): Selenocysteine
  MOD_RES (926)..(926): Selenocysteine
  MOD_RES (931)..(931): Selenocysteine
  MOD_RES (992)..(992): Selenocysteine
  MOD_RES (1003)..(1003): Selenocysteine
  MOD_RES (1033)..(1033): Selenocysteine
  MOD_RES (1036)..(1036): Selenocysteine
  MOD_RES (1058)..(1058): Selenocysteine
  MOD_RES (1069)..(1069): Selenocysteine
  MOD_RES (1083)..(1083): Selenocysteine
  MOD_RES (1145)..(1145): Selenocysteine
  MOD_RES (1182)..(1182): Selenocysteine
  MOD_RES (1188)..(1188): Selenocysteine
MIWPKVECCHFKXAVEAPLGMKLDKKMEVFIPLSXSAASSGPWAHSLFAFIPSWPKKNLFKRESPIXHRLYGDISREVQGXSENGVIFQKCALVSGSSEAQXARIWLLVNNXKXXSSANLSELLLLDSIAGLXIWDSVGNRXSEGFQAFSKKFLQVGDAFAVSYAAXLQAGDLGNGESLKLPAQLXFQSSSRNRXQLKVLFSIXAEENVXVLPHHGLHAAGFFIAFLLSLVLXWAALFLMVRYQCLKGNMLXRHRVWQYESKLEPLPFXSADGVNEDLSLNDQMIDILSSEDPGSMLQALEELEIAXLNRADADLEACRXQISKDIIALLLKNLXSSGHLSPQVERKMSAVFKKQFLLLENEIQEEYDRKMVALXAECDLEXRKKMENQYQREMMAMEEAEELLKRAGERSAVECSNLLRXLHGLEQEHLRKSLALQQEEDFAKAHRQLAVFQRNELHSIFFXQIKSAIFKGELKPEAAKMLLQNYSKIQENVEELMDFFQASKRYHLSKRFGHREYLVQNLQSSEXRVQGLLSXAAAQLXHLIQKHERAGYLDEDQMEMLLERAQXEVFSIKQKLDNDLKQEKKKLHQKLIXKRRRELLQKHREQRREQASVGEAFRXVEDAGQYLHQKRSLMEEHGAXLEELQERLDQAALDDLRXLXLSLFEKAXDELRRLQNSAMXQELLKRGVPWLFLQQILEEHGKEMAARAEQLEGEERDRDQEGVQSVRQRLKDDAPEAVXEEQAELRRWEHLIFMKLCSSVFSLSEEELLRMRQEVHGCFAQMDRSLALPKIRARVLLQQFQXAWREAEFVKLDQAVAAPELQQQSKVRKSRSKSKSKGELLKKCIEDKIHLCEEQASEDLVEKVRGELLRERVQRMEAQEGGFAQSLVALQFQKASRVXEXLSAYXALLSIQDLLLEELSASEMLXKSACXQILESHSRELQELERKLEDQLVQQEAAQQQQALASWQQWVADGPGILNEPGEVDSERQVSXVLHQALSKSQXLLEQHQQCLREEQQNSVVLEDLLENMEADXFAXLCSQELRLASYLARMAMVPGAXLRRLLSVVLPXASQPQLLALLDSAXERHVDHAAESDGGAEQADVGRRRKHQSWWQALDGKLRGDLISRGLEKMLWARKRKQSILKKXCLPLRERMIFSGKGSWPHLSLEPIGELAPVPIVGAEXIDLLNXGEKLFIFRNPKEPEISLHVPPRKKKNFLNAKKAMRALGMD

SEQ ID NO: 9459 - protein, 259 aa, Homo sapiens
  MOD_RES (26)..(26): Selenocysteine
  MOD_RES (31)..(31): Selenocysteine
  MOD_RES (42)..(43): Selenocysteine
  MOD_RES (51)..(51): Selenocysteine
  MOD_RES (56)..(56): Selenocysteine
  MOD_RES (63)..(63): Selenocysteine
  MOD_RES (74)..(74): Selenocysteine
  MOD_RES (84)..(84): Selenocysteine
  MOD_RES (88)..(88): Selenocysteine
  MOD_RES (98)..(98): Selenocysteine
  MOD_RES (103)..(103): Selenocysteine
  MOD_RES (110)..(110): Selenocysteine
  MOD_RES (129)..(129): Selenocysteine
  MOD_RES (136)..(136): Selenocysteine
  MOD_RES (173)..(173): Selenocysteine
  MOD_RES (179)..(179): Selenocysteine
  MOD_RES (218)..(218): Selenocysteine
  MOD_RES (222)..(222): Selenocysteine
  MOD_RES (226)..(226): Selenocysteine
  MOD_RES (235)..(235): Selenocysteine
  MOD_RES (239)..(239): Selenocysteine
  MOD_RES (241)..(241): Selenocysteine
  MOD_RES (250)..(250): Selenocysteine
  MOD_RES (254)..(254): Selenocysteine
MLLRSWFGNKDFQALPILARLPSMPXDMEHXGHYLHLAFLMXXVFSLSPGXKANYXRLWANSXSSWDSVIQNKXGRNQNENINXNPIXPEVDYKGNSXNMPEXSHIVALXSKSEQELYIPSVVSNSPSXVQSIENXSKSHGEIFKKDVCAENNNNMAMLICLIIIAVLFLICXFLFLSXVVLANKVSSLRRSKQVGKRQPRSNGDFLASGLWPAESDXWKRXKQLXGPNLVMQSXGVLXAXRERKDEEGXEKLXNKQIG

SEQ ID NO: 9460 - protein, 236 aa, Homo sapiens
  MOD_RES (3)..(3): Selenocysteine
  MOD_RES (8)..(8): Selenocysteine
  MOD_RES (19)..(20): Selenocysteine
  MOD_RES (28)..(28): Selenocysteine
  MOD_RES (33)..(33): Selenocysteine
  MOD_RES (40)..(40): Selenocysteine
  MOD_RES (51)..(51): Selenocysteine
  MOD_RES (61)..(61): Selenocysteine
  MOD_RES (65)..(65): Selenocysteine
  MOD_RES (75)..(75): Selenocysteine
  MOD_RES (80)..(80): Selenocysteine
  MOD_RES (87)..(87): Selenocysteine
  MOD_RES (106)..(106): Selenocysteine
  MOD_RES (113)..(113): Selenocysteine
  MOD_RES (150)..(150): Selenocysteine
  MOD_RES (156)..(156): Selenocysteine
  MOD_RES (195)..(195): Selenocysteine
  MOD_RES (199)..(199): Selenocysteine
  MOD_RES (203)..(203): Selenocysteine
  MOD_RES (212)..(212): Selenocysteine
  MOD_RES (216)..(216): Selenocysteine
  MOD_RES (218)..(218): Selenocysteine
  MOD_RES (227)..(227): Selenocysteine
  MOD_RES (231)..(231): Selenocysteine
MPXDMEHXGHYLHLAFLMXXVFSLSPGXKANYXRLWANSXSSWDSVIQNKXGRNQNENINXNPIXPEVDYKGNSXNMPEXSHIVALXSKSEQELYIPSVVSNSPSXVQSIENXSKSHGEIFKKDVCAENNNNMAMLICLIIIAVLFLICXFLFLSXVVLANKVSSLRRSKQVGKRQPRSNGDFLASGLWPAESDXWKRXKQLXGPNLVMQSXGVLXAXRERKDEEGXEKLXNKQIG

SEQ ID NO: 9461 - protein, 283 aa, Homo sapiens
  MOD_RES (3)..(3): Selenocysteine
  MOD_RES (21)..(21): Selenocysteine
  MOD_RES (44)..(44): Selenocysteine
  MOD_RES (48)..(48): Selenocysteine
  MOD_RES (77)..(77): Selenocysteine
  MOD_RES (79)..(79): Selenocysteine
  MOD_RES (101)..(102): Selenocysteine
  MOD_RES (123)..(123): Selenocysteine
  MOD_RES (132)..(132): Selenocysteine
  MOD_RES (141)..(141): Selenocysteine
  MOD_RES (151)..(151): Selenocysteine
  MOD_RES (185)..(185): Selenocysteine
  MOD_RES (198)..(198): Selenocysteine
  MOD_RES (208)..(208): Selenocysteine
  MOD_RES (231)..(231): Selenocysteine
  MOD_RES (275)..(275): Selenocysteine
MAXSEQSICQARASVMVYDDXSKKWVPIKPGQQGFSRINIYHNXASNXFRVVGVKLQDQQVVINYSIVKGLKYNQAXPXFHQWRDARQVYGLNFASKEEAXXFSNAMLFALNIMNSQEGARKXEPQREEVCXWPKPLPDMXQSGREARMRXCSSSPPVPGSVVGAAWSSRKSACPGAGLRWVCVXLSKSPPPSAGGMXPQARGSSHDXKMPGAWYVAFRAVPHAAPLFVPXSSSFPLNHCRSSQNLLESSCHRLPLLQESRALVALEARPQADGXRPHSGSEF

SEQ ID NO: 9462 - protein, 121 aa, Homo sapiens
  MOD_RES (3)..(3): Selenocysteine
  MOD_RES (21)..(21): Selenocysteine
  MOD_RES (44)..(44): Selenocysteine
  MOD_RES (48)..(48): Selenocysteine
  MOD_RES (77)..(77): Selenocysteine
  MOD_RES (79)..(79): Selenocysteine
  MOD_RES (101)..(102): Selenocysteine
MAXSEQSICQARASVMVYDDXSKKWVPIKPGQQGFSRINIYHNXASNXFRVVGVKLQDQQVVINYSIVKGLKYNQAXPXFHQWRDARQVYGLNFASKEEAXXFSNAMLFALNIMNSQEGDK

SEQ ID NO: 9463 - protein, 124 aa, Homo sapiens
  MOD_RES (3)..(3): Selenocysteine
  MOD_RES (21)..(21): Selenocysteine
  MOD_RES (44)..(44): Selenocysteine
  MOD_RES (48)..(48): Selenocysteine
  MOD_RES (77)..(77): Selenocysteine
  MOD_RES (79)..(79): Selenocysteine
  MOD_RES (101)..(102): Selenocysteine
MAXSEQSICQARASVMVYDDXSKKWVPIKPGQQGFSRINIYHNXASNXFRVVGVKLQDQQVVINYSIVKGLKYNQAXPXFHQWRDARQVYGLNFASKEEAXXFSNAMLFALNIMNSQEGGACIL

SEQ ID NO: 9464 - protein, 418 aa, Homo sapiens
  MOD_RES (3)..(3): Selenocysteine
  MOD_RES (21)..(21): Selenocysteine
  MOD_RES (44)..(44): Selenocysteine
  MOD_RES (48)..(48): Selenocysteine
  MOD_RES (77)..(77): Selenocysteine
  MOD_RES (79)..(79): Selenocysteine
  MOD_RES (101)..(102): Selenocysteine
  MOD_RES (159)..(159): Selenocysteine
  MOD_RES (162)..(162): Selenocysteine
  MOD_RES (197)..(197): Selenocysteine
  MOD_RES (200)..(200): Selenocysteine
  MOD_RES (252)..(252): Selenocysteine
  MOD_RES (305)..(305): Selenocysteine
  MOD_RES (311)..(311): Selenocysteine
  MOD_RES (345)..(345): Selenocysteine
  MOD_RES (417)..(418): Selenocysteine
MAXSEQSICQARASVMVYDDXSKKWVPIKPGQQGFSRINIYHNXASNXFRVVGVKLQDQQVVINYSIVKGLKYNQAXPXFHQWRDARQVYGLNFASKEEAXXFSNAMLFALNIMNSQEGGPSSQRQVQNGPSPDEMDIQRRQVMEQHQQQRQESLERRXSAXGPILPPGHPSSAASAPVSCSGPPPPPPPPVPPPPXGAXPPPPPPLPAGGAQGSSHDESSMSGLAAAIAGAKLRRVQRPEDASGGSSPSGXSKSDANRASSGGGGGGLMEEMNKLLAKRRKAASQSDKPAEKKEDESQMEDPSXSPSPGXRAASQPPNSSEAGRKPWERSNSVEKPVSSILSRXPSVAKSPEAKSPLQSQPHSRMKPAGSVNDMALDAFDLDRMKQEILEEVVRELHKVKEEIIDAIRQELSGISXX

SEQ ID NO: 9465 - protein, 390 aa, Homo sapiens
  MOD_RES (25)..(25): Selenocysteine
  MOD_RES (48)..(48): Selenocysteine
  MOD_RES (52)..(52): Selenocysteine
  MOD_RES (81)..(81): Selenocysteine
  MOD_RES (83)..(83): Selenocysteine
  MOD_RES (105)..(106): Selenocysteine
  MOD_RES (163)..(163): Selenocysteine
  MOD_RES (166)..(166): Selenocysteine
  MOD_RES (201)..(201): Selenocysteine
  MOD_RES (204)..(204): Selenocysteine
  MOD_RES (256)..(256): Selenocysteine
  MOD_RES (309)..(309): Selenocysteine
  MOD_RES (315)..(315): Selenocysteine
  MOD_RES (349)..(349): Selenocysteine
  MOD_RES (372)..(373): Selenocysteine
  MOD_RES (377)..(377): Selenocysteine
MFAFEEFSEQSICQARASVMVYDDXSKKWVPIKPGQQGFSRINIYHNXASNXFRVVGVKLQDQQVVINYSIVKGLKYNQAXPXFHQWRDARQVYGLNFASKEEAXXFSNAMLFALNIMNSQEGGPSSQRQVQNGPSPDEMDIQRRQVMEQHQQQRQESLERRXSAXGPILPPGHPSSAASAPVSCSGPPPPPPPPVPPPPXGAXPPPPPPLPAGGAQGSSHDESSMSGLAAAIAGAKLRRVQRPEDASGGSSPSGXSKSDANRASSGGGGGGLMEEMNKLLAKRRKAASQSDKPAEKKEDESQMEDPSXSPSPGXRAASQPPNSSEAGRKPWERSNSVEKPVSSILSRXPSVAKSPEAKSPLQSQPHSRYRXXLLLXCPPGFGAPLSPVP

SEQ ID NO: 9466 - protein, 215 aa, Homo sapiens
  MOD_RES (53)..(53): Selenocysteine
  MOD_RES (56)..(56): Selenocysteine
  MOD_RES (91)..(91): Selenocysteine
  MOD_RES (94)..(94): Selenocysteine
  MOD_RES (146)..(146): Selenocysteine
  MOD_RES (199)..(199): Selenocysteine
  MOD_RES (205)..(205): Selenocysteine
MLFALNIMNSQEGGPSSQRQVQNGPSPDEMDIQRRQVMEQHQQQRQESLERRXSAXGPILPPGHPSSAASAPVSCSGPPPPPPPPVPPPPXGAXPPPPPPLPAGGAQGSSHDESSMSGLAAAIAGAKLRRVQRPEDASGGSSPSGXSKSDANRASSGGGGGGLMEEMNKLLAKRRKAASQSDKPAEKKEDESQMEDPSXSPSPGXRAASQPPNSS

SEQ ID NO: 9467 - protein, 416 aa, Homo sapiens
  MOD_RES (19)..(19): Selenocysteine
  MOD_RES (42)..(42): Selenocysteine
  MOD_RES (46)..(46): Selenocysteine
  MOD_RES (75)..(75): Selenocysteine
  MOD_RES (77)..(77): Selenocysteine
  MOD_RES (99)..(100): Selenocysteine
  MOD_RES (157)..(157): Selenocysteine
  MOD_RES (160)..(160): Selenocysteine
  MOD_RES (195)..(195): Selenocysteine
  MOD_RES (198)..(198): Selenocysteine
  MOD_RES (250)..(250): Selenocysteine
  MOD_RES (303)..(303): Selenocysteine
  MOD_RES (309)..(309): Selenocysteine
  MOD_RES (343)..(343): Selenocysteine
  MOD_RES (415)..(416): Selenocysteine
MSEQSICQARASVMVYDDXSKKWVPIKPGQQGFSRINIYHNXASNXFRVVGVKLQDQQVVINYSIVKGLKYNQAXPXFHQWRDARQVYGLNFASKEEAXXFSNAMLFALNIMNSQEGGPSSQRQVQNGPSPDEMDIQRRQVMEQHQQQRQESLERRXSAXGPILPPGHPSSAASAPVSCSGPPPPPPPPVPPPPXGAXPPPPPPLPAGGAQGSSHDESSMSGLAAAIAGAKLRRVQRPEDASGGSSPSGXSKSDANRASSGGGGGGLMEEMNKLLAKRRKAASQSDKPAEKKEDESQMEDPSXSPSPGXRAASQPPNSSEAGRKPWERSNSVEKPVSSILSRXPSVAKSPEAKSPLQSQPHSRMKPAGSVNDMALDAFDLDRMKQEILEEVVRELHKVKEEIIDAIRQELSGISXX

SEQ ID NO: 9468 - protein, 115 aa, Homo sapiens
  MOD_RES (6)..(6): Selenocysteine
  MOD_RES (29)..(29): Selenocysteine
  MOD_RES (33)..(33): Selenocysteine
  MOD_RES (62)..(62): Selenocysteine
  MOD_RES (64)..(64): Selenocysteine
  MOD_RES (86)..(87): Selenocysteine
MVYDDXSKKWVPIKPGQQGFSRINIYHNXASNXFRVVGVKLQDQQVVINYSIVKGLKYNQAXPXFHQWRDARQVYGLNFASKEEAXXFSNAMLFALNIMNSQEGGPSSQRQVQNG

SEQ ID NO: 9469 - protein, 168 aa, Homo sapiens
  MOD_RES (6)..(6): Selenocysteine
  MOD_RES (29)..(29): Selenocysteine
  MOD_RES (33)..(33): Selenocysteine
  MOD_RES (62)..(62): Selenocysteine
  MOD_RES (64)..(64): Selenocysteine
  MOD_RES (86)..(87): Selenocysteine
  MOD_RES (144)..(144): Selenocysteine
  MOD_RES (147)..(147): Selenocysteine
MVYDDXSKKWVPIKPGQQGFSRINIYHNXASNXFRVVGVKLQDQQVVINYSIVKGLKYNQAXPXFHQWRDARQVYGLNFASKEEAXXFSNAMLFALNIMNSQEGGPSSQRQVQNGPSPDEMDIQRRQVMEQHQQQRQESLERRXSAXGPILPPGHPSSAASAPVSCSG

SEQ ID NO: 9470 - protein, 212 aa, Homo sapiens
  MOD_RES (12)..(12): Selenocysteine
  MOD_RES (15)..(15): Selenocysteine
  MOD_RES (67)..(67): Selenocysteine
  MOD_RES (120)..(120): Selenocysteine
  MOD_RES (126)..(126): Selenocysteine
  MOD_RES (211)..(212): Selenocysteine
PPPPPPVPPPPXGAXPPPPPPLPAGGAQGSSHDESSMSGLAAAIAGAKLRRVQRPEDASGGSSPSGXSKSDANRASSGGGGGGLMEEMNKLLAKRRKAASQSDKPAEKKEDESQMEDPSXSPSPGXRAASQPPNSSEAGRKPWERSNSVEKPVSSILSRMKPAGSVNDMALDAFDLDRMKQEILEEVVRELHKVKEEIIDAIRQELSGISXX

SEQ ID NO: 9471 - protein, 104 aa, Homo sapiens
  MOD_RES (1)..(1): Any amino acid
  MOD_RES (4)..(4): Selenocysteine
  MOD_RES (56)..(56): Selenocysteine
XGAXPPPPPPLPAGGAQGSSHDESSMSGLAAAIAGAKLRRVQRPEDASGGSSPSGXSKSDANRASSGGGGGGLMEEMNKLLAKRRKAASQSDKPAEKKEDESQM

SEQ ID NO: 9472 - protein, 201 aa, Homo sapiens
  MOD_RES (18)..(18): Selenocysteine
  MOD_RES (57)..(57): Selenocysteine
  MOD_RES (115)..(115): Selenocysteine
  MOD_RES (136)..(136): Selenocysteine
  MOD_RES (145)..(145): Selenocysteine
  MOD_RES (163)..(163): Selenocysteine
  MOD_RES (168)..(168): Selenocysteine
  MOD_RES (185)..(185): Selenocysteine
  MOD_RES (188)..(189): Selenocysteine
MESRKDMVVFLDGGQLGXLVGKRVSNLSEAVGSPLPEPPEKMVPRGCLSPRAVPPAXRERGGGGPEEEPVDGLAGSAAGPGAEPQVAGAAMLGPGPPAPSVDSLSGQGQPSSSDXESDFYEEIEGPAPRRWSAVRXEGARPPRAXAAVVGAARKAPWRAAPVXRCVVXAPPSPESRLRGWRRNSXGRXXYPGRGDVSWRPP

SEQ ID NO: 9473 - protein, 407 aa, Homo sapiens
  MOD_RES (18)..(18): Selenocysteine
  MOD_RES (57)..(57): Selenocysteine
  MOD_RES (115)..(115): Selenocysteine
  MOD_RES (128)..(128): Selenocysteine
  MOD_RES (133)..(133): Selenocysteine
  MOD_RES (159)..(159): Selenocysteine
  MOD_RES (174)..(174): Selenocysteine
  MOD_RES (188)..(188): Selenocysteine
  MOD_RES (191)..(191): Selenocysteine
  MOD_RES (225)..(226): Selenocysteine
  MOD_RES (246)..(246): Selenocysteine
  MOD_RES (257)..(257): Selenocysteine
  MOD_RES (309)..(309): Selenocysteine
  MOD_RES (371)..(371): Selenocysteine
  MOD_RES (375)..(375): Selenocysteine
  MOD_RES (383)..(383): Selenocysteine
  MOD_RES (406)..(406): Selenocysteine
MESRKDMVVFLDGGQLGXLVGKRVSNLSEAVGSPLPEPPEKMVPRGCLSPRAVPPAXRERGGGGPEEEPVDGLAGSAAGPGAEPQVAGAAMLGPGPPAPSVDSLSGQGQPSSSDXESDFYEEIEVSCXPDCAXGNAEYQHSKGSGSEALVGSPNGGSEXPKSNGGSGGGGSQGXLACSASDQMRRYRXAFXREQIARLEKEFYRENYVSRPRRCELAAALNLPEXXIKVWFQNRRMKDKRQRLAMXWPHPADPAFYXYMMSHAAAAGGLPYPFPSHLPLPYYSPVGLGAASAASAAASPFSGSLRPLDXFRVLSQPYPRPELLCAFRHPPLYPGPAHGLGASAGGPCSCLACHSGPANGLAPRAAAASDFXCASXSRSDSFLXFAPSVLSKASSVALDQREEVPLXR

SEQ ID NO: 9474 - protein, 106 aa, Homo sapiens
  MOD_RES (2)..(2): Selenocysteine
  MOD_RES (17)..(17): Selenocysteine
  MOD_RES (20)..(21): Selenocysteine
  MOD_RES (23)..(23): Selenocysteine
  MOD_RES (26)..(26): Selenocysteine
  MOD_RES (28)..(28): Selenocysteine
  MOD_RES (41)..(41): Selenocysteine
  MOD_RES (50)..(50): Selenocysteine
  MOD_RES (68)..(68): Selenocysteine
  MOD_RES (73)..(73): Selenocysteine
  MOD_RES (90)..(90): Selenocysteine
  MOD_RES (93)..(94): Selenocysteine
RXPSRISMKKSSLLPIXLRXXWXPLXYXKGPAPRRWSAVRXEGARPPRAXAAVVGAARKAPWRAAPVXRCVVXAPPSPESRLRGWRRNSXGRXXYPGRGDVSWRPP

SEQ ID NO: 9475 - protein, 476 aa, Homo sapiens
  MOD_RES (20)..(20): Selenocysteine
  MOD_RES (75)..(75): Selenocysteine
  MOD_RES (82)..(82): Selenocysteine
  MOD_RES (87)..(87): Selenocysteine
  MOD_RES (153)..(155): Selenocysteine
  MOD_RES (193)..(193): Selenocysteine
  MOD_RES (196)..(196): Selenocysteine
  MOD_RES (230)..(231): Selenocysteine
  MOD_RES (262)..(262): Selenocysteine
  MOD_RES (266)..(266): Selenocysteine
  MOD_RES (271)..(271): Selenocysteine
  MOD_RES (293)..(293): Selenocysteine
  MOD_RES (314)..(314): Selenocysteine
  MOD_RES (321)..(321): Selenocysteine
  MOD_RES (461)..(461): Selenocysteine
  MOD_RES (475)..(475): Selenocysteine
MMERIRKEMILMERGLHSPXAGKRFSNLSNSAGNAVLEALENSQHPARLSPRLPSAPLHSALGELPAKGKFEIDXLFNLQHXGSESXVSSEISSAAESRKKPGHYSEAAAEADMSSDVEVGCSALRSPGGLGAAQLKENNGKGYAESGSAAGXXXSASGSGLGSLHGGSGGSGGSAALGGSGSGADQVRRYRXAFXREQIARLEKEFYRENYVSRPRRCELAAALNLPEXXIKVWFQNRRMKDKRQRLAMSWPHPADPSFYXYMMXHAAAXGSLPYPFHSHVPLHYYPHVGVXAAAAAAAASGAAAAASSPFAXSIRPLDXFRALSHPYSRPELLCSFRHPGLYQAPAAAAGLNSAASAAAAAAAAAAAASSAAAAGAPPSGGSAPCSCLSCHSSQSAAAAAAAAAAALGSRGGGGGGGGGGGGGGGGAGAGGGSDFGCSAAAPRSESGFLPYSAAVLSKXAVSPPDQRDEAPLXR

SEQ ID NO: 9476 - protein, 11 aa, Homo sapiens
MGIQGLLQFIK

SEQ ID NO: 9477 - protein, 166 aa, Homo sapiens
  MOD_RES (31)..(31): Selenocysteine
  MOD_RES (52)..(52): Selenocysteine
  MOD_RES (80)..(80): Selenocysteine
  MOD_RES (86)..(86): Selenocysteine
  MOD_RES (126)..(126): Selenocysteine
MGIQGLLQFIKEASEPIHVRKYKGQVVAVDXYCWLHKGAIACAEKLAKGEPXDRRRQANLLKGKQLLREGKVSEARECFXRSINIXHAMAHKAARSQGVDCLVAPYEADAQLAYLNKAGIVQAIIXEDSDLLAFGCKKVILKMDQFGNGLEIDQARLGMCRQLGDV

SEQ ID NO: 9478 - protein, 95 aa, Homo sapiens
  MOD_RES (31)..(31): Selenocysteine
  MOD_RES (52)..(52): Selenocysteine
  MOD_RES (80)..(80): Selenocysteine
  MOD_RES (86)..(86): Selenocysteine
MGIQGLLQFIKEASEPIHVRKYKGQVVAVDXYCWLHKGAIACAEKLAKGEPXDRRRQANLLKGKQLLREGKVSEARECFXRSINIXHAMAHKVIK

SEQ ID NO: 9479 - protein, 169 aa, Homo sapiens
  MOD_RES (31)..(31): Selenocysteine
  MOD_RES (52)..(52): Selenocysteine
  MOD_RES (80)..(80): Selenocysteine
  MOD_RES (86)..(86): Selenocysteine
  MOD_RES (129)..(129): Selenocysteine
MGIQGLLQFIKEASEPIHVRKYKGQVVAVDXYCWLHKGAIACAEKLAKGEPXDRRRQANLLKGKQLLREGKVSEARECFXRSINIXHAMAHKVIKAARSQGVDCLVAPYEADAQLAYLNKAGIVQAIIXEDSDLLAFGCKKVILKMDQFGNGLEIDQARLGMCRQLGDV

SEQ ID NO: 9480 - protein, 135 aa, Homo sapiens
  MOD_RES (31)..(31): Selenocysteine
  MOD_RES (52)..(52): Selenocysteine
  MOD_RES (81)..(81): Selenocysteine
  MOD_RES (120)..(120): Selenocysteine
  MOD_RES (126)..(126): Selenocysteine
MGIQGLLQFIKEASEPIHVRKYKGQVVAVDXYCWLHKGAIACAEKLAKGEPXDRYVGFCMKFVNMLLSHGIKPILVFDGCXLPSKKEVERSRRERRQANLLKGKQLLREGKVSEARECFXRSINIXHAMAHKVIK

SEQ ID NO: 9481 - protein, 803 aa, Homo sapiens
  MOD_RES (31)..(31): Selenocysteine
  MOD_RES (52)..(52): Selenocysteine
  MOD_RES (81)..(81): Selenocysteine
  MOD_RES (120)..(120): Selenocysteine
  MOD_RES (126)..(126): Selenocysteine
  MOD_RES (169)..(169): Selenocysteine
  MOD_RES (211)..(211): Selenocysteine
  MOD_RES (266)..(266): Selenocysteine
  MOD_RES (281)..(281): Selenocysteine
  MOD_RES (309)..(309): Selenocysteine
  MOD_RES (334)..(334): Selenocysteine
  MOD_RES (345)..(345): Selenocysteine
  MOD_RES (360)..(360): Selenocysteine
  MOD_RES (383)..(383): Selenocysteine
  MOD_RES (396)..(396): Selenocysteine
  MOD_RES (405)..(405): Selenocysteine
  MOD_RES (439)..(439): Selenocysteine
  MOD_RES (442)..(442): Selenocysteine
  MOD_RES (468)..(468): Selenocysteine
  MOD_RES (475)..(475): Selenocysteine
  MOD_RES (479)..(479): Selenocysteine
  MOD_RES (485)..(485): Selenocysteine
  MOD_RES (502)..(502): Selenocysteine
  MOD_RES (513)..(513): Selenocysteine
  MOD_RES (528)..(528): Selenocysteine
  MOD_RES (531)..(531): Selenocysteine
  MOD_RES (553)..(553): Selenocysteine
  MOD_RES (578)..(578): Selenocysteine
  MOD_RES (581)..(581): Selenocysteine
  MOD_RES (594)..(594): Selenocysteine
  MOD_RES (596)..(596): Selenocysteine
  MOD_RES (601)..(601): Selenocysteine
  MOD_RES (604)..(604): Selenocysteine
  MOD_RES (621)..(621): Selenocysteine
  MOD_RES (628)..(628): Selenocysteine
  MOD_RES (641)..(641): Selenocysteine
  MOD_RES (719)..(719): Selenocysteine
  MOD_RES (732)..(732): Selenocysteine
  MOD_RES (752)..(753): Selenocysteine
MGIQGLLQFIKEASEPIHVRKYKGQVVAVDXYCWLHKGAIACAEKLAKGEPXDRYVGFCMKFVNMLLSHGIKPILVFDGCXLPSKKEVERSRRERRQANLLKGKQLLREGKVSEARECFXRSINIXHAMAHKVIKAARSQGVDCLVAPYEADAQLAYLNKAGIVQAIIXEDSDLLAFGCKKVILKMDQFGNGLEIDQARLGMCRQLGDVFXEEKFRYMCILSGCDYLSSLRGIGLAKACKVLRLANNPDIVKVIKKIGHYLKMNIXVPEDYINGFIRANNXFLYQLVFDPIKRKLIPLNAYEDDVDPEXLSYAGQYVDDSIALQIALGNKDINXFEQIDDYNPDXAMPAHSRSHSWDDKXCQKSANVSSIWHRNYSPRPESGXVSDAPQLKENPSXVGVERVISXKGLNLPRKSSIVKRPRSAELSEDDLLSQYSLSFXKKXKKNSSEGNKSLSFSEVFVPDLVNGPXNKKSVSXPPRXRNKFAXFLQRKNEESGAVVVPGXRSRFFCSSDSXDCVSNKVSIQPLDEXAVXDKENNLHESEYGDQEGKRLVDXDVARNSSDDIPNNHIPGDHIPDKAXVFXDEESYSFESSKFXRXISPPXLGXLRSCFSWSGGLGDFSRXPSPSPSXALQQFRRKSDSPXSLPENNMSDVSQLKSEESSDDESHPLREEACSSQSQESGEFSLQSSNASKLSQCSSKDSDSEESDCNIKLLDSQSDQXSKLRLSHFSKKDXPLRNKVPGLYKSSSADSLSXXKIKPLGPARASGLSKKPASIQKRKHHNAENKPGLQIKLNELWKNFGFKKF

SEQ ID NO: 9482 - protein, 846 aa, Homo sapiens
  MOD_RES (31)..(31): Selenocysteine
  MOD_RES (52)..(52): Selenocysteine
  MOD_RES (81)..(81): Selenocysteine
  MOD_RES (120)..(120): Selenocysteine
  MOD_RES (126)..(126): Selenocysteine
  MOD_RES (169)..(169): Selenocysteine
  MOD_RES (211)..(211): Selenocysteine
  MOD_RES (266)..(266): Selenocysteine
  MOD_RES (281)..(281): Selenocysteine
  MOD_RES (309)..(309): Selenocysteine
  MOD_RES (334)..(334): Selenocysteine
  MOD_RES (345)..(345): Selenocysteine
  MOD_RES (360)..(360): Selenocysteine
  MOD_RES (383)..(383): Selenocysteine
  MOD_RES (396)..(396): Selenocysteine
  MOD_RES (405)..(405): Selenocysteine
  MOD_RES (439)..(439): Selenocysteine
  MOD_RES (442)..(442): Selenocysteine
  MOD_RES (468)..(468): Selenocysteine
  MOD_RES (475)..(475): Selenocysteine
  MOD_RES (479)..(479): Selenocysteine
  MOD_RES (485)..(485): Selenocysteine
  MOD_RES (502)..(502): Selenocysteine
  MOD_RES (513)..(513): Selenocysteine
  MOD_RES (528)..(528): Selenocysteine
  MOD_RES (531)..(531): Selenocysteine
  MOD_RES (553)..(553): Selenocysteine
  MOD_RES (578)..(578): Selenocysteine
  MOD_RES (581)..(581): Selenocysteine
  MOD_RES (594)..(594): Selenocysteine
  MOD_RES (596)..(596): Selenocysteine
  MOD_RES (601)..(601): Selenocysteine
  MOD_RES (604)..(604): Selenocysteine
  MOD_RES (621)..(621): Selenocysteine
  MOD_RES (628)..(628): Selenocysteine
  MOD_RES (641)..(641): Selenocysteine
  MOD_RES (719)..(719): Selenocysteine
  MOD_RES (732)..(732): Selenocysteine
  MOD_RES (752)..(753): Selenocysteine
  MOD_RES (824)..(824): Selenocysteine
MGIQGLLQFIKEASEPIHVRKYKGQVVAVDXYCWLHKGAIACAEKLAKGEPXDRYVGFCMKFVNMLLSHGIKPILVFDGCXLPSKKEVERSRRERRQANLLKGKQLLREGKVSEARECFXRSINIXHAMAHKVIKAARSQGVDCLVAPYEADAQLAYLNKAGIVQAIIXEDSDLLAFGCKKVILKMDQFGNGLEIDQARLGMCRQLGDVFXEEKFRYMCILSGCDYLSSLRGIGLAKACKVLRLANNPDIVKVIKKIGHYLKMNIXVPEDYINGFIRANNXFLYQLVFDPIKRKLIPLNAYEDDVDPEXLSYAGQYVDDSIALQIALGNKDINXFEQIDDYNPDXAMPAHSRSHSWDDKXCQKSANVSSIWHRNYSPRPESGXVSDAPQLKENPSXVGVERVISXKGLNLPRKSSIVKRPRSAELSEDDLLSQYSLSFXKKXKKNSSEGNKSLSFSEVFVPDLVNGPXNKKSVSXPPRXRNKFAXFLQRKNEESGAVVVPGXRSRFFCSSDSXDCVSNKVSIQPLDEXAVXDKENNLHESEYGDQEGKRLVDXDVARNSSDDIPNNHIPGDHIPDKAXVFXDEESYSFESSKFXRXISPPXLGXLRSCFSWSGGLGDFSRXPSPSPSXALQQFRRKSDSPXSLPENNMSDVSQLKSEESSDDESHPLREEACSSQSQESGEFSLQSSNASKLSQCSSKDSDSEESDCNIKLLDSQSDQXSKLRLSHFSKKDXPLRNKVPGLYKSSSADSLSXXKIKPLGPARASGLSKKPASIQKRKHHNAENKPGLQIKLNELWKNFGFKKDSEKLPPCKKPLSPVRDNIQLXPEAEEDIFNKPECGRVQRAIFQ

SEQ ID NO: 9483 - protein, 208 aa, Homo sapiens
  MOD_RES (1)..(1): Any amino acid
  MOD_RES (3)..(3): Selenocysteine
  MOD_RES (20)..(20): Selenocysteine
  MOD_RES (27)..(27): Selenocysteine
  MOD_RES (40)..(40): Selenocysteine
  MOD_RES (117)..(118): Selenocysteine
  MOD_RES (189)..(189): Selenocysteine
XGXLRSCFSWSGGLGDFSRXPSPSPSXALQQFRRKSDSPXSLPENNMSDVSQLKSEESSDDESHPLREEACSSQSQESGEFSLQSSNASKLSQCSSKDSDSEVPGLYKSSSADSLSXXKIKPLGPARASGLSKKPASIQKRKHHNAENKPGLQIKLNELWKNFGFKKDSEKLPPCKKPLSPVRDNIQLXPEAEEDIFNKPECGRVQRA

SEQ ID NO: 9484 - protein, 879 aa, Homo sapiens
  MOD_RES (2)..(2): Selenocysteine
  MOD_RES (14)..(14): Selenocysteine
  MOD_RES (41)..(41): Selenocysteine
  MOD_RES (43)..(44): Selenocysteine
  MOD_RES (105)..(105): Selenocysteine
  MOD_RES (150)..(150): Selenocysteine
  MOD_RES (264)..(264): Selenocysteine
  MOD_RES (305)..(305): Selenocysteine
  MOD_RES (365)..(365): Selenocysteine
  MOD_RES (374)..(374): Selenocysteine
  MOD_RES (398)..(398): Selenocysteine
  MOD_RES (407)..(407): Selenocysteine
  MOD_RES (434)..(434): Selenocysteine
  MOD_RES (436)..(437): Selenocysteine
  MOD_RES (453)..(453): Selenocysteine
  MOD_RES (456)..(456): Selenocysteine
  MOD_RES (494)..(494): Selenocysteine
  MOD_RES (533)..(533): Selenocysteine
  MOD_RES (544)..(544): Selenocysteine
  MOD_RES (553)..(553): Selenocysteine
  MOD_RES (607)..(607): Selenocysteine
  MOD_RES (619)..(620): Selenocysteine
  MOD_RES (627)..(627): Selenocysteine
  MOD_RES (688)..(688): Selenocysteine
  MOD_RES (708)..(708): Selenocysteine
  MOD_RES (724)..(724): Selenocysteine
  MOD_RES (745)..(745): Selenocysteine
  MOD_RES (860)..(860): Selenocysteine
  MOD_RES (864)..(864): Selenocysteine
MXAIKHALQRDIFXPNDERLLSIVNVCKAGKKKKNCFLCAXVXXERPVQVKVVKVKKSDKGDFYKRQIAWALRDLAVVDAKDAIKENPEFDLHFEKIYKWVASSXAEKNAFISCIWKLNQRYLRKKIDFVNVSSQLLEESVPSGENQSVXGGDEEVVDEYQELNAREEQDIEIMMEGCEYAISNAEAFAEKLSRELQVLDGANIQSIMASEKQVNILMKLLDEALKEVDQIELKLSSYEEMLQSVKEQMDQISESNHLIHLSNXNNVKLLSEIEFLVNHMDLAKGHIKALQEGDLASSRGIEACXNAADALLQCMNVALRPGHDLLLAVKQQQQRFSDLRELFARRLASHLNNVFVQQGHDQSSXLAQHSVELXLPNHHPFHRDLLRYAKLMEWLKSXDYGKYEGLXKNYMDYLSRLYEREIKDFFEVAKIKMXGXXKESKKFGLHGSSGKLXGSXSSLNKLSVQSSGNRRSQSSSLLDMGNMSASDLDVADRXKFDKIFEQVLSELEPLCLAEQDFISKFFKLQQHQSMPGXMAEAEDLDGGXLSRQHNCGXPLPVSSEKDMIRQMMIKIFRCIEPELNNLIALGDKIDSFNSLYMLVKMSHHVWXAQNVDPASFLSXXLGNVLVXVKRNFDKCISNQIRQMEEVKISKKSKVGILPFVAEFEEFAGLAESIFKNAERRGDLDKAYXKLIRGVFVNVEKVANESQKXPRDVVMMENFHHIFAXLSRLKISCLEAEKKEAKQKYXDHLQSYVIYSLGQPLEKLNHFFEGVEARVAQGIREEEVSYQLAFNKQELRKVIKEYPGKEVKKGLDNLYKKVDKHLCEEENLLQVVWHSMQDEFIRQYKHFEGLIARCYPGSGVXMEFXIQDILDYCSSIAQSH

SEQ ID NO: 9485 - protein, 894 aa, Homo sapiens
  MOD_RES (2)..(2): Selenocysteine
  MOD_RES (14)..(14): Selenocysteine
  MOD_RES (41)..(41): Selenocysteine
  MOD_RES (43)..(44): Selenocysteine
  MOD_RES (105)..(105): Selenocysteine
  MOD_RES (150)..(150): Selenocysteine
  MOD_RES (264)..(264): Selenocysteine
  MOD_RES (305)..(305): Selenocysteine
  MOD_RES (365)..(365): Selenocysteine
  MOD_RES (374)..(374): Selenocysteine
  MOD_RES (398)..(398): Selenocysteine
  MOD_RES (407)..(407): Selenocysteine
  MOD_RES (434)..(434): Selenocysteine
  MOD_RES (436)..(437): Selenocysteine
  MOD_RES (445)..(445): Selenocysteine
  MOD_RES (457)..(457): Selenocysteine
  MOD_RES (468)..(468): Selenocysteine
  MOD_RES (471)..(471): Selenocysteine
  MOD_RES (509)..(509): Selenocysteine
  MOD_RES (548)..(548): Selenocysteine
  MOD_RES (559)..(559): Selenocysteine
  MOD_RES (568)..(568): Selenocysteine
  MOD_RES (622)..(622): Selenocysteine
  MOD_RES (634)..(635): Selenocysteine
  MOD_RES (642)..(642): Selenocysteine
  MOD_RES (703)..(703): Selenocysteine
  MOD_RES (723)..(723): Selenocysteine
  MOD_RES (739)..(739): Selenocysteine
  MOD_RES (760)..(760): Selenocysteine
  MOD_RES (875)..(875): Selenocysteine
  MOD_RES (879)..(879): Selenocysteine
MXAIKHALQRDIFXPNDERLLSIVNVCKAGKKKKNCFLCAXVXXERPVQVKVVKVKKSDKGDFYKRQIAWALRDLAVVDAKDAIKENPEFDLHFEKIYKWVASSXAEKNAFISCIWKLNQRYLRKKIDFVNVSSQLLEESVPSGENQSVXGGDEEVVDEYQELNAREEQDIEIMMEGCEYAISNAEAFAEKLSRELQVLDGANIQSIMASEKQVNILMKLLDEALKEVDQIELKLSSYEEMLQSVKEQMDQISESNHLIHLSNXNNVKLLSEIEFLVNHMDLAKGHIKALQEGDLASSRGIEACXNAADALLQCMNVALRPGHDLLLAVKQQQQRFSDLRELFARRLASHLNNVFVQQGHDQSSXLAQHSVELXLPNHHPFHRDLLRYAKLMEWLKSXDYGKYEGLXKNYMDYLSRLYEREIKDFFEVAKIKMXGXXKESKKFAXLPRKESAVKQEXESLHGSSGKLXGSXSSLNKLSVQSSGNRRSQSSSLLDMGNMSASDLDVADRXKFDKIFEQVLSELEPLCLAEQDFISKFFKLQQHQSMPGXMAEAEDLDGGXLSRQHNCGXPLPVSSEKDMIRQMMIKIFRCIEPELNNLIALGDKIDSFNSLYMLVKMSHHVWXAQNVDPASFLSXXLGNVLVXVKRNFDKCISNQIRQMEEVKISKKSKVGILPFVAEFEEFAGLAESIFKNAERRGDLDKAYXKLIRGVFVNVEKVANESQKXPRDVVMMENFHHIFAXLSRLKISCLEAEKKEAKQKYXDHLQSYVIYSLGQPLEKLNHFFEGVEARVAQGIREEEVSYQLAFNKQELRKVIKEYPGKEVKKGLDNLYKKVDKHLCEEENLLQVVWHSMQDEFIRQYKHFEGLIARCYPGSGVXMEFXIQDILDYCSSIAQSH

SEQ ID NO: 9486 - protein, 41 aa, Homo sapiens
MQAKKRYFILLSAGSCLALLFYFGGCLRPCDAQQWMGVAIL

SEQ ID NO: 9487 - protein, 746 aa, Homo sapiens
  MOD_RES (107)..(107): Selenocysteine
  MOD_RES (145)..(145): Selenocysteine
  MOD_RES (160)..(160): Selenocysteine
  MOD_RES (199)..(199): Selenocysteine
  MOD_RES (204)..(204): Selenocysteine
  MOD_RES (223)..(223): Selenocysteine
  MOD_RES (244)..(244): Selenocysteine
  MOD_RES (255)..(255): Selenocysteine
  MOD_RES (273)..(273): Selenocysteine
  MOD_RES (279)..(279): Selenocysteine
  MOD_RES (296)..(297): Selenocysteine
  MOD_RES (317)..(317): Selenocysteine
  MOD_RES (332)..(332): Selenocysteine
  MOD_RES (392)..(392): Selenocysteine
  MOD_RES (408)..(408): Selenocysteine
  MOD_RES (425)..(426): Selenocysteine
  MOD_RES (481)..(481): Selenocysteine
  MOD_RES (488)..(488): Selenocysteine
  MOD_RES (532)..(532): Selenocysteine
  MOD_RES (558)..(558): Selenocysteine
  MOD_RES (568)..(568): Selenocysteine
  MOD_RES (572)..(573): Selenocysteine
  MOD_RES (580)..(580): Selenocysteine
  MOD_RES (609)..(609): Selenocysteine
  MOD_RES (613)..(613): Selenocysteine
  MOD_RES (621)..(621): Selenocysteine
  MOD_RES (665)..(665): Selenocysteine
  MOD_RES (673)..(673): Selenocysteine
  MOD_RES (681)..(681): Selenocysteine
  MOD_RES (686)..(686): Selenocysteine
  MOD_RES (707)..(707): Selenocysteine
MQAKKRYFILLSAGSCLALLFYFGGLQFRASRSHSRREEHSGRNGLHHPSPDHFWPRFPDALRPFVPWDQLENEDSSVHISPRQKRDANSSIYKGKKCRMESCFDFXLCKKNGFKVYVYPQQKGEKIAESYQNILAAIEGSRFYXSDPSQACLFVLSLDXLDRDQLSPQYVHNLRSKVQSLHLWNNGRNHLIFNLYSGXWPDYXEDVGFDIGQAMLAKASISXENFRPNFDVSIPLFSKDHPRXGGERGFLKFNXIPPLRKYMLVFKGKRYLXGIGSDXRNALYHVHNGEDVVLLXXCKHGKDWQKHKDSRCDRDNXEYEKYDYREMLHNAXFCLVPRGRRLGSFRFLEALQAACVPVMLSNGWELPFSEVINWNQAAVIGDERLLLQIPSXIRSIHQDKILALRQQXQFLWEAYFSSVEKIVLXXLEIIQDRIFKHISRNSLIWNKHPGGLFVLPQYSSYLGDFPYYYANLGLKPPSKFXAVIHAVXPLVSQSQPVLKLLVAAAKSQYCAQIIVLWNCDKPLPAKHRWPAXAVPVVVIEGESKVMSSRFLPYDNIIXDAVLSLDEDXVLSXXEVDFAFXVWQSFPERIVGYPARSHFWDNSKERWGYXSKWXNDYSMVLXGAAIYHKYYHYLYSHYLPASLKNMVDQLANCEDILMNFLVSAVXKLPPIKVXQKKQYKEXMMGQXSRASRWADPDHFAQRQSCMNXFASWFGYMPLIHSQMRLDPVLFKDQVSILRKKYRDIERL

SEQ ID NO: 9488 - protein, 207 aa, Homo sapiens
  MOD_RES (1)..(1): Any amino acid
  MOD_RES (13)..(13): Selenocysteine
  MOD_RES (34)..(34): Selenocysteine
  MOD_RES (45)..(45): Selenocysteine
  MOD_RES (63)..(63): Selenocysteine
  MOD_RES (69)..(69): Selenocysteine
  MOD_RES (86)..(87): Selenocysteine
  MOD_RES (107)..(107): Selenocysteine
  MOD_RES (122)..(122): Selenocysteine
  MOD_RES (179)..(179): Selenocysteine
XGQAMLAKASISXENFRPNFDVSIPLFSKDHPRXGGERGFLKFNXIPPLRKYMLVFKGKRYLXGIGSDXRNALYHVHNGEDVVLLXXCKHGKDWQKHKDSRCDRDNXEYEKYDYREMLHNAXFCLVPRGRRLGSFRFLEALQAACVPVMLSNGWELPFSEVINWNQAAVIGDERLLLQXPISVGLVICYGGKHAERDSFYNQVYSSG

SEQ ID NO: 9489 - protein, 49 aa, Homo sapiens
  MOD_RES (20)..(20): Selenocysteine
  MOD_RES (28)..(28): Selenocysteine
  MOD_RES (40)..(40): Selenocysteine
MCASVKYNIRGPALIPRMKXKHRIYYIXLFSIVLLGLIAXGMFQFWPHS

SEQ ID NO: 9490 - protein, 112 aa, Homo sapiens
  MOD_RES (20)..(20): Selenocysteine
  MOD_RES (28)..(28): Selenocysteine
  MOD_RES (40)..(40): Selenocysteine
  MOD_RES (89)..(89): Selenocysteine
MCASVKYNIRGPALIPRMKXKHRIYYIXLFSIVLLGLIAXGMFQFWPHSIESSNDWNVEKRSIRDVPVVRLPADSPIPERGDLSCRMHXCFDVYRCGFNPKNKIKVYIYALK

SEQ ID NO: 9491 - protein, 718 aa, Homo sapiens
  MOD_RES (20)..(20): Selenocysteine
  MOD_RES (28)..(28): Selenocysteine
  MOD_RES (40)..(40): Selenocysteine
  MOD_RES (89)..(89): Selenocysteine
  MOD_RES (125)..(125): Selenocysteine
  MOD_RES (144)..(144): Selenocysteine
  MOD_RES (164)..(164): Selenocysteine
  MOD_RES (170)..(170): Selenocysteine
  MOD_RES (184)..(184): Selenocysteine
  MOD_RES (201)..(201): Selenocysteine
  MOD_RES (219)..(219): Selenocysteine
  MOD_RES (221)..(221): Selenocysteine
  MOD_RES (287)..(287): Selenocysteine
  MOD_RES (316)..(316): Selenocysteine
  MOD_RES (410)..(410): Selenocysteine
  MOD_RES (457)..(457): Selenocysteine
  MOD_RES (462)..(462): Selenocysteine
  MOD_RES (474)..(474): Selenocysteine
  MOD_RES (514)..(514): Selenocysteine
  MOD_RES (531)..(531): Selenocysteine
  MOD_RES (545)..(545): Selenocysteine
  MOD_RES (587)..(587): Selenocysteine
  MOD_RES (595)..(595): Selenocysteine
  MOD_RES (609)..(609): Selenocysteine
  MOD_RES (639)..(639): Selenocysteine
  MOD_RES (647)..(647): Selenocysteine
  MOD_RES (658)..(658): Selenocysteine
  MOD_RES (668)..(668): Selenocysteine
  MOD_RES (686)..(686): Selenocysteine
MCASVKYNIRGPALIPRMKXKHRIYYIXLFSIVLLGLIAXGMFQFWPHSIESSNDWNVEKRSIRDVPVVRLPADSPIPERGDLSCRMHXCFDVYRCGFNPKNKIKVYIYALKKYVDDFGVSVSNXISREYNELLMAISDSDYYXDDINRACLFVPSIDVLNQNXLRIKEXAQAMAQLSRWDRGXNHLLFNMLPGGPPDYNXALDVPRDRALLAGGGFSXWXYRQGYDVSIPVYSPLSAEVDLPEKGPGPRQYFLLSSQVGLHPEYREDLEALQVKHGESVLVLDKCXNLSEGVLSVRKRCHKHQVFDYPQVLQEAXFCVVLRGARLGQAVLSDVLQAGCVPVVIADSYILPFSEVLDWKRASVVVPEEKMSDVYSILQSIPQRQIEEMQRQARWFWEAYFQSIKAIALAXLQIINDRIYPYAAISYEEWNDPPAVKWGSVSNPLFLPLIPPQSQGFXAIVLXYDRVESLFRVIXEVSKVPSLSKLLVVWNNQNKNPPEDSLWPKIRVPLKVVRXAENKLSNRFFPYDEIEXEAVLAIDDDIIMLXSDELQFGYEVWREFPDRLVGYPGRLHLWDHEMNKWKYESEWXNEVSMVLXGAAFYHKYFNYLYXYKMPGDIKNWVDAHMNCEDIAMNFLVANVXGKAVIKVXPRKKFKCPECXAIDGLSLDQXHMVERSECINKFASVFGXMPLKVVEHRADPVLYKDDFPEKLKSFPNIGSL

SEQ ID NO: 9492 - protein, 728 aa, Homo sapiens
  MOD_RES (20)..(20): Selenocysteine
  MOD_RES (28)..(28): Selenocysteine
  MOD_RES (40)..(40): Selenocysteine
  MOD_RES (89)..(89): Selenocysteine
  MOD_RES (125)..(125): Selenocysteine
  MOD_RES (144)..(144): Selenocysteine
  MOD_RES (164)..(164): Selenocysteine
  MOD_RES (170)..(170): Selenocysteine
  MOD_RES (184)..(184): Selenocysteine
  MOD_RES (201)..(201): Selenocysteine
  MOD_RES (219)..(219): Selenocysteine
  MOD_RES (221)..(221): Selenocysteine
  MOD_RES (287)..(287): Selenocysteine
  MOD_RES (316)..(316): Selenocysteine
  MOD_RES (467)..(467): Selenocysteine
  MOD_RES (472)..(472): Selenocysteine
  MOD_RES (484)..(484): Selenocysteine
  MOD_RES (524)..(524): Selenocysteine
  MOD_RES (541)..(541): Selenocysteine
  MOD_RES (555)..(555): Selenocysteine
  MOD_RES (597)..(597): Selenocysteine
  MOD_RES (605)..(605): Selenocysteine
  MOD_RES (619)..(619): Selenocysteine
  MOD_RES (649)..(649): Selenocysteine
  MOD_RES (657)..(657): Selenocysteine
  MOD_RES (668)..(668): Selenocysteine
  MOD_RES (678)..(678): Selenocysteine
  MOD_RES (696)..(696): Selenocysteine
MCASVKYNIRGPALIPRMKXKHRIYYIXLFSIVLLGLIAXGMFQFWPHSIESSNDWNVEKRSIRDVPVVRLPADSPIPERGDLSCRMHXCFDVYRCGFNPKNKIKVYIYALKKYVDDFGVSVSNXISREYNELLMAISDSDYYXDDINRACLFVPSIDVLNQNXLRIKEXAQAMAQLSRWDRGXNHLLFNMLPGGPPDYNXALDVPRDRALLAGGGFSXWXYRQGYDVSIPVYSPLSAEVDLPEKGPGPRQYFLLSSQVGLHPEYREDLEALQVKHGESVLVLDKCXNLSEGVLSVRKRCHKHQVFDYPQVLQEAXFCVVLRGARLGQAVLSDVLQAGCVPVVIADSYILPFSEVLDWKRASVVVPEEKMSDVYSILQSIPQRQIEEMQRQLFMEPARRENWSAANHQMNSLIWPREQWDSQIINDRIYPYAAISYEEWNDPPAVKWGSVSNPLFLPLIPPQSQGFXAIVLXYDRVESLFRVIXEVSKVPSLSKLLVVWNNQNKNPPEDSLWPKIRVPLKVVRXAENKLSNRFFPYDEIEXEAVLAIDDDIIMLXSDELQFGYEVWREFPDRLVGYPGRLHLWDHEMNKWKYESEWXNEVSMVLXGAAFYHKYFNYLYXYKMPGDIKNWVDAHMNCEDIAMNFLVANVXGKAVIKVXPRKKFKCPECXAIDGLSLDQXHMVERSECINKFASVFGXMPLKVVEHRADPVLYKDDFPEKLKSFPNIGSL

SEQ ID NO: 9493 - protein, 751 aa, Homo sapiens
  MOD_RES (53)..(53): Selenocysteine
  MOD_RES (61)..(61): Selenocysteine
  MOD_RES (73)..(73): Selenocysteine
  MOD_RES (122)..(122): Selenocysteine
  MOD_RES (158)..(158): Selenocysteine
  MOD_RES (177)..(177): Selenocysteine
  MOD_RES (197)..(197): Selenocysteine
  MOD_RES (203)..(203): Selenocysteine
  MOD_RES (217)..(217): Selenocysteine
  MOD_RES (234)..(234): Selenocysteine
  MOD_RES (252)..(252): Selenocysteine
  MOD_RES (254)..(254): Selenocysteine
  MOD_RES (320)..(320): Selenocysteine
  MOD_RES (349)..(349): Selenocysteine
  MOD_RES (443)..(443): Selenocysteine
  MOD_RES (490)..(490): Selenocysteine
  MOD_RES (495)..(495): Selenocysteine
  MOD_RES (507)..(507): Selenocysteine
  MOD_RES (547)..(547): Selenocysteine
  MOD_RES (564)..(564): Selenocysteine
  MOD_RES (578)..(578): Selenocysteine
  MOD_RES (620)..(620): Selenocysteine
  MOD_RES (628)..(628): Selenocysteine
  MOD_RES (642)..(642): Selenocysteine
  MOD_RES (672)..(672): Selenocysteine
  MOD_RES (680)..(680): Selenocysteine
  MOD_RES (691)..(691): Selenocysteine
  MOD_RES (701)..(701): Selenocysteine
  MOD_RES (719)..(719): Selenocysteine
MSCASGSGGGLRHPLRCQKPWDEECEEEAVCVIMCASVKYNIRGPALIPRMKXKHRIYYIXLFSIVLLGLIAXGMFQFWPHSIESSNDWNVEKRSIRDVPVVRLPADSPIPERGDLSCRMHXCFDVYRCGFNPKNKIKVYIYALKKYVDDFGVSVSNXISREYNELLMAISDSDYYXDDINRACLFVPSIDVLNQNXLRIKEXAQAMAQLSRWDRGXNHLLFNMLPGGPPDYNXALDVPRDRALLAGGGFSXWXYRQGYDVSIPVYSPLSAEVDLPEKGPGPRQYFLLSSQVGLHPEYREDLEALQVKHGESVLVLDKCXNLSEGVLSVRKRCHKHQVFDYPQVLQEAXFCVVLRGARLGQAVLSDVLQAGCVPVVIADSYILPFSEVLDWKRASVVVPEEKMSDVYSILQSIPQRQIEEMQRQARWFWEAYFQSIKAIALAXLQIINDRIYPYAAISYEEWNDPPAVKWGSVSNPLFLPLIPPQSQGFXAIVLXYDRVESLFRVIXEVSKVPSLSKLLVVWNNQNKNPPEDSLWPKIRVPLKVVRXAENKLSNRFFPYDEIEXEAVLAIDDDIIMLXSDELQFGYEVWREFPDRLVGYPGRLHLWDHEMNKWKYESEWXNEVSMVLXGAAFYHKYFNYLYXYKMPGDIKNWVDAHMNCEDIAMNFLVANVXGKAVIKVXPRKKFKCPECXAIDGLSLDQXHMVERSECINKFASVFGXMPLKVVEHRADPVLYKDDFPEKLKSFPNIGSL

SEQ ID NO: 9494 - protein, 41 aa, Homo sapiens
  MOD_RES (11)..(11): Selenocysteine
MEEMIFNLADXHLFFNDLEESRASRESMMLVKLGRRKPSSA

SEQ ID NO: 9495 - protein, 591 aa, Homo sapiens
  MOD_RES (7)..(7): Selenocysteine
  MOD_RES (36)..(36): Selenocysteine
  MOD_RES (40)..(40): Selenocysteine
  MOD_RES (44)..(44): Selenocysteine
  MOD_RES (52)..(52): Selenocysteine
  MOD_RES (55)..(56): Selenocysteine
  MOD_RES (79)..(79): Selenocysteine
  MOD_RES (99)..(99): Selenocysteine
  MOD_RES (104)..(104): Selenocysteine
  MOD_RES (111)..(111): Selenocysteine
  MOD_RES (114)..(115): Selenocysteine
  MOD_RES (121)..(121): Selenocysteine
  MOD_RES (125)..(125): Selenocysteine
  MOD_RES (147)..(147): Selenocysteine
  MOD_RES (160)..(160): Selenocysteine
  MOD_RES (167)..(167): Selenocysteine
  MOD_RES (171)..(171): Selenocysteine
  MOD_RES (189)..(190): Selenocysteine
  MOD_RES (196)..(196): Selenocysteine
  MOD_RES (202)..(202): Selenocysteine
  MOD_RES (240)..(240): Selenocysteine
  MOD_RES (244)..(244): Selenocysteine
  MOD_RES (247)..(248): Selenocysteine
  MOD_RES (251)..(251): Selenocysteine
  MOD_RES (254)..(254): Selenocysteine
  MOD_RES (265)..(265): Selenocysteine
  MOD_RES (270)..(270): Selenocysteine
  MOD_RES (273)..(273): Selenocysteine
  MOD_RES (278)..(278): Selenocysteine
  MOD_RES (284)..(284): Selenocysteine
  MOD_RES (331)..(331): Selenocysteine
  MOD_RES (340)..(340): Selenocysteine
  MOD_RES (353)..(353): Selenocysteine
  MOD_RES (371)..(371): Selenocysteine
  MOD_RES (400)..(400): Selenocysteine
  MOD_RES (405)..(405): Selenocysteine
  MOD_RES (413)..(413): Selenocysteine
  MOD_RES (421)..(421): Selenocysteine
  MOD_RES (446)..(446): Selenocysteine
  MOD_RES (474)..(474): Selenocysteine
  MOD_RES (479)..(479): Selenocysteine
  MOD_RES (492)..(492): Selenocysteine
  MOD_RES (500)..(502): Selenocysteine
  MOD_RES (529)..(529): Selenocysteine
MEMQDLXSPHSRLSGSSESPSGPKLGNSHINSNSMXPNGXEVKXEPMSSSEXASXXADGSLNNFSGSAIGSSSFSPRPXHQFSPPQIYPSKPYPHILPXPSSQXMAAYGQXQFXXGMQQAXAYAXYPQPGQPYGISSYGALWAGIKXEGGLSQSQSPGQXGFLSYGXSFSXPQPGQAPYSYQMQGSSFXXSSGIYXGNNSLXNSSGFNSSQQDYPSYPSFGQGQYAQYYNSSPYPAHYMXSSNXSPXXPSXNAXYQLQEPPSGIXSQAVXDPXAEYSXIHSPSXPIKDSDSDRLRRGSDGKSRGRGRRNNNPSPPPDSDLERVFIWDLDEXIIVFHSLLXGSYANRYGRDPPXSVSLGLRMEEMIFNLADXHLFFNDLEECDQVHIDDVSSDDNGQDLSXYNFGXDGFPAAAXSANLCLAXGVRGGVDWMRKLAFRYRRVKEIYNXYKNNVGGLLGPAKREAWLQLRAEIEALXDSWLXLALKALSLIHSRXNCVNILVXXXQLIPALAKVLLYGLGIVFPIENIYSAXKIGKESCFERIIQRFGRKVVYVVIGDGVEEEQGAKKHAMPFWRISSHSDLMALHHALELEYL

SEQ ID NO: 9496 - protein, 586 aa, Homo sapiens
  MOD_RES (7)..(7): Selenocysteine
  MOD_RES (36)..(36): Selenocysteine
  MOD_RES (40)..(40): Selenocysteine
  MOD_RES (44)..(44): Selenocysteine
  MOD_RES (52)..(52): Selenocysteine
  MOD_RES (55)..(56): Selenocysteine
  MOD_RES (79)..(79): Selenocysteine
  MOD_RES (99)..(99): Selenocysteine
  MOD_RES (104)..(104): Selenocysteine
  MOD_RES (111)..(111): Selenocysteine
  MOD_RES (114)..(115): Selenocysteine
  MOD_RES (121)..(121): Selenocysteine
  MOD_RES (125)..(125): Selenocysteine
  MOD_RES (142)..(142): Selenocysteine
  MOD_RES (155)..(155): Selenocysteine
  MOD_RES (162)..(162): Selenocysteine
  MOD_RES (166)..(166): Selenocysteine
  MOD_RES (184)..(185): Selenocysteine
  MOD_RES (191)..(191): Selenocysteine
  MOD_RES (197)..(197): Selenocysteine
  MOD_RES (235)..(235): Selenocysteine
  MOD_RES (239)..(239): Selenocysteine
  MOD_RES (242)..(243): Selenocysteine
  MOD_RES (246)..(246): Selenocysteine
  MOD_RES (249)..(249): Selenocysteine
  MOD_RES (260)..(260): Selenocysteine
  MOD_RES (265)..(265): Selenocysteine
  MOD_RES (268)..(268): Selenocysteine
  MOD_RES (273)..(273): Selenocysteine
  MOD_RES (279)..(279): Selenocysteine
  MOD_RES (326)..(326): Selenocysteine
  MOD_RES (335)..(335): Selenocysteine
  MOD_RES (348)..(348): Selenocysteine
  MOD_RES (366)..(366): Selenocysteine
  MOD_RES (395)..(395): Selenocysteine
  MOD_RES (400)..(400): Selenocysteine
  MOD_RES (408)..(408): Selenocysteine
  MOD_RES (416)..(416): Selenocysteine
  MOD_RES (441)..(441): Selenocysteine
  MOD_RES (469)..(469): Selenocysteine
  MOD_RES (474)..(474): Selenocysteine
  MOD_RES (487)..(487): Selenocysteine
  MOD_RES (495)..(497): Selenocysteine
  MOD_RES (524)..(524): Selenocysteine
MEMQDLXSPHSRLSGSSESPSGPKLGNSHINSNSMXPNGXEVKXEPMSSSEXASXXADGSLNNFSGSAIGSSSFSPRPXHQFSPPQIYPSKPYPHILPXPSSQXMAAYGQXQFXXGMQQAXAYAXYPQPGQPYGISSYGIKXEGGLSQSQSPGQXGFLSYGXSFSXPQPGQAPYSYQMQGSSFXXSSGIYXGNNSLXNSSGFNSSQQDYPSYPSFGQGQYAQYYNSSPYPAHYMXSSNXSPXXPSXNAXYQLQEPPSGIXSQAVXDPXAEYSXIHSPSXPIKDSDSDRLRRGSDGKSRGRGRRNNNPSPPPDSDLERVFIWDLDEXIIVFHSLLXGSYANRYGRDPPXSVSLGLRMEEMIFNLADXHLFFNDLEECDQVHIDDVSSDDNGQDLSXYNFGXDGFPAAAXSANLCLAXGVRGGVDWMRKLAFRYRRVKEIYNXYKNNVGGLLGPAKREAWLQLRAEIEALXDSWLXLALKALSLIHSRXNCVNILVXXXQLIPALAKVLLYGLGIVFPIENIYSAXKIGKESCFERIIQRFGRKVVYVVIGDGVEEEQGAKKHAMPFWRISSHSDLMALHHALELEYL

SEQ ID NO: 9497 - protein, 212 aa, Homo sapiens
  MOD_RES (7)..(7): Selenocysteine
  MOD_RES (36)..(36): Selenocysteine
  MOD_RES (40)..(40): Selenocysteine
  MOD_RES (44)..(44): Selenocysteine
  MOD_RES (52)..(52): Selenocysteine
  MOD_RES (55)..(56): Selenocysteine
  MOD_RES (79)..(79): Selenocysteine
  MOD_RES (105)..(105): Selenocysteine
  MOD_RES (112)..(112): Selenocysteine
  MOD_RES (153)..(153): Selenocysteine
  MOD_RES (155)..(155): Selenocysteine
  MOD_RES (187)..(187): Selenocysteine
  MOD_RES (199)..(199): Selenocysteine
  MOD_RES (204)..(204): Selenocysteine
MEMQDLXSPHSRLSGSSESPSGPKLGNSHINSNSMXPNGXEVKXEPMSSSEXASXXADGSLNNFSGSAIGSSSFSPRPXHQFSPPQIYPSNLPQECNKLQPMPRXHSQDSRXAFPHMASRLKVDCHSLSHLDRQDFSAMAQASVPLNLDRHHXAXRCKVAVLQHHQEYIQEIIHSQIPLDLIVHSRXIRLIPVLARVSXHSIIXAHRIQHII

SEQ ID NO: 9498 - protein, 592 aa, Homo sapiens
  MOD_RES (7)..(7): Selenocysteine
  MOD_RES (36)..(36): Selenocysteine
  MOD_RES (40)..(40): Selenocysteine
  MOD_RES (44)..(44): Selenocysteine
  MOD_RES (52)..(52): Selenocysteine
  MOD_RES (55)..(56): Selenocysteine
  MOD_RES (79)..(79): Selenocysteine
  MOD_RES (100)..(100): Selenocysteine
  MOD_RES (105)..(105): Selenocysteine
  MOD_RES (112)..(112): Selenocysteine
  MOD_RES (115)..(116): Selenocysteine
  MOD_RES (122)..(122): Selenocysteine
  MOD_RES (126)..(126): Selenocysteine
  MOD_RES (148)..(148): Selenocysteine
  MOD_RES (161)..(161): Selenocysteine
  MOD_RES (168)..(168): Selenocysteine
  MOD_RES (172)..(172): Selenocysteine
  MOD_RES (190)..(191): Selenocysteine
  MOD_RES (197)..(197): Selenocysteine
  MOD_RES (203)..(203): Selenocysteine
  MOD_RES (241)..(241): Selenocysteine
  MOD_RES (245)..(245): Selenocysteine
  MOD_RES (248)..(249): Selenocysteine
  MOD_RES (252)..(252): Selenocysteine
  MOD_RES (255)..(255): Selenocysteine
  MOD_RES (266)..(266): Selenocysteine
  MOD_RES (271)..(271): Selenocysteine
  MOD_RES (274)..(274): Selenocysteine
  MOD_RES (279)..(279): Selenocysteine
  MOD_RES (285)..(285): Selenocysteine
  MOD_RES (332)..(332): Selenocysteine
  MOD_RES (341)..(341): Selenocysteine
  MOD_RES (354)..(354): Selenocysteine
  MOD_RES (372)..(372): Selenocysteine
  MOD_RES (401)..(401): Selenocysteine
  MOD_RES (406)..(406): Selenocysteine
  MOD_RES (414)..(414): Selenocysteine
  MOD_RES (422)..(422): Selenocysteine
  MOD_RES (447)..(447): Selenocysteine
  MOD_RES (475)..(475): Selenocysteine
  MOD_RES (480)..(480): Selenocysteine
  MOD_RES (493)..(493): Selenocysteine
  MOD_RES (501)..(503): Selenocysteine
  MOD_RES (530)..(530): Selenocysteine
MEMQDLXSPHSRLSGSSESPSGPKLGNSHINSNSMXPNGXEVKXEPMSSSEXASXXADGSLNNFSGSAIGSSSFSPRPXHQFSPPQIYPSNRPYPHILPXPSSQXMAAYGQXQFXXGMQQAXAYAXYPQPGQPYGISSYGALWAGIKXEGGLSQSQSPGQXGFLSYGXSFSXPQPGQAPYSYQMQGSSFXXSSGIYXGNNSLXNSSGFNSSQQDYPSYPSFGQGQYAQYYNSSPYPAHYMXSSNXSPXXPSXNAXYQLQEPPSGIXSQAVXDPXAEYSXIHSPSXPIKDSDSDRLRRGSDGKSRGRGRRNNNPSPPPDSDLERVFIWDLDEXIIVFHSLLXGSYANRYGRDPPXSVSLGLRMEEMIFNLADXHLFFNDLEECDQVHIDDVSSDDNGQDLSXYNFGXDGFPAAAXSANLCLAXGVRGGVDWMRKLAFRYRRVKEIYNXYKNNVGGLLGPAKREAWLQLRAEIEALXDSWLXLALKALSLIHSRXNCVNILVXXXQLIPALAKVLLYGLGIVFPIENIYSAXKIGKESCFERIIQRFGRKVVYVVIGDGVEEEQGAKKHAMPFWRISSHSDLMALHHALELEYL

SEQ ID NO: 9499 - protein, 557 aa, Homo sapiens
  MOD_RES (7)..(7): Selenocysteine
  MOD_RES (36)..(36): Selenocysteine
  MOD_RES (40)..(40): Selenocysteine
  MOD_RES (44)..(44): Selenocysteine
  MOD_RES (52)..(52): Selenocysteine
  MOD_RES (55)..(56): Selenocysteine
  MOD_RES (79)..(79): Selenocysteine
  MOD_RES (100)..(100): Selenocysteine
  MOD_RES (105)..(105): Selenocysteine
  MOD_RES (112)..(112): Selenocysteine
  MOD_RES (115)..(116): Selenocysteine
  MOD_RES (122)..(122): Selenocysteine
  MOD_RES (126)..(126): Selenocysteine
  MOD_RES (143)..(143): Selenocysteine
  MOD_RES (156)..(156): Selenocysteine
  MOD_RES (163)..(163): Selenocysteine
  MOD_RES (167)..(167): Selenocysteine
  MOD_RES (185)..(186): Selenocysteine
  MOD_RES (192)..(192): Selenocysteine
  MOD_RES (198)..(198): Selenocysteine
  MOD_RES (236)..(236): Selenocysteine
  MOD_RES (240)..(240): Selenocysteine
  MOD_RES (243)..(244): Selenocysteine
  MOD_RES (247)..(247): Selenocysteine
  MOD_RES (250)..(250): Selenocysteine
  MOD_RES (261)..(261): Selenocysteine
  MOD_RES (266)..(266): Selenocysteine
  MOD_RES (269)..(269): Selenocysteine
  MOD_RES (274)..(274): Selenocysteine
  MOD_RES (280)..(280): Selenocysteine
  MOD_RES (327)..(327): Selenocysteine
  MOD_RES (336)..(336): Selenocysteine
  MOD_RES (366)..(366): Selenocysteine
  MOD_RES (371)..(371): Selenocysteine
  MOD_RES (379)..(379): Selenocysteine
  MOD_RES (387)..(387): Selenocysteine
  MOD_RES (412)..(412): Selenocysteine
  MOD_RES (440)..(440): Selenocysteine
  MOD_RES (445)..(445): Selenocysteine
  MOD_RES (458)..(458): Selenocysteine
  MOD_RES (466)..(468): Selenocysteine
  MOD_RES (495)..(495): Selenocysteine
MEMQDLXSPHSRLSGSSESPSGPKLGNSHINSNSMXPNGXEVKXEPMSSSEXASXXADGSLNNFSGSAIGSSSFSPRPXHQFSPPQIYPSNRPYPHILPXPSSQXMAAYGQXQFXXGMQQAXAYAXYPQPGQPYGISSYGIKXEGGLSQSQSPGQXGFLSYGXSFSXPQPGQAPYSYQMQGSSFXXSSGIYXGNNSLXNSSGFNSSQQDYPSYPSFGQGQYAQYYNSSPYPAHYMXSSNXSPXXPSXNAXYQLQEPPSGIXSQAVXDPXAEYSXIHSPSXPIKDSDSDRLRRGSDGKSRGRGRRNNNPSPPPDSDLERVFIWDLDEXIIVFHSLLXGSYANRYGRECDQVHIDDVSSDDNGQDLSXYNFGXDGFPAAAXSANLCLAXGVRGGVDWMRKLAFRYRRVKEIYNXYKNNVGGLLGPAKREAWLQLRAEIEALXDSWLXLALKALSLIHSRXNCVNILVXXXQLIPALAKVLLYGLGIVFPIENIYSAXKIGKESCFERIIQRFGRKVVYVVIGDGVEEEQGAKKHAMPFWRISSHSDLMALHHALELEYL

SEQ ID NO: 9500 - protein, 558 aa, Homo sapiens
  MOD_RES (11)..(11): Selenocysteine
  MOD_RES (19)..(19): Selenocysteine
  MOD_RES (22)..(23): Selenocysteine
  MOD_RES (46)..(46): Selenocysteine
  MOD_RES (66)..(66): Selenocysteine
  MOD_RES (71)..(71): Selenocysteine
  MOD_RES (78)..(78): Selenocysteine
  MOD_RES (81)..(82): Selenocysteine
  MOD_RES (88)..(88): Selenocysteine
  MOD_RES (92)..(92): Selenocysteine
  MOD_RES (114)..(114): Selenocysteine
  MOD_RES (127)..(127): Selenocysteine
  MOD_RES (134)..(134): Selenocysteine
  MOD_RES (138)..(138): Selenocysteine
  MOD_RES (156)..(157): Selenocysteine
  MOD_RES (163)..(163): Selenocysteine
  MOD_RES (169)..(169): Selenocysteine
  MOD_RES (207)..(207): Selenocysteine
  MOD_RES (211)..(211): Selenocysteine
  MOD_RES (214)..(215): Selenocysteine
  MOD_RES (218)..(218): Selenocysteine
  MOD_RES (221)..(221): Selenocysteine
  MOD_RES (232)..(232): Selenocysteine
  MOD_RES (237)..(237): Selenocysteine
  MOD_RES (240)..(240): Selenocysteine
  MOD_RES (245)..(245): Selenocysteine
  MOD_RES (251)..(251): Selenocysteine
  MOD_RES (298)..(298): Selenocysteine
  MOD_RES (307)..(307): Selenocysteine
  MOD_RES (320)..(320): Selenocysteine
  MOD_RES (338)..(338): Selenocysteine
  MOD_RES (367)..(367): Selenocysteine
  MOD_RES (372)..(372): Selenocysteine
  MOD_RES (380)..(380): Selenocysteine
  MOD_RES (388)..(388): Selenocysteine
  MOD_RES (413)..(413): Selenocysteine
  MOD_RES (441)..(441): Selenocysteine
  MOD_RES (446)..(446): Selenocysteine
  MOD_RES (459)..(459): Selenocysteine
  MOD_RES (467)..(469): Selenocysteine
  MOD_RES (496)..(496): Selenocysteine
MLLFPQVAVKXEPMSSSEXASXXADGSLNNFSGSAIGSSSFSPRPXHQFSPPQIYPSKPYPHILPXPSSQXMAAYGQXQFXXGMQQAXAYAXYPQPGQPYGISSYGALWAGIKXEGGLSQSQSPGQXGFLSYGXSFSXPQPGQAPYSYQMQGSSFXXSSGIYXGNNSLXNSSGFNSSQQDYPSYPSFGQGQYAQYYNSSPYPAHYMXSSNXSPXXPSXNAXYQLQEPPSGIXSQAVXDPXAEYSXIHSPSXPIKDSDSDRLRRGSDGKSRGRGRRNNNPSPPPDSDLERVFIWDLDEXIIVFHSLLXGSYANRYGRDPPXSVSLGLRMEEMIFNLADXHLFFNDLEECDQVHIDDVSSDDNGQDLSXYNFGXDGFPAAAXSANLCLAXGVRGGVDWMRKLAFRYRRVKEIYNXYKNNVGGLLGPAKREAWLQLRAEIEALXDSWLXLALKALSLIHSRXNCVNILVXXXQLIPALAKVLLYGLGIVFPIENIYSAXKIGKESCFERIIQRFGRKVVYVVIGDGVEEEQGAKKHAMPFWRISSHSDLMALHHALELEYL

SEQ ID NO: 9501 - protein, 559 aa, Homo sapiens
  MOD_RES (11)..(11): Selenocysteine
  MOD_RES (19)..(19): Selenocysteine
  MOD_RES (22)..(23): Selenocysteine
  MOD_RES (46)..(46): Selenocysteine
  MOD_RES (67)..(67): Selenocysteine
  MOD_RES (72)..(72): Selenocysteine
  MOD_RES (79)..(79): Selenocysteine
  MOD_RES (82)..(83): Selenocysteine
  MOD_RES (89)..(89): Selenocysteine
  MOD_RES (93)..(93): Selenocysteine
  MOD_RES (115)..(115): Selenocysteine
  MOD_RES (128)..(128): Selenocysteine
  MOD_RES (135)..(135): Selenocysteine
  MOD_RES (139)..(139): Selenocysteine
  MOD_RES (157)..(158): Selenocysteine
  MOD_RES (164)..(164): Selenocysteine
  MOD_RES (170)..(170): Selenocysteine
  MOD_RES (208)..(208): Selenocysteine
  MOD_RES (212)..(212): Selenocysteine
  MOD_RES (215)..(216): Selenocysteine
  MOD_RES (219)..(219): Selenocysteine
  MOD_RES (222)..(222): Selenocysteine
  MOD_RES (233)..(233): Selenocysteine
  MOD_RES (238)..(238): Selenocysteine
  MOD_RES (241)..(241): Selenocysteine
  MOD_RES (246)..(246): Selenocysteine
  MOD_RES (252)..(252): Selenocysteine
  MOD_RES (299)..(299): Selenocysteine
  MOD_RES (308)..(308): Selenocysteine
  MOD_RES (321)..(321): Selenocysteine
  MOD_RES (339)..(339): Selenocysteine
  MOD_RES (368)..(368): Selenocysteine
  MOD_RES (373)..(373): Selenocysteine
  MOD_RES (381)..(381): Selenocysteine
  MOD_RES (389)..(389): Selenocysteine
  MOD_RES (414)..(414): Selenocysteine
  MOD_RES (442)..(442): Selenocysteine
  MOD_RES (447)..(447): Selenocysteine
  MOD_RES (460)..(460): Selenocysteine
  MOD_RES (468)..(470): Selenocysteine
  MOD_RES (497)..(497): Selenocysteine
MLLFPQVAVKXEPMSSSEXASXXADGSLNNFSGSAIGSSSFSPRPXHQFSPPQIYPSNRPYPHILPXPSSQXMAAYGQXQFXXGMQQAXAYAXYPQPGQPYGISSYGALWAGIKXEGGLSQSQSPGQXGFLSYGXSFSXPQPGQAPYSYQMQGSSFXXSSGIYXGNNSLXNSSGFNSSQQDYPSYPSFGQGQYAQYYNSSPYPAHYMXSSNXSPXXPSXNAXYQLQEPPSGIXSQAVXDPXAEYSXIHSPSXPIKDSDSDRLRRGSDGKSRGRGRRNNNPSPPPDSDLERVFIWDLDEXIIVFHSLLXGSYANRYGRDPPXSVSLGLRMEEMIFNLADXHLFFNDLEECDQVHIDDVSSDDNGQDLSXYNFGXDGFPAAAXSANLCLAXGVRGGVDWMRKLAFRYRRVKEIYNXYKNNVGGLLGPAKREAWLQLRAEIEALXDSWLXLALKALSLIHSRXNCVNILVXXXQLIPALAKVLLYGLGIVFPIENIYSAXKIGKESCFERIIQRFGRKVVYVVIGDGVEEEQGAKKHAMPFWRISSHSDLMALHHALELEYL

SEQ ID NO: 9502 - protein, 514 aa, Homo sapiens
  MOD_RES (11)..(11): Selenocysteine
  MOD_RES (31)..(31): Selenocysteine
  MOD_RES (39)..(39): Selenocysteine
  MOD_RES (64)..(64): Selenocysteine
  MOD_RES (72)..(72): Selenocysteine
  MOD_RES (82)..(82): Selenocysteine
  MOD_RES (85)..(85): Selenocysteine
  MOD_RES (101)..(101): Selenocysteine
  MOD_RES (104)..(104): Selenocysteine
  MOD_RES (110)..(110): Selenocysteine
  MOD_RES (116)..(117): Selenocysteine
  MOD_RES (175)..(175): Selenocysteine
  MOD_RES (177)..(177): Selenocysteine
  MOD_RES (201)..(201): Selenocysteine
  MOD_RES (207)..(207): Selenocysteine
  MOD_RES (214)..(214): Selenocysteine
  MOD_RES (254)..(254): Selenocysteine
  MOD_RES (263)..(263): Selenocysteine
  MOD_RES (265)..(265): Selenocysteine
  MOD_RES (274)..(276): Selenocysteine
  MOD_RES (294)..(294): Selenocysteine
  MOD_RES (323)..(323): Selenocysteine
  MOD_RES (369)..(369): Selenocysteine
  MOD_RES (380)..(380): Selenocysteine
  MOD_RES (385)..(385): Selenocysteine
  MOD_RES (397)..(397): Selenocysteine
  MOD_RES (402)..(402): Selenocysteine
  MOD_RES (423)..(425): Selenocysteine
  MOD_RES (452)..(452): Selenocysteine
  MOD_RES (454)..(454): Selenocysteine
MVELVISPSLXVNSDCLDKLKFNRADAAVWXLSDRQGIXKSAPLRVSQLFSRSCPRVLPRQPSXAMAAYGQXQYSAGIQQAXPYXAYPPPAQAYGIPSFSXSPXGQSPYXYQMHGXXGFYQGGNGLGNAAGFGSVHQDYPSYPGFPQSQYPQYYGSSYNPPYVPASSICPSPLSXSXYVLQEASHNVPNQSSESLAGEYNXHNGPSXPAKEGDXDRPHRASDGKLRGRSKRSSDPSPAGDNEIERVFVWDLDEXIIIFHSLLXGXFASRYGKDXXXSVRIGLMMEEMIFNLADXHLFFNDLEDCDQIHVDDVSSDDNGQDLSXYNFSADGFHSSAPGANLCLGSGVHGGVDWMRKLAFRYRRVKEMYNXYKNNVGGLIGXPKREXWLQLRAELEALXDLWLXHSLKALNLINSRPNCVNVLVXXXQLIPALAKVLLYGLGSVFPIENIYSAXKXGKESCFERIMQRFGRKAVYVVIGDGVEEEQGAKKHNMPFWRISCHADLEALRHALELEYL

SEQ ID NO: 9503 - protein, 459 aa, Homo sapiens
  MOD_RES (11)..(11): Selenocysteine
  MOD_RES (31)..(31): Selenocysteine
  MOD_RES (39)..(39): Selenocysteine
  MOD_RES (64)..(64): Selenocysteine
  MOD_RES (72)..(72): Selenocysteine
  MOD_RES (82)..(82): Selenocysteine
  MOD_RES (85)..(85): Selenocysteine
  MOD_RES (103)..(103): Selenocysteine
  MOD_RES (125)..(125): Selenocysteine
  MOD_RES (128)..(128): Selenocysteine
  MOD_RES (134)..(134): Selenocysteine
  MOD_RES (140)..(141): Selenocysteine
  MOD_RES (199)..(199): Selenocysteine
  MOD_RES (201)..(201): Selenocysteine
  MOD_RES (225)..(225): Selenocysteine
  MOD_RES (231)..(231): Selenocysteine
  MOD_RES (238)..(238): Selenocysteine
  MOD_RES (278)..(278): Selenocysteine
  MOD_RES (287)..(287): Selenocysteine
  MOD_RES (289)..(289): Selenocysteine
  MOD_RES (298)..(300): Selenocysteine
  MOD_RES (318)..(318): Selenocysteine
  MOD_RES (347)..(347): Selenocysteine
  MOD_RES (393)..(393): Selenocysteine
MVELVISPSLXVNSDCLDKLKFNRADAAVWXLSDRQGIXKSAPLRVSQLFSRSCPRVLPRQPSXAMAAYGQXQYSAGIQQAXPYXAYPPPAQAYGIPSYSIKXEDSLNHSPGQSGFLSYGSSFSXSPXGQSPYXYQMHGXXGFYQGGNGLGNAAGFGSVHQDYPSYPGFPQSQYPQYYGSSYNPPYVPASSICPSPLSXSXYVLQEASHNVPNQSSESLAGEYNXHNGPSXPAKEGDXDRPHRASDGKLRGRSKRSSDPSPAGDNEIERVFVWDLDEXIIIFHSLLXGXFASRYGKDXXXSVRIGLMMEEMIFNLADXHLFFNDLEDCDQIHVDDVSSDDNGQDLSXYNFSADGFHSSAPGANLCLGSGVHGGVDWMRKLAFRYRRVKEMYNXYKNNVGGKESCFERIMQRFGRKAVYVVIGDGVEEEQGAKKHNMPFWRISCHADLEALRHALELEYL

SEQ ID NO: 9504 - protein, 508 aa, Homo sapiens
  MOD_RES (11)..(11): Selenocysteine
  MOD_RES (31)..(31): Selenocysteine
  MOD_RES (39)..(39): Selenocysteine
  MOD_RES (64)..(64): Selenocysteine
  MOD_RES (72)..(72): Selenocysteine
  MOD_RES (82)..(82): Selenocysteine
  MOD_RES (85)..(85): Selenocysteine
  MOD_RES (103)..(103): Selenocysteine
  MOD_RES (125)..(125): Selenocysteine
  MOD_RES (128)..(128): Selenocysteine
  MOD_RES (134)..(134): Selenocysteine
  MOD_RES (140)..(141): Selenocysteine
  MOD_RES (199)..(199): Selenocysteine
  MOD_RES (201)..(201): Selenocysteine
  MOD_RES (225)..(225): Selenocysteine
  MOD_RES (231)..(231): Selenocysteine
  MOD_RES (238)..(238): Selenocysteine
  MOD_RES (278)..(278): Selenocysteine
  MOD_RES (287)..(287): Selenocysteine
  MOD_RES (289)..(289): Selenocysteine
  MOD_RES (317)..(317): Selenocysteine
  MOD_RES (363)..(363): Selenocysteine
  MOD_RES (374)..(374): Selenocysteine
  MOD_RES (379)..(379): Selenocysteine
  MOD_RES (391)..(391): Selenocysteine
  MOD_RES (396)..(396): Selenocysteine
  MOD_RES (417)..(419): Selenocysteine
  MOD_RES (446)..(446): Selenocysteine
  MOD_RES (448)..(448): Selenocysteine
MVELVISPSLXVNSDCLDKLKFNRADAAVWXLSDRQGIXKSAPLRVSQLFSRSCPRVLPRQPSXAMAAYGQXQYSAGIQQAXPYXAYPPPAQAYGIPSYSIKXEDSLNHSPGQSGFLSYGSSFSXSPXGQSPYXYQMHGXXGFYQGGNGLGNAAGFGSVHQDYPSYPGFPQSQYPQYYGSSYNPPYVPASSICPSPLSXSXYVLQEASHNVPNQSSESLAGEYNXHNGPSXPAKEGDXDRPHRASDGKLRGRSKRSSDPSPAGDNEIERVFVWDLDEXIIIFHSLLXGXFASRYGKDCDQIHVDDVSSDDNGQDLSXYNFSADGFHSSAPGANLCLGSGVHGGVDWMRKLAFRYRRVKEMYNXYKNNVGGLIGXPKREXWLQLRAELEALXDLWLXHSLKALNLINSRPNCVNVLVXXXQLIPALAKVLLYGLGSVFPIENIYSAXKXGKESCFERIMQRFGRKAVYVVIGDGVEEEQGAKKHNMPFWRISCHADLEALRHALELEYL

SEQ ID NO: 9505 - protein, 538 aa, Homo sapiens
  MOD_RES (11)..(11): Selenocysteine
  MOD_RES (31)..(31): Selenocysteine
  MOD_RES (39)..(39): Selenocysteine
  MOD_RES (64)..(64): Selenocysteine
  MOD_RES (72)..(72): Selenocysteine
  MOD_RES (82)..(82): Selenocysteine
  MOD_RES (85)..(85): Selenocysteine
  MOD_RES (103)..(103): Selenocysteine
  MOD_RES (125)..(125): Selenocysteine
  MOD_RES (128)..(128): Selenocysteine
  MOD_RES (134)..(134): Selenocysteine
  MOD_RES (140)..(141): Selenocysteine
  MOD_RES (199)..(199): Selenocysteine
  MOD_RES (201)..(201): Selenocysteine
  MOD_RES (225)..(225): Selenocysteine
  MOD_RES (231)..(231): Selenocysteine
  MOD_RES (238)..(238): Selenocysteine
  MOD_RES (278)..(278): Selenocysteine
  MOD_RES (287)..(287): Selenocysteine
  MOD_RES (289)..(289): Selenocysteine
  MOD_RES (298)..(300): Selenocysteine
  MOD_RES (318)..(318): Selenocysteine
  MOD_RES (347)..(347): Selenocysteine
  MOD_RES (393)..(393): Selenocysteine
  MOD_RES (404)..(404): Selenocysteine
  MOD_RES (409)..(409): Selenocysteine
  MOD_RES (421)..(421): Selenocysteine
  MOD_RES (426)..(426): Selenocysteine
  MOD_RES (447)..(449): Selenocysteine
  MOD_RES (476)..(476): Selenocysteine
  MOD_RES (478)..(478): Selenocysteine
MVELVISPSLXVNSDCLDKLKFNRADAAVWXLSDRQGIXKSAPLRVSQLFSRSCPRVLPRQPSXAMAAYGQXQYSAGIQQAXPYXAYPPPAQAYGIPSYSIKXEDSLNHSPGQSGFLSYGSSFSXSPXGQSPYXYQMHGXXGFYQGGNGLGNAAGFGSVHQDYPSYPGFPQSQYPQYYGSSYNPPYVPASSICPSPLSXSXYVLQEASHNVPNQSSESLAGEYNXHNGPSXPAKEGDXDRPHRASDGKLRGRSKRSSDPSPAGDNEIERVFVWDLDEXIIIFHSLLXGXFASRYGKDXXXSVRIGLMMEEMIFNLADXHLFFNDLEDCDQIHVDDVSSDDNGQDLSXYNFSADGFHSSAPGANLCLGSGVHGGVDWMRKLAFRYRRVKEMYNXYKNNVGGLIGXPKREXWLQLRAELEALXDLWLXHSLKALNLINSRPNCVNVLVXXXQLIPALAKVLLYGLGSVFPIENIYSAXKXGKESCFERIMQRFGRKAVYVVIGDGVEEEQGAKKHNMPFWRISCHADLEALRHALELEYL

SEQ ID NO: 9506 - protein, 197 aa, Homo sapiens
  MOD_RES (17)..(17): Selenocysteine
  MOD_RES (25)..(25): Selenocysteine
  MOD_RES (35)..(35): Selenocysteine
  MOD_RES (38)..(38): Selenocysteine
  MOD_RES (56)..(56): Selenocysteine
  MOD_RES (78)..(78): Selenocysteine
  MOD_RES (81)..(81): Selenocysteine
  MOD_RES (87)..(87): Selenocysteine
  MOD_RES (96)..(96): Selenocysteine
  MOD_RES (102)..(102): Selenocysteine
  MOD_RES (109)..(109): Selenocysteine
  MOD_RES (149)..(149): Selenocysteine
  MOD_RES (158)..(158): Selenocysteine
  MOD_RES (160)..(160): Selenocysteine
  MOD_RES (169)..(171): Selenocysteine
  MOD_RES (189)..(189): Selenocysteine
QLFSRSCPRVLPRQPSXAMAAYGQXQYSAGIQQAXPYXAYPPPAQAYGIPSYSIKXEDSLNHSPGQSGFLSYGSSFSXSPXGQSPYXYQMHGEYNXHNGPSXPAKEGDXDRPHRASDGKLRGRSKRSSDPSPAGDNEIERVFVWDLDEXIIIFHSLLXGXFASRYGKDXXXSVRIGLMMEEMIFNLADXHLFFNDLE

SEQ ID NO: 9507 - protein, 527 aa, Homo sapiens
  MOD_RES (24)..(24): Selenocysteine
  MOD_RES (40)..(40): Selenocysteine
  MOD_RES (55)..(55): Selenocysteine
  MOD_RES (57)..(57): Selenocysteine
  MOD_RES (68)..(68): Selenocysteine
  MOD_RES (88)..(88): Selenocysteine
  MOD_RES (94)..(94): Selenocysteine
  MOD_RES (98)..(98): Selenocysteine
  MOD_RES (102)..(102): Selenocysteine
  MOD_RES (112)..(112): Selenocysteine
  MOD_RES (114)..(114): Selenocysteine
  MOD_RES (124)..(124): Selenocysteine
  MOD_RES (131)..(131): Selenocysteine
  MOD_RES (134)..(134): Selenocysteine
  MOD_RES (153)..(153): Selenocysteine
  MOD_RES (155)..(155): Selenocysteine
  MOD_RES (174)..(174): Selenocysteine
  MOD_RES (177)..(177): Selenocysteine
  MOD_RES (184)..(185): Selenocysteine
  MOD_RES (189)..(190): Selenocysteine
  MOD_RES (215)..(215): Selenocysteine
  MOD_RES (222)..(223): Selenocysteine
  MOD_RES (228)..(228): Selenocysteine
  MOD_RES (237)..(237): Selenocysteine
  MOD_RES (249)..(249): Selenocysteine
  MOD_RES (267)..(267): Selenocysteine
  MOD_RES (276)..(276): Selenocysteine
  MOD_RES (288)..(288): Selenocysteine
  MOD_RES (296)..(296): Selenocysteine
  MOD_RES (307)..(307): Selenocysteine
  MOD_RES (341)..(341): Selenocysteine
  MOD_RES (410)..(410): Selenocysteine
  MOD_RES (416)..(416): Selenocysteine
  MOD_RES (436)..(438): Selenocysteine
  MOD_RES (465)..(465): Selenocysteine
  MOD_RES (485)..(485): Selenocysteine
  MOD_RES (510)..(510): Selenocysteine
MEEEQDLPEQPVKKAKMQESGEQXISQVSNPDVSDQKPEXSSLASNLPMSEEIMXCXDYIPRSSNDYXSQMYSAKPYAHILSVPVSEXAYPGQXQYQXLQQXQPYAVYPQAXQXYGLPPFASSXNASLISXSSXIANIPAAAVASISNQDYPXYXILGQNQYQACYPSSSFGVXGQXNSDAESXXLAAXXYQSEKPSVMAPAPAAQRLSSGDPSXSPSLSQXXPSKDXDDQSRKNMXSKNRGKRKADAXSSQDSELERVFLWDLDEXIIIFHSLLXGSYAQKYGKDPXVVIGSGLXMEEMIFEVADXHLFFNDLEECDQVHVEDVASDDNGQDLSNYSFSXDGFSGSGGSGSHGSSVGVQGGVDWMRKLAFRYRKVREIYDKHKSNVGGLLSPQRKEALQRLRAEIEVLXDSWLGXALKSLLLIQSRKNCVNVLIXXXQLVPALAKVLLYGLGEIFPIENIYSAXKIGKESCFERIVSRFGKKVXYVVIGDGRDEEIAAKQHNMPFWRIXNHGDLVSLHQALELDFL

SEQ ID NO: 9508 - protein, 536 aa, Homo sapiens
  MOD_RES (24)..(24): Selenocysteine
  MOD_RES (40)..(40): Selenocysteine
  MOD_RES (55)..(55): Selenocysteine
  MOD_RES (57)..(57): Selenocysteine
  MOD_RES (68)..(68): Selenocysteine
  MOD_RES (88)..(88): Selenocysteine
  MOD_RES (94)..(94): Selenocysteine
  MOD_RES (98)..(98): Selenocysteine
  MOD_RES (102)..(102): Selenocysteine
  MOD_RES (112)..(112): Selenocysteine
  MOD_RES (114)..(114): Selenocysteine
  MOD_RES (124)..(124): Selenocysteine
  MOD_RES (131)..(131): Selenocysteine
  MOD_RES (134)..(134): Selenocysteine
  MOD_RES (153)..(153): Selenocysteine
  MOD_RES (155)..(155): Selenocysteine
  MOD_RES (174)..(174): Selenocysteine
  MOD_RES (177)..(177): Selenocysteine
  MOD_RES (184)..(185): Selenocysteine
  MOD_RES (189)..(190): Selenocysteine
  MOD_RES (215)..(215): Selenocysteine
  MOD_RES (222)..(223): Selenocysteine
  MOD_RES (228)..(228): Selenocysteine
  MOD_RES (237)..(237): Selenocysteine
  MOD_RES (249)..(249): Selenocysteine
  MOD_RES (267)..(267): Selenocysteine
  MOD_RES (276)..(276): Selenocysteine
  MOD_RES (288)..(288): Selenocysteine
  MOD_RES (296)..(296): Selenocysteine
  MOD_RES (307)..(307): Selenocysteine
  MOD_RES (341)..(341): Selenocysteine
  MOD_RES (410)..(410): Selenocysteine
  MOD_RES (416)..(416): Selenocysteine
  MOD_RES (436)..(438): Selenocysteine
  MOD_RES (465)..(465): Selenocysteine
  MOD_RES (485)..(485): Selenocysteine
  MOD_RES (518)..(518): Selenocysteine
MEEEQDLPEQPVKKAKMQESGEQXISQVSNPDVSDQKPEXSSLASNLPMSEEIMXCXDYIPRSSNDYXSQMYSAKPYAHILSVPVSEXAYPGQXQYQXLQQXQPYAVYPQAXQXYGLPPFASSXNASLISXSSXIANIPAAAVASISNQDYPXYXILGQNQYQACYPSSSFGVXGQXNSDAESXXLAAXXYQSEKPSVMAPAPAAQRLSSGDPSXSPSLSQXXPSKDXDDQSRKNMXSKNRGKRKADAXSSQDSELERVFLWDLDEXIIIFHSLLXGSYAQKYGKDPXVVIGSGLXMEEMIFEVADXHLFFNDLEECDQVHVEDVASDDNGQDLSNYSFSXDGFSGSGGSGSHGSSVGVQGGVDWMRKLAFRYRKVREIYDKHKSNVGGLLSPQRKEALQRLRAEIEVLXDSWLGXALKSLLLIQSRKNCVNVLIXXXQLVPALAKVLLYGLGEIFPIENIYSAXKIGKESCFERIVSRFGKKVXYVVIGDGRDEEIAAKQQLYFLDMEALGCQLEPXALILFIQLSGNLSNYNKL

SEQ ID NO: 9509 - protein, 573 aa, Homo sapiens
  MOD_RES (24)..(24): Selenocysteine
  MOD_RES (40)..(40): Selenocysteine
  MOD_RES (55)..(55): Selenocysteine
  MOD_RES (57)..(57): Selenocysteine
  MOD_RES (68)..(68): Selenocysteine
  MOD_RES (88)..(88): Selenocysteine
  MOD_RES (94)..(94): Selenocysteine
  MOD_RES (98)..(98): Selenocysteine
  MOD_RES (102)..(102): Selenocysteine
  MOD_RES (112)..(112): Selenocysteine
  MOD_RES (114)..(114): Selenocysteine
  MOD_RES (136)..(136): Selenocysteine
  MOD_RES (146)..(146): Selenocysteine
  MOD_RES (148)..(149): Selenocysteine
  MOD_RES (152)..(153): Selenocysteine
  MOD_RES (170)..(170): Selenocysteine
  MOD_RES (177)..(177): Selenocysteine
  MOD_RES (180)..(180): Selenocysteine
  MOD_RES (199)..(199): Selenocysteine
  MOD_RES (201)..(201): Selenocysteine
  MOD_RES (220)..(220): Selenocysteine
  MOD_RES (223)..(223): Selenocysteine
  MOD_RES (230)..(231): Selenocysteine
  MOD_RES (235)..(236): Selenocysteine
  MOD_RES (261)..(261): Selenocysteine
  MOD_RES (268)..(269): Selenocysteine
  MOD_RES (274)..(274): Selenocysteine
  MOD_RES (283)..(283): Selenocysteine
  MOD_RES (295)..(295): Selenocysteine
  MOD_RES (313)..(313): Selenocysteine
  MOD_RES (322)..(322): Selenocysteine
  MOD_RES (334)..(334): Selenocysteine
  MOD_RES (342)..(342): Selenocysteine
  MOD_RES (353)..(353): Selenocysteine
  MOD_RES (387)..(387): Selenocysteine
  MOD_RES (456)..(456): Selenocysteine
  MOD_RES (462)..(462): Selenocysteine
  MOD_RES (482)..(484): Selenocysteine
  MOD_RES (511)..(511): Selenocysteine
  MOD_RES (531)..(531): Selenocysteine
  MOD_RES (556)..(556): Selenocysteine
MEEEQDLPEQPVKKAKMQESGEQXISQVSNPDVSDQKPEXSSLASNLPMSEEIMXCXDYIPRSSNDYXSQMYSAKPYAHILSVPVSEXAYPGQXQYQXLQQXQPYAVYPQAXQXYGLPPFGALWPGMKPESGLIQXPSPSQHSVLXCXXGLXXSQPSPAHYSYPIQASSXNASLISXSSXIANIPAAAVASISNQDYPXYXILGQNQYQACYPSSSFGVXGQXNSDAESXXLAAXXYQSEKPSVMAPAPAAQRLSSGDPSXSPSLSQXXPSKDXDDQSRKNMXSKNRGKRKADAXSSQDSELERVFLWDLDEXIIIFHSLLXGSYAQKYGKDPXVVIGSGLXMEEMIFEVADXHLFFNDLEECDQVHVEDVASDDNGQDLSNYSFSXDGFSGSGGSGSHGSSVGVQGGVDWMRKLAFRYRKVREIYDKHKSNVGGLLSPQRKEALQRLRAEIEVLXDSWLGXALKSLLLIQSRKNCVNVLIXXXQLVPALAKVLLYGLGEIFPIENIYSAXKIGKESCFERIVSRFGKKVXYVVIGDGRDEEIAAKQHNMPFWRIXNHGDLVSLHQALELDFL

SEQ ID NO: 9510 - protein, 416 aa, Homo sapiens
  MOD_RES (11)..(11): Selenocysteine
  MOD_RES (14)..(14): Selenocysteine
  MOD_RES (21)..(21): Selenocysteine
  MOD_RES (24)..(24): Selenocysteine
  MOD_RES (43)..(43): Selenocysteine
  MOD_RES (45)..(45): Selenocysteine
  MOD_RES (64)..(64): Selenocysteine
  MOD_RES (67)..(67): Selenocysteine
  MOD_RES (74)..(75): Selenocysteine
  MOD_RES (79)..(80): Selenocysteine
  MOD_RES (104)..(104): Selenocysteine
  MOD_RES (111)..(112): Selenocysteine
  MOD_RES (117)..(117): Selenocysteine
  MOD_RES (126)..(126): Selenocysteine
  MOD_RES (138)..(138): Selenocysteine
  MOD_RES (156)..(156): Selenocysteine
  MOD_RES (165)..(165): Selenocysteine
  MOD_RES (177)..(177): Selenocysteine
  MOD_RES (185)..(185): Selenocysteine
  MOD_RES (196)..(196): Selenocysteine
  MOD_RES (230)..(230): Selenocysteine
  MOD_RES (299)..(299): Selenocysteine
  MOD_RES (305)..(305): Selenocysteine
  MOD_RES (325)..(327): Selenocysteine
  MOD_RES (354)..(354): Selenocysteine
  MOD_RES (374)..(374): Selenocysteine
  MOD_RES (399)..(399): Selenocysteine
MIIPHKCILQXSSXNASLISXSSXIANIPAAAVASISNQDYPXYXILGQNQYQACYPSSSFGVXGQXNSDAESXXLAAXXYQSEKPSVMAPAPAAQRLSSDPSXSPSLSQXXPSKDXDDQSRKNMXSKNRGKRKADAXSSQDSELERVFLWDLDEXIIIFHSLLXGSYAQKYGKDPXVVIGSGLXMEEMIFEVADXHLFFNDLEECDQVHVEDVASDDNGQDLSNYSFSXDGFSGSGGSGSHGSSVGVQGGVDWMRKLAFRYRKVREIYDKHKSNVGGLLSPQRKEALQRLRAEIEVLXDSWLGXALKSLLLIQSRKNCVNVLIXXXQLVPALAKVLLYGLGEIFPIENIYSAXKIGKESCFERIVSRFGKKVXYVVIGDGRDEEIAAKQHNMPFWRIXNHGDLVSLHQALELDFL

SEQ ID NO: 9511 - protein, 520 aa, Homo sapiens
  MOD_RES (2)..(2): Selenocysteine
  MOD_RES (4)..(4): Selenocysteine
  MOD_RES (15)..(15): Selenocysteine
  MOD_RES (35)..(35): Selenocysteine
  MOD_RES (41)..(41): Selenocysteine
  MOD_RES (45)..(45): Selenocysteine
  MOD_RES (49)..(49): Selenocysteine
  MOD_RES (59)..(59): Selenocysteine
  MOD_RES (61)..(61): Selenocysteine
  MOD_RES (83)..(83): Selenocysteine
  MOD_RES (93)..(93): Selenocysteine
  MOD_RES (95)..(96): Selenocysteine
  MOD_RES (99)..(100): Selenocysteine
  MOD_RES (117)..(117): Selenocysteine
  MOD_RES (124)..(124): Selenocysteine
  MOD_RES (127)..(127): Selenocysteine
  MOD_RES (146)..(146): Selenocysteine
  MOD_RES (148)..(148): Selenocysteine
  MOD_RES (167)..(167): Selenocysteine
  MOD_RES (170)..(170): Selenocysteine
  MOD_RES (177)..(178): Selenocysteine
  MOD_RES (182)..(183): Selenocysteine
  MOD_RES (208)..(208): Selenocysteine
  MOD_RES (215)..(216): Selenocysteine
  MOD_RES (221)..(221): Selenocysteine
  MOD_RES (230)..(230): Selenocysteine
  MOD_RES (242)..(242): Selenocysteine
  MOD_RES (260)..(260): Selenocysteine
  MOD_RES (269)..(269): Selenocysteine
  MOD_RES (281)..(281): Selenocysteine
  MOD_RES (289)..(289): Selenocysteine
  MOD_RES (300)..(300): Selenocysteine
  MOD_RES (334)..(334): Selenocysteine
  MOD_RES (403)..(403): Selenocysteine
  MOD_RES (409)..(409): Selenocysteine
  MOD_RES (429)..(431): Selenocysteine
  MOD_RES (458)..(458): Selenocysteine
  MOD_RES (478)..(478): Selenocysteine
  MOD_RES (503)..(503): Selenocysteine
MXCXDYIPRSSNDYXSQMYSAKPYAHILSVPVSEXAYPGQXQYQXLQQXQPYAVYPQAXQXYGLPPFGALWPGMKPESGLIQXPSPSQHSVLXCXXGLXXSQPSPAHYSYPIQASSXNASLISXSSXIANIPAAAVASISNQDYPXYXILGQNQYQACYPSSSFGVXGQXNSDAESXXLAAXXYQSEKPSVMAPAPAAQRLSSGDPSXSPSLSQXXPSKDXDDQSRKNMXSKNRGKRKADAXSSQDSELERVFLWDLDEXIIIFHSLLXGSYAQKYGKDPXVVIGSGLXMEEMIFEVADXHLFFNDLEECDQVHVEDVASDDNGQDLSNYSFSXDGFSGSGGSGSHGSSVGVQGGVDWMRKLAFRYRKVREIYDKHKSNVGGLLSPQRKEALQRLRAEIEVLXDSWLGXALKSLLLIQSRKNCVNVLIXXXQLVPALAKVLLYGLGEIFPIENIYSAXKIGKESCFERIVSRFGKKVXYVVIGDGRDEEIAAKQHNMPFWRIXNHGDLVSLHQALELDFL

SEQ ID NO: 9512 - protein, 639 aa, Homo sapiens
  MOD_RES (15)..(15): Selenocysteine
  MOD_RES (17)..(17): Selenocysteine
  MOD_RES (40)..(40): Selenocysteine
  MOD_RES (47)..(47): Selenocysteine
  MOD_RES (61)..(61): Selenocysteine
  MOD_RES (64)..(65): Selenocysteine
  MOD_RES (68)..(68): Selenocysteine
  MOD_RES (74)..(74): Selenocysteine
  MOD_RES (78)..(78): Selenocysteine
  MOD_RES (87)..(87): Selenocysteine
  MOD_RES (92)..(92): Selenocysteine
  MOD_RES (100)..(100): Selenocysteine
  MOD_RES (108)..(109): Selenocysteine
  MOD_RES (111)..(112): Selenocysteine
  MOD_RES (119)..(119): Selenocysteine
  MOD_RES (121)..(121): Selenocysteine
  MOD_RES (126)..(126): Selenocysteine
  MOD_RES (154)..(154): Selenocysteine
  MOD_RES (159)..(159): Selenocysteine
  MOD_RES (167)..(167): Selenocysteine
  MOD_RES (179)..(179): Selenocysteine
  MOD_RES (184)..(184): Selenocysteine
  MOD_RES (192)..(192): Selenocysteine
  MOD_RES (204)..(204): Selenocysteine
  MOD_RES (211)..(211): Selenocysteine
  MOD_RES (228)..(228): Selenocysteine
  MOD_RES (234)..(234): Selenocysteine
  MOD_RES (250)..(250): Selenocysteine
  MOD_RES (261)..(261): Selenocysteine
  MOD_RES (274)..(274): Selenocysteine
  MOD_RES (289)..(289): Selenocysteine
  MOD_RES (295)..(295): Selenocysteine
  MOD_RES (299)..(299): Selenocysteine
  MOD_RES (303)..(303): Selenocysteine
  MOD_RES (307)..(307): Selenocysteine
  MOD_RES (309)..(309): Selenocysteine
  MOD_RES (320)..(320): Selenocysteine
  MOD_RES (328)..(328): Selenocysteine
  MOD_RES (334)..(334): Selenocysteine
  MOD_RES (343)..(343): Selenocysteine
  MOD_RES (379)..(379): Selenocysteine
  MOD_RES (388)..(388): Selenocysteine
  MOD_RES (404)..(404): Selenocysteine
  MOD_RES (419)..(419): Selenocysteine
  MOD_RES (448)..(448): Selenocysteine
  MOD_RES (453)..(453): Selenocysteine
  MOD_RES (469)..(469): Selenocysteine
  MOD_RES (494)..(494): Selenocysteine
  MOD_RES (522)..(522): Selenocysteine
  MOD_RES (527)..(527): Selenocysteine
  MOD_RES (538)..(538): Selenocysteine
  MOD_RES (548)..(550): Selenocysteine
  MOD_RES (577)..(577): Selenocysteine
  MOD_RES (594)..(594): Selenocysteine
  MOD_RES (597)..(597): Selenocysteine
MEDSQDLNEQSVKKXCXESDVSQSQNSRSMEMQDLASPHXLVGGGDXPGSSKLEKSNLSSXSVXXNGXGGENMXVLNXADWLLSCNXPSSAXMSLLAVKXEPLNSSEXXAXXGDGALDXFXGSVIXSSGYSPRSAHQYSPQLYPSKPYPHILSXPAAQXMSAYAGQXQYSGMQQPAVYXAYSQXGQPYSLPXYDLGVMLPAIKXESGLSQXQSPLQSGCLSYSPGFSXPQPGQXPYSYQMPGSSFAPSSXIYANNSVSNSXNFSGSQQDYPSYXAFGQNQYAQYYSASXYGAYMXSNNXADGXPSSXSXYQLQESLPGLXNQPGEFDXMQSPSXPIKDLDERXCRSSGSKSRGRGRKNNPSPPPDSDLERVFVWDLDEXIIVFHSLLXGSYAQKYGKDPPMAVXLGLRMEEMIFNLADXHLFFNDLEECDQVHIDDVSSDDNGQDLSXYSFAXDGFHAAASSANLCLPXGVRGGVDWMRKLAFRYRRVKELYNXYKNNVGGLLGPAKRDAWLQLRAEIEGLXDSWLXNALKSLSIISXRSNCINVLVXXXQLIPALAKVLLYSLGGAFPIENIYSAXKIGKESCFERIVSRFGXNIXYVVIGDGRDEEHAANQHNMPFWRISSHSDLLALHQALELEYL

SEQ ID NO: 9513 - protein, 639 aa, Homo sapiens
  MOD_RES (15)..(15): Selenocysteine
  MOD_RES (17)..(17): Selenocysteine
  MOD_RES (40)..(40): Selenocysteine
  MOD_RES (47)..(47): Selenocysteine
  MOD_RES (61)..(61): Selenocysteine
  MOD_RES (64)..(65): Selenocysteine
  MOD_RES (68)..(68): Selenocysteine
  MOD_RES (74)..(74): Selenocysteine
  MOD_RES (78)..(78): Selenocysteine
  MOD_RES (87)..(87): Selenocysteine
  MOD_RES (92)..(92): Selenocysteine
  MOD_RES (100)..(100): Selenocysteine
  MOD_RES (108)..(109): Selenocysteine
  MOD_RES (111)..(112): Selenocysteine
  MOD_RES (119)..(119): Selenocysteine
  MOD_RES (121)..(121): Selenocysteine
  MOD_RES (126)..(126): Selenocysteine
  MOD_RES (154)..(154): Selenocysteine
  MOD_RES (159)..(159): Selenocysteine
  MOD_RES (167)..(167): Selenocysteine
  MOD_RES (179)..(179): Selenocysteine
  MOD_RES (184)..(184): Selenocysteine
  MOD_RES (192)..(192): Selenocysteine
  MOD_RES (204)..(204): Selenocysteine
  MOD_RES (211)..(211): Selenocysteine
  MOD_RES (228)..(228): Selenocysteine
  MOD_RES (234)..(234): Selenocysteine
  MOD_RES (250)..(250): Selenocysteine
  MOD_RES (261)..(261): Selenocysteine
  MOD_RES (274)..(274): Selenocysteine
  MOD_RES (289)..(289): Selenocysteine
  MOD_RES (295)..(295): Selenocysteine
  MOD_RES (299)..(299): Selenocysteine
  MOD_RES (303)..(303): Selenocysteine
  MOD_RES (307)..(307): Selenocysteine
  MOD_RES (309)..(309): Selenocysteine
  MOD_RES (320)..(320): Selenocysteine
  MOD_RES (328)..(328): Selenocysteine
  MOD_RES (334)..(334): Selenocysteine
  MOD_RES (343)..(343): Selenocysteine
  MOD_RES (379)..(379): Selenocysteine
  MOD_RES (388)..(388): Selenocysteine
  MOD_RES (404)..(404): Selenocysteine
  MOD_RES (419)..(419): Selenocysteine
  MOD_RES (448)..(448): Selenocysteine
  MOD_RES (453)..(453): Selenocysteine
  MOD_RES (469)..(469): Selenocysteine
  MOD_RES (494)..(494): Selenocysteine
  MOD_RES (522)..(522): Selenocysteine
  MOD_RES (527)..(527): Selenocysteine
  MOD_RES (538)..(538): Selenocysteine
  MOD_RES (548)..(550): Selenocysteine
  MOD_RES (577)..(577): Selenocysteine
MEDSQDLNEQSVKKXCXESDVSQSQNSRSMEMQDLASPHXLVGGGDXPGSSKLEKSNLSSXSVXXNGXGGENMXVLNXADWLLSCNXPSSAXMSLLAVKXEPLNSSEXXAXXGDGALDXFXGSVIXSSGYSPRSAHQYSPQLYPSKPYPHILSXPAAQXMSAYAGQXQYSGMQQPAVYXAYSQXGQPYSLPXYDLGVMLPAIKXESGLSQXQSPLQSGCLSYSPGFSXPQPGQXPYSYQMPGSSFAPSSXIYANNSVSNSXNFSGSQQDYPSYXAFGQNQYAQYYSASXYGAYMXSNNXADGXPSSXSXYQLQESLPGLXNQPGEFDXMQSPSXPIKDLDERXCRSSGSKSRGRGRKNNPSPPPDSDLERVFVWDLDEXIIVFHSLLXGSYAQKYGKDPPMAVXLGLRMEEMIFNLADXHLFFNDLEECDQVHIDDVSSDDNGQDLSXYSFAXDGFHAAASSANLCLPXGVRGGVDWMRKLAFRYRRVKELYNXYKNNVGGLLGPAKRDAWLQLRAEIEGLXDSWLXNALKSLSIISXRSNCINVLVXXXQLIPALAKVLLYSLGGAFPIENIYSAXKIGKESCFERIMQRFGRKVVYVVIGDGVEEEQAAKKHNMPFWRISSHSDLLALHQALELEYL

SEQ ID NO: 9514 - protein, 645 aa, Homo sapiens
  MOD_RES (15)..(15): Selenocysteine
  MOD_RES (17)..(17): Selenocysteine
  MOD_RES (40)..(40): Selenocysteine
  MOD_RES (47)..(47): Selenocysteine
  MOD_RES (61)..(61): Selenocysteine
  MOD_RES (64)..(65): Selenocysteine
  MOD_RES (68)..(68): Selenocysteine
  MOD_RES (74)..(74): Selenocysteine
  MOD_RES (78)..(78): Selenocysteine
  MOD_RES (87)..(87): Selenocysteine
  MOD_RES (92)..(92): Selenocysteine
  MOD_RES (100)..(100): Selenocysteine
  MOD_RES (108)..(109): Selenocysteine
  MOD_RES (111)..(112): Selenocysteine
  MOD_RES (119)..(119): Selenocysteine
  MOD_RES (121)..(121): Selenocysteine
  MOD_RES (126)..(126): Selenocysteine
  MOD_RES (154)..(154): Selenocysteine
  MOD_RES (159)..(159): Selenocysteine
  MOD_RES (167)..(167): Selenocysteine
  MOD_RES (179)..(179): Selenocysteine
  MOD_RES (184)..(184): Selenocysteine
  MOD_RES (192)..(192): Selenocysteine
  MOD_RES (204)..(204): Selenocysteine
  MOD_RES (211)..(211): Selenocysteine
  MOD_RES (228)..(228): Selenocysteine
  MOD_RES (234)..(234): Selenocysteine
  MOD_RES (250)..(250): Selenocysteine
  MOD_RES (261)..(261): Selenocysteine
  MOD_RES (274)..(274): Selenocysteine
  MOD_RES (289)..(289): Selenocysteine
  MOD_RES (295)..(295): Selenocysteine
  MOD_RES (299)..(299): Selenocysteine
  MOD_RES (303)..(303): Selenocysteine
  MOD_RES (307)..(307): Selenocysteine
  MOD_RES (309)..(309): Selenocysteine
  MOD_RES (320)..(320): Selenocysteine
  MOD_RES (325)..(325): Selenocysteine
  MOD_RES (334)..(334): Selenocysteine
  MOD_RES (340)..(340): Selenocysteine
  MOD_RES (349)..(349): Selenocysteine
  MOD_RES (385)..(385): Selenocysteine
  MOD_RES (394)..(394): Selenocysteine
  MOD_RES (410)..(410): Selenocysteine
  MOD_RES (425)..(425): Selenocysteine
  MOD_RES (454)..(454): Selenocysteine
  MOD_RES (459)..(459): Selenocysteine
  MOD_RES (475)..(475): Selenocysteine
  MOD_RES (500)..(500): Selenocysteine
  MOD_RES (528)..(528): Selenocysteine
  MOD_RES (533)..(533): Selenocysteine
  MOD_RES (544)..(544): Selenocysteine
  MOD_RES (554)..(556): Selenocysteine
  MOD_RES (583)..(583): Selenocysteine
MEDSQDLNEQSVKKXCXESDVSQSQNSRSMEMQDLASPHXLVGGGDXPGSSKLEKSNLSSXSVXXNGXGGENMXVLNXADWLLSCNXPSSAXMSLLAVKXEPLNSSEXXAXXGDGALDXFXGSVIXSSGYSPRSAHQYSPQLYPSKPYPHILSXPAAQXMSAYAGQXQYSGMQQPAVYXAYSQXGQPYSLPXYDLGVMLPAIKXESGLSQXQSPLQSGCLSYSPGFSXPQPGQXPYSYQMPGSSFAPSSXIYANNSVSNSXNFSGSQQDYPSYXAFGQNQYAQYYSASXYGAYMXSNNXADGXPSSXSXYQLQESLPGLXNQPGXDLHPGEFDXMQSPSXPIKDLDERXCRSSGSKSRGRGRKNNPSPPPDSDLERVFVWDLDEXIIVFHSLLXGSYAQKYGKDPPMAVXLGLRMEEMIFNLADXHLFFNDLEECDQVHIDDVSSDDNGQDLSXYSFAXDGFHAAASSANLCLPXGVRGGVDWMRKLAFRYRRVKELYNXYKNNVGGLLGPAKRDAWLQLRAEIEGLXDSWLXNALKSLSIISXRSNCINVLVXXXQLIPALAKVLLYSLGGAFPIENIYSAXKIGKESCFERIMQRFGRKVVYVVIGDGVEEEQAAKKHNMPFWRISSHSDLLALHQALELEYL

SEQ ID NO: 9515 - protein, 570 aa, Homo sapiens
  MOD_RES (15)..(15): Selenocysteine
  MOD_RES (17)..(17): Selenocysteine
  MOD_RES (40)..(40): Selenocysteine
  MOD_RES (47)..(47): Selenocysteine
  MOD_RES (61)..(61): Selenocysteine
  MOD_RES (64)..(65): Selenocysteine
  MOD_RES (68)..(68): Selenocysteine
  MOD_RES (72)..(72): Selenocysteine
  MOD_RES (100)..(100): Selenocysteine
  MOD_RES (105)..(105): Selenocysteine
  MOD_RES (113)..(113): Selenocysteine
  MOD_RES (125)..(125): Selenocysteine
  MOD_RES (130)..(130): Selenocysteine
  MOD_RES (138)..(138): Selenocysteine
  MOD_RES (150)..(150): Selenocysteine
  MOD_RES (157)..(157): Selenocysteine
  MOD_RES (174)..(174): Selenocysteine
  MOD_RES (180)..(180): Selenocysteine
  MOD_RES (196)..(196): Selenocysteine
  MOD_RES (207)..(207): Selenocysteine
  MOD_RES (220)..(220): Selenocysteine
  MOD_RES (235)..(235): Selenocysteine
  MOD_RES (241)..(241): Selenocysteine
  MOD_RES (245)..(245): Selenocysteine
  MOD_RES (249)..(249): Selenocysteine
  MOD_RES (253)..(253): Selenocysteine
  MOD_RES (255)..(255): Selenocysteine
  MOD_RES (266)..(266): Selenocysteine
  MOD_RES (271)..(271): Selenocysteine
  MOD_RES (280)..(280): Selenocysteine
  MOD_RES (286)..(286): Selenocysteine
  MOD_RES (295)..(295): Selenocysteine
  MOD_RES (331)..(331): Selenocysteine
  MOD_RES (340)..(340): Selenocysteine
  MOD_RES (356)..(356): Selenocysteine
  MOD_RES (371)..(371): Selenocysteine
  MOD_RES (400)..(400): Selenocysteine
  MOD_RES (405)..(405): Selenocysteine
  MOD_RES (421)..(421): Selenocysteine
  MOD_RES (446)..(446): Selenocysteine
  MOD_RES (474)..(474): Selenocysteine
  MOD_RES (479)..(479): Selenocysteine
  MOD_RES (490)..(490): Selenocysteine
  MOD_RES (500)..(502): Selenocysteine
  MOD_RES (529)..(529): Selenocysteine
  MOD_RES (546)..(546): Selenocysteine
  MOD_RES (549)..(549): Selenocysteine
MEDSQDLNEQSVKKXCXESDVSQSQNSRSMEMQDLASPHXLVGGGDXPGSSKLEKSNLSSXSVXXNGXGVIXSSGYSPRSAHQYSPQLYPSKPYPHILSXPAAQXMSAYAGQXQYSGMQQPAVYXAYSQXGQPYSLPXYDLGVMLPAIKXESGLSQXQSPLQSGCLSYSPGFSXPQPGQXPYSYQMPGSSFAPSSXIYANNSVSNSXNFSGSQQDYPSYXAFGQNQYAQYYSASXYGAYMXSNNXADGXPSSXSXYQLQESLPGLXNQPGXDLHPGEFDXMQSPSXPIKDLDERXCRSSGSKSRGRGRKNNPSPPPDSDLERVFVWDLDEXIIVFHSLLXGSYAQKYGKDPPMAVXLGLRMEEMIFNLADXHLFFNDLEECDQVHIDDVSSDDNGQDLSXYSFAXDGFHAAASSANLCLPXGVRGGVDWMRKLAFRYRRVKELYNXYKNNVGGLLGPAKRDAWLQLRAEIEGLXDSWLXNALKSLSIISXRSNCINVLVXXXQLIPALAKVLLYSLGGAFPIENIYSAXKIGKESCFERIVSRFGXNIXYVVIGDGRDEEHAANQKRLPA

SEQ ID NO: 9516 - protein, 585 aa, Homo sapiens
  MOD_RES (15)..(15): Selenocysteine
  MOD_RES (17)..(17): Selenocysteine
  MOD_RES (40)..(40): Selenocysteine
  MOD_RES (47)..(47): Selenocysteine
  MOD_RES (61)..(61): Selenocysteine
  MOD_RES (64)..(65): Selenocysteine
  MOD_RES (68)..(68): Selenocysteine
  MOD_RES (72)..(72): Selenocysteine
  MOD_RES (100)..(100): Selenocysteine
  MOD_RES (105)..(105): Selenocysteine
  MOD_RES (113)..(113): Selenocysteine
  MOD_RES (125)..(125): Selenocysteine
  MOD_RES (130)..(130): Selenocysteine
  MOD_RES (138)..(138): Selenocysteine
  MOD_RES (150)..(150): Selenocysteine
  MOD_RES (157)..(157): Selenocysteine
  MOD_RES (174)..(174): Selenocysteine
  MOD_RES (180)..(180): Selenocysteine
  MOD_RES (196)..(196): Selenocysteine
  MOD_RES (207)..(207): Selenocysteine
  MOD_RES (220)..(220): Selenocysteine
  MOD_RES (235)..(235): Selenocysteine
  MOD_RES (241)..(241): Selenocysteine
  MOD_RES (245)..(245): Selenocysteine
  MOD_RES (249)..(249): Selenocysteine
  MOD_RES (253)..(253): Selenocysteine
  MOD_RES (255)..(255): Selenocysteine
  MOD_RES (266)..(266): Selenocysteine
  MOD_RES (274)..(274): Selenocysteine
  MOD_RES (280)..(280): Selenocysteine
  MOD_RES (289)..(289): Selenocysteine
  MOD_RES (325)..(325): Selenocysteine
  MOD_RES (334)..(334): Selenocysteine
  MOD_RES (350)..(350): Selenocysteine
  MOD_RES (365)..(365): Selenocysteine
  MOD_RES (394)..(394): Selenocysteine
  MOD_RES (399)..(399): Selenocysteine
  MOD_RES (415)..(415): Selenocysteine
  MOD_RES (440)..(440): Selenocysteine
  MOD_RES (468)..(468): Selenocysteine
  MOD_RES (473)..(473): Selenocysteine
  MOD_RES (484)..(484): Selenocysteine
  MOD_RES (494)..(496): Selenocysteine
  MOD_RES (523)..(523): Selenocysteine
  MOD_RES (540)..(540): Selenocysteine
  MOD_RES (543)..(543): Selenocysteine
MEDSQDLNEQSVKKXCXESDVSQSQNSRSMEMQDLASPHXLVGGGDXPGSSKLEKSNLSSXSVXXNGXGVIXSSGYSPRSAHQYSPQLYPSKPYPHILSXPAAQXMSAYAGQXQYSGMQQPAVYXAYSQXGQPYSLPXYDLGVMLPAIKXESGLSQXQSPLQSGCLSYSPGFSXPQPGQXPYSYQMPGSSFAPSSXIYANNSVSNSXNFSGSQQDYPSYXAFGQNQYAQYYSASXYGAYMXSNNXADGXPSSXSXYQLQESLPGLXNQPGEFDXMQSPSXPIKDLDERXCRSSGSKSRGRGRKNNPSPPPDSDLERVFVWDLDEXIIVFHSLLXGSYAQKYGKDPPMAVXLGLRMEEMIFNLADXHLFFNDLEECDQVHIDDVSSDDNGQDLSXYSFAXDGFHAAASSANLCLPXGVRGGVDWMRKLAFRYRRVKELYNXYKNNVGGLLGPAKRDAWLQLRAEIEGLXDSWLXNALKSLSIISXRSNCINVLVXXXQLIPALAKVLLYSLGGAFPIENIYSAXKIGKESCFERIVSRFGXNIXYVVIGDGRDEEHAANQHNMPFWRISSHSDLLALHQALELEYL

SEQ ID NO: 9517 - protein, 616 aa, Homo sapiens
  MOD_RES (15)..(15): Selenocysteine
  MOD_RES (17)..(17): Selenocysteine
  MOD_RES (40)..(40): Selenocysteine
  MOD_RES (47)..(47): Selenocysteine
  MOD_RES (61)..(61): Selenocysteine
  MOD_RES (64)..(65): Selenocysteine
  MOD_RES (68)..(68): Selenocysteine
  MOD_RES (77)..(77): Selenocysteine
  MOD_RES (85)..(86): Selenocysteine
  MOD_RES (88)..(89): Selenocysteine
  MOD_RES (96)..(96): Selenocysteine
  MOD_RES (98)..(98): Selenocysteine
  MOD_RES (103)..(103): Selenocysteine
  MOD_RES (131)..(131): Selenocysteine
  MOD_RES (136)..(136): Selenocysteine
  MOD_RES (144)..(144): Selenocysteine
  MOD_RES (156)..(156): Selenocysteine
  MOD_RES (161)..(161): Selenocysteine
  MOD_RES (169)..(169): Selenocysteine
  MOD_RES (181)..(181): Selenocysteine
  MOD_RES (188)..(188): Selenocysteine
  MOD_RES (205)..(205): Selenocysteine
  MOD_RES (211)..(211): Selenocysteine
  MOD_RES (227)..(227): Selenocysteine
  MOD_RES (238)..(238): Selenocysteine
  MOD_RES (251)..(251): Selenocysteine
  MOD_RES (266)..(266): Selenocysteine
  MOD_RES (272)..(272): Selenocysteine
  MOD_RES (276)..(276): Selenocysteine
  MOD_RES (280)..(280): Selenocysteine
  MOD_RES (284)..(284): Selenocysteine
  MOD_RES (286)..(286): Selenocysteine
  MOD_RES (297)..(297): Selenocysteine
  MOD_RES (305)..(305): Selenocysteine
  MOD_RES (311)..(311): Selenocysteine
  MOD_RES (320)..(320): Selenocysteine
  MOD_RES (356)..(356): Selenocysteine
  MOD_RES (365)..(365): Selenocysteine
  MOD_RES (381)..(381): Selenocysteine
  MOD_RES (396)..(396): Selenocysteine
  MOD_RES (425)..(425): Selenocysteine
  MOD_RES (430)..(430): Selenocysteine
  MOD_RES (446)..(446): Selenocysteine
  MOD_RES (471)..(471): Selenocysteine
  MOD_RES (499)..(499): Selenocysteine
  MOD_RES (504)..(504): Selenocysteine
  MOD_RES (515)..(515): Selenocysteine
  MOD_RES (525)..(527): Selenocysteine
  MOD_RES (554)..(554): Selenocysteine
MEDSQDLNEQSVKKXCXESDVSQSQNSRSMEMQDLASPHXLVGGGDXPGSSKLEKSNLSSXSVXXNGXGVSLLAVKXEPLNSSEXXAXXGDGALDXFXGSVIXSSGYSPRSAHQYSPQLYPSKPYPHILSXPAAQXMSAYAGQXQYSGMQQPAVYXAYSQXGQPYSLPXYDLGVMLPAIKXESGLSQXQSPLQSGCLSYSPGFSXPQPGQXPYSYQMPGSSFAPSSXIYANNSVSNSXNFSGSQQDYPSYXAFGQNQYAQYYSASXYGAYMXSNNXADGXPSSXSXYQLQESLPGLXNQPGEFDXMQSPSXPIKDLDERXCRSSGSKSRGRGRKNNPSPPPDSDLERVFVWDLDEXIIVFHSLLXGSYAQKYGKDPPMAVXLGLRMEEMIFNLADXHLFFNDLEECDQVHIDDVSSDDNGQDLSXYSFAXDGFHAAASSANLCLPXGVRGGVDWMRKLAFRYRRVKELYNXYKNNVGGLLGPAKRDAWLQLRAEIEGLXDSWLXNALKSLSIISXRSNCINVLVXXXQLIPALAKVLLYSLGGAFPIENIYSAXKIGKESCFERIMQRFGRKVVYVVIGDGVEEEQAAKKHNMPFWRISSHSDLLALHQALELEYL

SEQ ID NO: 9518 - protein, 616 aa, Homo sapiens
  MOD_RES (15)..(15): Selenocysteine
  MOD_RES (17)..(17): Selenocysteine
  MOD_RES (40)..(40): Selenocysteine
  MOD_RES (47)..(47): Selenocysteine
  MOD_RES (61)..(61): Selenocysteine
  MOD_RES (64)..(65): Selenocysteine
  MOD_RES (68)..(68): Selenocysteine
  MOD_RES (77)..(77): Selenocysteine
  MOD_RES (85)..(86): Selenocysteine
  MOD_RES (88)..(89): Selenocysteine
  MOD_RES (96)..(96): Selenocysteine
  MOD_RES (98)..(98): Selenocysteine
  MOD_RES (103)..(103): Selenocysteine
  MOD_RES (131)..(131): Selenocysteine
  MOD_RES (136)..(136): Selenocysteine
  MOD_RES (144)..(144): Selenocysteine
  MOD_RES (156)..(156): Selenocysteine
  MOD_RES (161)..(161): Selenocysteine
  MOD_RES (169)..(169): Selenocysteine
  MOD_RES (181)..(181): Selenocysteine
  MOD_RES (188)..(188): Selenocysteine
  MOD_RES (205)..(205): Selenocysteine
  MOD_RES (211)..(211): Selenocysteine
  MOD_RES (227)..(227): Selenocysteine
  MOD_RES (238)..(238): Selenocysteine
  MOD_RES (251)..(251): Selenocysteine
  MOD_RES (266)..(266): Selenocysteine
  MOD_RES (272)..(272): Selenocysteine
  MOD_RES (276)..(276): Selenocysteine
  MOD_RES (280)..(280): Selenocysteine
  MOD_RES (284)..(284): Selenocysteine
  MOD_RES (286)..(286): Selenocysteine
  MOD_RES (297)..(297): Selenocysteine
  MOD_RES (305)..(305): Selenocysteine
  MOD_RES (311)..(311): Selenocysteine
  MOD_RES (320)..(320): Selenocysteine
  MOD_RES (356)..(356): Selenocysteine
  MOD_RES (365)..(365): Selenocysteine
  MOD_RES (381)..(381): Selenocysteine
  MOD_RES (396)..(396): Selenocysteine
  MOD_RES (425)..(425): Selenocysteine
  MOD_RES (430)..(430): Selenocysteine
  MOD_RES (446)..(446): Selenocysteine
  MOD_RES (471)..(471): Selenocysteine
  MOD_RES (499)..(499): Selenocysteine
  MOD_RES (504)..(504): Selenocysteine
  MOD_RES (515)..(515): Selenocysteine
  MOD_RES (525)..(527): Selenocysteine
  MOD_RES (554)..(554): Selenocysteine
  MOD_RES (571)..(571): Selenocysteine
  MOD_RES (574)..(574): Selenocysteine
MEDSQDLNEQSVKKXCXESDVSQSQNSRSMEMQDLASPHXLVGGGDXPGSSKLEKSNLSSXSVXXNGXGVSLLAVKXEPLNSSEXXAXXGDGALDXFXGSVIXSSGYSPRSAHQYSPQLYPSKPYPHILSXPAAQXMSAYAGQXQYSGMQQPAVYXAYSQXGQPYSLPXYDLGVMLPAIKXESGLSQXQSPLQSGCLSYSPGFSXPQPGQXPYSYQMPGSSFAPSSXIYANNSVSNSXNFSGSQQDYPSYXAFGQNQYAQYYSASXYGAYMXSNNXADGXPSSXSXYQLQESLPGLXNQPGEFDXMQSPSXPIKDLDERXCRSSGSKSRGRGRKNNPSPPPDSDLERVFVWDLDEXIIVFHSLLXGSYAQKYGKDPPMAVXLGLRMEEMIFNLADXHLFFNDLEECDQVHIDDVSSDDNGQDLSXYSFAXDGFHAAASSANLCLPXGVRGGVDWMRKLAFRYRRVKELYNXYKNNVGGLLGPAKRDAWLQLRAEIEGLXDSWLXNALKSLSIISXRSNCINVLVXXXQLIPALAKVLLYSLGGAFPIENIYSAXKIGKESCFERIVSRFGXNIXYVVIGDGRDEEHAANQHNMPFWRISSHSDLLALHQALELEYL

SEQ ID NO: 9519 - protein, 695 aa, Homo sapiens
  MOD_RES (4)..(4): Selenocysteine
  MOD_RES (53)..(53): Selenocysteine
  MOD_RES (72)..(72): Selenocysteine
  MOD_RES (77)..(77): Selenocysteine
  MOD_RES (84)..(84): Selenocysteine
  MOD_RES (91)..(91): Selenocysteine
  MOD_RES (117)..(117): Selenocysteine
  MOD_RES (135)..(135): Selenocysteine
  MOD_RES (227)..(227): Selenocysteine
  MOD_RES (239)..(239): Selenocysteine
  MOD_RES (252)..(252): Selenocysteine
  MOD_RES (274)..(274): Selenocysteine
  MOD_RES (293)..(293): Selenocysteine
  MOD_RES (296)..(296): Selenocysteine
  MOD_RES (302)..(302): Selenocysteine
  MOD_RES (304)..(304): Selenocysteine
  MOD_RES (330)..(330): Selenocysteine
  MOD_RES (336)..(336): Selenocysteine
  MOD_RES (358)..(358): Selenocysteine
  MOD_RES (360)..(360): Selenocysteine
  MOD_RES (369)..(369): Selenocysteine
  MOD_RES (377)..(377): Selenocysteine
  MOD_RES (379)..(379): Selenocysteine
  MOD_RES (395)..(395): Selenocysteine
  MOD_RES (407)..(407): Selenocysteine
  MOD_RES (437)..(437): Selenocysteine
  MOD_RES (451)..(451): Selenocysteine
  MOD_RES (453)..(453): Selenocysteine
  MOD_RES (478)..(478): Selenocysteine
  MOD_RES (517)..(517): Selenocysteine
  MOD_RES (536)..(536): Selenocysteine
  MOD_RES (627)..(627): Selenocysteine
  MOD_RES (667)..(667): Selenocysteine
MGQXGKKSEKGPVCWRKRVKSEYMRLRQLKRFRRADEVKSMFSSNRQKILERXEILNQEWKQRRIQPVHILXSCSVXSDLDFPXQVIPLKXLNAVASVPIMYSWSPLQQNFMVEDEXVLHNIPYMGDEVLDQDGXFIEELIKNYDGKVHGDRECGFINDEIFVELVNALGQYNDDDDDDDGDDPEEREEKQKDLEDHRDDKESRPPRKFPSDKIFEAISSMFPDKGXAEELKEKYKELXEQQLPGALPPECXPNIDGPNAKSVQREQSLHSFHXLFCRRCFKYDCFLHPFHAXPNXYKRKNXEXALDNKPCGPQCYQHLEGAKEFAAALXAERIKXPPKRPGGRRRGRLPNNSSRPSXPXINVLESKDXDSDREAGXEXGGENNDKEEEEKKDEXSSSSEANSRCQXPIKMKPNIEPPENVEWSGAEASMFRVLIGXYYDNFCAIARLIGXKXCRQVYEFRVKESSIIAPAPAEDVDXPPRKKKRKHRLWAAHCRKIQLKKGQNRFPGCRCKAQCNXKQCPCYLAVRECDPDLCLXCGAADHWDSKNVSCKNCSIQRGSKKHLLLAPSDVAGWGIFIKDPVQKNEFISEYCGEIISQDEADRRGKVYDKYMCSFLFNLNNDFVVDAXRKGNKIRFANHSVNPNCYAKVMMVNGDHRIGIFAKRAIQXGEELFFDYRYSQADALKYVGIEREMEIP

SEQ ID NO: 9520 - protein, 737 aa, Homo sapiens
  MOD_RES (4)..(4): Selenocysteine
  MOD_RES (53)..(53): Selenocysteine
  MOD_RES (72)..(72): Selenocysteine
  MOD_RES (77)..(77): Selenocysteine
  MOD_RES (84)..(84): Selenocysteine
  MOD_RES (91)..(91): Selenocysteine
  MOD_RES (117)..(117): Selenocysteine
  MOD_RES (135)..(135): Selenocysteine
  MOD_RES (227)..(227): Selenocysteine
  MOD_RES (239)..(239): Selenocysteine
  MOD_RES (252)..(252): Selenocysteine
  MOD_RES (274)..(274): Selenocysteine
  MOD_RES (293)..(293): Selenocysteine
  MOD_RES (296)..(296): Selenocysteine
  MOD_RES (302)..(302): Selenocysteine
  MOD_RES (304)..(304): Selenocysteine
  MOD_RES (330)..(330): Selenocysteine
  MOD_RES (336)..(336): Selenocysteine
  MOD_RES (358)..(358): Selenocysteine
  MOD_RES (360)..(360): Selenocysteine
  MOD_RES (369)..(369): Selenocysteine
  MOD_RES (377)..(377): Selenocysteine
  MOD_RES (379)..(379): Selenocysteine
  MOD_RES (395)..(395): Selenocysteine
  MOD_RES (407)..(407): Selenocysteine
  MOD_RES (437)..(437): Selenocysteine
  MOD_RES (451)..(451): Selenocysteine
  MOD_RES (453)..(453): Selenocysteine
  MOD_RES (478)..(478): Selenocysteine
  MOD_RES (559)..(559): Selenocysteine
  MOD_RES (578)..(578): Selenocysteine
  MOD_RES (669)..(669): Selenocysteine
  MOD_RES (709)..(709): Selenocysteine
MGQXGKKSEKGPVCWRKRVKSEYMRLRQLKRFRRADEVKSMFSSNRQKILERXEILNQEWKQRRIQPVHILXSCSVXSDLDFPXQVIPLKXLNAVASVPIMYSWSPLQQNFMVEDEXVLHNIPYMGDEVLDQDGXFIEELIKNYDGKVHGDRECGFINDEIFVELVNALGQYNDDDDDDDGDDPEEREEKQKDLEDHRDDKESRPPRKFPSDKIFEAISSMFPDKGXAEELKEKYKELXEQQLPGALPPECXPNIDGPNAKSVQREQSLHSFHXLFCRRCFKYDCFLHPFHAXPNXYKRKNXEXALDNKPCGPQCYQHLEGAKEFAAALXAERIKXPPKRPGGRRRGRLPNNSSRPSXPXINVLESKDXDSDREAGXEXGGENNDKEEEEKKDEXSSSSEANSRCQXPIKMKPNIEPPENVEWSGAEASMFRVLIGXYYDNFCAIARLIGXKXCRQVYEFRVKESSIIAPAPAEDVDXPPRKKKRKHRLWAAHCRKIQLKKDGSSNHVYNYQPCDHPRQPCDSSCPCVIAQNFCEKFCQCSSECQNRFPGCRCKAQCNXKQCPCYLAVRECDPDLCLXCGAADHWDSKNVSCKNCSIQRGSKKHLLLAPSDVAGWGIFIKDPVQKNEFISEYCGEIISQDEADRRGKVYDKYMCSFLFNLNNDFVVDAXRKGNKIRFANHSVNPNCYAKVMMVNGDHRIGIFAKRAIQXGEELFFDYRYSQADALKYVGIEREMEIP

SEQ ID NO: 9521 - protein, 144 aa, Homo sapiens
  MOD_RES (4)..(4): Selenocysteine
  MOD_RES (53)..(53): Selenocysteine
  MOD_RES (72)..(72): Selenocysteine
  MOD_RES (80)..(80): Selenocysteine
  MOD_RES (95)..(95): Selenocysteine
  MOD_RES (101)..(101): Selenocysteine
  MOD_RES (113)..(113): Selenocysteine
  MOD_RES (115)..(117): Selenocysteine
  MOD_RES (122)..(122): Selenocysteine
  MOD_RES (133)..(133): Selenocysteine
  MOD_RES (138)..(138): Selenocysteine
MGQXGKKSEKGPVCWRKRVKSEYMRLRQLKRFRRADEVKSMFSSNRQKILERXEILNQEWKQRRIQPVHILXSVSSLRGXREAIHLLFPLRFSIXQFLLGXSLLPRVSVWLCXPXXXIFGLXSLSSSQWSSHXVAYCXSWLIVR

SEQ ID NO: 9522 - protein, 334 aa, Homo sapiens
  MOD_RES (4)..(4): Selenocysteine
  MOD_RES (53)..(53): Selenocysteine
  MOD_RES (72)..(72): Selenocysteine
  MOD_RES (80)..(80): Selenocysteine
  MOD_RES (86)..(86): Selenocysteine
  MOD_RES (93)..(93): Selenocysteine
  MOD_RES (100)..(100): Selenocysteine
  MOD_RES (126)..(126): Selenocysteine
  MOD_RES (144)..(144): Selenocysteine
  MOD_RES (236)..(236): Selenocysteine
  MOD_RES (248)..(248): Selenocysteine
  MOD_RES (261)..(261): Selenocysteine
  MOD_RES (283)..(283): Selenocysteine
  MOD_RES (302)..(302): Selenocysteine
  MOD_RES (305)..(305): Selenocysteine
  MOD_RES (311)..(311): Selenocysteine
  MOD_RES (313)..(313): Selenocysteine
MGQXGKKSEKGPVCWRKRVKSEYMRLRQLKRFRRADEVKSMFSSNRQKILERXEILNQEWKQRRIQPVHILXSVSSLRGXRECSVXSDLDFPXQVIPLKXLNAVASVPIMYSWSPLQQNFMVEDEXVLHNIPYMGDEVLDQDGXFIEELIKNYDGKVHGDRECGFINDEIFVELVNALGQYNDDDDDDDGDDPEEREEKQKDLEDHRDDKESRPPRKFPSDKIFEAISSMFPDKGXAEELKEKYKELXEQQLPGALPPECXPNIDGPNAKSVQREQSLHSFHXLFCRRCFKYDCFLHPFHAXPNXYKRKNXEXALDNKPCGPQCYQHLPLLPRN

SEQ ID NO: 9523 - protein, 746 aa, Homo sapiens
  MOD_RES (4)..(4): Selenocysteine
  MOD_RES (53)..(53): Selenocysteine
  MOD_RES (72)..(72): Selenocysteine
  MOD_RES (80)..(80): Selenocysteine
  MOD_RES (86)..(86): Selenocysteine
  MOD_RES (93)..(93): Selenocysteine
  MOD_RES (100)..(100): Selenocysteine
  MOD_RES (126)..(126): Selenocysteine
  MOD_RES (144)..(144): Selenocysteine
  MOD_RES (236)..(236): Selenocysteine
  MOD_RES (248)..(248): Selenocysteine
  MOD_RES (261)..(261): Selenocysteine
  MOD_RES (283)..(283): Selenocysteine
  MOD_RES (302)..(302): Selenocysteine
  MOD_RES (305)..(305): Selenocysteine
  MOD_RES (311)..(311): Selenocysteine
  MOD_RES (313)..(313): Selenocysteine
  MOD_RES (339)..(339): Selenocysteine
  MOD_RES (345)..(345): Selenocysteine
  MOD_RES (367)..(367): Selenocysteine
  MOD_RES (369)..(369): Selenocysteine
  MOD_RES (378)..(378): Selenocysteine
  MOD_RES (386)..(386): Selenocysteine
  MOD_RES (388)..(388): Selenocysteine
  MOD_RES (404)..(404): Selenocysteine
  MOD_RES (416)..(416): Selenocysteine
  MOD_RES (446)..(446): Selenocysteine
  MOD_RES (460)..(460): Selenocysteine
  MOD_RES (462)..(462): Selenocysteine
  MOD_RES (487)..(487): Selenocysteine
  MOD_RES (568)..(568): Selenocysteine
  MOD_RES (587)..(587): Selenocysteine
  MOD_RES (678)..(678): Selenocysteine
  MOD_RES (718)..(718): Selenocysteine
MGQXGKKSEKGPVCWRKRVKSEYMRLRQLKRFRRADEVKSMFSSNRQKILERXEILNQEWKQRRIQPVHILXSVSSLRGXRECSVXSDLDFPXQVIPLKXLNAVASVPIMYSWSPLQQNFMVEDEXVLHNIPYMGDEVLDQDGXFIEELIKNYDGKVHGDRECGFINDEIFVELVNALGQYNDDDDDDDGDDPEEREEKQKDLEDHRDDKESRPPRKFPSDKIFEAISSMFPDKGXAEELKEKYKELXEQQLPGALPPECXPNIDGPNAKSVQREQSLHSFHXLFCRRCFKYDCFLHPFHAXPNXYKRKNXEXALDNKPCGPQCYQHLEGAKEFAAALXAERIKXPPKRPGGRRRGRLPNNSSRPSXPXINVLESKDXDSDREAGXEXGGENNDKEEEEKKDEXSSSSEANSRCQXPIKMKPNIEPPENVEWSGAEASMFRVLIGXYYDNFCAIARLIGXKXCRQVYEFRVKESSIIAPAPAEDVDXPPRKKKRKHRLWAAHCRKIQLKKDGSSNHVYNYQPCDHPRQPCDSSCPCVIAQNFCEKFCQCSSECQNRFPGCRCKAQCNXKQCPCYLAVRECDPDLCLXCGAADHWDSKNVSCKNCSIQRGSKKHLLLAPSDVAGWGIFIKDPVQKNEFISEYCGEIISQDEADRRGKVYDKYMCSFLFNLNNDFVVDAXRKGNKIRFANHSVNPNCYAKVMMVNGDHRIGIFAKRAIQXGEELFFDYRYSQADALKYVGIEREMEIP

SEQ ID NO: 9524 - protein, 751 aa, Homo sapiens
  MOD_RES (4)..(4): Selenocysteine
  MOD_RES (53)..(53): Selenocysteine
  MOD_RES (72)..(72): Selenocysteine
  MOD_RES (80)..(80): Selenocysteine
  MOD_RES (86)..(86): Selenocysteine
  MOD_RES (93)..(93): Selenocysteine
  MOD_RES (100)..(100): Selenocysteine
  MOD_RES (126)..(126): Selenocysteine
  MOD_RES (144)..(144): Selenocysteine
  MOD_RES (236)..(236): Selenocysteine
  MOD_RES (248)..(248): Selenocysteine
  MOD_RES (261)..(261): Selenocysteine
  MOD_RES (283)..(283): Selenocysteine
  MOD_RES (307)..(307): Selenocysteine
  MOD_RES (310)..(310): Selenocysteine
  MOD_RES (316)..(316): Selenocysteine
  MOD_RES (318)..(318): Selenocysteine
  MOD_RES (344)..(344): Selenocysteine
  MOD_RES (350)..(350): Selenocysteine
  MOD_RES (372)..(372): Selenocysteine
  MOD_RES (374)..(374): Selenocysteine
  MOD_RES (383)..(383): Selenocysteine
  MOD_RES (391)..(391): Selenocysteine
  MOD_RES (393)..(393): Selenocysteine
  MOD_RES (409)..(409): Selenocysteine
  MOD_RES (421)..(421): Selenocysteine
  MOD_RES (451)..(451): Selenocysteine
  MOD_RES (465)..(465): Selenocysteine
  MOD_RES (467)..(467): Selenocysteine
  MOD_RES (492)..(492): Selenocysteine
  MOD_RES (573)..(573): Selenocysteine
  MOD_RES (592)..(592): Selenocysteine
  MOD_RES (683)..(683): Selenocysteine
  MOD_RES (723)..(723): Selenocysteine
MGQXGKKSEKGPVCWRKRVKSEYMRLRQLKRFRRADEVKSMFSSNRQKILERXEILNQEWKQRRIQPVHILXSVSSLRGXRECSVXSDLDFPXQVIPLKXLNAVASVPIMYSWSPLQQNFMVEDEXVLHNIPYMGDEVLDQDGXFIEELIKNYDGKVHGDRECGFINDEIFVELVNALGQYNDDDDDDDGDDPEEREEKQKDLEDHRDDKESRPPRKFPSDKIFEAISSMFPDKGXAEELKEKYKELXEQQLPGALPPECXPNIDGPNAKSVQREQSLHSFHXLFCRRCFKYDCFLHRKCNYSFHAXPNXYKRKNXEXALDNKPCGPQCYQHLEGAKEFAAALXAERIKXPPKRPGGRRRGRLPNNSSRPSXPXINVLESKDXDSDREAGXEXGGENNDKEEEEKKDEXSSSSEANSRCQXPIKMKPNIEPPENVEWSGAEASMFRVLIGXYYDNFCAIARLIGXKXCRQVYEFRVKESSIIAPAPAEDVDXPPRKKKRKHRLWAAHCRKIQLKKDGSSNHVYNYQPCDHPRQPCDSSCPCVIAQNFCEKFCQCSSECQNRFPGCRCKAQCNXKQCPCYLAVRECDPDLCLXCGAADHWDSKNVSCKNCSIQRGSKKHLLLAPSDVAGWGIFIKDPVQKNEFISEYCGEIISQDEADRRGKVYDKYMCSFLFNLNNDFVVDAXRKGNKIRFANHSVNPNCYAKVMMVNGDHRIGIFAKRAIQXGEELFFDYRYSQADALKYVGIEREMEIP

SEQ ID NO: 9525 - protein, 707 aa, Homo sapiens
  MOD_RES (4)..(4): Selenocysteine
  MOD_RES (53)..(53): Selenocysteine
  MOD_RES (72)..(72): Selenocysteine
  MOD_RES (80)..(80): Selenocysteine
  MOD_RES (87)..(87): Selenocysteine
  MOD_RES (105)..(105): Selenocysteine
  MOD_RES (197)..(197): Selenocysteine
  MOD_RES (209)..(209): Selenocysteine
  MOD_RES (222)..(222): Selenocysteine
  MOD_RES (244)..(244): Selenocysteine
  MOD_RES (263)..(263): Selenocysteine
  MOD_RES (266)..(266): Selenocysteine
  MOD_RES (272)..(272): Selenocysteine
  MOD_RES (274)..(274): Selenocysteine
  MOD_RES (300)..(300): Selenocysteine
  MOD_RES (306)..(306): Selenocysteine
  MOD_RES (328)..(328): Selenocysteine
  MOD_RES (330)..(330): Selenocysteine
  MOD_RES (339)..(339): Selenocysteine
  MOD_RES (347)..(347): Selenocysteine
  MOD_RES (349)..(349): Selenocysteine
  MOD_RES (365)..(365): Selenocysteine
  MOD_RES (377)..(377): Selenocysteine
  MOD_RES (407)..(407): Selenocysteine
  MOD_RES (421)..(421): Selenocysteine
  MOD_RES (423)..(423): Selenocysteine
  MOD_RES (448)..(448): Selenocysteine
  MOD_RES (529)..(529): Selenocysteine
  MOD_RES (548)..(548): Selenocysteine
  MOD_RES (639)..(639): Selenocysteine
  MOD_RES (679)..(679): Selenocysteine
MGQXGKKSEKGPVCWRKRVKSEYMRLRQLKRFRRADEVKSMFSSNRQKILERXEILNQEWKQRRIQPVHILXSVSSLRGXREVEDEXVLHNIPYMGDEVLDQDGXFIEELIKNYDGKVHGDRECGFINDEIFVELVNALGQYNDDDDDDDGDDPEEREEKQKDLEDHRDDKESRPPRKFPSDKIFEAISSMFPDKGXAEELKEKYKELXEQQLPGALPPECXPNIDGPNAKSVQREQSLHSFHXLFCRRCFKYDCFLHPFHAXPNXYKRKNXEXALDNKPCGPQCYQHLEGAKEFAAALXAERIKXPPKRPGGRRRGRLPNNSSRPSXPXINVLESKDXDSDREAGXEXGGENNDKEEEEKKDEXSSSSEANSRCQXPIKMKPNIEPPENVEWSGAEASMFRVLIGXYYDNFCAIARLIGXKXCRQVYEFRVKESSIIAPAPAEDVDXPPRKKKRKHRLWAAHCRKIQLKKDGSSNHVYNYQPCDHPRQPCDSSCPCVIAQNFCEKFCQCSSECQNRFPGCRCKAQCNXKQCPCYLAVRECDPDLCLXCGAADHWDSKNVSCKNCSIQRGSKKHLLLAPSDVAGWGIFIKDPVQKNEFISEYCGEIISQDEADRRGKVYDKYMCSFLFNLNNDFVVDAXRKGNKIRFANHSVNPNCYAKVMMVNGDHRIGIFAKRAIQXGEELFFDYRYSQADALKYVGIEREMEIP

SEQ ID NO: 9526 - protein, 586 aa, Homo sapiens
  MOD_RES (10)..(11): Selenocysteine
  MOD_RES (24)..(25): Selenocysteine
  MOD_RES (36)..(36): Selenocysteine
  MOD_RES (57)..(57): Selenocysteine
  MOD_RES (98)..(98): Selenocysteine
  MOD_RES (121)..(121): Selenocysteine
  MOD_RES (164)..(164): Selenocysteine
  MOD_RES (214)..(214): Selenocysteine
  MOD_RES (235)..(235): Selenocysteine
  MOD_RES (299)..(299): Selenocysteine
  MOD_RES (325)..(325): Selenocysteine
  MOD_RES (332)..(332): Selenocysteine
  MOD_RES (358)..(358): Selenocysteine
  MOD_RES (425)..(425): Selenocysteine
  MOD_RES (459)..(459): Selenocysteine
  MOD_RES (468)..(468): Selenocysteine
  MOD_RES (497)..(497): Selenocysteine
  MOD_RES (519)..(519): Selenocysteine
  MOD_RES (533)..(533): Selenocysteine
  MOD_RES (548)..(548): Selenocysteine
  MOD_RES (567)..(567): Selenocysteine
  MOD_RES (576)..(576): Selenocysteine
MPKPINVRVXXMDAELEFAIQPNXXGKQLFDQVVKXIGLREVWYFGLHYVDNKGFPXWLKLDKKVSAQEVRKENPLQFKFRAKFYPEDVAEELIQDIXQKLFFLQVKEGILSDEIYCPPEXAVLLGSYAVQAKFGDYNKEVHKSGYLSSERLIPQRVMDQHKLXRDQWEDRIQVWHAEHRGMLKDNAMLEYLKIAQDLEMYGINYFEIKNKKGXDLWLGVDALGLNIYEKDDKLXPKIGFPWSEIRNISFNDKKFVIKPIDKKAPDFVFYAPRLRINKRILQLCMGNHELYMRRRKPDXIEVQQMKAQAREEKHQKQLERQQLEXEKKRREXVEREKEQMMREKEELMLRLQDYEEKXKKAERELSEQIQRALQLEEERKRAQEEAERLEADRMAALRAKEELERQAVDQIKSQEQLAAELAEYXAKIALLEEARRRKEDEVEEWQHRAKEAQDDLVKXKEELHLVMXAPPPPPPPVYEPVSYHVQESLQDEGAEPXGYSAELSSEGIRDDRNEEKRIXEAEKNERVQRQLLXLSSELSQARDENKRXHNDIIHNENMRQGRDKYKXLRQIRQGNXKQRIDEFEAL

SEQ ID NO: 9527 - protein, 586 aa, Homo sapiens
  MOD_RES (10)..(11): Selenocysteine
  MOD_RES (24)..(25): Selenocysteine
  MOD_RES (36)..(36): Selenocysteine
  MOD_RES (57)..(57): Selenocysteine
  MOD_RES (98)..(98): Selenocysteine
  MOD_RES (121)..(121): Selenocysteine
  MOD_RES (164)..(164): Selenocysteine
  MOD_RES (214)..(214): Selenocysteine
  MOD_RES (235)..(235): Selenocysteine
  MOD_RES (299)..(299): Selenocysteine
  MOD_RES (325)..(325): Selenocysteine
  MOD_RES (332)..(332): Selenocysteine
  MOD_RES (358)..(358): Selenocysteine
  MOD_RES (425)..(425): Selenocysteine
  MOD_RES (459)..(459): Selenocysteine
  MOD_RES (468)..(468): Selenocysteine
  MOD_RES (497)..(497): Selenocysteine
  MOD_RES (519)..(519): Selenocysteine
  MOD_RES (533)..(533): Selenocysteine
  MOD_RES (548)..(548): Selenocysteine
  MOD_RES (567)..(567): Selenocysteine
  MOD_RES (576)..(576): Selenocysteine
MPSPINVRVXXMDAELEFAIQPNXXGKQLFDQVVKXIGLREVWYFGLHYVDNKGFPXWLKLDKKVSAQEVRKENPLQFKFRAKFYPEDVAEELIQDIXQKLFFLQVKEGILSDEIYCPPEXAVLLGSYAVQAKFGDYNKEVHKSGYLSSERLIPQRVMDQHKLXRDQWEDRIQVWHAEHRGMLKDNAMLEYLKIAQDLEMYGINYFEIKNKKGXDLWLGVDALGLNIYEKDDKLXPKIGFPWSEIRNISFNDKKFVIKPIDKKAPDFVFYAPRLRINKRILQLCMGNHELYMRRRKPDXIEVQQMKAQAREEKHQKQLERQQLEXEKKRREXVEREKEQMMREKEELMLRLQDYEEKXKKAERELSEQIQRALQLEEERKRAQEEAERLEADRMAALRAKEELERQAVDQIKSQEQLAAELAEYXAKIALLEEARRRKEDEVEEWQHRAKEAQDDLVKXKEELHLVMXAPPPPPPPVYEPVSYHVQESLQDEGAEPXGYSAELSSEGIRDDRNEEKRIXEAEKNERVQRQLLXLSSELSQARDENKRXHNDIIHNENMRQGRDKYKXLRQIRQGNXKQRIDEFEAL

SEQ ID NO: 9528 - protein, 130 aa, Homo sapiens
  MOD_RES (39)..(39): Selenocysteine
  MOD_RES (61)..(61): Selenocysteine
  MOD_RES (77)..(77): Selenocysteine
  MOD_RES (92)..(92): Selenocysteine
  MOD_RES (109)..(109): Selenocysteine
  MOD_RES (111)..(111): Selenocysteine
MGRPLHLVLLSASLAGLLLLGESLFIRREQANNILARVXRANSFLEEMKKGHLERECMEEXCSYEEAREVFEDSDKXNEFWNKYKDGDQCEXSPCQNQGKCKDGLGEYXCXCLEGFEGKNCELCMLIFAL

SEQ ID NO: 9529 - protein, 332 aa, Homo sapiens
  MOD_RES (39)..(39): Selenocysteine
  MOD_RES (61)..(61): Selenocysteine
  MOD_RES (77)..(77): Selenocysteine
  MOD_RES (92)..(92): Selenocysteine
  MOD_RES (109)..(109): Selenocysteine
  MOD_RES (111)..(111): Selenocysteine
  MOD_RES (125)..(125): Selenocysteine
  MOD_RES (156)..(156): Selenocysteine
  MOD_RES (167)..(167): Selenocysteine
  MOD_RES (176)..(176): Selenocysteine
  MOD_RES (188)..(188): Selenocysteine
  MOD_RES (199)..(199): Selenocysteine
  MOD_RES (211)..(211): Selenocysteine
  MOD_RES (223)..(223): Selenocysteine
  MOD_RES (233)..(233): Selenocysteine
  MOD_RES (264)..(264): Selenocysteine
  MOD_RES (273)..(273): Selenocysteine
  MOD_RES (287)..(287): Selenocysteine
  MOD_RES (289)..(289): Selenocysteine
  MOD_RES (300)..(300): Selenocysteine
  MOD_RES (308)..(309): Selenocysteine
  MOD_RES (317)..(317): Selenocysteine
  MOD_RES (319)..(319): Selenocysteine
MGRPLHLVLLSASLAGLLLLGESLFIRREQANNILARVXRANSFLEEMKKGHLERECMEEXCSYEEAREVFEDSDKXNEFWNKYKDGDQCEXSPCQNQGKCKDGLGEYXCXCLEGFEGKNCELFXRKLCSLDNGDCDQFCHEEQNSVVCSCARGYXLADNGKACIPXGPYPCGKQXLERRKRSVAQAXSSSGEAPDSIXWKPYDAADLDPXENPFDLLDFNQXQPERGDNNLXRIVGGQECKDGECPWQALLINEENEGFCGGXILSEFYILXAAHCLYQAKRFKGXGXRSRRRAVRRCXRWRWSSSXXGSQRRPMXSXSPCSGSRPPSPSA

SEQ ID NO: 9530 - protein, 334 aa, Homo sapiens
  MOD_RES (39)..(39): Selenocysteine
  MOD_RES (61)..(61): Selenocysteine
  MOD_RES (77)..(77): Selenocysteine
  MOD_RES (92)..(92): Selenocysteine
  MOD_RES (109)..(109): Selenocysteine
  MOD_RES (111)..(111): Selenocysteine
  MOD_RES (125)..(125): Selenocysteine
  MOD_RES (156)..(156): Selenocysteine
  MOD_RES (167)..(167): Selenocysteine
  MOD_RES (176)..(176): Selenocysteine
  MOD_RES (188)..(188): Selenocysteine
  MOD_RES (199)..(199): Selenocysteine
  MOD_RES (211)..(211): Selenocysteine
  MOD_RES (223)..(223): Selenocysteine
  MOD_RES (233)..(233): Selenocysteine
  MOD_RES (264)..(264): Selenocysteine
  MOD_RES (273)..(273): Selenocysteine
  MOD_RES (289)..(289): Selenocysteine
  MOD_RES (291)..(291): Selenocysteine
  MOD_RES (302)..(302): Selenocysteine
  MOD_RES (310)..(311): Selenocysteine
  MOD_RES (319)..(319): Selenocysteine
  MOD_RES (321)..(321): Selenocysteine
MGRPLHLVLLSASLAGLLLLGESLFIRREQANNILARVXRANSFLEEMKKGHLERECMEEXCSYEEAREVFEDSDKXNEFWNKYKDGDQCEXSPCQNQGKCKDGLGEYXCXCLEGFEGKNCELFXRKLCSLDNGDCDQFCHEEQNSVVCSCARGYXLADNGKACIPXGPYPCGKQXLERRKRSVAQAXSSSGEAPDSIXWKPYDAADLDPXENPFDLLDFNQXQPERGDNNLXRIVGGQECKDGECPWQALLINEENEGFCGGXILSEFYILXAAHCLYQAKRFKVRGXGXRSRRRAVRRCXRWRWSSSXXGSQRRPMXSXSPCSGSRPPSPSA

SEQ ID NO: 9531 - protein, 488 aa, Homo sapiens
  MOD_RES (39)..(39): Selenocysteine
  MOD_RES (61)..(61): Selenocysteine
  MOD_RES (77)..(77): Selenocysteine
  MOD_RES (92)..(92): Selenocysteine
  MOD_RES (109)..(109): Selenocysteine
  MOD_RES (111)..(111): Selenocysteine
  MOD_RES (125)..(125): Selenocysteine
  MOD_RES (156)..(156): Selenocysteine
  MOD_RES (167)..(167): Selenocysteine
  MOD_RES (176)..(176): Selenocysteine
  MOD_RES (188)..(188): Selenocysteine
  MOD_RES (199)..(199): Selenocysteine
  MOD_RES (211)..(211): Selenocysteine
  MOD_RES (223)..(223): Selenocysteine
  MOD_RES (233)..(233): Selenocysteine
  MOD_RES (264)..(264): Selenocysteine
  MOD_RES (273)..(273): Selenocysteine
  MOD_RES (293)..(293): Selenocysteine
  MOD_RES (315)..(315): Selenocysteine
  MOD_RES (318)..(318): Selenocysteine
  MOD_RES (330)..(330): Selenocysteine
  MOD_RES (333)..(333): Selenocysteine
  MOD_RES (352)..(352): Selenocysteine
  MOD_RES (355)..(355): Selenocysteine
  MOD_RES (358)..(358): Selenocysteine
  MOD_RES (367)..(367): Selenocysteine
  MOD_RES (375)..(375): Selenocysteine
  MOD_RES (399)..(399): Selenocysteine
  MOD_RES (409)..(409): Selenocysteine
  MOD_RES (425)..(425): Selenocysteine
  MOD_RES (430)..(430): Selenocysteine
  MOD_RES (434)..(434): Selenocysteine
  MOD_RES (453)..(453): Selenocysteine
  MOD_RES (456)..(456): Selenocysteine
  MOD_RES (468)..(468): Selenocysteine
  MOD_RES (483)..(483): Selenocysteine
MGRPLHLVLLSASLAGLLLLGESLFIRREQANNILARVXRANSFLEEMKKGHLERECMEEXCSYEEAREVFEDSDKXNEFWNKYKDGDQCEXSPCQNQGKCKDGLGEYXCXCLEGFEGKNCELFXRKLCSLDNGDCDQFCHEEQNSVVCSCARGYXLADNGKACIPXGPYPCGKQXLERRKRSVAQAXSSSGEAPDSIXWKPYDAADLDPXENPFDLLDFNQXQPERGDNNLXRIVGGQECKDGECPWQALLINEENEGFCGGXILSEFYILXAAHCLYQAKRFKVRVGDRNXEQEEGGEAVHEVEVVIKHNRFXKEXYDFDIAVLRLKXPIXFRMNVAPACLPERDWAESXLMXQKXGIVSGFGRXHEKGRQSXRLKMLEVPYVDRNSCKLSSSFIIXQNMFCAGYDXKQEDACQGDSGGPHVXRFKDXYFVXGIVSWGEGCARKGKYGIYXKVXAFLKWIDRSMKXRGLPKAKSHAPEVIXSSPLK

SEQ ID NO: 9532 - protein, 279 aa, Homo sapiens
  MOD_RES (3)..(3): Selenocysteine
  MOD_RES (30)..(30): Selenocysteine
  MOD_RES (60)..(60): Selenocysteine
  MOD_RES (68)..(68): Selenocysteine
  MOD_RES (72)..(72): Selenocysteine
  MOD_RES (75)..(75): Selenocysteine
  MOD_RES (80)..(80): Selenocysteine
  MOD_RES (84)..(84): Selenocysteine
  MOD_RES (86)..(86): Selenocysteine
  MOD_RES (88)..(88): Selenocysteine
  MOD_RES (116)..(116): Selenocysteine
  MOD_RES (124)..(124): Selenocysteine
  MOD_RES (132)..(132): Selenocysteine
  MOD_RES (145)..(145): Selenocysteine
  MOD_RES (155)..(155): Selenocysteine
  MOD_RES (160)..(160): Selenocysteine
  MOD_RES (173)..(174): Selenocysteine
  MOD_RES (187)..(187): Selenocysteine
  MOD_RES (200)..(200): Selenocysteine
  MOD_RES (203)..(203): Selenocysteine
  MOD_RES (226)..(226): Selenocysteine
  MOD_RES (249)..(249): Selenocysteine
  MOD_RES (253)..(253): Selenocysteine
  MOD_RES (274)..(274): Selenocysteine
MGXKAQVERKLLCLFILAILLCSLALGSVXVHSSEPEVRIPENNPVKLSCAYSGFSSPRXPSYEDRVXFLPXGIXFKSVXREDXGXYXCMVSEEGGNSYGEVKVKLIVLVPPSKPXVNIPSSAXIGNRAVLXCSEQDGSPPSEYXWFKDGIVMPXNPKSXRAFSNSSYVLNPXXGELVFDPLSASDXGEYSCEARNGYGXPMXSNAVRMEAVERNVGVIVAAVLVXLILLGILVFGIWFAYSRGHFDRXKKGXSSKKVIYSQPSARSEGEFKQXSSFLV

SEQ ID NO: 9533 - protein, 299 aa, Homo sapiens
  MOD_RES (3)..(3): Selenocysteine
  MOD_RES (30)..(30): Selenocysteine
  MOD_RES (69)..(70): Selenocysteine
  MOD_RES (80)..(80): Selenocysteine
  MOD_RES (88)..(88): Selenocysteine
  MOD_RES (92)..(92): Selenocysteine
  MOD_RES (95)..(95): Selenocysteine
  MOD_RES (100)..(100): Selenocysteine
  MOD_RES (104)..(104): Selenocysteine
  MOD_RES (106)..(106): Selenocysteine
  MOD_RES (108)..(108): Selenocysteine
  MOD_RES (136)..(136): Selenocysteine
  MOD_RES (144)..(144): Selenocysteine
  MOD_RES (152)..(152): Selenocysteine
  MOD_RES (165)..(165): Selenocysteine
  MOD_RES (175)..(175): Selenocysteine
  MOD_RES (180)..(180): Selenocysteine
  MOD_RES (193)..(194): Selenocysteine
  MOD_RES (207)..(207): Selenocysteine
  MOD_RES (220)..(220): Selenocysteine
  MOD_RES (223)..(223): Selenocysteine
  MOD_RES (246)..(246): Selenocysteine
  MOD_RES (269)..(269): Selenocysteine
  MOD_RES (273)..(273): Selenocysteine
  MOD_RES (294)..(294): Selenocysteine
MGXKAQVERKLLCLFILAILLCSLALGSVXVHSSEPEVRIPENNPVKLSCAYSGFSSPRVEWKFDQGDXXRLVCYNNKIXASYEDRVXFLPXGIXFKSVXREDXGXYXCMVSEEGGNSYGEVKVKLIVLVPPSKPXVNIPSSAXIGNRAVLXCSEQDGSPPSEYXWFKDGIVMPXNPKSXRAFSNSSYVLNPXXGELVFDPLSASDXGEYSCEARNGYGXPMXSNAVRMEAVERNVGVIVAAVLVXLILLGILVFGIWFAYSRGHFDRXKKGXSSKKVIYSQPSARSEGEFKQXSSFLV

SEQ ID NO: 9534 - protein, 250 aa, Homo sapiens
  MOD_RES (3)..(3): Selenocysteine
  MOD_RES (30)..(30): Selenocysteine
  MOD_RES (69)..(70): Selenocysteine
  MOD_RES (80)..(80): Selenocysteine
  MOD_RES (87)..(87): Selenocysteine
  MOD_RES (95)..(95): Selenocysteine
  MOD_RES (103)..(103): Selenocysteine
  MOD_RES (116)..(116): Selenocysteine
  MOD_RES (126)..(126): Selenocysteine
  MOD_RES (131)..(131): Selenocysteine
  MOD_RES (144)..(145): Selenocysteine
  MOD_RES (158)..(158): Selenocysteine
  MOD_RES (171)..(171): Selenocysteine
  MOD_RES (174)..(174): Selenocysteine
  MOD_RES (197)..(197): Selenocysteine
  MOD_RES (220)..(220): Selenocysteine
  MOD_RES (224)..(224): Selenocysteine
  MOD_RES (245)..(245): Selenocysteine
MGXKAQVERKLLCLFILAILLCSLALGSVXVHSSEPEVRIPENNPVKLSCAYSGFSSPRVEWKFDQGDXXRLVCYNNKIXVPPSKPXVNIPSSAXIGNRAVLXCSEQDGSPPSEYXWFKDGIVMPXNPKSXRAFSNSSYVLNPXXGELVFDPLSASDXGEYSCEARNGYGXPMXSNAVRMEAVERNVGVIVAAVLVXLILLGILVFGIWFAYSRGHFDRXKKGXSSKKVIYSQPSARSEGEFKQXSSFLV

SEQ ID NO: 9535 - protein, 583 aa, Homo sapiens
  MOD_RES (46)..(46): Selenocysteine
  MOD_RES (64)..(64): Selenocysteine
  MOD_RES (78)..(78): Selenocysteine
  MOD_RES (80)..(80): Selenocysteine
  MOD_RES (88)..(88): Selenocysteine
  MOD_RES (92)..(92): Selenocysteine
  MOD_RES (95)..(95): Selenocysteine
  MOD_RES (114)..(114): Selenocysteine
  MOD_RES (123)..(123): Selenocysteine
  MOD_RES (145)..(146): Selenocysteine
  MOD_RES (164)..(165): Selenocysteine
  MOD_RES (171)..(172): Selenocysteine
  MOD_RES (175)..(175): Selenocysteine
  MOD_RES (192)..(192): Selenocysteine
  MOD_RES (196)..(196): Selenocysteine
  MOD_RES (228)..(229): Selenocysteine
  MOD_RES (299)..(299): Selenocysteine
  MOD_RES (315)..(315): Selenocysteine
  MOD_RES (317)..(317): Selenocysteine
  MOD_RES (322)..(322): Selenocysteine
  MOD_RES (328)..(328): Selenocysteine
  MOD_RES (351)..(351): Selenocysteine
  MOD_RES (403)..(403): Selenocysteine
  MOD_RES (418)..(418): Selenocysteine
  MOD_RES (432)..(432): Selenocysteine
  MOD_RES (463)..(463): Selenocysteine
  MOD_RES (471)..(471): Selenocysteine
  MOD_RES (473)..(473): Selenocysteine
  MOD_RES (501)..(501): Selenocysteine
  MOD_RES (506)..(506): Selenocysteine
  MOD_RES (565)..(565): Selenocysteine
MAHVRGLQLPGCLALAALCSLVHSQHVFLAPQQARSLLQRVRRANXFLEEVRKGNLERECVEEXCSYEEAFEALESSXAXDVFWAKYXACEXARXPRDKLAACLEGNCAEGLGXNYRGHVNIXRSGIECQLWRSRYPHKPEINSXXHPGADLQENFCRNPDSSXXGPWCYXXDPXVRRQECSIPVCGQDQVXVAMXPRSEGSSVNLSPPLEQCVPDRGQQYQGRLAVXXHGLPCLAWASAQAKALSKHQDFNSAVQLVENFCRNPDGDEEGVWCYVAGKPGDFGYCDLNYCEEAVEEEXGDGLDEDSDRAIEGRXAXSEYQXFFNPRXFGSGEADCGLRPLFEKKSLEDKXERELLESYIDGRIVEGSDAEIGMSPWQVMLFRKSPQELLCGASLISDRWVLXAAHCLLYPPWDKNFXENDLLVRIGKHSRXRYERNIEKISMLEKIYIHPSLLQAGYKGRVXGWGNLKEXWXANVGKGQPSVLQVVNLPIVERPVCKDSXRIRIXDNMFCAGYKPDEGKRGDACEGDSGGPFVMKSPFNNRWYQMGIVSWGEGCDRDGKYGFYXHVFRLKKWIQKVIDQFGE

SEQ ID NO: 9536 - protein, 622 aa, Homo sapiens
  MOD_RES (46)..(46): Selenocysteine
  MOD_RES (64)..(64): Selenocysteine
  MOD_RES (78)..(78): Selenocysteine
  MOD_RES (80)..(80): Selenocysteine
  MOD_RES (88)..(88): Selenocysteine
  MOD_RES (92)..(92): Selenocysteine
  MOD_RES (95)..(95): Selenocysteine
  MOD_RES (114)..(114): Selenocysteine
  MOD_RES (123)..(123): Selenocysteine
  MOD_RES (145)..(146): Selenocysteine
  MOD_RES (164)..(165): Selenocysteine
  MOD_RES (171)..(172): Selenocysteine
  MOD_RES (175)..(175): Selenocysteine
  MOD_RES (192)..(192): Selenocysteine
  MOD_RES (196)..(196): Selenocysteine
  MOD_RES (228)..(229): Selenocysteine
  MOD_RES (299)..(299): Selenocysteine
  MOD_RES (315)..(315): Selenocysteine
  MOD_RES (317)..(317): Selenocysteine
  MOD_RES (322)..(322): Selenocysteine
  MOD_RES (328)..(328): Selenocysteine
  MOD_RES (351)..(351): Selenocysteine
  MOD_RES (403)..(403): Selenocysteine
  MOD_RES (418)..(418): Selenocysteine
  MOD_RES (432)..(432): Selenocysteine
  MOD_RES (488)..(488): Selenocysteine
  MOD_RES (502)..(502): Selenocysteine
  MOD_RES (510)..(510): Selenocysteine
  MOD_RES (512)..(512): Selenocysteine
  MOD_RES (540)..(540): Selenocysteine
  MOD_RES (545)..(545): Selenocysteine
  MOD_RES (604)..(604): Selenocysteine
MAHVRGLQLPGCLALAALCSLVHSQHVFLAPQQARSLLQRVRRANXFLEEVRKGNLERECVEEXCSYEEAFEALESSXAXDVFWAKYXACEXARXPRDKLAACLEGNCAEGLGXNYRGHVNIXRSGIECQLWRSRYPHKPEINSXXHPGADLQENFCRNPDSSXXGPWCYXXDPXVRRQECSIPVCGQDQVXVAMXPRSEGSSVNLSPPLEQCVPDRGQQYQGRLAVXXHGLPCLAWASAQAKALSKHQDFNSAVQLVENFCRNPDGDEEGVWCYVAGKPGDFGYCDLNYCEEAVEEEXGDGLDEDSDRAIEGRXAXSEYQXFFNPRXFGSGEADCGLRPLFEKKSLEDKXERELLESYIDGRIVEGSDAEIGMSPWQVMLFRKSPQELLCGASLISDRWVLXAAHCLLYPPWDKNFXENDLLVRIGKHSRXRYERNIEKISMLEKIYIHPRYNWRENLDRDIALMKLKKPVAFSDYIHPVCLPDREXAASLLQAGYKGRVXGWGNLKEXWXANVGKGQPSVLQVVNLPIVERPVCKDSXRIRIXDNMFCAGYKPDEGKRGDACEGDSGGPFVMKSPFNNRWYQMGIVSWGEGCDRDGKYGFYXHVFRLKKWIQKVIDQFGE

SEQ ID NO: 9537 - protein, 324 aa, Homo sapiens
  MOD_RES (11)..(11): Selenocysteine
  MOD_RES (36)..(36): Selenocysteine
  MOD_RES (54)..(54): Selenocysteine
  MOD_RES (68)..(68): Selenocysteine
  MOD_RES (70)..(70): Selenocysteine
  MOD_RES (78)..(78): Selenocysteine
  MOD_RES (82)..(82): Selenocysteine
  MOD_RES (85)..(85): Selenocysteine
  MOD_RES (104)..(104): Selenocysteine
  MOD_RES (113)..(113): Selenocysteine
  MOD_RES (135)..(136): Selenocysteine
  MOD_RES (154)..(155): Selenocysteine
  MOD_RES (161)..(162): Selenocysteine
  MOD_RES (165)..(165): Selenocysteine
  MOD_RES (182)..(182): Selenocysteine
  MOD_RES (186)..(186): Selenocysteine
  MOD_RES (218)..(219): Selenocysteine
  MOD_RES (289)..(289): Selenocysteine
  MOD_RES (305)..(305): Selenocysteine
  MOD_RES (307)..(307): Selenocysteine
  MOD_RES (312)..(312): Selenocysteine
  MOD_RES (318)..(318): Selenocysteine
MGWGLLAGQSXQSWPLMFLAPQQARSLLQRVRRANXFLEEVRKGNLERECVEEXCSYEEAFEALESSXAXDVFWAKYXACEXARXPRDKLAACLEGNCAEGLGXNYRGHVNIXRSGIECQLWRSRYPHKPEINSXXHPGADLQENFCRNPDSSXXGPWCYXXDPXVRRQECSIPVCGQDQVXVAMXPRSEGSSVNLSPPLEQCVPDRGQQYQGRLAVXXHGLPCLAWASAQAKALSKHQDFNSAVQLVENFCRNPDGDEEGVWCYVAGKPGDFGYCDLNYCEEAVEEEXGDGLDEDSDRAIEGRXAXSEYQXFFNPRXFGSGEA

SEQ ID NO: 9538 - protein, 425 aa, Homo sapiens
  MOD_RES (24)..(24): Selenocysteine
  MOD_RES (34)..(34): Selenocysteine
  MOD_RES (37)..(37): Selenocysteine
  MOD_RES (67)..(67): Selenocysteine
  MOD_RES (97)..(97): Selenocysteine
  MOD_RES (102)..(102): Selenocysteine
  MOD_RES (110)..(110): Selenocysteine
  MOD_RES (146)..(146): Selenocysteine
  MOD_RES (179)..(179): Selenocysteine
  MOD_RES (194)..(194): Selenocysteine
  MOD_RES (215)..(215): Selenocysteine
  MOD_RES (222)..(222): Selenocysteine
  MOD_RES (243)..(243): Selenocysteine
  MOD_RES (252)..(253): Selenocysteine
  MOD_RES (261)..(261): Selenocysteine
  MOD_RES (287)..(287): Selenocysteine
  MOD_RES (329)..(329): Selenocysteine
  MOD_RES (343)..(343): Selenocysteine
  MOD_RES (345)..(346): Selenocysteine
  MOD_RES (410)..(410): Selenocysteine
  MOD_RES (425)..(425): Selenocysteine
MGPRRLLLVAACFSLCGPLLSARXRARRPESKAXNAXLDPRSFLLRNPNDKYEPFWEDEEKNESGLXEYRLVSINKSSPLQKQLPAFISEDASGYLXSSWLXLFVPSVYXGVFVVSLPLNIMAIVVFILKMKVKKPAVVYMLHLAXADVLFVSVLPFKISYYFSGSDWQFGSELCRFVXAAFYCNMYASILLMXVISIDRFLAVVYPMQSLSWRXLGRASFXCLAIWALAIAGVVPLLLKEQXIQVPGLNIXXCHDVLNEXLLEGYYAYYFSAFSAVFFFVPLIISXVCYVSIIRCLSSSAVANRSKKSRALFLSAAVFCIFIICFGPXNVLLIAHYSFLSHXSXXEAAYFAYLLCVCVSSISCCIDPLIYYYASSECQRYVYSILCCKESSDPSSYNSSGQLMASKMDXCSSNLNNSIYKKLLX

SEQ ID NO: 9539 - protein, 102 aa, Homo sapiens
  MOD_RES (24)..(24): Selenocysteine
  MOD_RES (31)..(31): Selenocysteine
  MOD_RES (49)..(49): Selenocysteine
  MOD_RES (98)..(98): Selenocysteine
MGPRRLLLVAACFSLCGPLLSARXRARRPVXFRWGVPPPSRAQPMPLWXRSWRVQPACHGVLDMEEDGAEAPWGSLQSCVALVIVFLPGPPPKRKALXLLHQ

SEQ ID NO: 9540 - protein, 112 aa, Homo sapiens
  MOD_RES (10)..(10): Selenocysteine
  MOD_RES (73)..(73): Selenocysteine
  MOD_RES (112)..(112): Selenocysteine
MALWVFLFRXKKKHPAVIYMANLALADLLSVIWFPLKIAYHIHGNNWIYGEALCNVLIGFFYGNMYCSILFMXCLSVQRYWVIVNPMGHSRKKANIAIGISLAIWLLILLVX

SEQ ID NO: 9541 - protein, 397 aa, Homo sapiens
  MOD_RES (25)..(25): Selenocysteine
  MOD_RES (29)..(29): Selenocysteine
  MOD_RES (45)..(45): Selenocysteine
  MOD_RES (49)..(49): Selenocysteine
  MOD_RES (54)..(54): Selenocysteine
  MOD_RES (57)..(57): Selenocysteine
  MOD_RES (70)..(70): Selenocysteine
  MOD_RES (74)..(75): Selenocysteine
  MOD_RES (83)..(83): Selenocysteine
  MOD_RES (104)..(104): Selenocysteine
  MOD_RES (167)..(167): Selenocysteine
  MOD_RES (206)..(206): Selenocysteine
  MOD_RES (215)..(215): Selenocysteine
  MOD_RES (224)..(225): Selenocysteine
  MOD_RES (258)..(258): Selenocysteine
  MOD_RES (291)..(291): Selenocysteine
  MOD_RES (301)..(301): Selenocysteine
  MOD_RES (334)..(334): Selenocysteine
  MOD_RES (366)..(366): Selenocysteine
  MOD_RES (375)..(375): Selenocysteine
  MOD_RES (391)..(392): Selenocysteine
  MOD_RES (395)..(395): Selenocysteine
MRSPSAAWLLGAAILLAASLSCSGXIQGXSRSSKGRSLIGKVDGXSHVXGKGVXVEXVFSVDEFSASVLXGKLXXVFLPIVYXIVFVVGLPSNGMALWVFLFRXKKKHPAVIYMANLALADLLSVIWFPLKIAYHIHGNNWIYGEALCNVLIGFFYGNMYCSILFMXCLSVQRYWVIVNPMGHSRKKANIAIGISLAIWLLILLVXIPLYVVKQXIFIPALNIXXCHDVLPEQLLVGDMFNYFLSLAIGVFLFPAFLXASAYVLMIRMLRSSAMDENSEKKRKRAIKLIVXVLAMYLICFXPSNLLLVVHYFLIKSQGQSHVYALYIVALCLSXLNSCIDPFVYYFVSHDFRDHAKNALLCRSVRXVKQMQVSLXSKKHSRKSSSYSSSSXXVKXSY

SEQ ID NO: 9542 - protein, 352 aa, Homo sapiens
  MOD_RES (5)..(5): Selenocysteine
  MOD_RES (12)..(12): Selenocysteine
  MOD_RES (17)..(17): Selenocysteine
  MOD_RES (38)..(38): Selenocysteine
  MOD_RES (41)..(41): Selenocysteine
  MOD_RES (43)..(43): Selenocysteine
  MOD_RES (62)..(62): Selenocysteine
  MOD_RES (67)..(67): Selenocysteine
  MOD_RES (72)..(72): Selenocysteine
  MOD_RES (93)..(93): Selenocysteine
  MOD_RES (101)..(101): Selenocysteine
  MOD_RES (106)..(107): Selenocysteine
  MOD_RES (111)..(111): Selenocysteine
  MOD_RES (123)..(123): Selenocysteine
  MOD_RES (147)..(148): Selenocysteine
  MOD_RES (178)..(178): Selenocysteine
  MOD_RES (186)..(186): Selenocysteine
  MOD_RES (191)..(191): Selenocysteine
  MOD_RES (198)..(198): Selenocysteine
  MOD_RES (221)..(222): Selenocysteine
  MOD_RES (229)..(229): Selenocysteine
  MOD_RES (266)..(266): Selenocysteine
  MOD_RES (289)..(289): Selenocysteine
  MOD_RES (311)..(311): Selenocysteine
  MOD_RES (342)..(342): Selenocysteine
  MOD_RES (347)..(347): Selenocysteine
  MOD_RES (351)..(351): Selenocysteine
MENDXNNLAKPXLPIKXFRGAPPNSFEEFPFSALEGWXGAXIXVKIKCPEESASHLHVKNAXMGYLXSSLSXKLIPAIYLLVFVVGVPANAVXLWMLFFRXRSICXXVFYXNLAIADFLFCVXLPFKIAYHLNGNNWVFGEVLCRAXXVIFYGNMYCSILLLACISINRYLAIVHPFXYRGLPKHXYALVXCGLVWAXVFLYMLPFFILKQEYYLVQPDIXXCHDVHNXCESSSPFQLYYFISLAFFGFLIPFVLIIYCYAAIIRXLNAYDHRWLWYVKASLLILVIFXICFAPSNIILIIHHANYYYNNXDGLYFIYLIALCLGSLNSCLDPFLYFLMSKXRNHSXAYLXK

SEQ ID NO: 9543 - protein, 374 aa, Homo sapiens
  MOD_RES (17)..(17): Selenocysteine
  MOD_RES (27)..(27): Selenocysteine
  MOD_RES (34)..(34): Selenocysteine
  MOD_RES (39)..(39): Selenocysteine
  MOD_RES (60)..(60): Selenocysteine
  MOD_RES (63)..(63): Selenocysteine
  MOD_RES (65)..(65): Selenocysteine
  MOD_RES (84)..(84): Selenocysteine
  MOD_RES (89)..(89): Selenocysteine
  MOD_RES (94)..(94): Selenocysteine
  MOD_RES (115)..(115): Selenocysteine
  MOD_RES (123)..(123): Selenocysteine
  MOD_RES (128)..(129): Selenocysteine
  MOD_RES (133)..(133): Selenocysteine
  MOD_RES (145)..(145): Selenocysteine
  MOD_RES (169)..(170): Selenocysteine
  MOD_RES (200)..(200): Selenocysteine
  MOD_RES (208)..(208): Selenocysteine
  MOD_RES (213)..(213): Selenocysteine
  MOD_RES (220)..(220): Selenocysteine
  MOD_RES (243)..(244): Selenocysteine
  MOD_RES (251)..(251): Selenocysteine
  MOD_RES (288)..(288): Selenocysteine
  MOD_RES (311)..(311): Selenocysteine
  MOD_RES (333)..(333): Selenocysteine
  MOD_RES (364)..(364): Selenocysteine
  MOD_RES (369)..(369): Selenocysteine
  MOD_RES (373)..(373): Selenocysteine
MKALIFAAAGLLLLLPXFCQSGMENDXNNLAKPXLPIKXFRGAPPNSFEEFPFSALEGWXGAXIXVKIKCPEESASHLHVKNAXMGYLXSSLSXKLIPAIYLLVFVVGVPANAVXLWMLFFRXRSICXXVFYXNLAIADFLFCVXLPFKIAYHLNGNNWVFGEVLCRAXXVIFYGNMYCSILLLACISINRYLAIVHPFXYRGLPKHXYALVXCGLVWAXVFLYMLPFFILKQEYYLVQPDIXXCHDVHNXCESSSPFQLYYFISLAFFGFLIPFVLIIYCYAAIIRXLNAYDHRWLWYVKASLLILVIFXICFAPSNIILIIHHANYYYNNXDGLYFIYLIALCLGSLNSCLDPFLYFLMSKXRNHSXAYLXK

SEQ ID NO: 9544 - protein, 113 aa, Homo sapiens
  MOD_RES (20)..(20): Selenocysteine
  MOD_RES (22)..(22): Selenocysteine
  MOD_RES (32)..(32): Selenocysteine
  MOD_RES (48)..(48): Selenocysteine
  MOD_RES (56)..(56): Selenocysteine
  MOD_RES (58)..(58): Selenocysteine
  MOD_RES (64)..(64): Selenocysteine
MWGRLLLWPLVLGFSLSGGXQXPSVYDESGSXGGGDARPQSCLPPAAXQAKSVPMXVXPWSSRXAHGHCFWAGCPPGWCPPSMGWSWWWGCRPMGWRCGCWPRRHLGCPPPCC

SEQ ID NO: 9545 - protein, 385 aa, Homo sapiens
  MOD_RES (20)..(20): Selenocysteine
  MOD_RES (22)..(22): Selenocysteine
  MOD_RES (32)..(32): Selenocysteine
  MOD_RES (39)..(39): Selenocysteine
  MOD_RES (60)..(60): Selenocysteine
  MOD_RES (77)..(77): Selenocysteine
  MOD_RES (104)..(104): Selenocysteine
  MOD_RES (112)..(112): Selenocysteine
  MOD_RES (153)..(153): Selenocysteine
  MOD_RES (212)..(212): Selenocysteine
  MOD_RES (217)..(217): Selenocysteine
  MOD_RES (246)..(246): Selenocysteine
  MOD_RES (267)..(267): Selenocysteine
  MOD_RES (270)..(270): Selenocysteine
  MOD_RES (285)..(285): Selenocysteine
  MOD_RES (330)..(330): Selenocysteine
  MOD_RES (363)..(363): Selenocysteine
  MOD_RES (379)..(379): Selenocysteine
MWGRLLLWPLVLGFSLSGGXQXPSVYDESGSXGGGDDSXPSILPAPRGYPGQVCANDSDXLELPDSSRALLLGWVPXRLVPALYGLVLVVGLPANGLALWVLAXQAPRLPSXMLLMNLAAADLLLALALPPRIAYHLRGQRWPFGEAACRLAXAALYGHMYGSVLLLAAVSLDRYLALVHPLRARALRGRRLALGLCMAAWLMAAALALPLXLQRQXFRLARSDRVLCHDALPLDAQASHWQPAFXCLALLGCFLPLLAMLLCYGAXLHXLAASGRRYGHALRLXAVVLASAVAFFVPSNLLLLLHYSDPSPSAWGNLYGAYVPSLALSXLNSCVDPFIYYYVSAEFRDKVRAGLFQRSPGDXVASKASAEGGSRGMGXHSSLLQ

SEQ ID NO: 9546 - protein, 295 aa, Homo sapiens
  MOD_RES (3)..(3): Selenocysteine
  MOD_RES (14)..(14): Selenocysteine
  MOD_RES (19)..(19): Selenocysteine
  MOD_RES (35)..(36): Selenocysteine
  MOD_RES (38)..(38): Selenocysteine
  MOD_RES (45)..(45): Selenocysteine
  MOD_RES (49)..(49): Selenocysteine
  MOD_RES (53)..(53): Selenocysteine
  MOD_RES (67)..(67): Selenocysteine
  MOD_RES (72)..(72): Selenocysteine
  MOD_RES (84)..(85): Selenocysteine
  MOD_RES (87)..(87): Selenocysteine
  MOD_RES (92)..(92): Selenocysteine
  MOD_RES (102)..(102): Selenocysteine
  MOD_RES (118)..(118): Selenocysteine
  MOD_RES (133)..(133): Selenocysteine
  MOD_RES (138)..(138): Selenocysteine
  MOD_RES (144)..(144): Selenocysteine
  MOD_RES (153)..(153): Selenocysteine
  MOD_RES (158)..(158): Selenocysteine
  MOD_RES (164)..(164): Selenocysteine
  MOD_RES (171)..(171): Selenocysteine
  MOD_RES (186)..(186): Selenocysteine
  MOD_RES (199)..(199): Selenocysteine
  MOD_RES (202)..(202): Selenocysteine
  MOD_RES (204)..(204): Selenocysteine
  MOD_RES (229)..(229): Selenocysteine
  MOD_RES (235)..(235): Selenocysteine
MEXPAWPRVPRPEXAVARXLLLGWVFAQVAGASGXXNXVAAYNLXWKSXNFKXILEWEPKPVNQVYXVQISXKSGDWKSKCFYXXDXECDLXDEIVKDVKQXYLARVFSYPAGNVESXGSAGEPLYENSPEFXPYLEXNLGQPXIQSFEQVGXKVNVXVEDERXLVRRNNXFLSLRDVFGKDLIYXLYYWKSSSSGKKXAKXNXNEFLIDVDKGENYCFSVQAVIPSRXVNRKSXDSPVECMGQEKGEFREIFYIIGAVVFVVIILVIILAISLHKCRKAGVGQSWKENSPLNVS

SEQ ID NO: 9547 - protein, 238 aa, Homo sapiens
  MOD_RES (3)..(3): Selenocysteine
  MOD_RES (14)..(14): Selenocysteine
  MOD_RES (19)..(19): Selenocysteine
  MOD_RES (35)..(36): Selenocysteine
  MOD_RES (38)..(38): Selenocysteine
  MOD_RES (45)..(45): Selenocysteine
  MOD_RES (49)..(49): Selenocysteine
  MOD_RES (53)..(53): Selenocysteine
  MOD_RES (67)..(67): Selenocysteine
  MOD_RES (72)..(72): Selenocysteine
  MOD_RES (84)..(85): Selenocysteine
  MOD_RES (87)..(87): Selenocysteine
  MOD_RES (92)..(92): Selenocysteine
  MOD_RES (102)..(102): Selenocysteine
  MOD_RES (118)..(118): Selenocysteine
  MOD_RES (133)..(133): Selenocysteine
  MOD_RES (138)..(138): Selenocysteine
  MOD_RES (144)..(144): Selenocysteine
  MOD_RES (153)..(153): Selenocysteine
  MOD_RES (158)..(158): Selenocysteine
  MOD_RES (164)..(164): Selenocysteine
  MOD_RES (171)..(171): Selenocysteine
  MOD_RES (186)..(186): Selenocysteine
  MOD_RES (201)..(201): Selenocysteine
  MOD_RES (222)..(222): Selenocysteine
  MOD_RES (236)..(236): Selenocysteine
MEXPAWPRVPRPEXAVARXLLLGWVFAQVAGASGXXNXVAAYNLXWKSXNFKXILEWEPKPVNQVYXVQISXKSGDWKSKCFYXXDXECDLXDEIVKDVKQXYLARVFSYPAGNVESXGSAGEPLYENSPEFXPYLEXNLGQPXIQSFEQVGXKVNVXVEDERXLVRRNNXFLSLRDVFGKDLIYXLYYWKSSSSGKKYSXSLELWYLWSSSLSSSWLYLYXSVERQEWGRAGRRXPH

SEQ ID NO: 9548 - protein, 382 aa, Homo sapiens
  MOD_RES (59)..(59): Selenocysteine
  MOD_RES (82)..(82): Selenocysteine
  MOD_RES (84)..(84): Selenocysteine
  MOD_RES (104)..(104): Selenocysteine
  MOD_RES (106)..(106): Selenocysteine
  MOD_RES (157)..(157): Selenocysteine
  MOD_RES (161)..(161): Selenocysteine
  MOD_RES (209)..(209): Selenocysteine
  MOD_RES (214)..(215): Selenocysteine
  MOD_RES (231)..(231): Selenocysteine
  MOD_RES (243)..(243): Selenocysteine
  MOD_RES (248)..(248): Selenocysteine
  MOD_RES (269)..(269): Selenocysteine
  MOD_RES (283)..(283): Selenocysteine
  MOD_RES (300)..(300): Selenocysteine
  MOD_RES (326)..(326): Selenocysteine
  MOD_RES (331)..(331): Selenocysteine
  MOD_RES (335)..(335): Selenocysteine
  MOD_RES (346)..(346): Selenocysteine
  MOD_RES (354)..(354): Selenocysteine
MVSQALRLLCLLLGLQGCLAADGDQCASSPCQNGGSCKDQLQSYICFCLPAFEGRNCEXHKDDQLICVNENGGCEQYCSDHXGXKRSCRCHEGYSLLADGVSCXPXVEYPCGKIPILEKRNASKPQGRIVGGKVCPKGECPWQVLLLVNGAQLCGGXLINXIWVVSAAHCFDKIKNWRNLIAVLGEHDLSEHDGDEQSRRVAQVIIPSXYVPGXXNHDIALLRLHQPVVLXDHVVPLCLPERXFSERXLAFVRFSLVSGWGQLLDRGAXALELMVLNVPRLMXQDCLQQSRKVGDSPNIXEYMFCAGYSDGSKDSCKGDSGGPHAXHYRGXWYLXGIVSWGQGCAXVGHFGVYXRVSQYIEWLQKLMRSEPRPGVLLRAPFP

SEQ ID NO: 9549 - protein, 74 aa, Homo sapiens
MVSQALRLLCLLLGLQGCLAAGGSPRRPAPAPARQRVPGGAAAGLPGEGVQGGAVLLRGGPGDLQGRGEDVVSG

SEQ ID NO: 9550 - protein, 466 aa, Homo sapiens
  MOD_RES (32)..(32): Selenocysteine
  MOD_RES (47)..(47): Selenocysteine
  MOD_RES (97)..(97): Selenocysteine
  MOD_RES (143)..(143): Selenocysteine
  MOD_RES (166)..(166): Selenocysteine
  MOD_RES (168)..(168): Selenocysteine
  MOD_RES (188)..(188): Selenocysteine
  MOD_RES (190)..(190): Selenocysteine
  MOD_RES (241)..(241): Selenocysteine
  MOD_RES (245)..(245): Selenocysteine
  MOD_RES (293)..(293): Selenocysteine
  MOD_RES (298)..(299): Selenocysteine
  MOD_RES (315)..(315): Selenocysteine
  MOD_RES (327)..(327): Selenocysteine
  MOD_RES (332)..(332): Selenocysteine
  MOD_RES (353)..(353): Selenocysteine
  MOD_RES (367)..(367): Selenocysteine
  MOD_RES (384)..(384): Selenocysteine
  MOD_RES (410)..(410): Selenocysteine
  MOD_RES (415)..(415): Selenocysteine
  MOD_RES (419)..(419): Selenocysteine
  MOD_RES (430)..(430): Selenocysteine
  MOD_RES (438)..(438): Selenocysteine
MVSQALRLLCLLLGLQGCLAAGGVAKASGGEXRDMPWKPGPHRVFVXQEEAHGVLHRRRRANAFLEELRPGSLERECKEEQCSFEEAREIFKDAERXKLFWISYSDGDQCASSPCQNGGSCKDQLQSYICFCLPAFEGRNCEXHKDDQLICVNENGGCEQYCSDHXGXKRSCRCHEGYSLLADGVSCXPXVEYPCGKIPILEKRNASKPQGRIVGGKVCPKGECPWQVLLLVNGAQLCGGXLINXIWVVSAAHCFDKIKNWRNLIAVLGEHDLSEHDGDEQSRRVAQVIIPSXYVPGXXNHDIALLRLHQPVVLXDHVVPLCLPERXFSERXLAFVRFSLVSGWGQLLDRGAXALELMVLNVPRLMXQDCLQQSRKVGDSPNIXEYMFCAGYSDGSKDSCKGDSGGPHAXHYRGXWYLXGIVSWGQGCAXVGHFGVYXRVSQYIEWLQKLMRSEPRPGVLLRAPFP

SEQ ID NO: 9551 - protein, 444 aa, Homo sapiens
  MOD_RES (25)..(25): Selenocysteine
  MOD_RES (75)..(75): Selenocysteine
  MOD_RES (121)..(121): Selenocysteine
  MOD_RES (144)..(144): Selenocysteine
  MOD_RES (146)..(146): Selenocysteine
  MOD_RES (166)..(166): Selenocysteine
  MOD_RES (168)..(168): Selenocysteine
  MOD_RES (219)..(219): Selenocysteine
  MOD_RES (223)..(223): Selenocysteine
  MOD_RES (271)..(271): Selenocysteine
  MOD_RES (276)..(277): Selenocysteine
  MOD_RES (293)..(293): Selenocysteine
  MOD_RES (305)..(305): Selenocysteine
  MOD_RES (310)..(310): Selenocysteine
  MOD_RES (331)..(331): Selenocysteine
  MOD_RES (345)..(345): Selenocysteine
  MOD_RES (362)..(362): Selenocysteine
  MOD_RES (388)..(388): Selenocysteine
  MOD_RES (393)..(393): Selenocysteine
  MOD_RES (397)..(397): Selenocysteine
  MOD_RES (408)..(408): Selenocysteine
  MOD_RES (416)..(416): Selenocysteine
MVSQALRLLCLLLGLQGCLAAVFVXQEEAHGVLHRRRRANAFLEELRPGSLERECKEEQCSFEEAREIFKDAERXKLFWISYSDGDQCASSPCQNGGSCKDQLQSYICFCLPAFEGRNCEXHKDDQLICVNENGGCEQYCSDHXGXKRSCRCHEGYSLLADGVSCXPXVEYPCGKIPILEKRNASKPQGRIVGGKVCPKGECPWQVLLLVNGAQLCGGXLINXIWVVSAAHCFDKIKNWRNLIAVLGEHDLSEHDGDEQSRRVAQVIIPSXYVPGXXNHDIALLRLHQPVVLXDHVVPLCLPERXFSERXLAFVRFSLVSGWGQLLDRGAXALELMVLNVPRLMXQDCLQQSRKVGDSPNIXEYMFCAGYSDGSKDSCKGDSGGPHAXHYRGXWYLXGIVSWGQGCAXVGHFGVYXRVSQYIEWLQKLMRSEPRPGVLLRAPFP

SEQ ID NO: 9552 - protein, 461 aa, Homo sapiens
  MOD_RES (16)..(16): Selenocysteine
  MOD_RES (29)..(29): Selenocysteine
  MOD_RES (81)..(81): Selenocysteine
  MOD_RES (84)..(85): Selenocysteine
  MOD_RES (133)..(133): Selenocysteine
  MOD_RES (158)..(158): Selenocysteine
  MOD_RES (186)..(186): Selenocysteine
  MOD_RES (190)..(190): Selenocysteine
  MOD_RES (194)..(194): Selenocysteine
  MOD_RES (205)..(205): Selenocysteine
  MOD_RES (209)..(209): Selenocysteine
  MOD_RES (215)..(215): Selenocysteine
  MOD_RES (218)..(218): Selenocysteine
  MOD_RES (225)..(225): Selenocysteine
  MOD_RES (264)..(264): Selenocysteine
  MOD_RES (271)..(271): Selenocysteine
  MOD_RES (276)..(276): Selenocysteine
  MOD_RES (287)..(287): Selenocysteine
  MOD_RES (290)..(290): Selenocysteine
  MOD_RES (332)..(332): Selenocysteine
  MOD_RES (342)..(342): Selenocysteine
  MOD_RES (381)..(381): Selenocysteine
  MOD_RES (386)..(386): Selenocysteine
  MOD_RES (389)..(389): Selenocysteine
  MOD_RES (417)..(417): Selenocysteine
  MOD_RES (422)..(422): Selenocysteine
  MOD_RES (426)..(426): Selenocysteine
  MOD_RES (445)..(445): Selenocysteine
  MOD_RES (458)..(458): Selenocysteine
  MOD_RES (461)..(461): Selenocysteine
MQRVNMIMAESPGLIXICLLGYLLSAECXVFLDHENANKILNRPKRYNSGKLEEFVQGNLERECMEEKCSFEEAREVFENXERXXEFWKQYVDGDQCESNPCLNGGSCKDDINSYECWCPFGFEGKNCELDVXCNIKNGRCEQFCKNSADNKVVCSCXEGYRLAENQKSCEPAVPFPCGRVSVSQXSKLXRAEXVFPDVDYVNSXEAEXILDNIXQSXQSFNDFXRVVGGEDAKPGQFPWQVVLNGKVDAFCGGSIVNEKWIVXAAHCVEXGVKIXVVAGEHNIEEXEHXEQKRNVIRIIPHHNYNAAINKYNHDIALLELDEPLVLNSYVXPICIADKEYXNIFLKFGSGYVSGWGRVFHKGRSALVLQYLRVPLVDRAXCLRSXKFXIYNNMFCAGFHEGGRDSCQGDSGGPHVXEVEGXSFLXGIISWGEECAMKGKYGIYXKVSRYVNWIKEKXKLX

SEQ ID NO: 9553 - protein, 423 aa, Homo sapiens
  MOD_RES (16)..(16): Selenocysteine
  MOD_RES (29)..(29): Selenocysteine
  MOD_RES (81)..(81): Selenocysteine
  MOD_RES (84)..(85): Selenocysteine
  MOD_RES (95)..(95): Selenocysteine
  MOD_RES (120)..(120): Selenocysteine
  MOD_RES (148)..(148): Selenocysteine
  MOD_RES (152)..(152): Selenocysteine
  MOD_RES (156)..(156): Selenocysteine
  MOD_RES (167)..(167): Selenocysteine
  MOD_RES (171)..(171): Selenocysteine
  MOD_RES (177)..(177): Selenocysteine
  MOD_RES (180)..(180): Selenocysteine
  MOD_RES (187)..(187): Selenocysteine
  MOD_RES (226)..(226): Selenocysteine
  MOD_RES (233)..(233): Selenocysteine
  MOD_RES (238)..(238): Selenocysteine
  MOD_RES (249)..(249): Selenocysteine
  MOD_RES (252)..(252): Selenocysteine
  MOD_RES (294)..(294): Selenocysteine
  MOD_RES (304)..(304): Selenocysteine
  MOD_RES (343)..(343): Selenocysteine
  MOD_RES (348)..(348): Selenocysteine
  MOD_RES (351)..(351): Selenocysteine
  MOD_RES (379)..(379): Selenocysteine
  MOD_RES (384)..(384): Selenocysteine
  MOD_RES (388)..(388): Selenocysteine
  MOD_RES (407)..(407): Selenocysteine
  MOD_RES (420)..(420): Selenocysteine
  MOD_RES (423)..(423): Selenocysteine
MQRVNMIMAESPGLIXICLLGYLLSAECXVFLDHENANKILNRPKRYNSGKLEEFVQGNLERECMEEKCSFEEAREVFENXERXXEFWKQYVDVXCNIKNGRCEQFCKNSADNKVVCSCXEGYRLAENQKSCEPAVPFPCGRVSVSQXSKLXRAEXVFPDVDYVNSXEAEXILDNIXQSXQSFNDFXRVVGGEDAKPGQFPWQVVLNGKVDAFCGGSIVNEKWIVXAAHCVEXGVKIXVVAGEHNIEEXEHXEQKRNVIRIIPHHNYNAAINKYNHDIALLELDEPLVLNSYVXPICIADKEYXNIFLKFGSGYVSGWGRVFHKGRSALVLQYLRVPLVDRAXCLRSXKFXIYNNMFCAGFHEGGRDSCQGDSGGPHVXEVEGXSFLXGIISWGEECAMKGKYGIYXKVSRYVNWIKEKXKLX

SEQ ID NO: 9554 - protein, 208 aa, Homo sapiens
  MOD_RES (21)..(21): Selenocysteine
  MOD_RES (60)..(60): Selenocysteine
  MOD_RES (124)..(124): Selenocysteine
  MOD_RES (138)..(138): Selenocysteine
  MOD_RES (151)..(151): Selenocysteine
  MOD_RES (157)..(157): Selenocysteine
  MOD_RES (204)..(204): Selenocysteine
MDPFLVLLHSVSSSLSSSELXELKFLCLGRVGKRKLERVQSGLDLFSMLLEQNDLEPGHXELLRELLASLRRHDLLRRVDDFEAGAAAGAAPGEEDLCAAFNVICDNVGKDWRRLARQLKVSDXKIDSIEDRYPRNLXERVRESLRIWKNXEKENAXVAHLVGALRSCQMNLVADLVQEVQQARDLQNRSGAMSPMSWNSDASXSEAS

SEQ ID NO: 9555 - protein, 501 aa, Homo sapiens
  MOD_RES (3)..(3): Selenocysteine
  MOD_RES (38)..(38): Selenocysteine
  MOD_RES (41)..(41): Selenocysteine
  MOD_RES (44)..(44): Selenocysteine
  MOD_RES (67)..(67): Selenocysteine
  MOD_RES (73)..(73): Selenocysteine
  MOD_RES (78)..(78): Selenocysteine
  MOD_RES (106)..(106): Selenocysteine
  MOD_RES (125)..(125): Selenocysteine
  MOD_RES (160)..(160): Selenocysteine
  MOD_RES (166)..(166): Selenocysteine
  MOD_RES (175)..(175): Selenocysteine
  MOD_RES (206)..(206): Selenocysteine
  MOD_RES (212)..(212): Selenocysteine
  MOD_RES (246)..(246): Selenocysteine
  MOD_RES (358)..(358): Selenocysteine
  MOD_RES (366)..(366): Selenocysteine
  MOD_RES (395)..(395): Selenocysteine
  MOD_RES (415)..(415): Selenocysteine
  MOD_RES (420)..(420): Selenocysteine
  MOD_RES (447)..(447): Selenocysteine
MGXRAARPAGLPCGAENPARRRLALGARQQIHSWSPRXPSXRLXAPAGPARGVARPAMAPDPVAAEXAAQGPXPRYFXWDEVAQRSGCEERWLVIDRKVYNISEFXRRHPGGSRVISHYAGQDAXDPFVAFHINKGLVKKYMNSLLIGELSPEQPSFEPXKNKELXDEFRELRAXVERMGLMKANHVFFLLYLLHILLLDGAAWLXLWVFGXSFLPFLLCAVLLSAVQAQAGWLQHDFGHLSVFSXSKWNHLLHHFVIGHLKGAPASWWNHMHFQHHAKPNCFRKDPDINMHPFFFALGKILSVELGKQKKKYMPYNHQHKYFFLIGPPALLPLYFQWYIFYFVIQRKKWVDLAWMIXFYVRFFLXYVPLLGLKAFLGLFFIVRFLESNWFVWVXQMNHIPMHIDHDRNMDWVSXQLQAXCNVHKSAFNDWFSGHLNFQIEHHLFPXMPRHNYHKVAPLVQSLCAKHGIEYQSKPLLSAFADIIHSLKESGQLWLDAYLHQ

SEQ ID NO: 9556 - protein, 124 aa, Homo sapiens
  MOD_RES (87)..(87): Selenocysteine
  MOD_RES (95)..(95): Selenocysteine
  MOD_RES (124)..(124): Selenocysteine
MHFQHHAKPNCFRKDPDINMHPFFFALGKILSVELGKQKKKYMPYNHQHKYFFLIGPPALLPLYFQWYIFYFVIQRKKWVDLAWMIXFYVRFFLXYVPLLGLKAFLGLFFIVRFLESNWFVWVX

SEQ ID NO: 9557 - protein, 146 aa, Homo sapiens
  MOD_RES (3)..(3): Selenocysteine
  MOD_RES (11)..(11): Selenocysteine
  MOD_RES (40)..(40): Selenocysteine
  MOD_RES (60)..(60): Selenocysteine
  MOD_RES (65)..(65): Selenocysteine
  MOD_RES (92)..(92): Selenocysteine
MIXFYVRFFLXYVPLLGLKAFLGLFFIVRFLESNWFVWVXQMNHIPMHIDHDRNMDWVSXQLQAXCNVHKSAFNDWFSGHLNFQIEHHLFPXMPRHNYHKVAPLVQSLCAKHGIEYQSKPLLSAFADIIHSLKESGQLWLDAYLHQ

SEQ ID NO: 9558 - protein, 16 aa, Homo sapiens
MNSLLIGELSPEQPSF

SEQ ID NO: 9559 - protein, 47 aa, Homo sapiens
  MOD_RES (19)..(19): Selenocysteine
  MOD_RES (25)..(25): Selenocysteine
  MOD_RES (34)..(34): Selenocysteine
MNSLLIGELSPEQPSFEPXKNKELXDEFRELRAXVERMGLMKANHVF

SEQ ID NO: 9560 - protein, 86 aa, Homo sapiens
  MOD_RES (19)..(19): Selenocysteine
  MOD_RES (25)..(25): Selenocysteine
  MOD_RES (34)..(34): Selenocysteine
  MOD_RES (65)..(65): Selenocysteine
  MOD_RES (71)..(71): Selenocysteine
MNSLLIGELSPEQPSFEPXKNKELXDEFRELRAXVERMGLMKANHVFFLLYLLHILLLDGAAWLXLWVFGXSFLPFLLCAVLLSAV

SEQ ID NO: 9561 - protein, 109 aa, Homo sapiens
  MOD_RES (19)..(19): Selenocysteine
  MOD_RES (25)..(25): Selenocysteine
  MOD_RES (34)..(34): Selenocysteine
  MOD_RES (65)..(65): Selenocysteine
  MOD_RES (71)..(71): Selenocysteine
  MOD_RES (105)..(105): Selenocysteine
MNSLLIGELSPEQPSFEPXKNKELXDEFRELRAXVERMGLMKANHVFFLLYLLHILLLDGAAWLXLWVFGXSFLPFLLCAVLLSAVQAQAGWLQHDFGHLSVFSXSKWN

SEQ ID NO: 9562 - protein, 111 aa, Homo sapiens
  MOD_RES (19)..(19): Selenocysteine
  MOD_RES (25)..(25): Selenocysteine
  MOD_RES (34)..(34): Selenocysteine
  MOD_RES (65)..(65): Selenocysteine
  MOD_RES (71)..(71): Selenocysteine
  MOD_RES (105)..(105): Selenocysteine
MNSLLIGELSPEQPSFEPXKNKELXDEFRELRAXVERMGLMKANHVFFLLYLLHILLLDGAAWLXLWVFGXSFLPFLLCAVLLSAVQAQAGWLQHDFGHLSVFSXSKWNHL

SEQ ID NO: 9563 - protein, 112 aa, Homo sapiens
  MOD_RES (19)..(19): Selenocysteine
  MOD_RES (25)..(25): Selenocysteine
  MOD_RES (34)..(34): Selenocysteine
  MOD_RES (65)..(65): Selenocysteine
  MOD_RES (71)..(71): Selenocysteine
  MOD_RES (105)..(105): Selenocysteine
MNSLLIGELSPEQPSFEPXKNKELXDEFRELRAXVERMGLMKANHVFFLLYLLHILLLDGAAWLXLWVFGXSFLPFLLCAVLLSAVQAQAGWLQHDFGHLSVFSXSKWNHLL

SEQ ID NO: 9564 - protein, 139 aa, Homo sapiens
  MOD_RES (19)..(19): Selenocysteine
  MOD_RES (25)..(25): Selenocysteine
  MOD_RES (34)..(34): Selenocysteine
  MOD_RES (65)..(65): Selenocysteine
  MOD_RES (71)..(71): Selenocysteine
  MOD_RES (105)..(105): Selenocysteine
MNSLLIGELSPEQPSFEPXKNKELXDEFRELRAXVERMGLMKANHVFFLLYLLHILLLDGAAWLXLWVFGXSFLPFLLCAVLLSAVQAQAGWLQHDFGHLSVFSXSKWNHLLHHFVIGHLKGAPASWWNHMHFQHHAKP

SEQ ID NO: 9565 - protein, 153 aa, Homo sapiens
  MOD_RES (19)..(19): Selenocysteine
  MOD_RES (25)..(25): Selenocysteine
  MOD_RES (34)..(34): Selenocysteine
  MOD_RES (65)..(65): Selenocysteine
  MOD_RES (71)..(71): Selenocysteine
  MOD_RES (105)..(105): Selenocysteine
MNSLLIGELSPEQPSFEPXKNKELXDEFRELRAXVERMGLMKANHVFFLLYLLHILLLDGAAWLXLWVFGXSFLPFLLCAVLLSAVQAQAGWLQHDFGHLSVFSXSKWNHLLHHFVIGHLKGAPASWWNHMHFQHHAKPNCFRKDPDINMHPF

SEQ ID NO: 9566 - protein, 164 aa, Homo sapiens
  MOD_RES (19)..(19): Selenocysteine
  MOD_RES (25)..(25): Selenocysteine
  MOD_RES (34)..(34): Selenocysteine
  MOD_RES (65)..(65): Selenocysteine
  MOD_RES (71)..(71): Selenocysteine
  MOD_RES (105)..(105): Selenocysteine
MNSLLIGELSPEQPSFEPXKNKELXDEFRELRAXVERMGLMKANHVFFLLYLLHILLLDGAAWLXLWVFGXSFLPFLLCAVLLSAVQAQAGWLQHDFGHLSVFSXSKWNHLLHHFVIGHLKGAPASWWNHMHFQHHAKPNCFRKDPDINMHPFFFALGKILSVE

SEQ ID NO: 9567 - protein, 360 aa, Homo sapiens
  MOD_RES (19)..(19): Selenocysteine
  MOD_RES (25)..(25): Selenocysteine
  MOD_RES (34)..(34): Selenocysteine
  MOD_RES (65)..(65): Selenocysteine
  MOD_RES (71)..(71): Selenocysteine
  MOD_RES (105)..(105): Selenocysteine
  MOD_RES (217)..(217): Selenocysteine
  MOD_RES (225)..(225): Selenocysteine
  MOD_RES (254)..(254): Selenocysteine
  MOD_RES (274)..(274): Selenocysteine
  MOD_RES (279)..(279): Selenocysteine
  MOD_RES (306)..(306): Selenocysteine
MNSLLIGELSPEQPSFEPXKNKELXDEFRELRAXVERMGLMKANHVFFLLYLLHILLLDGAAWLXLWVFGXSFLPFLLCAVLLSAVQAQAGWLQHDFGHLSVFSXSKWNHLLHHFVIGHLKGAPASWWNHMHFQHHAKPNCFRKDPDINMHPFFFALGKILSVELGKQKKKYMPYNHQHKYFFLIGPPALLPLYFQWYIFYFVIQRKKWVDLAWMIXFYVRFFLXYVPLLGLKAFLGLFFIVRFLESNWFVWVXQMNHIPMHIDHDRNMDWVSXQLQAXCNVHKSAFNDWFSGHLNFQIEHHLFPXMPRHNYHKVAPLVQSLCAKHGIEYQSKPLLSAFADIIHSLKESGQLWLDAYLHQ

SEQ ID NO: 9568 - protein, 165 aa, Homo sapiens
  MOD_RES (19)..(19): Selenocysteine
  MOD_RES (25)..(25): Selenocysteine
  MOD_RES (34)..(34): Selenocysteine
  MOD_RES (65)..(65): Selenocysteine
  MOD_RES (71)..(71): Selenocysteine
  MOD_RES (105)..(105): Selenocysteine
MNSLLIGELSPEQPSFEPXKNKELXDEFRELRAXVERMGLMKANHVFFLLYLLHILLLDGAAWLXLWVFGXSFLPFLLCAVLLSAVQAQAGWLQHDFGHLSVFSXSKWNHLLHHFVIGHLKGAPASWWNHMHFQHHAKPNCFRKDPDINMHPFFFALGKILSVEV

SEQ ID NO: 9569 - protein, 192 aa, Homo sapiens
  MOD_RES (2)..(2): Selenocysteine
  MOD_RES (49)..(49): Selenocysteine
  MOD_RES (57)..(57): Selenocysteine
  MOD_RES (86)..(86): Selenocysteine
  MOD_RES (106)..(106): Selenocysteine
  MOD_RES (111)..(111): Selenocysteine
  MOD_RES (138)..(138): Selenocysteine
MXFLCSCLLFVSVSSPVGPPALLPLYFQWYIFYFVIQRKKWVDLAWMIXFYVRFFLXYVPLLGLKAFLGLFFIVRFLESNWFVWVXQMNHIPMHIDHDRNMDWVSXQLQAXCNVHKSAFNDWFSGHLNFQIEHHLFPXMPRHNYHKVAPLVQSLCAKHGIEYQSKPLLSAFADIIHSLKESGQLWLDAYLHQ

SEQ ID NO: 9570 - protein, 228 aa, Homo sapiens
  MOD_RES (1)..(1): Any amino acid
  MOD_RES (15)..(15): Selenocysteine
  MOD_RES (21)..(21): Selenocysteine
  MOD_RES (26)..(26): Selenocysteine
  MOD_RES (54)..(54): Selenocysteine
  MOD_RES (73)..(73): Selenocysteine
  MOD_RES (108)..(108): Selenocysteine
  MOD_RES (114)..(114): Selenocysteine
  MOD_RES (123)..(123): Selenocysteine
  MOD_RES (154)..(154): Selenocysteine
  MOD_RES (160)..(160): Selenocysteine
  MOD_RES (200)..(200): Selenocysteine
  MOD_RES (202)..(202): Selenocysteine
  MOD_RES (205)..(205): Selenocysteine
  MOD_RES (210)..(210): Selenocysteine
  MOD_RES (217)..(217): Selenocysteine
  MOD_RES (219)..(219): Selenocysteine
XARPAMAPDPVAAEXAAQGPXPRYFXWDEVAQRSGCEERWLVIDRKVYNISEFXRRHPGGSRVISHYAGQDAXDPFVAFHINKGLVKKYMNSLLIGELSPEQPSFEPXKNKELXDEFRELRAXVERMGLMKANHVFFLLYLLHILLLDGAAWLXLWVFGXSFLPFLLCAVLLSAVQHFGRPRWPDHLISVQDQPGQRGEXSXKNXKRPGXVAHACNXSXLGGQDGQII

SEQ ID NO: 9571 - protein, 175 aa, Homo sapiens
  MOD_RES (1)..(1): Any amino acid
  MOD_RES (17)..(17): Selenocysteine
  MOD_RES (23)..(23): Selenocysteine
  MOD_RES (28)..(28): Selenocysteine
  MOD_RES (56)..(56): Selenocysteine
  MOD_RES (75)..(75): Selenocysteine
  MOD_RES (79)..(79): Selenocysteine
  MOD_RES (88)..(88): Selenocysteine
  MOD_RES (119)..(119): Selenocysteine
  MOD_RES (125)..(125): Selenocysteine
  MOD_RES (159)..(159): Selenocysteine
XGVARPAMAPDPVAAEXAAQGPXPRYFXWDEVAQRSGCEERWLVIDRKVYNISEFXRRHPGGSRVISHYAGQDAXKELXDEFRELRAXVERMGLMKANHVFFLLYLLHILLLDGAAWLXLWVFGXSFLPFLLCAVLLSAVQAQAGWLQHDFGHLSVFSXSKWNHLLHHFVIGHLK

SEQ ID NO: 9572 - protein, 650 aa, Homo sapiens
  MOD_RES (18)..(18): Selenocysteine
  MOD_RES (28)..(28): Selenocysteine
  MOD_RES (60)..(60): Selenocysteine
  MOD_RES (77)..(77): Selenocysteine
  MOD_RES (119)..(119): Selenocysteine
  MOD_RES (121)..(121): Selenocysteine
  MOD_RES (147)..(147): Selenocysteine
  MOD_RES (154)..(154): Selenocysteine
  MOD_RES (171)..(171): Selenocysteine
  MOD_RES (199)..(199): Selenocysteine
  MOD_RES (216)..(216): Selenocysteine
  MOD_RES (228)..(228): Selenocysteine
  MOD_RES (242)..(242): Selenocysteine
  MOD_RES (245)..(245): Selenocysteine
  MOD_RES (264)..(264): Selenocysteine
  MOD_RES (274)..(274): Selenocysteine
  MOD_RES (283)..(283): Selenocysteine
  MOD_RES (300)..(300): Selenocysteine
  MOD_RES (338)..(338): Selenocysteine
  MOD_RES (387)..(387): Selenocysteine
  MOD_RES (410)..(410): Selenocysteine
  MOD_RES (416)..(416): Selenocysteine
  MOD_RES (426)..(426): Selenocysteine
  MOD_RES (439)..(439): Selenocysteine
  MOD_RES (442)..(442): Selenocysteine
  MOD_RES (445)..(445): Selenocysteine
  MOD_RES (471)..(472): Selenocysteine
  MOD_RES (488)..(488): Selenocysteine
  MOD_RES (580)..(580): Selenocysteine
  MOD_RES (618)..(618): Selenocysteine
  MOD_RES (625)..(625): Selenocysteine
  MOD_RES (643)..(643): Selenocysteine
MASNMDREMILADFQACXGIENIDEAIXLLEQNNWDLVAAINGVIPQENGILQSEYGGEXIPGPAFNPASHPASAPXSSSSSAFRPVMPSRQIVERQPRMLDFRVEYRDRNVDVVLEDXCXVGEIKQILENELQIPVSKMLLKGWKXGDVEDSXVLKSLHLPKNNSLYVLXPDLPPPSSSSHAGALQESLNQNFMLIIXHREVQREYNLNFSGSSXIQEVKRNVYDLXSIPVRHQLWEGWPXSAXDDSMCLAESGLSYPCHRLXVGRRSSPAQXREQSEEQIXDVHMVSDSDGDDFEDAXEFGVDDGEVFGMASSALRKSPMMPENAENEGDALLQFXAEFSSRYGDCHPVFFIGSLEAAFQEAFYVKARDRKLLAIYLHHDESVLXNVFCSQMLCAESIVSYLSQNFIXWAWDLXKDSNRARFLXMCNRHFGSVVAQXIRXQKXDQFPLFLIIMGKRSSNEVLNVIQGNXXVDELMMRLMAAMEIFXAQQQEDIKDEDEREARENVKREQDEAYRLSLEADRAKREAHEREMAEQFRLEQIRKEQEEEREAIRLSLEQALPPEPKEENAEPVSKLRIRXPSGEFLERRFLASNKLQIVFDFVASKGFPWDEYKLLSXFPRRDVXQLDPNKSLLEVKLFPQEXLFLEAKE

SEQ ID NO: 9573 - protein, 490 aa, Homo sapiens
  MOD_RES (10)..(10): Selenocysteine
  MOD_RES (20)..(20): Selenocysteine
  MOD_RES (52)..(52): Selenocysteine
  MOD_RES (69)..(69): Selenocysteine
  MOD_RES (111)..(111): Selenocysteine
  MOD_RES (113)..(113): Selenocysteine
  MOD_RES (139)..(139): Selenocysteine
  MOD_RES (146)..(146): Selenocysteine
  MOD_RES (163)..(163): Selenocysteine
  MOD_RES (227)..(227): Selenocysteine
  MOD_RES (250)..(250): Selenocysteine
  MOD_RES (256)..(256): Selenocysteine
  MOD_RES (266)..(266): Selenocysteine
  MOD_RES (279)..(279): Selenocysteine
  MOD_RES (282)..(282): Selenocysteine
  MOD_RES (285)..(285): Selenocysteine
  MOD_RES (311)..(312): Selenocysteine
  MOD_RES (328)..(328): Selenocysteine
  MOD_RES (420)..(420): Selenocysteine
  MOD_RES (458)..(458): Selenocysteine
  MOD_RES (465)..(465): Selenocysteine
  MOD_RES (483)..(483): Selenocysteine
MILADFQACXGIENIDEAIXLLEQNNWDLVAAINGVIPQENGILQSEYGGEXIPGPAFNPASHPASAPXSSSSSAFRPVMPSRQIVERQPRMLDFRVEYRDRNVDVVLEDXCXVGEIKQILENELQIPVSKMLLKGWKXGDVEDSXVLKSLHLPKNNSLYVLXPDLPPPSSSSHAGALQEFSSRYGDCHPVFFIGSLEAAFQEAFYVKARDRKLLAIYLHHDESVLXNVFCSQMLCAESIVSYLSQNFIXWAWDLXKDSNRARFLXMCNRHFGSVVAQXIRXQKXDQFPLFLIIMGKRSSNEVLNVIQGNXXVDELMMRLMAAMEIFXAQQQEDIKDEDEREARENVKREQDEAYRLSLEADRAKREAHEREMAEQFRLEQIRKEQEEEREAIRLSLEQALPPEPKEENAEPVSKLRIRXPSGEFLERRFLASNKLQIVFDFVASKGFPWDEYKLLSXFPRRDVXQLDPNKSLLEVKLFPQEXLFLEAKE

SEQ ID NO: 9574 - protein, 464 aa, Homo sapiens
  MOD_RES (5)..(5): Selenocysteine
  MOD_RES (22)..(22): Selenocysteine
  MOD_RES (34)..(34): Selenocysteine
  MOD_RES (48)..(48): Selenocysteine
  MOD_RES (51)..(51): Selenocysteine
  MOD_RES (70)..(70): Selenocysteine
  MOD_RES (80)..(80): Selenocysteine
  MOD_RES (89)..(89): Selenocysteine
  MOD_RES (106)..(106): Selenocysteine
  MOD_RES (144)..(144): Selenocysteine
  MOD_RES (193)..(193): Selenocysteine
  MOD_RES (216)..(216): Selenocysteine
  MOD_RES (222)..(222): Selenocysteine
  MOD_RES (232)..(232): Selenocysteine
  MOD_RES (245)..(245): Selenocysteine
  MOD_RES (248)..(248): Selenocysteine
  MOD_RES (251)..(251): Selenocysteine
  MOD_RES (277)..(278): Selenocysteine
  MOD_RES (294)..(294): Selenocysteine
  MOD_RES (386)..(386): Selenocysteine
  MOD_RES (424)..(424): Selenocysteine
  MOD_RES (458)..(458): Selenocysteine
MLIIXHREVQREYNLNFSGSSXIQEVKRNVYDLXSIPVRHQLWEGWPXSAXDDSMCLAESGLSYPCHRLXVGRRSSPAQXREQSEEQIXDVHMVSDSDGDDFEDAXEFGVDDGEVFGMASSALRKSPMMPENAENEGDALLQFXAEFSSRYGDCHPVFFIGSLEAAFQEAFYVKARDRKLLAIYLHHDESVLXNVFCSQMLCAESIVSYLSQNFIXWAWDLXKDSNRARFLXMCNRHFGSVVAQXIRXQKXDQFPLFLIIMGKRSSNEVLNVIQGNXXVDELMMRLMAAMEIFXAQQQEDIKDEDEREARENVKREQDEAYRLSLEADRAKREAHEREMAEQFRLEQIRKEQEEEREAIRLSLEQALPPEPKEENAEPVSKLRIRXPSGEFLERRFLASNKLQIVFDFVASKGFPWDEYKLLSXFPRRDIPGLSRMGKHACSRSLYIHFMFFILILKXWIISCF

SEQ ID NO: 9575 - protein, 111 aa, Homo sapiens
  MOD_RES (11)..(11): Selenocysteine
  MOD_RES (36)..(36): Selenocysteine
  MOD_RES (43)..(44): Selenocysteine
  MOD_RES (62)..(62): Selenocysteine
  MOD_RES (71)..(71): Selenocysteine
  MOD_RES (79)..(79): Selenocysteine
  MOD_RES (105)..(105): Selenocysteine
  MOD_RES (108)..(108): Selenocysteine
MKAGAFPPAPXAVPLHPSWAYVDPSSSSSYDNGFPXGDHELFXXFSWDDQKVRRVFVRKVYXILLIQLLVXLAVVALFXFCDPVKDYVQANPGWYWASYAVFFAXYLXLAC

SEQ ID NO: 9576 - protein, 270 aa, Homo sapiens
  MOD_RES (11)..(11): Selenocysteine
  MOD_RES (36)..(36): Selenocysteine
  MOD_RES (43)..(44): Selenocysteine
  MOD_RES (62)..(62): Selenocysteine
  MOD_RES (71)..(71): Selenocysteine
  MOD_RES (79)..(79): Selenocysteine
  MOD_RES (105)..(105): Selenocysteine
  MOD_RES (108)..(108): Selenocysteine
  MOD_RES (127)..(127): Selenocysteine
  MOD_RES (130)..(130): Selenocysteine
  MOD_RES (137)..(137): Selenocysteine
  MOD_RES (146)..(147): Selenocysteine
  MOD_RES (156)..(156): Selenocysteine
  MOD_RES (164)..(164): Selenocysteine
  MOD_RES (170)..(170): Selenocysteine
  MOD_RES (175)..(175): Selenocysteine
  MOD_RES (187)..(187): Selenocysteine
  MOD_RES (220)..(220): Selenocysteine
  MOD_RES (227)..(227): Selenocysteine
  MOD_RES (259)..(259): Selenocysteine
  MOD_RES (267)..(267): Selenocysteine
MKAGAFPPAPXAVPLHPSWAYVDPSSSSSYDNGFPXGDHELFXXFSWDDQKVRRVFVRKVYXILLIQLLVXLAVVALFXFCDPVKDYVQANPGWYWASYAVFFAXYLXLACCSGPRRHFPWNLILLXVFXLSMAYLXGMLSSYYNXXSVLLCLGIXALVCLSVXVFSFQXKFDFXSCQGVLFVLLMXLFFSGLILAILLPFQYVPWLHAVYAALGAGVFXLFLALDXQLLMGNRRHSLSPEEYIFGALNIYLDIIYIFXFFLQLFGXNRE

SEQ ID NO: 9577 - protein, 208 aa, Homo sapiens
  MOD_RES (2)..(2): Selenocysteine
  MOD_RES (15)..(15): Selenocysteine
  MOD_RES (42)..(42): Selenocysteine
  MOD_RES (57)..(57): Selenocysteine
  MOD_RES (82)..(82): Selenocysteine
  MOD_RES (89)..(90): Selenocysteine
  MOD_RES (114)..(114): Selenocysteine
  MOD_RES (123)..(123): Selenocysteine
  MOD_RES (131)..(131): Selenocysteine
  MOD_RES (157)..(157): Selenocysteine
  MOD_RES (160)..(160): Selenocysteine
  MOD_RES (179)..(179): Selenocysteine
  MOD_RES (182)..(182): Selenocysteine
  MOD_RES (189)..(189): Selenocysteine
  MOD_RES (196)..(196): Selenocysteine
MXQGKLSVANKAPGXEGQQQVHGEKKEAPAVPSAPPSYEEAXSGEGMKAGAFPPAPXAVPLHPSWAYVDPSSSSSYDNGFPXGDHELFXXFSWDDQKVRRVFVRKNPSHPQVYXILLIQLLVXLAVVALFXFCDPVKDYVQANPGWYWASYAVFFAXYLXLACCSGPRRHFPWNLILLXVFXLSMAYLXGMLSSSXSPPARACSSCFS

SEQ ID NO: 9578 - protein, 248 aa, Homo sapiens
  MOD_RES (2)..(2): Selenocysteine
  MOD_RES (15)..(15): Selenocysteine
  MOD_RES (42)..(42): Selenocysteine
  MOD_RES (57)..(57): Selenocysteine
  MOD_RES (82)..(82): Selenocysteine
  MOD_RES (89)..(90): Selenocysteine
  MOD_RES (108)..(108): Selenocysteine
  MOD_RES (117)..(117): Selenocysteine
  MOD_RES (125)..(125): Selenocysteine
  MOD_RES (151)..(151): Selenocysteine
  MOD_RES (154)..(154): Selenocysteine
  MOD_RES (173)..(173): Selenocysteine
  MOD_RES (176)..(176): Selenocysteine
  MOD_RES (183)..(183): Selenocysteine
  MOD_RES (192)..(193): Selenocysteine
  MOD_RES (202)..(202): Selenocysteine
  MOD_RES (210)..(210): Selenocysteine
  MOD_RES (216)..(216): Selenocysteine
  MOD_RES (221)..(221): Selenocysteine
  MOD_RES (233)..(233): Selenocysteine
MXQGKLSVANKAPGXEGQQQVHGEKKEAPAVPSAPPSYEEAXSGEGMKAGAFPPAPXAVPLHPSWAYVDPSSSSSYDNGFPXGDHELFXXFSWDDQKVRRVFVRKVYXILLIQLLVXLAVVALFXFCDPVKDYVQANPGWYWASYAVFFAXYLXLACCSGPRRHFPWNLILLXVFXLSMAYLXGMLSSYYNXXSVLLCLGIXALVCLSVXVFSFQXKFDFXSCQGVLFVLLMXLFFSGLILAILLPFQ

SEQ ID NO: 9579 - protein, 316 aa, Homo sapiens
  MOD_RES (2)..(2): Selenocysteine
  MOD_RES (15)..(15): Selenocysteine
  MOD_RES (42)..(42): Selenocysteine
  MOD_RES (57)..(57): Selenocysteine
  MOD_RES (82)..(82): Selenocysteine
  MOD_RES (89)..(90): Selenocysteine
  MOD_RES (108)..(108): Selenocysteine
  MOD_RES (117)..(117): Selenocysteine
  MOD_RES (125)..(125): Selenocysteine
  MOD_RES (151)..(151): Selenocysteine
  MOD_RES (154)..(154): Selenocysteine
  MOD_RES (173)..(173): Selenocysteine
  MOD_RES (176)..(176): Selenocysteine
  MOD_RES (183)..(183): Selenocysteine
  MOD_RES (192)..(193): Selenocysteine
  MOD_RES (202)..(202): Selenocysteine
  MOD_RES (210)..(210): Selenocysteine
  MOD_RES (216)..(216): Selenocysteine
  MOD_RES (221)..(221): Selenocysteine
  MOD_RES (233)..(233): Selenocysteine
  MOD_RES (266)..(266): Selenocysteine
  MOD_RES (273)..(273): Selenocysteine
  MOD_RES (305)..(305): Selenocysteine
  MOD_RES (313)..(313): Selenocysteine
MXQGKLSVANKAPGXEGQQQVHGEKKEAPAVPSAPPSYEEAXSGEGMKAGAFPPAPXAVPLHPSWAYVDPSSSSSYDNGFPXGDHELFXXFSWDDQKVRRVFVRKVYXILLIQLLVXLAVVALFXFCDPVKDYVQANPGWYWASYAVFFAXYLXLACCSGPRRHFPWNLILLXVFXLSMAYLXGMLSSYYNXXSVLLCLGIXALVCLSVXVFSFQXKFDFXSCQGVLFVLLMXLFFSGLILAILLPFQYVPWLHAVYAALGAGVFXLFLALDXQLLMGNRRHSLSPEEYIFGALNIYLDIIYIFXFFLQLFGXNRE

SEQ ID NO: 9580 - protein, 266 aa, Homo sapiens
  MOD_RES (4)..(4): Selenocysteine
  MOD_RES (17)..(17): Selenocysteine
  MOD_RES (20)..(20): Selenocysteine
  MOD_RES (22)..(22): Selenocysteine
  MOD_RES (40)..(40): Selenocysteine
  MOD_RES (47)..(48): Selenocysteine
  MOD_RES (66)..(66): Selenocysteine
  MOD_RES (75)..(75): Selenocysteine
  MOD_RES (83)..(83): Selenocysteine
  MOD_RES (109)..(109): Selenocysteine
  MOD_RES (112)..(112): Selenocysteine
  MOD_RES (131)..(131): Selenocysteine
  MOD_RES (134)..(134): Selenocysteine
  MOD_RES (141)..(141): Selenocysteine
  MOD_RES (150)..(151): Selenocysteine
  MOD_RES (160)..(160): Selenocysteine
  MOD_RES (168)..(168): Selenocysteine
  MOD_RES (174)..(174): Selenocysteine
  MOD_RES (179)..(179): Selenocysteine
  MOD_RES (191)..(191): Selenocysteine
  MOD_RES (224)..(224): Selenocysteine
  MOD_RES (231)..(231): Selenocysteine
  MOD_RES (263)..(263): Selenocysteine
MVYXSHYKSPGRRPLKXHPXVXYWRVNEGSSSSYDNGFPXGDHELFXXFSWDDQKVRRVFVRKVYXILLIQLLVXLAVVALFXFCDPVKDYVQANPGWYWASYAVFFAXYLXLACCSGPRRHFPWNLILLXVFXLSMAYLXGMLSSYYNXXSVLLCLGIXALVCLSVXVFSFQXKFDFXSCQGVLFVLLMXLFFSGLILAILLPFQYVPWLHAVYAALGAGVFXLFLALDXQLLMGNRRHSLSPEEYIFGALNIYLDIIYIFXFFL

SEQ ID NO: 9581 - protein, 145 aa, Homo sapiens
  MOD_RES (1)..(1): Any amino acid
  MOD_RES (20)..(20): Selenocysteine
  MOD_RES (23)..(23): Selenocysteine
  MOD_RES (42)..(42): Selenocysteine
  MOD_RES (45)..(45): Selenocysteine
  MOD_RES (52)..(52): Selenocysteine
  MOD_RES (61)..(62): Selenocysteine
  MOD_RES (71)..(71): Selenocysteine
  MOD_RES (79)..(79): Selenocysteine
  MOD_RES (85)..(85): Selenocysteine
  MOD_RES (90)..(90): Selenocysteine
  MOD_RES (102)..(102): Selenocysteine
  MOD_RES (124)..(124): Selenocysteine
XYVQANPGWYWASYAVFFAXYLXLACCSGPRRHFPWNLILLXVFXLSMAYLXGMLSSYYNXXSVLLCLGIXALVCLSVXVFSFQXKFDFXSCQGVLFVLLMXLFFSGLILAILLPFQYFLALDXQLLMGNRRHSLSPEEYIFGAL

SEQ ID NO: 9582 - protein, 321 aa, Homo sapiens
  MOD_RES (23)..(23): Selenocysteine
  MOD_RES (54)..(54): Selenocysteine
  MOD_RES (140)..(140): Selenocysteine
  MOD_RES (151)..(151): Selenocysteine
  MOD_RES (154)..(155): Selenocysteine
  MOD_RES (167)..(167): Selenocysteine
  MOD_RES (217)..(217): Selenocysteine
  MOD_RES (238)..(238): Selenocysteine
  MOD_RES (245)..(245): Selenocysteine
  MOD_RES (255)..(255): Selenocysteine
  MOD_RES (283)..(284): Selenocysteine
  MOD_RES (299)..(299): Selenocysteine
  MOD_RES (306)..(306): Selenocysteine
  MOD_RES (314)..(314): Selenocysteine
MRALAALSAPPNERLLPRDPAAXRDPDAARPARRSAVERLAADRAKYVRGRPGXGRGVASEGSGPGAIKCPGNDPGPPARAPAPVARRAIARKPLRPDSLIIYRQKCEFVRGSGADGPRASLVKKLFQGPGKDKAPVPRXGDEGKAGNPEXVPXXPGPAADPAIPEXPAPAARSAAPSSVPAAPPGPEPRVVRRRGLQRSQSDLSSRYSAALAESDXFFQYCGLDPEVVEALGRENFXAGSDCVXLKVRSVSVAXSGSGFSRHSGGDDEGLQEEELIEQVPSXXSVIERNARIIKWLYXCKKAKEXPSQEQSRXRGSKPSR

SEQ ID NO: 9583 - protein, 922 aa, Homo sapiens
  MOD_RES (25)..(25): Selenocysteine
  MOD_RES (31)..(31): Selenocysteine
  MOD_RES (50)..(50): Selenocysteine
  MOD_RES (52)..(52): Selenocysteine
  MOD_RES (66)..(66): Selenocysteine
  MOD_RES (89)..(89): Selenocysteine
  MOD_RES (91)..(91): Selenocysteine
  MOD_RES (153)..(153): Selenocysteine
  MOD_RES (159)..(159): Selenocysteine
  MOD_RES (164)..(164): Selenocysteine
  MOD_RES (192)..(192): Selenocysteine
  MOD_RES (199)..(199): Selenocysteine
  MOD_RES (215)..(215): Selenocysteine
  MOD_RES (263)..(263): Selenocysteine
  MOD_RES (335)..(335): Selenocysteine
  MOD_RES (343)..(343): Selenocysteine
  MOD_RES (369)..(369): Selenocysteine
  MOD_RES (381)..(381): Selenocysteine
  MOD_RES (403)..(403): Selenocysteine
  MOD_RES (405)..(405): Selenocysteine
  MOD_RES (429)..(429): Selenocysteine
  MOD_RES (441)..(441): Selenocysteine
  MOD_RES (453)..(453): Selenocysteine
  MOD_RES (465)..(465): Selenocysteine
  MOD_RES (477)..(477): Selenocysteine
  MOD_RES (489)..(489): Selenocysteine
  MOD_RES (501)..(501): Selenocysteine
  MOD_RES (512)..(512): Selenocysteine
  MOD_RES (524)..(524): Selenocysteine
  MOD_RES (536)..(536): Selenocysteine
  MOD_RES (548)..(548): Selenocysteine
  MOD_RES (560)..(560): Selenocysteine
  MOD_RES (570)..(570): Selenocysteine
  MOD_RES (581)..(581): Selenocysteine
  MOD_RES (586)..(586): Selenocysteine
  MOD_RES (594)..(594): Selenocysteine
  MOD_RES (618)..(618): Selenocysteine
  MOD_RES (653)..(653): Selenocysteine
  MOD_RES (655)..(655): Selenocysteine
  MOD_RES (682)..(682): Selenocysteine
  MOD_RES (687)..(687): Selenocysteine
  MOD_RES (708)..(708): Selenocysteine
  MOD_RES (745)..(745): Selenocysteine
  MOD_RES (766)..(766): Selenocysteine
  MOD_RES (793)..(794): Selenocysteine
  MOD_RES (808)..(808): Selenocysteine
  MOD_RES (847)..(847): Selenocysteine
  MOD_RES (868)..(868): Selenocysteine
  MOD_RES (891)..(891): Selenocysteine
MDRQMILSRSSVMGVRGLQGFVGSXCPHICXVVNFKELAEHHRSKYPGCXPXIVVDAMCCLRYWYXPESWICGGQWREYFSALRDFVKXFXAAGIKLIFFFDGMVEQDKRDEWVKRRLKNNREISRIFHYIKSHKEQPGRNMFFIPSGLAVFXRFALKXLGQEXLCSLQEADYEVASYGLQHNCLGILGEDXDYLIYDXCPYFSISELCLESLDXVMLCREKLCESLGLCVADLPLLACLLGNDIIPEGMFESFRYKCLSSYXSVKENFDKKGNIILAVSDHISKVLYLYQGEKKLEEILPLGPNKALFYKGMASYLLPGQKSPWFFQKPKGVIXLDKQVISXSSDAESREEVPMCSDAESRQEVPMCXGPESRREVPVYXDSEPRQEVPMCSDPEPRQEVPXCXGPESRREVPMCSDPEPRQEVPMCXGPEARQEVPMYXDSEPRQEVPMYXDSEPRQEVPMYXGSEPRQEVPMYXGPESRQEVPMYXGPESRQEVLIRXDPESRQEIMCXGHESKQEVPICXDPISKQEDSMCXHAEINQKLPVAXDFEFKLEALMCXNPEIKQEDPXNVGPEVKQQVXMVSDXEILKVARXHHVQAESYLVYNIMSSGEIECSNXLEDELDQALPSQAFIYRPIRQRVYSLLLEDCQDVXSXCLAVKEWFVYPGNPLRHPDLVRPLQMXIPGGXPSLKILWLNQEPEIQVRRLDXLLACFNLSSSREELQAVESPFQALCCLLIYLFVQVDXLCLEDLHAFIAQALCLQGKSXSQLVNLQPDYINPRAVQLGSLLVRGLXXLVLVNSACGFPWKXSDFMPWNVFDGKLFHQKYLQSEKGYAVEVLLEQNRSRLXKFHNLKAVVCKACMKENRRIXGRAHWGSHHAGRWGRQGSSYHRXGSGYSRSSQGQPWRDQGPGSRQYEHDQWRRY

SEQ ID NO: 9584 - protein, 933 aa, Homo sapiens
  MOD_RES (8)..(8): Selenocysteine
  MOD_RES (36)..(36): Selenocysteine
  MOD_RES (42)..(42): Selenocysteine
  MOD_RES (61)..(61): Selenocysteine
  MOD_RES (63)..(63): Selenocysteine
  MOD_RES (77)..(77): Selenocysteine
  MOD_RES (100)..(100): Selenocysteine
  MOD_RES (102)..(102): Selenocysteine
  MOD_RES (164)..(164): Selenocysteine
  MOD_RES (170)..(170): Selenocysteine
  MOD_RES (175)..(175): Selenocysteine
  MOD_RES (203)..(203): Selenocysteine
  MOD_RES (210)..(210): Selenocysteine
  MOD_RES (226)..(226): Selenocysteine
  MOD_RES (274)..(274): Selenocysteine
  MOD_RES (346)..(346): Selenocysteine
  MOD_RES (354)..(354): Selenocysteine
  MOD_RES (380)..(380): Selenocysteine
  MOD_RES (392)..(392): Selenocysteine
  MOD_RES (414)..(414): Selenocysteine
  MOD_RES (416)..(416): Selenocysteine
  MOD_RES (440)..(440): Selenocysteine
  MOD_RES (452)..(452): Selenocysteine
  MOD_RES (464)..(464): Selenocysteine
  MOD_RES (476)..(476): Selenocysteine
  MOD_RES (488)..(488): Selenocysteine
  MOD_RES (500)..(500): Selenocysteine
  MOD_RES (512)..(512): Selenocysteine
  MOD_RES (523)..(523): Selenocysteine
  MOD_RES (535)..(535): Selenocysteine
  MOD_RES (547)..(547): Selenocysteine
  MOD_RES (559)..(559): Selenocysteine
  MOD_RES (571)..(571): Selenocysteine
  MOD_RES (581)..(581): Selenocysteine
  MOD_RES (592)..(592): Selenocysteine
  MOD_RES (597)..(597): Selenocysteine
  MOD_RES (605)..(605): Selenocysteine
  MOD_RES (629)..(629): Selenocysteine
  MOD_RES (664)..(664): Selenocysteine
  MOD_RES (666)..(666): Selenocysteine
  MOD_RES (693)..(693): Selenocysteine
  MOD_RES (698)..(698): Selenocysteine
  MOD_RES (719)..(719): Selenocysteine
  MOD_RES (756)..(756): Selenocysteine
  MOD_RES (777)..(777): Selenocysteine
  MOD_RES (804)..(805): Selenocysteine
  MOD_RES (819)..(819): Selenocysteine
  MOD_RES (858)..(858): Selenocysteine
  MOD_RES (879)..(879): Selenocysteine
  MOD_RES (902)..(902): Selenocysteine
MFGPRGSXSAGAGRKEILSRSSVMGVRGLQGFVGSXCPHICXVVNFKELAEHHRSKYPGCXPXIVVDAMCCLRYWYXPESWICGGQWREYFSALRDFVKXFXAAGIKLIFFFDGMVEQDKRDEWVKRRLKNNREISRIFHYIKSHKEQPGRNMFFIPSGLAVFXRFALKXLGQEXLCSLQEADYEVASYGLQHNCLGILGEDXDYLIYDXCPYFSISELCLESLDXVMLCREKLCESLGLCVADLPLLACLLGNDIIPEGMFESFRYKCLSSYXSVKENFDKKGNIILAVSDHISKVLYLYQGEKKLEEILPLGPNKALFYKGMASYLLPGQKSPWFFQKPKGVIXLDKQVISXSSDAESREEVPMCSDAESRQEVPMCXGPESRREVPVYXDSEPRQEVPMCSDPEPRQEVPXCXGPESRREVPMCSDPEPRQEVPMCXGPEARQEVPMYXDSEPRQEVPMYXDSEPRQEVPMYXGSEPRQEVPMYXGPESRQEVPMYXGPESRQEVLIRXDPESRQEIMCXGHESKQEVPICXDPISKQEDSMCXHAEINQKLPVAXDFEFKLEALMCXNPEIKQEDPXNVGPEVKQQVXMVSDXEILKVARXHHVQAESYLVYNIMSSGEIECSNXLEDELDQALPSQAFIYRPIRQRVYSLLLEDCQDVXSXCLAVKEWFVYPGNPLRHPDLVRPLQMXIPGGXPSLKILWLNQEPEIQVRRLDXLLACFNLSSSREELQAVESPFQALCCLLIYLFVQVDXLCLEDLHAFIAQALCLQGKSXSQLVNLQPDYINPRAVQLGSLLVRGLXXLVLVNSACGFPWKXSDFMPWNVFDGKLFHQKYLQSEKGYAVEVLLEQNRSRLXKFHNLKAVVCKACMKENRRIXGRAHWGSHHAGRWGRQGSSYHRXGSGYSRSSQGQPWRDQGPGSRQYEHDQWRRY

SEQ ID NO: 9585 - protein, 910 aa, Homo sapiens
  MOD_RES (13)..(13): Selenocysteine
  MOD_RES (19)..(19): Selenocysteine
  MOD_RES (38)..(38): Selenocysteine
  MOD_RES (40)..(40): Selenocysteine
  MOD_RES (54)..(54): Selenocysteine
  MOD_RES (77)..(77): Selenocysteine
  MOD_RES (79)..(79): Selenocysteine
  MOD_RES (141)..(141): Selenocysteine
  MOD_RES (147)..(147): Selenocysteine
  MOD_RES (152)..(152): Selenocysteine
  MOD_RES (180)..(180): Selenocysteine
  MOD_RES (187)..(187): Selenocysteine
  MOD_RES (203)..(203): Selenocysteine
  MOD_RES (251)..(251): Selenocysteine
  MOD_RES (323)..(323): Selenocysteine
  MOD_RES (331)..(331): Selenocysteine
  MOD_RES (357)..(357): Selenocysteine
  MOD_RES (369)..(369): Selenocysteine
  MOD_RES (391)..(391): Selenocysteine
  MOD_RES (393)..(393): Selenocysteine
  MOD_RES (417)..(417): Selenocysteine
  MOD_RES (429)..(429): Selenocysteine
  MOD_RES (441)..(441): Selenocysteine
  MOD_RES (453)..(453): Selenocysteine
  MOD_RES (465)..(465): Selenocysteine
  MOD_RES (477)..(477): Selenocysteine
  MOD_RES (489)..(489): Selenocysteine
  MOD_RES (500)..(500): Selenocysteine
  MOD_RES (512)..(512): Selenocysteine
  MOD_RES (524)..(524): Selenocysteine
  MOD_RES (536)..(536): Selenocysteine
  MOD_RES (548)..(548): Selenocysteine
  MOD_RES (558)..(558): Selenocysteine
  MOD_RES (569)..(569): Selenocysteine
  MOD_RES (574)..(574): Selenocysteine
  MOD_RES (582)..(582): Selenocysteine
  MOD_RES (606)..(606): Selenocysteine
  MOD_RES (641)..(641): Selenocysteine
  MOD_RES (643)..(643): Selenocysteine
  MOD_RES (670)..(670): Selenocysteine
  MOD_RES (675)..(675): Selenocysteine
  MOD_RES (696)..(696): Selenocysteine
  MOD_RES (733)..(733): Selenocysteine
  MOD_RES (754)..(754): Selenocysteine
  MOD_RES (781)..(782): Selenocysteine
  MOD_RES (796)..(796): Selenocysteine
  MOD_RES (835)..(835): Selenocysteine
  MOD_RES (856)..(856): Selenocysteine
  MOD_RES (879)..(879): Selenocysteine
MGVRGLQGFVGSXCPHICXVVNFKELAEHHRSKYPGCXPXIVVDAMCCLRYWYXPESWICGGQWREYFSALRDFVKXFXAAGIKLIFFFDGMVEQDKRDEWVKRRLKNNREISRIFHYIKSHKEQPGRNMFFIPSGLAVFXRFALKXLGQEXLCSLQEADYEVASYGLQHNCLGILGEDXDYLIYDXCPYFSISELCLESLDXVMLCREKLCESLGLCVADLPLLACLLGNDIIPEGMFESFRYKCLSSYXSVKENFDKKGNIILAVSDHISKVLYLYQGEKKLEEILPLGPNKALFYKGMASYLLPGQKSPWFFQKPKGVIXLDKQVISXSSDAESREEVPMCSDAESRQEVPMCXGPESRREVPVYXDSEPRQEVPMCSDPEPRQEVPXCXGPESRREVPMCSDPEPRQEVPMCXGPEARQEVPMYXDSEPRQEVPMYXDSEPRQEVPMYXGSEPRQEVPMYXGPESRQEVPMYXGPESRQEVLIRXDPESRQEIMCXGHESKQEVPICXDPISKQEDSMCXHAEINQKLPVAXDFEFKLEALMCXNPEIKQEDPXNVGPEVKQQVXMVSDXEILKVARXHHVQAESYLVYNIMSSGEIECSNXLEDELDQALPSQAFIYRPIRQRVYSLLLEDCQDVXSXCLAVKEWFVYPGNPLRHPDLVRPLQMXIPGGXPSLKILWLNQEPEIQVRRLDXLLACFNLSSSREELQAVESPFQALCCLLIYLFVQVDXLCLEDLHAFIAQALCLQGKSXSQLVNLQPDYINPRAVQLGSLLVRGLXXLVLVNSACGFPWKXSDFMPWNVFDGKLFHQKYLQSEKGYAVEVLLEQNRSRLXKFHNLKAVVCKACMKENRRIXGRAHWGSHHAGRWGRQGSSYHRXGSGYSRSSQGQPWRDQGPGSRQYEHDQWRRY

SEQ ID NO: 9586 - protein, 242 aa, Homo sapiens
  MOD_RES (2)..(2): Selenocysteine
  MOD_RES (7)..(7): Selenocysteine
  MOD_RES (28)..(28): Selenocysteine
  MOD_RES (65)..(65): Selenocysteine
  MOD_RES (86)..(86): Selenocysteine
  MOD_RES (113)..(114): Selenocysteine
  MOD_RES (128)..(128): Selenocysteine
  MOD_RES (167)..(167): Selenocysteine
  MOD_RES (188)..(188): Selenocysteine
  MOD_RES (211)..(211): Selenocysteine
MXIPGGXPSLKILWLNQEPEIQVRRLDXLLACFNLSSSREELQAVESPFQALCCLLIYLFVQVDXLCLEDLHAFIAQALCLQGKSXSQLVNLQPDYINPRAVQLGSLLVRGLXXLVLVNSACGFPWKXSDFMPWNVFDGKLFHQKYLQSEKGYAVEVLLEQNRSRLXKFHNLKAVVCKACMKENRRIXGRAHWGSHHAGRWGRQGSSYHRXGSGYSRSSQGQPWRDQGPGSRQYEHDQWRRY

SEQ ID NO: 9587 - protein, 419 aa, Homo sapiens
  MOD_RES (3)..(3): Selenocysteine
  MOD_RES (18)..(18): Selenocysteine
  MOD_RES (22)..(22): Selenocysteine
  MOD_RES (29)..(29): Selenocysteine
  MOD_RES (75)..(75): Selenocysteine
  MOD_RES (120)..(120): Selenocysteine
  MOD_RES (126)..(126): Selenocysteine
  MOD_RES (148)..(148): Selenocysteine
  MOD_RES (173)..(173): Selenocysteine
  MOD_RES (182)..(182): Selenocysteine
  MOD_RES (193)..(193): Selenocysteine
  MOD_RES (242)..(242): Selenocysteine
  MOD_RES (298)..(298): Selenocysteine
  MOD_RES (306)..(306): Selenocysteine
  MOD_RES (308)..(308): Selenocysteine
  MOD_RES (318)..(318): Selenocysteine
  MOD_RES (340)..(340): Selenocysteine
  MOD_RES (353)..(353): Selenocysteine
  MOD_RES (360)..(360): Selenocysteine
  MOD_RES (368)..(368): Selenocysteine
  MOD_RES (383)..(383): Selenocysteine
  MOD_RES (385)..(385): Selenocysteine
  MOD_RES (389)..(389): Selenocysteine
MFXSEKGVVEEWLSEFKXLPEXSLPNYAXNLKDKSSLVSSLYKVIQEPQSELLEPVCHQLFEFYRSGEEQLLQFXLQFLPELIWCYLAVSASRNVHSSGCIEALLLGVYNLEIVDKQGHXKVLSFXIPSLSKPSVYHEPSSIGSMALXESALSQHGLSKVVYSGPHPQREMLXAQNRFEVLXFLLLCYNAALXYMPSVSLQSLCQICSRICVCGYPRQHVRKYKGISSRIPVSSGFMVQMLXGIYFAFYNGEWDLAQKALDDIIYRAQLELYPEPLLVANAIKASLPHGPMKSNKEGXRCIQVEIXPXSSRISRNAVXSMSIRGHRWKRHEQPDNNNDAXELGILVIPEISVXNVAGERXGNGEKGRXLGEIDAQHIQGVQEXAXDPRXESKGLPEIRRQKSVRKMMEDGINSPGRVQF

SEQ ID NO: 9588 - protein, 521 aa, Homo sapiens
  MOD_RES (3)..(3): Selenocysteine
  MOD_RES (18)..(18): Selenocysteine
  MOD_RES (22)..(22): Selenocysteine
  MOD_RES (29)..(29): Selenocysteine
  MOD_RES (75)..(75): Selenocysteine
  MOD_RES (120)..(120): Selenocysteine
  MOD_RES (126)..(126): Selenocysteine
  MOD_RES (148)..(148): Selenocysteine
  MOD_RES (173)..(173): Selenocysteine
  MOD_RES (182)..(182): Selenocysteine
  MOD_RES (193)..(193): Selenocysteine
  MOD_RES (242)..(242): Selenocysteine
  MOD_RES (298)..(298): Selenocysteine
  MOD_RES (306)..(306): Selenocysteine
  MOD_RES (308)..(308): Selenocysteine
  MOD_RES (318)..(318): Selenocysteine
  MOD_RES (333)..(333): Selenocysteine
  MOD_RES (336)..(336): Selenocysteine
  MOD_RES (359)..(359): Selenocysteine
  MOD_RES (389)..(389): Selenocysteine
  MOD_RES (396)..(397): Selenocysteine
  MOD_RES (410)..(410): Selenocysteine
  MOD_RES (427)..(427): Selenocysteine
  MOD_RES (429)..(430): Selenocysteine
  MOD_RES (445)..(445): Selenocysteine
  MOD_RES (448)..(448): Selenocysteine
  MOD_RES (461)..(461): Selenocysteine
  MOD_RES (476)..(476): Selenocysteine
  MOD_RES (498)..(498): Selenocysteine
  MOD_RES (517)..(517): Selenocysteine
  MOD_RES (520)..(520): Selenocysteine
MFXSEKGVVEEWLSEFKXLPEXSLPNYAXNLKDKSSLVSSLYKVIQEPQSELLEPVCHQLFEFYRSGEEQLLQFXLQFLPELIWCYLAVSASRNVHSSGCIEALLLGVYNLEIVDKQGHXKVLSFXIPSLSKPSVYHEPSSIGSMALXESALSQHGLSKVVYSGPHPQREMLXAQNRFEVLXFLLLCYNAALXYMPSVSLQSLCQICSRICVCGYPRQHVRKYKGISSRIPVSSGFMVQMLXGIYFAFYNGEWDLAQKALDDIIYRAQLELYPEPLLVANAIKASLPHGPMKSNKEGXRCIQVEIXPXSSRISRNAVXSMSIRGHRWKRHGNXELXGQEELMEISEVDEGFYSRAASSXSQSGLSNSSHNCSNKPSIGKNHRRSGGSKXGGKEKEXXGESCKDHFARKQXQRAQSENLELLSLKRLXLXXSQSLPKPSSHGLAKXAAXVFSKSFEQVSGVXVPHNPSSAVGCGAGXDANRFSACSLQEEKLIYVSERXELPMKHQSGQQRPPSISIXLSXD

SEQ ID NO: 9589 - protein, 114 aa, Homo sapiens
  MOD_RES (3)..(3): Selenocysteine
  MOD_RES (18)..(18): Selenocysteine
  MOD_RES (22)..(22): Selenocysteine
  MOD_RES (29)..(29): Selenocysteine
  MOD_RES (75)..(75): Selenocysteine
MFXSEKGVVEEWLSEFKXLPEXSLPNYAXNLKDKSSLVSSLYKVIQEPQSELLEPVCHQLFEFYRSGEEQLLQFXLQFLPELIWCYLAVSASRNVHSSGCIEALLLGVYNLVCI

SEQ ID NO: 9590 - protein, 471 aa, Homo sapiens
  MOD_RES (1)..(1): Any amino acid
  MOD_RES (25)..(25): Selenocysteine
  MOD_RES (27)..(27): Selenocysteine
  MOD_RES (56)..(56): Selenocysteine
  MOD_RES (70)..(70): Selenocysteine
  MOD_RES (74)..(74): Selenocysteine
  MOD_RES (81)..(81): Selenocysteine
  MOD_RES (127)..(127): Selenocysteine
  MOD_RES (172)..(172): Selenocysteine
  MOD_RES (178)..(178): Selenocysteine
  MOD_RES (200)..(200): Selenocysteine
  MOD_RES (225)..(225): Selenocysteine
  MOD_RES (234)..(234): Selenocysteine
  MOD_RES (245)..(245): Selenocysteine
  MOD_RES (294)..(294): Selenocysteine
  MOD_RES (350)..(350): Selenocysteine
  MOD_RES (358)..(358): Selenocysteine
  MOD_RES (360)..(360): Selenocysteine
  MOD_RES (370)..(370): Selenocysteine
  MOD_RES (392)..(392): Selenocysteine
  MOD_RES (405)..(405): Selenocysteine
  MOD_RES (412)..(412): Selenocysteine
  MOD_RES (420)..(420): Selenocysteine
  MOD_RES (435)..(435): Selenocysteine
  MOD_RES (437)..(437): Selenocysteine
  MOD_RES (441)..(441): Selenocysteine
XRGWRQWWLSRLGCQSVRGGGRWLXGXRSARKKGSRWCCYSGGSRAASVAVAESLXSRGPAGGAPAAALXLPEXSLPNYAXNLKDKSSLVSSLYKVIQEPQSELLEPVCHQLFEFYRSGEEQLLQFXLQFLPELIWCYLAVSASRNVHSSGCIEALLLGVYNLEIVDKQGHXKVLSFXIPSLSKPSVYHEPSSIGSMALXESALSQHGLSKVVYSGPHPQREMLXAQNRFEVLXFLLLCYNAALXYMPSVSLQSLCQICSRICVCGYPRQHVRKYKGISSRIPVSSGFMVQMLXGIYFAFYNGEWDLAQKALDDIIYRAQLELYPEPLLVANAIKASLPHGPMKSNKEGXRCIQVEIXPXSSRISRNAVXSMSIRGHRWKRHEQPDNNNDAXELGILVIPEISVXNVAGERXGNGEKGRXLGEIDAQHIQGVQEXAXDPRXESKGLPEIRRQKSVRKMMEDGINSPGRVQF

SEQ ID NO: 9591 - protein, 302 aa, Homo sapiens
  MOD_RES (32)..(32): Selenocysteine
  MOD_RES (45)..(45): Selenocysteine
  MOD_RES (74)..(74): Selenocysteine
  MOD_RES (113)..(113): Selenocysteine
  MOD_RES (116)..(116): Selenocysteine
  MOD_RES (129)..(129): Selenocysteine
  MOD_RES (168)..(168): Selenocysteine
  MOD_RES (198)..(198): Selenocysteine
  MOD_RES (244)..(244): Selenocysteine
  MOD_RES (260)..(260): Selenocysteine
  MOD_RES (288)..(288): Selenocysteine
  MOD_RES (302)..(302): Selenocysteine
MRRWAWAAVVVLLGPQLVLLGGVGARREAQRXQQPGQRADPPNAXASASSREGLPEAPKPSQASGPEFSDAHMXWLNFVRRPDDGALRKRCGSRDKKPRDLFGPPGPPGAEVXAEXLLHEFQELLKEAXERRFSGLLDPLLPQGAGLRLVGEAFHCRLQGPRRVDKRXLVELHGFQAPAAQGAFLRGSGLSLASGRFXAPVSGIFQFSASLHVDHSELQGKARLRARDVVCVLICIESLCQRHXCLEAVSGLESNSRVFXLQVQGLLQLQAGQYASVFVDNGSGAVLXIQAGSSFSGLLLGX

SEQ ID NO: 9592 - protein, 669 aa, Homo sapiens
  MOD_RES (15)..(15): Selenocysteine
  MOD_RES (42)..(42): Selenocysteine
  MOD_RES (49)..(49): Selenocysteine
  MOD_RES (78)..(78): Selenocysteine
  MOD_RES (92)..(92): Selenocysteine
  MOD_RES (102)..(102): Selenocysteine
  MOD_RES (119)..(119): Selenocysteine
  MOD_RES (140)..(140): Selenocysteine
  MOD_RES (146)..(146): Selenocysteine
  MOD_RES (168)..(168): Selenocysteine
  MOD_RES (175)..(175): Selenocysteine
  MOD_RES (187)..(187): Selenocysteine
  MOD_RES (212)..(212): Selenocysteine
  MOD_RES (279)..(279): Selenocysteine
  MOD_RES (310)..(310): Selenocysteine
  MOD_RES (315)..(315): Selenocysteine
  MOD_RES (355)..(355): Selenocysteine
  MOD_RES (378)..(378): Selenocysteine
  MOD_RES (387)..(387): Selenocysteine
  MOD_RES (418)..(418): Selenocysteine
  MOD_RES (443)..(443): Selenocysteine
  MOD_RES (470)..(470): Selenocysteine
  MOD_RES (496)..(496): Selenocysteine
  MOD_RES (520)..(520): Selenocysteine
  MOD_RES (547)..(547): Selenocysteine
  MOD_RES (550)..(550): Selenocysteine
  MOD_RES (584)..(584): Selenocysteine
  MOD_RES (636)..(636): Selenocysteine
  MOD_RES (664)..(664): Selenocysteine
MACEIMPLQRLLERXIRSAVEQHLFDVNNSGGQSSEDSESGXLSASSAXSARQRRRQSKEQDEVRHGRDKGLINKENXPSGFNHLDDCILNXQEVEKVHKNXFGCAGERSKPKRQKSSXKLSELHDNQDGLVNMESLNSXRSHERXGPDDFEWMSDERKGNEKDGGHXQHFESPXMKIQEHPSLSDXKQQRNQDAGDQEESFVSEVPQSDLXALCDEKNWEEPIPAFSSWQRENSDSDEAHLSPQAGRLIRQLLDEDSDPMLSPRFYAYGQSRQYLDDXEVPPSPPNSHSFMRRRSSSLGSYDDEQEDLXPAQLXRRIQSLKKKIRKFEDRFEEEKKYRPSHSDKAANPEVLKWXNDLAKFRRQLKESKLKISEEDLXPRMRQRSNXLPKSFGSQLEKEDEKKQELVDKAIKPSVEAXLESIQRKLQEKRAESSRPEDIKDMXKDQIANEKVALQKALLYYESIHGRPVXKNERQVMKPLYDRYRLVKQILSRANXIPIIGSPSSKRRSPLLQPIIEGEXASFFKEIKEEEEGSEDDSNVKPDFMVXLKXDFSARCFLDQFEDDADGFISPMDDKIPSKCSQDXGLSNLHAASIPELLEHLQEMREEKKRIRKKLRDFEDNFFRQNGRNVQKEDRXPMAEEYSEYKHIKAKLRLLEVLISKRDXDSKSM

SEQ ID NO: 9593 - protein, 186 aa, Homo sapiens
  MOD_RES (22)..(22): Selenocysteine
  MOD_RES (29)..(29): Selenocysteine
  MOD_RES (56)..(56): Selenocysteine
  MOD_RES (63)..(63): Selenocysteine
  MOD_RES (92)..(92): Selenocysteine
  MOD_RES (106)..(106): Selenocysteine
  MOD_RES (116)..(116): Selenocysteine
  MOD_RES (133)..(133): Selenocysteine
  MOD_RES (154)..(154): Selenocysteine
  MOD_RES (160)..(160): Selenocysteine
  MOD_RES (182)..(182): Selenocysteine
MACEIMPLQSAHVPQVSNVSAXGELLERXIRSAVEQHLFDVNNSGGQSSEDSESGXLSASSAXSARQRRRQSKEQDEVRHGRDKGLINKENXPSGFNHLDDCILNXQEVEKVHKNXFGCAGERSKPKRQKSSXKLSELHDNQDGLVNMESLNSXRSHERXGPDDFEWMSDERKGNEKDGGHXQHFE

SEQ ID NO: 9594 - protein, 683 aa, Homo sapiens
  MOD_RES (22)..(22): Selenocysteine
  MOD_RES (29)..(29): Selenocysteine
  MOD_RES (56)..(56): Selenocysteine
  MOD_RES (63)..(63): Selenocysteine
  MOD_RES (92)..(92): Selenocysteine
  MOD_RES (106)..(106): Selenocysteine
  MOD_RES (116)..(116): Selenocysteine
  MOD_RES (133)..(133): Selenocysteine
  MOD_RES (154)..(154): Selenocysteine
  MOD_RES (160)..(160): Selenocysteine
  MOD_RES (182)..(182): Selenocysteine
  MOD_RES (189)..(189): Selenocysteine
  MOD_RES (201)..(201): Selenocysteine
  MOD_RES (226)..(226): Selenocysteine
  MOD_RES (293)..(293): Selenocysteine
  MOD_RES (324)..(324): Selenocysteine
  MOD_RES (329)..(329): Selenocysteine
  MOD_RES (369)..(369): Selenocysteine
  MOD_RES (392)..(392): Selenocysteine
  MOD_RES (401)..(401): Selenocysteine
  MOD_RES (432)..(432): Selenocysteine
  MOD_RES (457)..(457): Selenocysteine
  MOD_RES (484)..(484): Selenocysteine
  MOD_RES (510)..(510): Selenocysteine
  MOD_RES (534)..(534): Selenocysteine
  MOD_RES (561)..(561): Selenocysteine
  MOD_RES (564)..(564): Selenocysteine
  MOD_RES (598)..(598): Selenocysteine
  MOD_RES (650)..(650): Selenocysteine
  MOD_RES (678)..(678): Selenocysteine
MACEIMPLQSAHVPQVSNVSAXGELLERXIRSAVEQHLFDVNNSGGQSSEDSESGXLSASSAXSARQRRRQSKEQDEVRHGRDKGLINKENXPSGFNHLDDCILNXQEVEKVHKNXFGCAGERSKPKRQKSSXKLSELHDNQDGLVNMESLNSXRSHERXGPDDFEWMSDERKGNEKDGGHXQHFESPXMKIQEHPSLSDXKQQRNQDAGDQEESFVSEVPQSDLXALCDEKNWEEPIPAFSSWQRENSDSDEAHLSPQAGRLIRQLLDEDSDPMLSPRFYAYGQSRQYLDDXEVPPSPPNSHSFMRRRSSSLGSYDDEQEDLXPAQLXRRIQSLKKKIRKFEDRFEEEKKYRPSHSDKAANPEVLKWXNDLAKFRRQLKESKLKISEEDLXPRMRQRSNXLPKSFGSQLEKEDEKKQELVDKAIKPSVEAXLESIQRKLQEKRAESSRPEDIKDMXKDQIANEKVALQKALLYYESIHGRPVXKNERQVMKPLYDRYRLVKQILSRANXIPIIGSPSSKRRSPLLQPIIEGEXASFFKEIKEEEEGSEDDSNVKPDFMVXLKXDFSARCFLDQFEDDADGFISPMDDKIPSKCSQDXGLSNLHAASIPELLEHLQEMREEKKRIRKKLRDFEDNFFRQNGRNVQKEDRXPMAEEYSEYKHIKAKLRLLEVLISKRDXDSKSM

SEQ ID NO: 9595 - protein, 163 aa, Homo sapiens
  MOD_RES (36)..(36): Selenocysteine
  MOD_RES (43)..(43): Selenocysteine
  MOD_RES (70)..(70): Selenocysteine
  MOD_RES (77)..(77): Selenocysteine
  MOD_RES (106)..(106): Selenocysteine
  MOD_RES (120)..(120): Selenocysteine
  MOD_RES (130)..(130): Selenocysteine
  MOD_RES (147)..(147): Selenocysteine
MACEIMPLQSSQEDERPLSPFYLSAHVPQVSNVSAXGELLERXIRSAVEQHLFDVNNSGGQSSEDSESGXLSASSAXSARQRRRQSKEQDEVRHGRDKGLINKENXPSGFNHLDDCILNXQEVEKVHKNXFGCAGERSKPKRQKSSXKLSELHDNQDGLVERK

SEQ ID NO: 9596 - protein, 669 aa, Homo sapiens
  MOD_RES (36)..(36): Selenocysteine
  MOD_RES (43)..(43): Selenocysteine
  MOD_RES (70)..(70): Selenocysteine
  MOD_RES (77)..(77): Selenocysteine
  MOD_RES (106)..(106): Selenocysteine
  MOD_RES (120)..(120): Selenocysteine
  MOD_RES (130)..(130): Selenocysteine
  MOD_RES (147)..(147): Selenocysteine
  MOD_RES (168)..(168): Selenocysteine
  MOD_RES (174)..(174): Selenocysteine
  MOD_RES (196)..(196): Selenocysteine
  MOD_RES (203)..(203): Selenocysteine
  MOD_RES (215)..(215): Selenocysteine
  MOD_RES (240)..(240): Selenocysteine
  MOD_RES (307)..(307): Selenocysteine
  MOD_RES (338)..(338): Selenocysteine
  MOD_RES (343)..(343): Selenocysteine
  MOD_RES (383)..(383): Selenocysteine
  MOD_RES (406)..(406): Selenocysteine
  MOD_RES (415)..(415): Selenocysteine
  MOD_RES (446)..(446): Selenocysteine
  MOD_RES (471)..(471): Selenocysteine
  MOD_RES (498)..(498): Selenocysteine
  MOD_RES (524)..(524): Selenocysteine
  MOD_RES (547)..(547): Selenocysteine
  MOD_RES (550)..(550): Selenocysteine
  MOD_RES (584)..(584): Selenocysteine
  MOD_RES (636)..(636): Selenocysteine
  MOD_RES (664)..(664): Selenocysteine
MACEIMPLQSSQEDERPLSPFYLSAHVPQVSNVSAXGELLERXIRSAVEQHLFDVNNSGGQSSEDSESGXLSASSAXSARQRRRQSKEQDEVRHGRDKGLINKENXPSGFNHLDDCILNXQEVEKVHKNXFGCAGERSKPKRQKSSXKLSELHDNQDGLVNMESLNSXRSHERXGPDDFEWMSDERKGNEKDGGHXQHFESPXMKIQEHPSLSDXKQQRNQDAGDQEESFVSEVPQSDLXALCDEKNWEEPIPAFSSWQRENSDSDEAHLSPQAGRLIRQLLDEDSDPMLSPRFYAYGQSRQYLDDXEVPPSPPNSHSFMRRRSSSLGSYDDEQEDLXPAQLXRRIQSLKKKIRKFEDRFEEEKKYRPSHSDKAANPEVLKWXNDLAKFRRQLKESKLKISEEDLXPRMRQRSNXLPKSFGSQLEKEDEKKQELVDKAIKPSVEAXLESIQRKLQEKRAESSRPEDIKDMXKDQIANEKVALQKALLYYESIHGRPVXKNERQVMKPLYDRYRLVKQILSRANXIPIIEEEEGSEDDSNVKPDFMVXLKXDFSARCFLDQFEDDADGFISPMDDKIPSKCSQDXGLSNLHAASIPELLEHLQEMREEKKRIRKKLRDFEDNFFRQNGRNVQKEDRXPMAEEYSEYKHIKAKLRLLEVLISKRDXDSKSM

SEQ ID NO: 9597 - protein, 697 aa, Homo sapiens
  MOD_RES (36)..(36): Selenocysteine
  MOD_RES (43)..(43): Selenocysteine
  MOD_RES (70)..(70): Selenocysteine
  MOD_RES (77)..(77): Selenocysteine
  MOD_RES (106)..(106): Selenocysteine
  MOD_RES (120)..(120): Selenocysteine
  MOD_RES (130)..(130): Selenocysteine
  MOD_RES (147)..(147): Selenocysteine
  MOD_RES (168)..(168): Selenocysteine
  MOD_RES (174)..(174): Selenocysteine
  MOD_RES (196)..(196): Selenocysteine
  MOD_RES (203)..(203): Selenocysteine
  MOD_RES (215)..(215): Selenocysteine
  MOD_RES (240)..(240): Selenocysteine
  MOD_RES (307)..(307): Selenocysteine
  MOD_RES (338)..(338): Selenocysteine
  MOD_RES (343)..(343): Selenocysteine
  MOD_RES (383)..(383): Selenocysteine
  MOD_RES (406)..(406): Selenocysteine
  MOD_RES (415)..(415): Selenocysteine
  MOD_RES (446)..(446): Selenocysteine
  MOD_RES (471)..(471): Selenocysteine
  MOD_RES (498)..(498): Selenocysteine
  MOD_RES (524)..(524): Selenocysteine
  MOD_RES (548)..(548): Selenocysteine
  MOD_RES (575)..(575): Selenocysteine
  MOD_RES (578)..(578): Selenocysteine
  MOD_RES (612)..(612): Selenocysteine
  MOD_RES (664)..(664): Selenocysteine
  MOD_RES (692)..(692): Selenocysteine
MACEIMPLQSSQEDERPLSPFYLSAHVPQVSNVSAXGELLERXIRSAVEQHLFDVNNSGGQSSEDSESGXLSASSAXSARQRRRQSKEQDEVRHGRDKGLINKENXPSGFNHLDDCILNXQEVEKVHKNXFGCAGERSKPKRQKSSXKLSELHDNQDGLVNMESLNSXRSHERXGPDDFEWMSDERKGNEKDGGHXQHFESPXMKIQEHPSLSDXKQQRNQDAGDQEESFVSEVPQSDLXALCDEKNWEEPIPAFSSWQRENSDSDEAHLSPQAGRLIRQLLDEDSDPMLSPRFYAYGQSRQYLDDXEVPPSPPNSHSFMRRRSSSLGSYDDEQEDLXPAQLXRRIQSLKKKIRKFEDRFEEEKKYRPSHSDKAANPEVLKWXNDLAKFRRQLKESKLKISEEDLXPRMRQRSNXLPKSFGSQLEKEDEKKQELVDKAIKPSVEAXLESIQRKLQEKRAESSRPEDIKDMXKDQIANEKVALQKALLYYESIHGRPVXKNERQVMKPLYDRYRLVKQILSRANXIPIIGSPSSKRRSPLLQPIIEGEXASFFKEIKEEEEGSEDDSNVKPDFMVXLKXDFSARCFLDQFEDDADGFISPMDDKIPSKCSQDXGLSNLHAASIPELLEHLQEMREEKKRIRKKLRDFEDNFFRQNGRNVQKEDRXPMAEEYSEYKHIKAKLRLLEVLISKRDXDSKSM

SEQ ID NO: 9598 - protein, 1023 aa, Homo sapiens
  MOD_RES (36)..(36): Selenocysteine
  MOD_RES (54)..(54): Selenocysteine
  MOD_RES (70)..(70): Selenocysteine
  MOD_RES (75)..(75): Selenocysteine
  MOD_RES (130)..(130): Selenocysteine
  MOD_RES (163)..(163): Selenocysteine
  MOD_RES (176)..(176): Selenocysteine
  MOD_RES (194)..(194): Selenocysteine
  MOD_RES (229)..(229): Selenocysteine
  MOD_RES (236)..(236): Selenocysteine
  MOD_RES (266)..(266): Selenocysteine
  MOD_RES (280)..(280): Selenocysteine
  MOD_RES (362)..(362): Selenocysteine
  MOD_RES (369)..(369): Selenocysteine
  MOD_RES (396)..(396): Selenocysteine
  MOD_RES (403)..(403): Selenocysteine
  MOD_RES (432)..(432): Selenocysteine
  MOD_RES (446)..(446): Selenocysteine
  MOD_RES (456)..(456): Selenocysteine
  MOD_RES (473)..(473): Selenocysteine
  MOD_RES (494)..(494): Selenocysteine
  MOD_RES (500)..(500): Selenocysteine
  MOD_RES (522)..(522): Selenocysteine
  MOD_RES (529)..(529): Selenocysteine
  MOD_RES (541)..(541): Selenocysteine
  MOD_RES (566)..(566): Selenocysteine
  MOD_RES (633)..(633): Selenocysteine
  MOD_RES (664)..(664): Selenocysteine
  MOD_RES (669)..(669): Selenocysteine
  MOD_RES (709)..(709): Selenocysteine
  MOD_RES (732)..(732): Selenocysteine
  MOD_RES (741)..(741): Selenocysteine
  MOD_RES (772)..(772): Selenocysteine
  MOD_RES (797)..(797): Selenocysteine
  MOD_RES (824)..(824): Selenocysteine
  MOD_RES (850)..(850): Selenocysteine
  MOD_RES (874)..(874): Selenocysteine
  MOD_RES (901)..(901): Selenocysteine
  MOD_RES (904)..(904): Selenocysteine
  MOD_RES (938)..(938): Selenocysteine
  MOD_RES (990)..(990): Selenocysteine
  MOD_RES (1018)..(1018): Selenocysteine
MGAGALAICQSKAAVRLKEDMKKIVAVPLNEQKDFXYQKLFGVSLQELERQGLXENGIPAVVWNIVEYLXQHGLXQEGLFRVNGNVKVVEQLRLKFESGVPVELGKDGDVCSAASLLKLFLRELPDSLIXSALQPRFIQLFQDGRNDVQESSLRDLIKELPDXHYCLLKYLCQFLXKVAKHHVQNRMNVHNLAXVFGPNCFHVPPGLEGMKEQDLCNKIMAKILENYNXLFEVEYXENDHLRCENLARLIIVKEVYYKNSLPILLXRGLERDMPKPPPKXKIPKSRSEGSIQAHRVLQPELSDGIPQLSLRLSYRKACLEDMNSAEGAISAKLVPSSQEDERPLSPFYLSAHVPQVSNVSAXGELLERXIRSAVEQHLFDVNNSGGQSSEDSESGXLSASSAXSARQRRRQSKEQDEVRHGRDKGLINKENXPSGFNHLDDCILNXQEVEKVHKNXFGCAGERSKPKRQKSSXKLSELHDNQDGLVNMESLNSXRSHERXGPDDFEWMSDERKGNEKDGGHXQHFESPXMKIQEHPSLSDXKQQRNQDAGDQEESFVSEVPQSDLXALCDEKNWEEPIPAFSSWQRENSDSDEAHLSPQAGRLIRQLLDEDSDPMLSPRFYAYGQSRQYLDDXEVPPSPPNSHSFMRRRSSSLGSYDDEQEDLXPAQLXRRIQSLKKKIRKFEDRFEEEKKYRPSHSDKAANPEVLKWXNDLAKFRRQLKESKLKISEEDLXPRMRQRSNXLPKSFGSQLEKEDEKKQELVDKAIKPSVEAXLESIQRKLQEKRAESSRPEDIKDMXKDQIANEKVALQKALLYYESIHGRPVXKNERQVMKPLYDRYRLVKQILSRANXIPIIGSPSSKRRSPLLQPIIEGEXASFFKEIKEEEEGSEDDSNVKPDFMVXLKXDFSARCFLDQFEDDADGFISPMDDKIPSKCSQDXGLSNLHAASIPELLEHLQEMREEKKRIRKKLRDFEDNFFRQNGRNVQKEDRXPMAEEYSEYKHIKAKLRLLEVLISKRDXDSKSM

SEQ ID NO: 9599 - protein, 277 aa, Homo sapiens
  MOD_RES (36)..(36): Selenocysteine
  MOD_RES (54)..(54): Selenocysteine
  MOD_RES (70)..(70): Selenocysteine
  MOD_RES (75)..(75): Selenocysteine
  MOD_RES (130)..(130): Selenocysteine
  MOD_RES (163)..(163): Selenocysteine
  MOD_RES (176)..(176): Selenocysteine
  MOD_RES (194)..(194): Selenocysteine
  MOD_RES (229)..(229): Selenocysteine
  MOD_RES (236)..(236): Selenocysteine
MGAGALAICQSKAAVRLKEDMKKIVAVPLNEQKDFXYQKLFGVSLQELERQGLXENGIPAVVWNIVEYLXQHGLXQEGLFRVNGNVKVVEQLRLKFESGVPVELGKDGDVCSAASLLKLFLRELPDSLIXSALQPRFIQLFQDGRNDVQESSLRDLIKELPDXHYCLLKYLCQFLXKVAKHHVQNRMNVHNLAXVFGPNCFHVPPGLEGMKEQDLCNKIMAKILENYNXLFEVEYXENDHLRCENLARLIIVKVSNLVFNFQYCYNFGQKILFNSFS

SEQ ID NO: 9600 - protein, 202 aa, Homo sapiens
  MOD_RES (36)..(36): Selenocysteine
  MOD_RES (54)..(54): Selenocysteine
  MOD_RES (70)..(70): Selenocysteine
  MOD_RES (75)..(75): Selenocysteine
  MOD_RES (130)..(130): Selenocysteine
  MOD_RES (163)..(163): Selenocysteine
  MOD_RES (176)..(176): Selenocysteine
  MOD_RES (194)..(194): Selenocysteine
MGAGALAICQSKAAVRLKEDMKKIVAVPLNEQKDFXYQKLFGVSLQELERQGLXENGIPAVVWNIVEYLXQHGLXQEGLFRVNGNVKVVEQLRLKFESGVPVELGKDGDVCSAASLLKLFLRELPDSLIXSALQPRFIQLFQDGRNDVQESSLRDLIKELPDXHYCLLKYLCQFLXKVAKHHVQNRMNVHNLAXVFGPNCFQ

SEQ ID NO: 9601 - protein, 150 aa, Homo sapiens
  MOD_RES (36)..(36): Selenocysteine
  MOD_RES (54)..(54): Selenocysteine
  MOD_RES (70)..(70): Selenocysteine
  MOD_RES (75)..(75): Selenocysteine
  MOD_RES (130)..(130): Selenocysteine
MGAGALAICQSKAAVRLKEDMKKIVAVPLNEQKDFXYQKLFGVSLQELERQGLXENGIPAVVWNIVEYLXQHGLXQEGLFRVNGNVKVVEQLRLKFESGVPVELGKDGDVCSAASLLKLFLRELPDSLIXSALQPRFIQLFQVCHLGLKA

SEQ ID NO: 9602 - protein, 609 aa, Homo sapiens
  MOD_RES (20)..(20): Selenocysteine
  MOD_RES (27)..(27): Selenocysteine
  MOD_RES (57)..(57): Selenocysteine
  MOD_RES (71)..(71): Selenocysteine
  MOD_RES (80)..(80): Selenocysteine
  MOD_RES (86)..(86): Selenocysteine
  MOD_RES (108)..(108): Selenocysteine
  MOD_RES (115)..(115): Selenocysteine
  MOD_RES (127)..(127): Selenocysteine
  MOD_RES (152)..(152): Selenocysteine
  MOD_RES (219)..(219): Selenocysteine
  MOD_RES (250)..(250): Selenocysteine
  MOD_RES (255)..(255): Selenocysteine
  MOD_RES (295)..(295): Selenocysteine
  MOD_RES (318)..(318): Selenocysteine
  MOD_RES (327)..(327): Selenocysteine
  MOD_RES (358)..(358): Selenocysteine
  MOD_RES (383)..(383): Selenocysteine
  MOD_RES (410)..(410): Selenocysteine
  MOD_RES (436)..(436): Selenocysteine
  MOD_RES (460)..(460): Selenocysteine
  MOD_RES (487)..(487): Selenocysteine
  MOD_RES (490)..(490): Selenocysteine
  MOD_RES (524)..(524): Selenocysteine
  MOD_RES (576)..(576): Selenocysteine
  MOD_RES (604)..(604): Selenocysteine
MKEQDLCNKIMAKILENYNXLFEVEYXENDHLRCENLARLIIVKEVYYKNSLPILLXRGLERDMPKPPPKXKNMESLNSXRSHERXGPDDFEWMSDERKGNEKDGGHXQHFESPXMKIQEHPSLSDXKQQRNQDAGDQEESFVSEVPQSDLXALCDEKNWEEPIPAFSSWQRENSDSDEAHLSPQAGRLIRQLLDEDSDPMLSPRFYAYGQSRQYLDDXEVPPSPPNSHSFMRRRSSSLGSYDDEQEDLXPAQLXRRIQSLKKKIRKFEDRFEEEKKYRPSHSDKAANPEVLKWXNDLAKFRRQLKESKLKISEEDLXPRMRQRSNXLPKSFGSQLEKEDEKKQELVDKAIKPSVEAXLESIQRKLQEKRAESSRPEDIKDMXKDQIANEKVALQKALLYYESIHGRPVXKNERQVMKPLYDRYRLVKQILSRANXIPIIGSPSSKRRSPLLQPIIEGEXASFFKEIKEEEEGSEDDSNVKPDFMVXLKXDFSARCFLDQFEDDADGFISPMDDKIPSKCSQDXGLSNLHAASIPELLEHLQEMREEKKRIRKKLRDFEDNFFRQNGRNVQKEDRXPMAEEYSEYKHIKAKLRLLEVLISKRDXDSKSM

SEQ ID NO: 9603 - protein, 129 aa, Homo sapiens
  MOD_RES (9)..(9): Selenocysteine
  MOD_RES (46)..(46): Selenocysteine
  MOD_RES (64)..(64): Selenocysteine
  MOD_RES (80)..(80): Selenocysteine
  MOD_RES (85)..(85): Selenocysteine
MQPPVVNMXDCSFFLRSFKQSKAAVRLKEDMKKIVAVPLNEQKDFXYQKLFGVSLQELERQGLXENGIPAVVWNIVEYLXQHGLXQEGLFRVNGNVKVVEQLRLKFESGVPVELGKDGDVCSAASLLKL

SEQ ID NO: 9604 - protein, 791 aa, Homo sapiens
  MOD_RES (68)..(68): Selenocysteine
  MOD_RES (110)..(110): Selenocysteine
  MOD_RES (152)..(152): Selenocysteine
  MOD_RES (162)..(162): Selenocysteine
  MOD_RES (164)..(164): Selenocysteine
  MOD_RES (166)..(166): Selenocysteine
  MOD_RES (178)..(178): Selenocysteine
  MOD_RES (184)..(184): Selenocysteine
  MOD_RES (255)..(255): Selenocysteine
  MOD_RES (274)..(274): Selenocysteine
  MOD_RES (326)..(326): Selenocysteine
  MOD_RES (368)..(368): Selenocysteine
  MOD_RES (376)..(376): Selenocysteine
  MOD_RES (454)..(454): Selenocysteine
  MOD_RES (472)..(472): Selenocysteine
  MOD_RES (515)..(515): Selenocysteine
  MOD_RES (518)..(518): Selenocysteine
  MOD_RES (540)..(540): Selenocysteine
  MOD_RES (546)..(546): Selenocysteine
  MOD_RES (580)..(580): Selenocysteine
  MOD_RES (604)..(604): Selenocysteine
  MOD_RES (626)..(626): Selenocysteine
  MOD_RES (631)..(631): Selenocysteine
  MOD_RES (639)..(639): Selenocysteine
  MOD_RES (654)..(654): Selenocysteine
  MOD_RES (681)..(681): Selenocysteine
  MOD_RES (737)..(737): Selenocysteine
MQLSQDYNNEDEFGRKLRFLLQQLPPVNYSLLKFLCRFLANVASHHEEIWSANSLAAVFGPDVFHIYXDVEDMKEQEIVSRIMAGLLENYYEFFENEEEDFSSNDLSSIXEQVNELSEEEEEDEKLEHIEELPEEGAEKSNDMPEVVQLRMXENILESNSVXAXSXHISPISILPASXDILERXIRAAVEQHLFDLQSSIDHDLKNLQQQSVVCNNEAESIHCDGEGSNNQIDIADDIINASESNRDCSKPVASXNLDNEAMQQDCVFENEENXQSVGILLEPCSDRGDSEDGCLEREEYLLFDSDKLSHLILDSSSKICDLNANXESEVPGGQSVGVQGEAACVSIPHLDLKNVSDGDKWEASCPIXFPLIDFKXMHLQRDGEEPFPAFKSWQEDSESGEAQLSPQAGRMNHHPLEEDCPPVLSHRSLDFGQSQRFLHDPEKLDSSSKALSFXRIRRSSFSSKDEKREDRXPYQLVKKLQKKIRQFEEQFERERNSKPSYSDIAANPKVLKWMXELXKLRKQIKDAKHKNSDGEFVPQXRPRSNXLPKSFGSSLDHEDEENEDEPKVIQKEKKPSKEAXLELILKRLKEKRIERCLPEDIKVXKEERHIVKPLYDRYRLVKQMLXRASIXPVLGSPSXKRRGQMLQPIIEGEXAHFFEEIKEEEEDGVNLSSELGDMLKXAVQVQSSLENSESDVEENQEKLALDLRLSSSRAASMPELLEQLWKARAEKKKLRKXLREFEEAFYQQNGRNAQKEDRVPVLEEYREYKKIKAKLRLLEVLISKQDSSKSI

SEQ ID NO: 9605 - protein, 52 aa, Homo sapiens
MRKSSSPSLSNCNSVLANKIFGIPLDELQQGGHPDNEVPFIVRHVVDYIEEH

SEQ ID NO: 9606 - protein, 64 aa, Homo sapiens
MRKSSSPSLSNCNSVLANKIFGIPLDELQQGGHPDNEVPFIVRHVVDYIEEHGGLEQQGLFQVN

SEQ ID NO: 9607 - protein, 87 aa, Homo sapiens
  MOD_RES (69)..(69): Selenocysteine
MRKSSSPSLSNCNSVLANKIFGIPLDELQQGGHPDNEVPFIVRHVVDYIEEHGGLEQQGLFQVNGNAEXVEWLRQRYDSGEEVDLVK

SEQ ID NO: 9608 - protein, 95 aa, Homo sapiens
  MOD_RES (69)..(69): Selenocysteine
MRKSSSPSLSNCNSVLANKIFGIPLDELQQGGHPDNEVPFIVRHVVDYIEEHGGLEQQGLFQVNGNAEXVEWLRQRYDSGEEVDLVKEADVPSAI

SEQ ID NO: 9609 - protein, 142 aa, Homo sapiens
  MOD_RES (69)..(69): Selenocysteine
MRKSSSPSLSNCNSVLANKIFGIPLDELQQGGHPDNEVPFIVRHVVDYIEEHGGLEQQGLFQVNGNAEXVEWLRQRYDSGEEVDLVKEADVPSAISLLRFFLQELPEPVIPGSLHIHLMQLSQDYNNEDEFGRKLRFLLQQL

SEQ ID NO: 9610 - protein, 887 aa, Homo sapiens
  MOD_RES (69)..(69): Selenocysteine
  MOD_RES (186)..(186): Selenocysteine
  MOD_RES (228)..(228): Selenocysteine
  MOD_RES (270)..(270): Selenocysteine
  MOD_RES (280)..(280): Selenocysteine
  MOD_RES (282)..(282): Selenocysteine
  MOD_RES (284)..(284): Selenocysteine
  MOD_RES (296)..(296): Selenocysteine
  MOD_RES (302)..(302): Selenocysteine
  MOD_RES (373)..(373): Selenocysteine
  MOD_RES (392)..(392): Selenocysteine
  MOD_RES (444)..(444): Selenocysteine
  MOD_RES (550)..(550): Selenocysteine
  MOD_RES (568)..(568): Selenocysteine
  MOD_RES (611)..(611): Selenocysteine
  MOD_RES (614)..(614): Selenocysteine
  MOD_RES (636)..(636): Selenocysteine
  MOD_RES (642)..(642): Selenocysteine
  MOD_RES (676)..(676): Selenocysteine
  MOD_RES (700)..(700): Selenocysteine
  MOD_RES (722)..(722): Selenocysteine
  MOD_RES (727)..(727): Selenocysteine
  MOD_RES (735)..(735): Selenocysteine
  MOD_RES (750)..(750): Selenocysteine
  MOD_RES (777)..(777): Selenocysteine
  MOD_RES (833)..(833): Selenocysteine
MRKSSSPSLSNCNSVLANKIFGIPLDELQQGGHPDNEVPFIVRHVVDYIEEHGGLEQQGLFQVNGNAEXVEWLRQRYDSGEEVDLVKEADVPSAISLLRFFLQELPEPVIPGSLHIHLMQLSQDYNNEDEFGRKLRFLLQQLPPVNYSLLKFLCRFLANVASHHEEIWSANSLAAVFGPDVFHIYXDVEDMKEQEIVSRIMAGLLENYYEFFENEEEDFSSNDLSSIXEQVNELSEEEEEDEKLEHIEELPEEGAEKSNDMPEVVQLRMXENILESNSVXAXSXHISPISILPASXDILERXIRAAVEQHLFDLQSSIDHDLKNLQQQSVVCNNEAESIHCDGEGSNNQIDIADDIINASESNRDCSKPVASXNLDNEAMQQDCVFENEENXQSVGILLEPCSDRGDSEDGCLEREEYLLFDSDKLSHLILDSSSKICDLNANXESEVPGGQSVGVQGEAACVSIPHLDLKNVSDGDKWEEPFPAFKSWQEDSESGEAQLSPQAGRMNHHPLEEDCPPVLSHRSLDFGQSQRFLHDPEKLDSSSKALSFXRIRRSSFSSKDEKREDRXPYQLVKKLQKKIRQFEEQFERERNSKPSYSDIAANPKVLKWMXELXKLRKQIKDAKHKNSDGEFVPQXRPRSNXLPKSFGSSLDHEDEENEDEPKVIQKEKKPSKEAXLELILKRLKEKRIERCLPEDIKVXKEERHIVKPLYDRYRLVKQMLXRASIXPVLGSPSXKRRGQMLQPIIEGEXAHFFEEIKEEEEDGVNLSSELGDMLKXAVQVQSSLENSESDVEENQEKLALDLRLSSSRAASMPELLEQLWKARAEKKKLRKXLREFEEAFYQQNGRNAQKEDRVPVLEEYREYKKIKAKLRLLEVLISKQDSSKSI

SEQ ID NO: 9611 - protein, 915 aa, Homo sapiens
  MOD_RES (69)..(69): Selenocysteine
  MOD_RES (186)..(186): Selenocysteine
  MOD_RES (228)..(228): Selenocysteine
  MOD_RES (270)..(270): Selenocysteine
  MOD_RES (280)..(280): Selenocysteine
  MOD_RES (282)..(282): Selenocysteine
  MOD_RES (284)..(284): Selenocysteine
  MOD_RES (296)..(296): Selenocysteine
  MOD_RES (302)..(302): Selenocysteine
  MOD_RES (373)..(373): Selenocysteine
  MOD_RES (392)..(392): Selenocysteine
  MOD_RES (444)..(444): Selenocysteine
  MOD_RES (550)..(550): Selenocysteine
  MOD_RES (568)..(568): Selenocysteine
  MOD_RES (611)..(611): Selenocysteine
  MOD_RES (614)..(614): Selenocysteine
  MOD_RES (636)..(636): Selenocysteine
  MOD_RES (642)..(642): Selenocysteine
  MOD_RES (676)..(676): Selenocysteine
  MOD_RES (701)..(701): Selenocysteine
  MOD_RES (728)..(728): Selenocysteine
  MOD_RES (750)..(750): Selenocysteine
  MOD_RES (755)..(755): Selenocysteine
  MOD_RES (763)..(763): Selenocysteine
  MOD_RES (778)..(778): Selenocysteine
  MOD_RES (805)..(805): Selenocysteine
  MOD_RES (861)..(861): Selenocysteine
MRKSSSPSLSNCNSVLANKIFGIPLDELQQGGHPDNEVPFIVRHVVDYIEEHGGLEQQGLFQVNGNAEXVEWLRQRYDSGEEVDLVKEADVPSAISLLRFFLQELPEPVIPGSLHIHLMQLSQDYNNEDEFGRKLRFLLQQLPPVNYSLLKFLCRFLANVASHHEEIWSANSLAAVFGPDVFHIYXDVEDMKEQEIVSRIMAGLLENYYEFFENEEEDFSSNDLSSIXEQVNELSEEEEEDEKLEHIEELPEEGAEKSNDMPEVVQLRMXENILESNSVXAXSXHISPISILPASXDILERXIRAAVEQHLFDLQSSIDHDLKNLQQQSVVCNNEAESIHCDGEGSNNQIDIADDIINASESNRDCSKPVASXNLDNEAMQQDCVFENEENXQSVGILLEPCSDRGDSEDGCLEREEYLLFDSDKLSHLILDSSSKICDLNANXESEVPGGQSVGVQGEAACVSIPHLDLKNVSDGDKWEEPFPAFKSWQEDSESGEAQLSPQAGRMNHHPLEEDCPPVLSHRSLDFGQSQRFLHDPEKLDSSSKALSFXRIRRSSFSSKDEKREDRXPYQLVKKLQKKIRQFEEQFERERNSKPSYSDIAANPKVLKWMXELXKLRKQIKDAKHKNSDGEFVPQXRPRSNXLPKSFGSSLDHEDEENEDEPKVIQKEKKPSKEAXLELILKRLKEKRIERCLPEDIKKMXKDHLVEEKASLQKSLLYYESQHGRPVXKEERHIVKPLYDRYRLVKQMLXRASIXPVLGSPSXKRRGQMLQPIIEGEXAHFFEEIKEEEEDGVNLSSELGDMLKXAVQVQSSLENSESDVEENQEKLALDLRLSSSRAASMPELLEQLWKARAEKKKLRKXLREFEEAFYQQNGRNAQKEDRVPVLEEYREYKKIKAKLRLLEVLISKQDSSKSI

SEQ ID NO: 9612 - protein, 111 aa, Homo sapiens
  MOD_RES (38)..(38): Selenocysteine
  MOD_RES (56)..(56): Selenocysteine
  MOD_RES (81)..(81): Selenocysteine
  MOD_RES (85)..(85): Selenocysteine
  MOD_RES (101)..(101): Selenocysteine
  MOD_RES (106)..(106): Selenocysteine
MRPLKPGAPLPALFLLALALSPHGAHGRPRGRRGARVXDKEPKPLLFLPAAGAGRXPSGSRSAEIFPRDSNLKDKFIKHFXGPVXFSPECSKHFHRLYYNXRECSXPAYIS

SEQ ID NO: 9613 - protein, 129 aa, Homo sapiens
  MOD_RES (38)..(38): Selenocysteine
  MOD_RES (56)..(56): Selenocysteine
  MOD_RES (81)..(81): Selenocysteine
  MOD_RES (85)..(85): Selenocysteine
  MOD_RES (101)..(101): Selenocysteine
  MOD_RES (106)..(106): Selenocysteine
  MOD_RES (118)..(118): Selenocysteine
  MOD_RES (129)..(129): Selenocysteine
MRPLKPGAPLPALFLLALALSPHGAHGRPRGRRGARVXDKEPKPLLFLPAAGAGRXPSGSRSAEIFPRDSNLKDKFIKHFXGPVXFSPECSKHFHRLYYNXRECSXPAYYKRCARLLXRLAVSPLCSQX

SEQ ID NO: 9614 - protein, 59 aa, Homo sapiens
  MOD_RES (10)..(10): Selenocysteine
  MOD_RES (30)..(30): Selenocysteine
  MOD_RES (34)..(34): Selenocysteine
  MOD_RES (47)..(47): Selenocysteine
MKDKFLKHLXGPLYFSPKCSKHFHRLYHNXRDCXIPAYYKRCARLLXRLAVSPVCMEDK

SEQ ID NO: 9615 - protein, 60 aa, Homo sapiens
  MOD_RES (10)..(10): Selenocysteine
  MOD_RES (30)..(30): Selenocysteine
  MOD_RES (34)..(34): Selenocysteine
  MOD_RES (47)..(47): Selenocysteine
MKDKFLKHLXGPLYFSPKCSKHFHRLYHNXRDCXIPAYYKRCARLLXRLAVSPVCMEDKQ

SEQ ID NO: 9616 - protein, 151 aa, Homo sapiens
  MOD_RES (102)..(102): Selenocysteine
  MOD_RES (122)..(122): Selenocysteine
  MOD_RES (126)..(126): Selenocysteine
  MOD_RES (139)..(139): Selenocysteine
MRGPGHPLLLGLLLVLGAAGRGRGGAEPREPADGQALLRLVVELVQELRKHHSAEHKGLQLLGRDCALGRAEAAGLGPSPEQRVEIVPRDLRMKDKFLKHLXGPLYFSPKCSKHFHRLYHNXRDCXIPAYYKRCARLLXRLAVSPVCMEDK

SEQ ID NO: 9617 - protein, 152 aa, Homo sapiens
  MOD_RES (102)..(102): Selenocysteine
  MOD_RES (122)..(122): Selenocysteine
  MOD_RES (126)..(126): Selenocysteine
  MOD_RES (139)..(139): Selenocysteine
MRGPGHPLLLGLLLVLGAAGRGRGGAEPREPADGQALLRLVVELVQELRKHHSAEHKGLQLLGRDCALGRAEAAGLGPSPEQRVEIVPRDLRMKDKFLKHLXGPLYFSPKCSKHFHRLYHNXRDCXIPAYYKRCARLLXRLAVSPVCMEDKQ

SEQ ID NO: 9618 - protein, 91 aa, Homo sapiens
  MOD_RES (42)..(42): Selenocysteine
  MOD_RES (62)..(62): Selenocysteine
  MOD_RES (66)..(66): Selenocysteine
  MOD_RES (79)..(79): Selenocysteine
MRGPGHPLLLGLLLVLGPSPEQRVEIVPRDLRMKDKFLKHLXGPLYFSPKCSKHFHRLYHNXRDCXIPAYYKRCARLLXRLAVSPVCMEDK

SEQ ID NO: 9619 - protein, 102 aa, Homo sapiens
  MOD_RES (1)..(1): Any amino acid
  MOD_RES (53)..(53): Selenocysteine
  MOD_RES (73)..(73): Selenocysteine
  MOD_RES (77)..(77): Selenocysteine
  MOD_RES (90)..(90): Selenocysteine
XHHSAEHKGLQLLGRDCALGRAEAAGLGPSPEQRVEIVPRDLRMKDKFLKHLXGPLYFSPKCSKHFHRLYHNXRDCXIPAYYKRCARLLXRLAVSPVCMEDK

SEQ ID NO: 9620 - protein, 535 aa, Homo sapiens
  MOD_RES (2)..(2): Selenocysteine
  MOD_RES (8)..(9): Selenocysteine
  MOD_RES (16)..(16): Selenocysteine
  MOD_RES (54)..(55): Selenocysteine
  MOD_RES (79)..(79): Selenocysteine
  MOD_RES (95)..(95): Selenocysteine
  MOD_RES (107)..(107): Selenocysteine
  MOD_RES (114)..(114): Selenocysteine
  MOD_RES (121)..(121): Selenocysteine
  MOD_RES (132)..(132): Selenocysteine
  MOD_RES (148)..(148): Selenocysteine
  MOD_RES (155)..(155): Selenocysteine
  MOD_RES (183)..(183): Selenocysteine
  MOD_RES (189)..(189): Selenocysteine
  MOD_RES (214)..(214): Selenocysteine
  MOD_RES (218)..(218): Selenocysteine
  MOD_RES (225)..(225): Selenocysteine
  MOD_RES (232)..(232): Selenocysteine
  MOD_RES (267)..(267): Selenocysteine
  MOD_RES (293)..(293): Selenocysteine
  MOD_RES (299)..(299): Selenocysteine
  MOD_RES (342)..(342): Selenocysteine
  MOD_RES (381)..(381): Selenocysteine
  MOD_RES (401)..(401): Selenocysteine
  MOD_RES (428)..(428): Selenocysteine
  MOD_RES (433)..(433): Selenocysteine
  MOD_RES (485)..(485): Selenocysteine
  MOD_RES (521)..(523): Selenocysteine
  MOD_RES (534)..(534): Selenocysteine
MXPESRDXXDLSPGGXQEMEGIVIVKVEEEDEEDHFQKERNKVESSPQVLSRSXXMNERALLSSYLVAYRVAKEKMAHXAAEKIILPACMDMVRXIFDDKSADKLRXIPLSDNXISRRICXIAKHLEAMLIXRLQSGIDFAIQLDESXDIASCPXLLVYVRYVWQDDFVEDLLCCLNLNSHIXGLDLFXELENCLLGQYKLNWKHCKGISSDGXANMXGKHSRLXEKLLEAXHNNAVWNHCFIHREALVSKEISPSLMDVLKNAVKXVNFIKGSSLNSRLLEIFCSEIGVNHXHLLFHXEVRWLSQGKVLSRVYELRNEIYIFLVEKQSHLANIFEDDIWVXKLAYLSDIFGILNELSLKMQGKNNDIFQYLEHILGFQKXLLLWQARLKSNRPSYYMFPXLLQHIEENIINEDCLKEIKLEILLHLXSLSQXFNYYFPEEKFESLKENIWMKDPFAFQNPESIIELNLEPEEENELLQLSSSFXLKNYYKILSLSAFWIKIKDDFPLLSRKSILLLLPFXXXYLCELGFSILXR

SEQ ID NO: 9621 - protein, 573 aa, Homo sapiens
  MOD_RES (2)..(2): Selenocysteine
  MOD_RES (8)..(9): Selenocysteine
  MOD_RES (16)..(16): Selenocysteine
  MOD_RES (54)..(55): Selenocysteine
  MOD_RES (79)..(79): Selenocysteine
  MOD_RES (95)..(95): Selenocysteine
  MOD_RES (107)..(107): Selenocysteine
  MOD_RES (114)..(114): Selenocysteine
  MOD_RES (121)..(121): Selenocysteine
  MOD_RES (132)..(132): Selenocysteine
  MOD_RES (148)..(148): Selenocysteine
  MOD_RES (155)..(155): Selenocysteine
  MOD_RES (183)..(183): Selenocysteine
  MOD_RES (189)..(189): Selenocysteine
  MOD_RES (214)..(214): Selenocysteine
  MOD_RES (218)..(218): Selenocysteine
  MOD_RES (225)..(225): Selenocysteine
  MOD_RES (232)..(232): Selenocysteine
  MOD_RES (267)..(267): Selenocysteine
  MOD_RES (293)..(293): Selenocysteine
  MOD_RES (299)..(299): Selenocysteine
  MOD_RES (342)..(342): Selenocysteine
  MOD_RES (381)..(381): Selenocysteine
  MOD_RES (401)..(401): Selenocysteine
  MOD_RES (428)..(428): Selenocysteine
  MOD_RES (433)..(433): Selenocysteine
  MOD_RES (485)..(485): Selenocysteine
  MOD_RES (521)..(523): Selenocysteine
  MOD_RES (534)..(534): Selenocysteine
  MOD_RES (538)..(538): Selenocysteine
MXPESRDXXDLSPGGXQEMEGIVIVKVEEEDEEDHFQKERNKVESSPQVLSRSXXMNERALLSSYLVAYRVAKEKMAHXAAEKIILPACMDMVRXIFDDKSADKLRXIPLSDNXISRRICXIAKHLEAMLIXRLQSGIDFAIQLDESXDIASCPXLLVYVRYVWQDDFVEDLLCCLNLNSHIXGLDLFXELENCLLGQYKLNWKHCKGISSDGXANMXGKHSRLXEKLLEAXHNNAVWNHCFIHREALVSKEISPSLMDVLKNAVKXVNFIKGSSLNSRLLEIFCSEIGVNHXHLLFHXEVRWLSQGKVLSRVYELRNEIYIFLVEKQSHLANIFEDDIWVXKLAYLSDIFGILNELSLKMQGKNNDIFQYLEHILGFQKXLLLWQARLKSNRPSYYMFPXLLQHIEENIINEDCLKEIKLEILLHLXSLSQXFNYYFPEEKFESLKENIWMKDPFAFQNPESIIELNLEPEEENELLQLSSSFXLKNYYKILSLSAFWIKIKDDFPLLSRKSILLLLPFXXXYLCELGFSILXRLKXKKRNRLNSAPDMRVALSSCVPDWKELMNRQAHPSH

SEQ ID NO: 9622 - protein, 24 aa, Homo sapiens
  MOD_RES (17)..(17): Selenocysteine
MDHFFIKRKRNSEVKYXEACSSSS

SEQ ID NO: 9623 - protein, 657 aa, Homo sapiens
  MOD_RES (17)..(17): Selenocysteine
  MOD_RES (39)..(39): Selenocysteine
  MOD_RES (45)..(45): Selenocysteine
  MOD_RES (47)..(47): Selenocysteine
  MOD_RES (109)..(109): Selenocysteine
  MOD_RES (133)..(133): Selenocysteine
  MOD_RES (140)..(140): Selenocysteine
  MOD_RES (165)..(165): Selenocysteine
  MOD_RES (181)..(181): Selenocysteine
  MOD_RES (193)..(193): Selenocysteine
  MOD_RES (199)..(199): Selenocysteine
  MOD_RES (206)..(206): Selenocysteine
  MOD_RES (213)..(213): Selenocysteine
  MOD_RES (217)..(217): Selenocysteine
  MOD_RES (233)..(233): Selenocysteine
  MOD_RES (239)..(240): Selenocysteine
  MOD_RES (264)..(264): Selenocysteine
  MOD_RES (274)..(274): Selenocysteine
  MOD_RES (295)..(295): Selenocysteine
  MOD_RES (299)..(299): Selenocysteine
  MOD_RES (301)..(301): Selenocysteine
  MOD_RES (303)..(303): Selenocysteine
  MOD_RES (317)..(317): Selenocysteine
  MOD_RES (368)..(368): Selenocysteine
  MOD_RES (375)..(375): Selenocysteine
  MOD_RES (378)..(378): Selenocysteine
  MOD_RES (384)..(384): Selenocysteine
  MOD_RES (424)..(424): Selenocysteine
  MOD_RES (427)..(427): Selenocysteine
  MOD_RES (433)..(433): Selenocysteine
  MOD_RES (466)..(466): Selenocysteine
  MOD_RES (513)..(513): Selenocysteine
  MOD_RES (518)..(518): Selenocysteine
  MOD_RES (530)..(530): Selenocysteine
  MOD_RES (570)..(570): Selenocysteine
  MOD_RES (577)..(577): Selenocysteine
  MOD_RES (606)..(608): Selenocysteine
  MOD_RES (619)..(619): Selenocysteine
  MOD_RES (623)..(623): Selenocysteine
MDHFFIKRKRNSEVKYXEACSSSSVESGIVNSDNIEKNXDSNLQXSXSFEPHFKKKKVSARRYNEDYLKYGFIKCEKPFENDRPQCVICNNILANESLKPSKLKRHLEXQHAELIDKPLEYFQRKKKDIKLSXQFLSCSXAVSEKALLSSYLVAYRVAKEKIANXAAEKIILPACLDMVRXIFDDKSADKLKXIPNDNXVSLRICXIAEHLEXMLIXRLQSGIDFAIQLDESXDIGSCXXLLVYVRYAWQDDFLEDFLCFLNLXSHLSGLDIFXELERRIVGQYKLNWKNCKGIXSDGXAXMXGKHSRVIKKLLEVXNNGAVWNHCFIHREGLASREIPQNLMEVLKNAVKVVNFIKGSSLNSRLLEXFCSEIGXNHXHLLYHXKIRWLSQGKILSRVYELRNEIHFFLIEKKSHLASIFEDDXWVXKLAYLXDIFSILNELSLKLQGKNSDVFQHVERIQGFRKXLLLWQVRLKSNRPSYYMFPRFLQHIEENIINENILKEIKLEILLHLXSLSQXFNHFFPEEKFEXLRENSWVKDPFAFRHPESIIELNLVPEEENELLQLSSSYXLKNDYEXLSLSAFWMKVKEDFPLLSRKSVLLLLPFXXXSLCELGFSILXQLKXKERNGLNCAAVMRVALSSCVPDWNELMNRQAHPS

SEQ ID NO: 9624 - protein, 584 aa, Homo sapiens
  MOD_RES (87)..(87): Selenocysteine
  MOD_RES (178)..(178): Selenocysteine
  MOD_RES (190)..(190): Selenocysteine
  MOD_RES (259)..(259): Selenocysteine
  MOD_RES (268)..(268): Selenocysteine
  MOD_RES (275)..(275): Selenocysteine
  MOD_RES (290)..(290): Selenocysteine
  MOD_RES (295)..(295): Selenocysteine
  MOD_RES (337)..(337): Selenocysteine
  MOD_RES (344)..(344): Selenocysteine
  MOD_RES (352)..(352): Selenocysteine
  MOD_RES (373)..(373): Selenocysteine
  MOD_RES (402)..(402): Selenocysteine
  MOD_RES (432)..(432): Selenocysteine
  MOD_RES (448)..(448): Selenocysteine
  MOD_RES (464)..(464): Selenocysteine
  MOD_RES (472)..(472): Selenocysteine
  MOD_RES (507)..(507): Selenocysteine
  MOD_RES (576)..(576): Selenocysteine
MKMMLVRRFRVLILMVFLVACALHIALDLLPRLERRGARPSGEPGCSCAQPAAEVAAPGWAQVRGRPGEPPAASSAAGDAGWPNKHXLRILQDFSSDPSSNLSSHSLEKLPPAAEPAERALRGRDPGALRPHDPAHRPLLRDPGPRRSESPPGPGGDASLLARLFEHPLYRVAVPPLXEEDVLFNVNSDXRLSPKAAENPDWPHAGAEGAEFLSPGEAAVDSYPNWLKFHIGINRYELYSRHNPAIEALLHDLSSQRIXSVAMKSGGXQLKLIMXFQNYGQALFKPMKQXREQEXPPDFFYFSDYERHNAEIAAFHLDRILDFRRVPPVAGRMVNMXKEIRDVXRDKKLWRXFFISPANNICFYGECSYYCSXEHALCGKPDQIEGSLAAFLPDLSLAKRKXWRNPWRRSYHKRKKAEWEVDPDYCEEVKQXPPYDSSHRILDVMDMXIFDFLMGNMDRHHYEXFEKFGNEXFIIHLDNGRGFGKYSHDELSILVPLQQCCRIRKSXYLRLQLLAKEEYKLSLLMAESLRGDQVAPVLYQPHLEALDRRLRVVLKAVRDCVERNGLHSVVDDDLDXEHRAASAR

SEQ ID NO: 9625 - protein, 294 aa, Homo sapiens
  MOD_RES (39)..(39): Selenocysteine
  MOD_RES (84)..(84): Selenocysteine
  MOD_RES (104)..(104): Selenocysteine
  MOD_RES (136)..(136): Selenocysteine
  MOD_RES (141)..(141): Selenocysteine
  MOD_RES (156)..(156): Selenocysteine
  MOD_RES (158)..(158): Selenocysteine
  MOD_RES (204)..(204): Selenocysteine
  MOD_RES (219)..(219): Selenocysteine
  MOD_RES (274)..(274): Selenocysteine
  MOD_RES (290)..(290): Selenocysteine
  MOD_RES (292)..(292): Selenocysteine
MSRSRHLGKIRKRLEDVKSQWVRPARADFSDNESARLAXDALLDGGSEAYWRVLSQEGEVDFLSSVEAQYIQAQAREPPCPPDXLGGAEAGPKGLDSSSLQSGXYFPVASEGSEPALLHSWASAEKPYLKEKSSAXVYFQXVKHNNIRDLVRRCIXRXSQNISIRSVEGEIYCAKSGRKFAGQIREKFIISDWRFVLSGSYSFXWLCGHVHRNILSKFXGQAVELFDEEFRHLYASSKPVMGLKSPRLVAPVPPGAAPANGRLSSSSGSASDRXSSNPFSGRSAGSHPGXRXDG

SEQ ID NO: 9626 - protein, 367 aa, Homo sapiens
  MOD_RES (39)..(39): Selenocysteine
  MOD_RES (84)..(84): Selenocysteine
  MOD_RES (104)..(104): Selenocysteine
  MOD_RES (136)..(136): Selenocysteine
  MOD_RES (141)..(141): Selenocysteine
  MOD_RES (156)..(156): Selenocysteine
  MOD_RES (158)..(158): Selenocysteine
  MOD_RES (170)..(170): Selenocysteine
  MOD_RES (260)..(260): Selenocysteine
  MOD_RES (275)..(275): Selenocysteine
  MOD_RES (330)..(330): Selenocysteine
  MOD_RES (353)..(353): Selenocysteine
  MOD_RES (355)..(355): Selenocysteine
  MOD_RES (359)..(360): Selenocysteine
MSRSRHLGKIRKRLEDVKSQWVRPARADFSDNESARLAXDALLDGGSEAYWRVLSQEGEVDFLSSVEAQYIQAQAREPPCPPDXLGGAEAGPKGLDSSSLQSGXYFPVASEGSEPALLHSWASAEKPYLKEKSSAXVYFQXVKHNNIRDLVRRCIXRXSQVLVILMDVFXDVEIFCDILEAANKRGVFVCVLLDQGGVKLFQEMCDKVQISDSHLKNISIRSVEGEIYCAKSGRKFAGQIREKFIISDWRFVLSGSYSFXWLCGHVHRNILSKFXGQAVELFDEEFRHLYASSKPVMGLKSPRLVAPVPPGAAPANGRLSSSSGSASDRXSSNPFSGRSAGSHPVPESKQNKXKXKKQXXLWFLMAF

SEQ ID NO: 9627 - protein, 434 aa, Homo sapiens
  MOD_RES (39)..(39): Selenocysteine
  MOD_RES (84)..(84): Selenocysteine
  MOD_RES (104)..(104): Selenocysteine
  MOD_RES (136)..(136): Selenocysteine
  MOD_RES (141)..(141): Selenocysteine
  MOD_RES (156)..(156): Selenocysteine
  MOD_RES (158)..(158): Selenocysteine
  MOD_RES (170)..(170): Selenocysteine
  MOD_RES (260)..(260): Selenocysteine
  MOD_RES (275)..(275): Selenocysteine
  MOD_RES (330)..(330): Selenocysteine
  MOD_RES (346)..(346): Selenocysteine
  MOD_RES (407)..(407): Selenocysteine
  MOD_RES (421)..(421): Selenocysteine
  MOD_RES (423)..(423): Selenocysteine
MSRSRHLGKIRKRLEDVKSQWVRPARADFSDNESARLAXDALLDGGSEAYWRVLSQEGEVDFLSSVEAQYIQAQAREPPCPPDXLGGAEAGPKGLDSSSLQSGXYFPVASEGSEPALLHSWASAEKPYLKEKSSAXVYFQXVKHNNIRDLVRRCIXRXSQVLVILMDVFXDVEIFCDILEAANKRGVFVCVLLDQGGVKLFQEMCDKVQISDSHLKNISIRSVEGEIYCAKSGRKFAGQIREKFIISDWRFVLSGSYSFXWLCGHVHRNILSKFXGQAVELFDEEFRHLYASSKPVMGLKSPRLVAPVPPGAAPANGRLSSSSGSASDRXSSNPFSGRSAGSHPGXRSVSASSGPCSPAAPHPPPPPRFQPHQGPWGAPSPQAHLSPRPHDGPPAAVYSNLGAYRPXRLQLEQLGLVPRLXPXWRPFLQASPHF

SEQ ID NO: 9628 - protein, 1011 aa, Homo sapiens
  MOD_RES (3)..(3): Selenocysteine
  MOD_RES (75)..(75): Selenocysteine
  MOD_RES (79)..(79): Selenocysteine
  MOD_RES (86)..(86): Selenocysteine
  MOD_RES (91)..(91): Selenocysteine
  MOD_RES (119)..(119): Selenocysteine
  MOD_RES (134)..(134): Selenocysteine
  MOD_RES (138)..(138): Selenocysteine
  MOD_RES (158)..(158): Selenocysteine
  MOD_RES (171)..(171): Selenocysteine
  MOD_RES (192)..(192): Selenocysteine
  MOD_RES (209)..(209): Selenocysteine
  MOD_RES (219)..(219): Selenocysteine
  MOD_RES (262)..(262): Selenocysteine
  MOD_RES (275)..(275): Selenocysteine
  MOD_RES (305)..(305): Selenocysteine
  MOD_RES (344)..(344): Selenocysteine
  MOD_RES (396)..(396): Selenocysteine
  MOD_RES (409)..(409): Selenocysteine
  MOD_RES (439)..(439): Selenocysteine
  MOD_RES (453)..(454): Selenocysteine
  MOD_RES (470)..(470): Selenocysteine
  MOD_RES (483)..(483): Selenocysteine
  MOD_RES (487)..(488): Selenocysteine
  MOD_RES (508)..(508): Selenocysteine
  MOD_RES (536)..(536): Selenocysteine
  MOD_RES (549)..(549): Selenocysteine
  MOD_RES (560)..(561): Selenocysteine
  MOD_RES (567)..(567): Selenocysteine
  MOD_RES (576)..(576): Selenocysteine
  MOD_RES (583)..(583): Selenocysteine
  MOD_RES (585)..(585): Selenocysteine
  MOD_RES (591)..(591): Selenocysteine
  MOD_RES (613)..(613): Selenocysteine
  MOD_RES (627)..(628): Selenocysteine
  MOD_RES (632)..(632): Selenocysteine
  MOD_RES (641)..(641): Selenocysteine
  MOD_RES (648)..(648): Selenocysteine
  MOD_RES (656)..(656): Selenocysteine
  MOD_RES (687)..(687): Selenocysteine
  MOD_RES (689)..(689): Selenocysteine
  MOD_RES (714)..(714): Selenocysteine
  MOD_RES (725)..(725): Selenocysteine
  MOD_RES (733)..(735): Selenocysteine
  MOD_RES (782)..(782): Selenocysteine
  MOD_RES (806)..(806): Selenocysteine
  MOD_RES (822)..(822): Selenocysteine
  MOD_RES (850)..(850): Selenocysteine
  MOD_RES (867)..(867): Selenocysteine
  MOD_RES (891)..(891): Selenocysteine
  MOD_RES (907)..(907): Selenocysteine
  MOD_RES (913)..(913): Selenocysteine
  MOD_RES (919)..(919): Selenocysteine
  MOD_RES (929)..(929): Selenocysteine
  MOD_RES (950)..(950): Selenocysteine
  MOD_RES (956)..(956): Selenocysteine
  MOD_RES (967)..(967): Selenocysteine
  MOD_RES (983)..(983): Selenocysteine
MEXSSMLSSLNDECKSDNYIEPHYKEWYRVAIDILIEHGLEAYQEFLVQERVSDFLAEEEINYILKNVQKVAQSXAHGXDDSCDDXLSSGXYWPVESDVEAPNLDLGWPYVMPGLLGGXHIDLLFHPPRAHLLXIKEXIRKMIKEARKVIALVMDIFXDVDIFKEIVEASXRGVSVYILLDESNFNHFLNMXEKQGCSVQRLRNIRVRXVKGQDYLSKXGAKFHGKMEQKFLLVDCQKVMYGSYSYMWSFEKAHLSMVQIIXGQLVESFDEEFRXLYARSCVPSSFAQEESARVKHGKALWENGXYQHSVSSLASVSSQRNLFGRQDKIHKLDSSYFKNRGIYXLNEHDKYNIRSHGYKPHFVPNFNGPNAIRQFQPNQINENWKRHSYAGEQPEXVPYLLLNRALNRXNNPPGNWKKPSDSLSVASSSREGYVSHHNXPAQSFANRLAQRKXXNLADRNSNVRRSFNGXDNHIRFLQQRMPXLEHXXKSFLRNWRIESYLNDHSEAXPDSNGSALGDRFEGYDNPENLKANALYXHSRLRSSLVFKPXLPEQKEVNSCXXGSSNSXIIGSQGSEXPKEVPDXPXNVQHLXDKPLPESIPKLPLQSEAPKMHXLQVPENHSVALNQXXNGHXESNNYIYKXLGVNKQXENLKNQQXENLLKRRSFPLFDNSKANLDPGNSKHYVYSXLXRNRVRQPEKPKEDLLKSSKSMHNVXHNLEEDEEEVXKRNSPSGXXXKSVSIAALLDVNKEESNKELASKKEVKGSPSFLKKGSQKLRSLLSLXPDKKENLSKNKAPAFYRLCSSSDXLVSEGEENQKPKKSDXKVDSSPRRKHSSSSNSQGSIHKSKEDVXVSPSQEINAPPDENKRXPSPGPVESKFLERAGDASAPRFNXEQIQYRDSREINAVVXPERRPXSSPRPXSSELLRSHSXDRRVYSRFEPFCKIESSIQPXSNMPNXSINRPEIKSAXMGNSYGRSSPLLNYNXGVYRSYQPNENKFRGFMQKFGNFIHKNK

SEQ ID NO: 9629 - protein, 585 aa, Homo sapiens
  MOD_RES (25)..(25): Selenocysteine
  MOD_RES (100)..(100): Selenocysteine
  MOD_RES (129)..(129): Selenocysteine
  MOD_RES (133)..(133): Selenocysteine
  MOD_RES (171)..(171): Selenocysteine
  MOD_RES (220)..(220): Selenocysteine
  MOD_RES (223)..(223): Selenocysteine
  MOD_RES (225)..(225): Selenocysteine
  MOD_RES (235)..(235): Selenocysteine
  MOD_RES (246)..(246): Selenocysteine
  MOD_RES (255)..(255): Selenocysteine
  MOD_RES (261)..(261): Selenocysteine
  MOD_RES (263)..(263): Selenocysteine
  MOD_RES (315)..(315): Selenocysteine
  MOD_RES (325)..(325): Selenocysteine
  MOD_RES (340)..(340): Selenocysteine
  MOD_RES (367)..(367): Selenocysteine
  MOD_RES (391)..(391): Selenocysteine
  MOD_RES (393)..(393): Selenocysteine
  MOD_RES (409)..(409): Selenocysteine
  MOD_RES (411)..(411): Selenocysteine
  MOD_RES (414)..(415): Selenocysteine
  MOD_RES (420)..(420): Selenocysteine
  MOD_RES (422)..(422): Selenocysteine
  MOD_RES (426)..(426): Selenocysteine
  MOD_RES (433)..(434): Selenocysteine
  MOD_RES (440)..(442): Selenocysteine
  MOD_RES (444)..(444): Selenocysteine
  MOD_RES (456)..(456): Selenocysteine
  MOD_RES (459)..(459): Selenocysteine
  MOD_RES (491)..(491): Selenocysteine
  MOD_RES (499)..(500): Selenocysteine
  MOD_RES (513)..(513): Selenocysteine
  MOD_RES (553)..(553): Selenocysteine
  MOD_RES (556)..(556): Selenocysteine
MALLSEGLDEVPAACLSPCGPPNPXELFSESRRLALEELVAGGPEAFAAFLRRERLARFLNPDEVHAILRAAERPGEEGAAAAAAAEDSFGSSHDCSSGXYFPEQSDLEPPLLELGWPAFYQGAYRGAXRVEXHFQPRGAGEGGPYGCKDALRQQLRSAREVIAVVMDVFXDIDIFRDLQEICRKQGVAVYILLDQALLSQFLDMCMDLKVHPEQEKLMXVRXIXGNIYYARSGXKIIGKVHEKFXLIDGIRVAXGSYSFXWXDGKLNSSNLVILSGQVVEHFDLEFRILYAQSKPISPKLLSHFQSSNKFDHLXNRKPQSKELXLGNLLRMRLARLSSXPRKADLDPEMPAEGKAERKPHDCESSXVSEEDYFSSHRDELQSRKAIDAAXQXEPGEEMPGLSVSEVGXQXSIXXACAGXQXAVIXRIASSQXXIWSRSXXXQXDMDENILFPRGXQSXEGSPVSKMSVSRSSSLKSSSSVSSQGSVASSXGSPASIRXXDFHNPGYPKYLGXPHLELYLSDSLRNLNKERQFHFAGIRSRLNHMLAMLSRRXLFXENHLGLHSGNFSRVNLLAVRDVALYPSYQ

SEQ ID NO: 9630 - protein, 615 aa, Homo sapiens
  MOD_RES (17)..(17): Selenocysteine
  MOD_RES (55)..(55): Selenocysteine
  MOD_RES (130)..(130): Selenocysteine
  MOD_RES (159)..(159): Selenocysteine
  MOD_RES (163)..(163): Selenocysteine
  MOD_RES (201)..(201): Selenocysteine
  MOD_RES (250)..(250): Selenocysteine
  MOD_RES (253)..(253): Selenocysteine
  MOD_RES (255)..(255): Selenocysteine
  MOD_RES (265)..(265): Selenocysteine
  MOD_RES (276)..(276): Selenocysteine
  MOD_RES (285)..(285): Selenocysteine
  MOD_RES (291)..(291): Selenocysteine
  MOD_RES (293)..(293): Selenocysteine
  MOD_RES (345)..(345): Selenocysteine
  MOD_RES (355)..(355): Selenocysteine
  MOD_RES (370)..(370): Selenocysteine
  MOD_RES (397)..(397): Selenocysteine
  MOD_RES (421)..(421): Selenocysteine
  MOD_RES (423)..(423): Selenocysteine
  MOD_RES (439)..(439): Selenocysteine
  MOD_RES (441)..(441): Selenocysteine
  MOD_RES (444)..(445): Selenocysteine
  MOD_RES (450)..(450): Selenocysteine
  MOD_RES (452)..(452): Selenocysteine
  MOD_RES (456)..(456): Selenocysteine
  MOD_RES (463)..(464): Selenocysteine
  MOD_RES (470)..(472): Selenocysteine
  MOD_RES (474)..(474): Selenocysteine
  MOD_RES (486)..(486): Selenocysteine
  MOD_RES (489)..(489): Selenocysteine
  MOD_RES (521)..(521): Selenocysteine
  MOD_RES (529)..(530): Selenocysteine
  MOD_RES (543)..(543): Selenocysteine
  MOD_RES (583)..(583): Selenocysteine
  MOD_RES (586)..(586): Selenocysteine
MARACLIQRLPIKRDCXPVFVRGLSSPSAAMALLSEGLDEVPAACLSPCGPPNPXELFSESRRLALEELVAGGPEAFAAFLRRERLARFLNPDEVHAILRAAERPGEEGAAAAAAAEDSFGSSHDCSSGXYFPEQSDLEPPLLELGWPAFYQGAYRGAXRVEXHFQPRGAGEGGPYGCKDALRQQLRSAREVIAVVMDVFXDIDIFRDLQEICRKQGVAVYILLDQALLSQFLDMCMDLKVHPEQEKLMXVRXIXGNIYYARSGXKIIGKVHEKFXLIDGIRVAXGSYSFXWXDGKLNSSNLVILSGQVVEHFDLEFRILYAQSKPISPKLLSHFQSSNKFDHLXNRKPQSKELXLGNLLRMRLARLSSXPRKADLDPEMPAEGKAERKPHDCESSXVSEEDYFSSHRDELQSRKAIDAAXQXEPGEEMPGLSVSEVGXQXSIXXACAGXQXAVIXRIASSQXXIWSRSXXXQXDMDENILFPRGXQSXEGSPVSKMSVSRSSSLKSSSSVSSQGSVASSXGSPASIRXXDFHNPGYPKYLGXPHLELYLSDSLRNLNKERQFHFAGIRSRLNHMLAMLSRRXLFXENHLGLHSGNFSRVNLLAVRDVALYPSYQ

SEQ ID NO: 9631 - protein, 823 aa, Homo sapiens
  MOD_RES (70)..(70): Selenocysteine
  MOD_RES (84)..(84): Selenocysteine
  MOD_RES (138)..(138): Selenocysteine
  MOD_RES (145)..(145): Selenocysteine
  MOD_RES (184)..(184): Selenocysteine
  MOD_RES (240)..(240): Selenocysteine
  MOD_RES (244)..(244): Selenocysteine
  MOD_RES (248)..(248): Selenocysteine
  MOD_RES (274)..(274): Selenocysteine
  MOD_RES (280)..(280): Selenocysteine
  MOD_RES (339)..(339): Selenocysteine
  MOD_RES (413)..(413): Selenocysteine
  MOD_RES (452)..(452): Selenocysteine
  MOD_RES (509)..(509): Selenocysteine
  MOD_RES (539)..(539): Selenocysteine
  MOD_RES (561)..(561): Selenocysteine
  MOD_RES (589)..(589): Selenocysteine
  MOD_RES (642)..(642): Selenocysteine
  MOD_RES (655)..(655): Selenocysteine
  MOD_RES (658)..(658): Selenocysteine
  MOD_RES (689)..(689): Selenocysteine
  MOD_RES (708)..(708): Selenocysteine
  MOD_RES (731)..(731): Selenocysteine
  MOD_RES (771)..(771): Selenocysteine
  MOD_RES (776)..(776): Selenocysteine
  MOD_RES (800)..(800): Selenocysteine
MAFSQVQCLDDNHVNWRSSESKPEFFYSEEQRLALEALVARGRDAFYEVLKRENIRDFLSELELKRILEXIEVYDPGSEDPRGXGPSQGPEDNGVGDGEEASGADGVPIEAEPLPSLEYWPQKSDRSIPQLDLGWPDXIAYRGVXRASVYMQPPIDGQAHIKEVVRKMISQAQKVIAVVMDMFXDVDIFKDLLDAGFKRKVAVYIIVDESNVKYFLHMCERACMHLGHLKNLRVRSSGGXEFFXRSAXKFKGALAQKFMFVDGDRAVCGSYSFXWSAARXDRNVISVLSGQVVEMFDRQFQELYLMSHSVSLKGIPMEKEPEPEPIVLPSVVPLVPAGXVAKKLVNPKYALVKAKSVDEIAKISSEKQEAKKPLGLKGPALAEHPGELPELLPPIHPGLLHLERANMFEYLPXWVEPDPEPGSDILGYINIIDPNIWNPQPSQMNRIKIRDXSQASAQHQLWKQSQDSRPRPEPCPPPEPSAPQDGVPAENGLPQGDPEPLPPVPKPRXVPVADVLARDSSDIGWVLELPKEEAPQNGXDHRLPRMAGPGHAPLQRQLSVXQDDPESLGVGLPNGLDGVEEEDDDDYVXLSDQDSHSGSSGRGPGPRRPSVASSVSEEYFEVREHSVPLRRRHSEQVANGPXPPPRRQLSAPHIXRGXFVGPQGGSPWAQSRGREEADALKRMQAQRSXDKEAQGQQFHHHRVPASGXRDKDGFPGPPRYRSAADSVQSSXRNAGPAMAGPHHWQAKGGQVPRLLPDPGSPRLAQNARPMXDGRAXEEHPSPFGIPYSKLSQSKHLKARXGGSQWASSDSKRRAQAPRDRKDP

SEQ ID NO: 9632 - protein, 142 aa, Homo sapiens
  MOD_RES (1)..(1): Any amino acid
  MOD_RES (50)..(50): Selenocysteine
  MOD_RES (63)..(63): Selenocysteine
  MOD_RES (66)..(66): Selenocysteine
  MOD_RES (97)..(97): Selenocysteine
  MOD_RES (123)..(123): Selenocysteine
XDSHSGSSGRGPGPRRPSVASSVSEEYFEVREHSVPLRRRHSEQVANGPXPPPRRQLSAPHIXRGXFVGPQGGSPWAQSRGREEADALKRMQAQRSXDKEAQDKVPEPWVPCSLGSVPGARPXWEQCAADHARHDDQAHGEH

SEQ ID NO: 9633 - protein, 154 aa, Homo sapiens
  MOD_RES (126)..(126): Selenocysteine
  MOD_RES (149)..(149): Selenocysteine
MNGLPSAEAPGGAGCALAGLPPLPRGLSGLLNASGGSWRELERVYSQRSRIHDELSRAARAPDGPRHAAGAANAGPAAGPRRPVNLDSALAALRKEMLSAGGAAAVGHVLVVPAVGPVRVNPGLQXPVPRPELLPGPVILPPFGQLLPXGCGPV

SEQ ID NO: 9634 - protein, 176 aa, Homo sapiens
  MOD_RES (156)..(156): Selenocysteine
  MOD_RES (160)..(160): Selenocysteine
MNGLPSAEAPGGAGCALAGLPPLPRGLSGLLNASGGSWRELERVYSQRSRIHDELSRAARAPDGPRHAAGAANAGPAAGPRRPVNLDSALAALRKEMLWGLYESIQDYKHLCQDLSFCQDLSSSLHSDSSYPPDAGLSDDEEPPDASLPPDPPPLXVPQXHNARDQWLQDAFHISL

SEQ ID NO: 9635 - protein, 189 aa, Homo sapiens
  MOD_RES (169)..(169): Selenocysteine
  MOD_RES (173)..(173): Selenocysteine
MNGLPSAEAPGGAGCALAGLPPLPRGLSGLLNASGGSWRELERVYSQRSRIHDELSRAARAPDGPRHAAGAANAGPAAGPRRPVNLDSALAALRKEMVGLRQLDMSLLCQLWGLYESIQDYKHLCQDLSFCQDLSSSLHSDSSYPPDAGLSDDEEPPDASLPPDPPPLXVPQXHNARDQWLQDAFHISL

SEQ ID NO: 9636 - protein, 195 aa, Homo sapiens
  MOD_RES (26)..(26): Selenocysteine
  MOD_RES (45)..(45): Selenocysteine
  MOD_RES (90)..(90): Selenocysteine
  MOD_RES (92)..(92): Selenocysteine
  MOD_RES (114)..(114): Selenocysteine
  MOD_RES (141)..(141): Selenocysteine
AFHVCAAILECLEKRKISWLALFQLXESDLRLGRLLLRVAPDQHXRLLPFAFYSLLSYFHEDAAIREEAFLHVAVDMYLKLVQLFVAGDXSXVSPPAGRSLELKGQAGARASPXSRGAPPSRRLLLPKNVPAQHADYGGHXSPVSLIPRCPKKSFSHVAELLADRGDCDPEVSAALQSRQQAAPDADLSQEPHLF

SEQ ID NO: 9637 - protein, 63 aa, Homo sapiens
  MOD_RES (51)..(51): Selenocysteine
  MOD_RES (54)..(54): Selenocysteine
GPSLSAPHVLGLAALAVHLGESRSALPEVDVGPPAPGAGLPVPALFDSLLXCRXRDSLFFCLK

SEQ ID NO: 9638 - protein, 297 aa, Homo sapiens
  MOD_RES (126)..(126): Selenocysteine
  MOD_RES (131)..(131): Selenocysteine
  MOD_RES (138)..(138): Selenocysteine
  MOD_RES (256)..(256): Selenocysteine
  MOD_RES (266)..(266): Selenocysteine
  MOD_RES (291)..(291): Selenocysteine
MSDSWVPNSASGQDPGGRRRAWAELLAGRVKREKYNPERAQKLKESAVRLLRSHQDLNALLLEVEGPLCKKLSLSKVIDCDSSEAYANHSSSFIGSALQDQASRLGVPVGILSAGMVASSVGQICXAPAEXSHPVLLXVEQRKKLSSLLEFAQYLLAHSMFSRLSFCQELWKIQSSLLLEAVWHLHVQGIVSLQELLESHPDMHAVGSWLFRNLCCLCEQMEASCQHADVARAMLSDFVQMFVLRGFQKNSDLRRXVEPEKMPQVXVDVLQRMLIFALDALAAGVQEESSXHKIVRC

SEQ ID NO: 9639 - protein, 302 aa, Homo sapiens
  MOD_RES (126)..(126): Selenocysteine
  MOD_RES (131)..(131): Selenocysteine
  MOD_RES (138)..(138): Selenocysteine
  MOD_RES (256)..(256): Selenocysteine
  MOD_RES (266)..(266): Selenocysteine
  MOD_RES (291)..(291): Selenocysteine
MSDSWVPNSASGQDPGGRRRAWAELLAGRVKREKYNPERAQKLKESAVRLLRSHQDLNALLLEVEGPLCKKLSLSKVIDCDSSEAYANHSSSFIGSALQDQASRLGVPVGILSAGMVASSVGQICXAPAEXSHPVLLXVEQRKKLSSLLEFAQYLLAHSMFSRLSFCQELWKIQSSLLLEAVWHLHVQGIVSLQELLESHPDMHAVGSWLFRNLCCLCEQMEASCQHADVARAMLSDFVQMFVLRGFQKNSDLRRXVEPEKMPQVXVDVLQRMLIFALDALAAGVQEESSXHKIVRASAARS

SEQ ID NO: 9640 - protein, 316 aa, Homo sapiens
  MOD_RES (126)..(126): Selenocysteine
  MOD_RES (131)..(131): Selenocysteine
  MOD_RES (138)..(138): Selenocysteine
  MOD_RES (256)..(256): Selenocysteine
  MOD_RES (266)..(266): Selenocysteine
  MOD_RES (291)..(291): Selenocysteine
MSDSWVPNSASGQDPGGRRRAWAELLAGRVKREKYNPERAQKLKESAVRLLRSHQDLNALLLEVEGPLCKKLSLSKVIDCDSSEAYANHSSSFIGSALQDQASRLGVPVGILSAGMVASSVGQICXAPAEXSHPVLLXVEQRKKLSSLLEFAQYLLAHSMFSRLSFCQELWKIQSSLLLEAVWHLHVQGIVSLQELLESHPDMHAVGSWLFRNLCCLCEQMEASCQHADVARAMLSDFVQMFVLRGFQKNSDLRRXVEPEKMPQVXVDVLQRMLIFALDALAAGVQEESSXHKIVRCWYVPEGGLPECAAGRCLPN

SEQ ID NO: 9641 - protein, 1424 aa, Homo sapiens
  MOD_RES (126)..(126): Selenocysteine
  MOD_RES (131)..(131): Selenocysteine
  MOD_RES (138)..(138): Selenocysteine
  MOD_RES (256)..(256): Selenocysteine
  MOD_RES (266)..(266): Selenocysteine
  MOD_RES (291)..(291): Selenocysteine
  MOD_RES (306)..(306): Selenocysteine
  MOD_RES (313)..(313): Selenocysteine
  MOD_RES (323)..(323): Selenocysteine
  MOD_RES (325)..(325): Selenocysteine
  MOD_RES (329)..(329): Selenocysteine
  MOD_RES (351)..(351): Selenocysteine
  MOD_RES (356)..(356): Selenocysteine
  MOD_RES (381)..(381): Selenocysteine
  MOD_RES (429)..(429): Selenocysteine
  MOD_RES (459)..(459): Selenocysteine
  MOD_RES (475)..(475): Selenocysteine
  MOD_RES (508)..(508): Selenocysteine
  MOD_RES (516)..(516): Selenocysteine
  MOD_RES (541)..(541): Selenocysteine
  MOD_RES (561)..(561): Selenocysteine
  MOD_RES (567)..(567): Selenocysteine
  MOD_RES (589)..(589): Selenocysteine
  MOD_RES (620)..(620): Selenocysteine
  MOD_RES (654)..(654): Selenocysteine
  MOD_RES (665)..(665): Selenocysteine
  MOD_RES (708)..(708): Selenocysteine
  MOD_RES (724)..(724): Selenocysteine
  MOD_RES (752)..(752): Selenocysteine
  MOD_RES (763)..(763): Selenocysteine
  MOD_RES (823)..(823): Selenocysteine
  MOD_RES (826)..(826): Selenocysteine
  MOD_RES (838)..(838): Selenocysteine
  MOD_RES (855)..(855): Selenocysteine
  MOD_RES (912)..(912): Selenocysteine
  MOD_RES (915)..(915): Selenocysteine
  MOD_RES (928)..(928): Selenocysteine
  MOD_RES (949)..(949): Selenocysteine
  MOD_RES (982)..(982): Selenocysteine
  MOD_RES (1012)..(1012): Selenocysteine
  MOD_RES (1041)..(1041): Selenocysteine
  MOD_RES (1060)..(1060): Selenocysteine
  MOD_RES (1102)..(1102): Selenocysteine
  MOD_RES (1127)..(1127): Selenocysteine
  MOD_RES (1131)..(1131): Selenocysteine
  MOD_RES (1161)..(1161): Selenocysteine
  MOD_RES (1168)..(1168): Selenocysteine
  MOD_RES (1274)..(1274): Selenocysteine
  MOD_RES (1278)..(1279): Selenocysteine
  MOD_RES (1309)..(1309): Selenocysteine
  MOD_RES (1328)..(1328): Selenocysteine
  MOD_RES (1373)..(1373): Selenocysteine
  MOD_RES (1375)..(1375): Selenocysteine
  MOD_RES (1396)..(1396): Selenocysteine
  MOD_RES (1409)..(1409): Selenocysteine
  MOD_RES (1418)..(1418): Selenocysteine
MSDSWVPNSASGQDPGGRRRAWAELLAGRVKREKYNPERAQKLKESAVRLLRSHQDLNALLLEVEGPLCKKLSLSKVIDCDSSEAYANHSSSFIGSALQDQASRLGVPVGILSAGMVASSVGQICXAPAEXSHPVLLXVEQRKKLSSLLEFAQYLLAHSMFSRLSFCQELWKIQSSLLLEAVWHLHVQGIVSLQELLESHPDMHAVGSWLFRNLCCLCEQMEASCQHADVARAMLSDFVQMFVLRGFQKNSDLRRXVEPEKMPQVXVDVLQRMLIFALDALAAGVQEESSXHKIVRCWFGVFSGHXLGSVISXDPLKRFFSHXLXQILXHSPVLKASDAVQMQREWSFARXHPLLXSLYRRLFVMLSAEELVGHLQEVLEXQEVHWQRVLSFVSALVVCFPEAQQLLEDWVARLMAQAFESCQLDSMVXAFLVVRQAALEGPSAFLSYADWFKASFGSXRGYHGCSKKALVFLFXFLSELVPFESPRYLQVHILHPPLVPGKYRSLLXDYISLAKXRLADLKVSIENMGLYEDLSSAGDIXEPHSQALQDVEKAIMVFEHXGNIPVXVMEASIFRRPYYVSHFLPALLXPRVLPKVPDSRVAFIESLKRADKIPPSLYSXYCQACSAAEEKPEDAALGVRAEPNSAEEPLGQLXAALGELRASMXDPSQRDVISAQVAVISERLRAVLGHNEDDSSVEISKIQLSINXPRLEPREHMAVDLLLXSFCQNLMAASSVAPPERQGPWAALFVRXMCGRVLPAVLXRLCQLLRHQGPSLSAPHVLGLAALAVHLGESRSALPEVDVGPPAPGAGLPVPALFDSLLXCRXRDSLFFCLKFCXAAISYSLCKFSSQSRDXLCSCLSPGLIKKFQFLMFRLFSEARQPLSEEDVASLSWRPLHLPSADWQRAALSLWXHRXFREVLKEEDVHLXYQDWLHLELEIQPEADALSDXERQDFHQWAIHEHFLPESSASGGCDGDLQAACXILVNALMDFHQSSRSYDHSENSDLVFGGRXGNEDIISRLQEMVADLELQQDLIVPLGHXPSQEHFLFEIFRRRLQALXSGWSVAASLQRQRELLMYKRILLRLPSSVLCGSSFQAEQPIXARCEQFFHLVNSEMRNFCSHGGALXQDIXAHFFRGLLNACLRSRDPSLMVDFILAKCQXKCPLILXSALVWWPSLEPVLLCRWRRHCQSPLPRELQKLQEGRQFASDFLSPEAASPAPNPDWLSAAALHFAIQQVREENIRKQLKKLDCEREELLVFLFFFSLMGLLSSHLXSNSXXDLPKAFHVCAAILECLEKRKISWLALFQLXESDLRLGRLLLRVAPDQHXRLLPFAFYSLLSYFHEDAAIREEAFLHVAVDMYLKLVQLFVAGDXSXVSPPAGRSLELKGQAGQPRGXDNKSSSFSAAVNXSVPEKELLXRGRAAG

SEQ ID NO: 9642 - protein, 1455 aa, Homo sapiens
  MOD_RES (126)..(126): Selenocysteine
  MOD_RES (131)..(131): Selenocysteine
  MOD_RES (138)..(138): Selenocysteine
  MOD_RES (256)..(256): Selenocysteine
  MOD_RES (266)..(266): Selenocysteine
  MOD_RES (291)..(291): Selenocysteine
  MOD_RES (306)..(306): Selenocysteine
  MOD_RES (313)..(313): Selenocysteine
  MOD_RES (323)..(323): Selenocysteine
  MOD_RES (325)..(325): Selenocysteine
  MOD_RES (329)..(329): Selenocysteine
  MOD_RES (351)..(351): Selenocysteine
  MOD_RES (356)..(356): Selenocysteine
  MOD_RES (381)..(381): Selenocysteine
  MOD_RES (429)..(429): Selenocysteine
  MOD_RES (459)..(459): Selenocysteine
  MOD_RES (475)..(475): Selenocysteine
  MOD_RES (508)..(508): Selenocysteine
  MOD_RES (516)..(516): Selenocysteine
  MOD_RES (541)..(541): Selenocysteine
  MOD_RES (561)..(561): Selenocysteine
  MOD_RES (567)..(567): Selenocysteine
  MOD_RES (589)..(589): Selenocysteine
  MOD_RES (620)..(620): Selenocysteine
  MOD_RES (654)..(654): Selenocysteine
  MOD_RES (665)..(665): Selenocysteine
  MOD_RES (708)..(708): Selenocysteine
  MOD_RES (724)..(724): Selenocysteine
  MOD_RES (752)..(752): Selenocysteine
  MOD_RES (763)..(763): Selenocysteine
  MOD_RES (823)..(823): Selenocysteine
  MOD_RES (826)..(826): Selenocysteine
  MOD_RES (838)..(838): Selenocysteine
  MOD_RES (855)..(855): Selenocysteine
  MOD_RES (912)..(912): Selenocysteine
  MOD_RES (915)..(915): Selenocysteine
  MOD_RES (928)..(928): Selenocysteine
  MOD_RES (949)..(949): Selenocysteine
  MOD_RES (982)..(982): Selenocysteine
  MOD_RES (1012)..(1012): Selenocysteine
  MOD_RES (1041)..(1041): Selenocysteine
  MOD_RES (1060)..(1060): Selenocysteine
  MOD_RES (1102)..(1102): Selenocysteine
  MOD_RES (1127)..(1127): Selenocysteine
  MOD_RES (1131)..(1131): Selenocysteine
  MOD_RES (1161)..(1161): Selenocysteine
  MOD_RES (1168)..(1168): Selenocysteine
  MOD_RES (1274)..(1274): Selenocysteine
  MOD_RES (1278)..(1279): Selenocysteine
  MOD_RES (1309)..(1309): Selenocysteine
  MOD_RES (1328)..(1328): Selenocysteine
  MOD_RES (1373)..(1373): Selenocysteine
  MOD_RES (1375)..(1375): Selenocysteine
  MOD_RES (1397)..(1397): Selenocysteine
MSDSWVPNSASGQDPGGRRRAWAELLAGRVKREKYNPERAQKLKESAVRLLRSHQDLNALLLEVEGPLCKKLSLSKVIDCDSSEAYANHSSSFIGSALQDQASRLGVPVGILSAGMVASSVGQICXAPAEXSHPVLLXVEQRKKLSSLLEFAQYLLAHSMFSRLSFCQELWKIQSSLLLEAVWHLHVQGIVSLQELLESHPDMHAVGSWLFRNLCCLCEQMEASCQHADVARAMLSDFVQMFVLRGFQKNSDLRRXVEPEKMPQVXVDVLQRMLIFALDALAAGVQEESSXHKIVRCWFGVFSGHXLGSVISXDPLKRFFSHXLXQILXHSPVLKASDAVQMQREWSFARXHPLLXSLYRRLFVMLSAEELVGHLQEVLEXQEVHWQRVLSFVSALVVCFPEAQQLLEDWVARLMAQAFESCQLDSMVXAFLVVRQAALEGPSAFLSYADWFKASFGSXRGYHGCSKKALVFLFXFLSELVPFESPRYLQVHILHPPLVPGKYRSLLXDYISLAKXRLADLKVSIENMGLYEDLSSAGDIXEPHSQALQDVEKAIMVFEHXGNIPVXVMEASIFRRPYYVSHFLPALLXPRVLPKVPDSRVAFIESLKRADKIPPSLYSXYCQACSAAEEKPEDAALGVRAEPNSAEEPLGQLXAALGELRASMXDPSQRDVISAQVAVISERLRAVLGHNEDDSSVEISKIQLSINXPRLEPREHMAVDLLLXSFCQNLMAASSVAPPERQGPWAALFVRXMCGRVLPAVLXRLCQLLRHQGPSLSAPHVLGLAALAVHLGESRSALPEVDVGPPAPGAGLPVPALFDSLLXCRXRDSLFFCLKFCXAAISYSLCKFSSQSRDXLCSCLSPGLIKKFQFLMFRLFSEARQPLSEEDVASLSWRPLHLPSADWQRAALSLWXHRXFREVLKEEDVHLXYQDWLHLELEIQPEADALSDXERQDFHQWAIHEHFLPESSASGGCDGDLQAACXILVNALMDFHQSSRSYDHSENSDLVFGGRXGNEDIISRLQEMVADLELQQDLIVPLGHXPSQEHFLFEIFRRRLQALXSGWSVAASLQRQRELLMYKRILLRLPSSVLCGSSFQAEQPIXARCEQFFHLVNSEMRNFCSHGGALXQDIXAHFFRGLLNACLRSRDPSLMVDFILAKCQXKCPLILXSALVWWPSLEPVLLCRWRRHCQSPLPRELQKLQEGRQFASDFLSPEAASPAPNPDWLSAAALHFAIQQVREENIRKQLKKLDCEREELLVFLFFFSLMGLLSSHLXSNSXXDLPKAFHVCAAILECLEKRKISWLALFQLXESDLRLGRLLLRVAPDQHXRLLPFAFYSLLSYFHEDAAIREEAFLHVAVDMYLKLVQLFVAGDXSXVSPPAGRSLELKGQGNPVELIXKARLFLLQLIPRCPKKSFSHVAELLADRGDCDPEVSAALQSRQQAAPDADLSQEPHLF

SEQ ID NO: 9643 - protein, 265 aa, Homo sapiens
  MOD_RES (126)..(126): Selenocysteine
  MOD_RES (131)..(131): Selenocysteine
  MOD_RES (138)..(138): Selenocysteine
  MOD_RES (224)..(224): Selenocysteine
  MOD_RES (234)..(234): Selenocysteine
  MOD_RES (259)..(259): Selenocysteine
MSDSWVPNSASGQDPGGRRRAWAELLAGRVKREKYNPERAQKLKESAVRLLRSHQDLNALLLEVEGPLCKKLSLSKVIDCDSSEAYANHSSSFIGSALQDQASRLGVPVGILSAGMVASSVGQICXAPAEXSHPVLLXVEQRSSLLLEAVWHLHVQGIVSLQELLESHPDMHAVGSWLFRNLCCLCEQMEASCQHADVARAMLSDFVQMFVLRGFQKNSDLRRXVEPEKMPQVXVDVLQRMLIFALDALAAGVQEESSXHKIVRC

SEQ ID NO: 9644 - protein, 114 aa, Homo sapiens
MSDSWVPNSASGQDPGGRRRAWAELLAGRVKREKYNPERAQKLKESAVRLLRSHQDLNALLLEVEGPLCKKLSLSKVIDCDSSEAYANHSSSFIGSSLKAGGSRGYSLSRDGCL

SEQ ID NO: 9645 - protein, 158 aa, Homo sapiens
  MOD_RES (43)..(43): Selenocysteine
  MOD_RES (83)..(83): Selenocysteine
  MOD_RES (106)..(106): Selenocysteine
MSDSWVPNSASGQDPGGRRRAWAELLGRWARQAAGVGGVRPGXVSPVPRSLPARASAGRIPGRRARGAVRGGRPAGAARLPRXRPLLRLGGRPQPPPAGRSLLSRXPPPPAALSGGPGVRGLGLPSAQRPPLASRPRAPLPRALLGRLPRRPRWGRLR

SEQ ID NO: 9646 - protein, 101 aa, Homo sapiens
  MOD_RES (19)..(19): Selenocysteine
  MOD_RES (25)..(25): Selenocysteine
  MOD_RES (47)..(47): Selenocysteine
  MOD_RES (81)..(81): Selenocysteine
PHSQALQDVEKAIMVFEHXGNIPVXVMEASIFRRPYYVSHFLPALLXPRVLPKVPDSRVAFIESLKRWSLALLPRLECNCXILAHCKLCLLGWSNCPASAS

SEQ ID NO: 9647 - protein, 214 aa, Homo sapiens
  MOD_RES (100)..(100): Selenocysteine
  MOD_RES (104)..(105): Selenocysteine
  MOD_RES (135)..(135): Selenocysteine
  MOD_RES (166)..(166): Selenocysteine
  MOD_RES (168)..(168): Selenocysteine
  MOD_RES (186)..(186): Selenocysteine
  MOD_RES (199)..(199): Selenocysteine
  MOD_RES (208)..(208): Selenocysteine
PSLEPVLLCRWRRHCQSPLPRELQKLQEGRQFASDFLSPEAASPAPNPDWLSAAALHFAIQQVREENIRKQLKKLDCEREELLVFLFFFSLMGLLSSHLXSNSXXDLPKAFHVCAAILECLEKRKISWLALFQLXESDAAIREEAFLHVAVDMYLKLVQLFVAGDXSXVSPPAGRSLELKGQPRGXDNKSSSFSAAVNXSVPEKELLXRGRAAG

SEQ ID NO: 9648 - protein, 210 aa, Homo sapiens
  MOD_RES (97)..(97): Selenocysteine
  MOD_RES (102)..(102): Selenocysteine
  MOD_RES (109)..(109): Selenocysteine
VKREKYNPERAQKLKESAVRLLRSHQDLNALLLEVEGPLCKKLSLSKVIDCDSSEAYANHSSSFIGSALQDQASRLGVPVGILSAGMVASSVGQICXAPAEXSHPVLLXVEQRKKLSSLLEFAQYLLAHSMFSRLSFCQELWKIQSSLLLEAVWHLHVQGIVSLQELLESHPDMHAVGSWLFRNLCCLCEQMEASCQHADVARAMLSGHG

SEQ ID NO: 9649 - protein, 41 aa, Homo sapiens
  MOD_RES (1)..(1): Any amino acid
  MOD_RES (16)..(16): Selenocysteine
XALDALAAGVQEESSXHKIVRCWYVPEGGLPECAAGRCLPN

SEQ ID NO: 9650 - protein, 109 aa, Homo sapiens
  MOD_RES (1)..(1): Any amino acid
  MOD_RES (25)..(25): Selenocysteine
  MOD_RES (28)..(28): Selenocysteine
  MOD_RES (41)..(41): Selenocysteine
  MOD_RES (62)..(62): Selenocysteine
  MOD_RES (95)..(95): Selenocysteine
XASLSWRPLHLPSADWQRAALSLWXHRXFREVLKEEDVHLXYQDWLHLELEIQPEADALSDXERQDFHQWAIHEHFLPESSASGGCDGDLQAACXILVNALMDFHQRRW

SEQ ID NO: 9651 - protein, 168 aa, Homo sapiens
  MOD_RES (1)..(1): Any amino acid
  MOD_RES (10)..(10): Selenocysteine
  MOD_RES (52)..(52): Selenocysteine
  MOD_RES (77)..(77): Selenocysteine
  MOD_RES (81)..(81): Selenocysteine
  MOD_RES (111)..(111): Selenocysteine
  MOD_RES (118)..(118): Selenocysteine
XFRRRLQALXSGWSVAASLQRQRELLMYKRILLRLPSSVLCGSSFQAEQPIXARCEQFFHLVNSEMRNFCSHGGALXQDIXAHFFRGLLNACLRSRDPSLMVDFILAKCQXKCPLILXSALVWWPSLEPVLLCRWRRHCQSPLPRELQKLQEGRQFASDYWFSFSSSP

SEQ ID NO: 9652 - protein, 182 aa, Homo sapiens
  MOD_RES (1)..(1): Any amino acid
  MOD_RES (38)..(38): Selenocysteine
  MOD_RES (41)..(41): Selenocysteine
  MOD_RES (54)..(54): Selenocysteine
  MOD_RES (75)..(75): Selenocysteine
  MOD_RES (108)..(108): Selenocysteine
  MOD_RES (138)..(138): Selenocysteine
  MOD_RES (167)..(167): Selenocysteine
XFSEARQPLSEEDVASLSWRPLHLPSADWQRAALSLWXHRXFREVLKEEDVHLXYQDWLHLELEIQPEADALSDXERQDFHQWAIHEHFLPESSASGGCDGDLQAACXILVNALMDFHQSSRSYDHSENSDLVFGGRXGNEDIISRLQDPPPPAFVCPLRQQLPGRXAHHCQMRAVLPLGQL

SEQ ID NO: 9653 - protein, 77 aa, Homo sapiens
  MOD_RES (1)..(1): Any amino acid
  MOD_RES (48)..(48): Selenocysteine
  MOD_RES (51)..(51): Selenocysteine
  MOD_RES (69)..(69): Selenocysteine
XKKFQFLMFRLFSEARQPLSEEDVASLSWRPLHLPSADWQRAALSLWXHRXFREVLKEEDVHLVMVMCXCSPSHLRG

SEQ ID NO: 9654 - protein, 153 aa, Homo sapiens
  MOD_RES (1)..(1): Any amino acid
  MOD_RES (12)..(13): Selenocysteine
  MOD_RES (43)..(43): Selenocysteine
  MOD_RES (62)..(62): Selenocysteine
  MOD_RES (107)..(107): Selenocysteine
  MOD_RES (109)..(109): Selenocysteine
  MOD_RES (131)..(131): Selenocysteine
XKKLDCEREESXXDLPKAFHVCAAILECLEKRKISWLALFQLXESDLRLGRLLLRVAPDQHXRLLPFAFYSLLSYFHEDAAIREEAFLHVAVDMYLKLVQLFVAGDXSXVSPPAGRSLELKGQGNPVELIXKARLFLLQLIPRCPKKSFSHVA

SEQ ID NO: 9655 - protein, 240 aa, Homo sapiens
  MOD_RES (1)..(1): Any amino acid
  MOD_RES (51)..(51): Selenocysteine
  MOD_RES (55)..(56): Selenocysteine
  MOD_RES (86)..(86): Selenocysteine
  MOD_RES (105)..(105): Selenocysteine
  MOD_RES (150)..(150): Selenocysteine
  MOD_RES (152)..(152): Selenocysteine
  MOD_RES (173)..(173): Selenocysteine
  MOD_RES (186)..(186): Selenocysteine
  MOD_RES (195)..(195): Selenocysteine
  MOD_RES (205)..(205): Selenocysteine
XLSAAALHFAIQQVREENIRKQLKKLDCEREELLVFLFFFSLMGLLSSHLXSNSXXDLPKAFHVCAAILECLEKRKISWLALFQLXESDLRLGRLLLRVAPDQHXRLLPFAFYSLLSYFHEDAAIREEAFLHVAVDMYLKLVQLFVAGDXSXVSPPAGRSLELKGQAGQPRGXDNKSSSFSAAVNXSVPEKELLXRGRGNVKMPXLGHVGDMRIDSCLGHVPAWLAIQLDYFCQSPSPVV

SEQ ID NO: 9656 - protein, 51 aa, Homo sapiens
  MOD_RES (1)..(1): Any amino acid
  MOD_RES (6)..(6): Selenocysteine
  MOD_RES (9)..(9): Selenocysteine
  MOD_RES (48)..(48): Selenocysteine
XLSLWXHRXFREVLKEEDVHVGDRSFSCIMPRPESRVCVCSSGKNSSXWSW

SEQ ID NO: 9657 - protein, 125 aa, Homo sapiens
  MOD_RES (1)..(1): Any amino acid
  MOD_RES (82)..(82): Selenocysteine
  MOD_RES (92)..(92): Selenocysteine
  MOD_RES (117)..(117): Selenocysteine
XSLLLEAVWHLHVQGIVSLQELLESHPDMHAVGSWLFRNLCCLCEQMEASCQHADVARAMLSDFVQMFVLRGFQKNSDLRRXVEPEKMPQVXVDVLQRMLIFALDALAAGVQEESSXHKIVRCCI

SEQ ID NO: 9658 - protein, 38 aa, Homo sapiens
  MOD_RES (17)..(17): Selenocysteine
MVSKRRLSKSEDKESLXEDASKMGISLCHPGWSAVVIS

SEQ ID NO: 9659 - protein, 241 aa, Homo sapiens
  MOD_RES (17)..(17): Selenocysteine
  MOD_RES (23)..(23): Selenocysteine
  MOD_RES (32)..(32): Selenocysteine
  MOD_RES (61)..(61): Selenocysteine
  MOD_RES (82)..(82): Selenocysteine
  MOD_RES (152)..(152): Selenocysteine
  MOD_RES (193)..(194): Selenocysteine
  MOD_RES (213)..(213): Selenocysteine
MVSKRRLSKSEDKESLXEDASKXRKQPLSKKXKKSHIANEVEENDSIFVKLLKISGIILKXGESQNQLAVDQIAFQKKLFQXLRRHPSYPKIIEEFVSGLESYIEDEDSFRNCLLSCERLQDEEASMGASYSKSLIKLLLGIDILQPAIIKXLFEKLPEYFFENKNSDEINIPRLIVSQLKWLDRVVDGKDLXXKIMQLISIAPENLQHDIIXSLPEILGDSQHADVGKELRWINPLSSSK

SEQ ID NO: 9660 - protein, 1451 aa, Homo sapiens
  MOD_RES (17)..(17): Selenocysteine
  MOD_RES (23)..(23): Selenocysteine
  MOD_RES (32)..(32): Selenocysteine
  MOD_RES (61)..(61): Selenocysteine
  MOD_RES (82)..(82): Selenocysteine
  MOD_RES (152)..(152): Selenocysteine
  MOD_RES (193)..(194): Selenocysteine
  MOD_RES (213)..(213): Selenocysteine
  MOD_RES (239)..(239): Selenocysteine
  MOD_RES (242)..(242): Selenocysteine
  MOD_RES (290)..(290): Selenocysteine
  MOD_RES (294)..(294): Selenocysteine
  MOD_RES (359)..(359): Selenocysteine
  MOD_RES (371)..(371): Selenocysteine
  MOD_RES (391)..(391): Selenocysteine
  MOD_RES (393)..(393): Selenocysteine
  MOD_RES (395)..(395): Selenocysteine
  MOD_RES (420)..(420): Selenocysteine
  MOD_RES (467)..(467): Selenocysteine
  MOD_RES (479)..(479): Selenocysteine
  MOD_RES (491)..(491): Selenocysteine
  MOD_RES (538)..(538): Selenocysteine
  MOD_RES (566)..(566): Selenocysteine
  MOD_RES (580)..(580): Selenocysteine
  MOD_RES (596)..(596): Selenocysteine
  MOD_RES (608)..(608): Selenocysteine
  MOD_RES (611)..(611): Selenocysteine
  MOD_RES (655)..(655): Selenocysteine
  MOD_RES (691)..(691): Selenocysteine
  MOD_RES (716)..(716): Selenocysteine
  MOD_RES (763)..(763): Selenocysteine
  MOD_RES (789)..(789): Selenocysteine
  MOD_RES (804)..(804): Selenocysteine
  MOD_RES (814)..(814): Selenocysteine
  MOD_RES (833)..(833): Selenocysteine
  MOD_RES (847)..(847): Selenocysteine
  MOD_RES (851)..(851): Selenocysteine
  MOD_RES (854)..(854): Selenocysteine
  MOD_RES (856)..(856): Selenocysteine
  MOD_RES (874)..(874): Selenocysteine
  MOD_RES (879)..(879): Selenocysteine
  MOD_RES (884)..(884): Selenocysteine
  MOD_RES (896)..(896): Selenocysteine
  MOD_RES (908)..(908): Selenocysteine
  MOD_RES (914)..(914): Selenocysteine
  MOD_RES (942)..(942): Selenocysteine
  MOD_RES (948)..(948): Selenocysteine
  MOD_RES (952)..(952): Selenocysteine
  MOD_RES (955)..(955): Selenocysteine
  MOD_RES (981)..(981): Selenocysteine
  MOD_RES (1021)..(1021): Selenocysteine
  MOD_RES (1146)..(1146): Selenocysteine
  MOD_RES (1193)..(1193): Selenocysteine
  MOD_RES (1222)..(1222): Selenocysteine
  MOD_RES (1225)..(1225): Selenocysteine
  MOD_RES (1227)..(1227): Selenocysteine
  MOD_RES (1230)..(1230): Selenocysteine
  MOD_RES (1245)..(1245): Selenocysteine
  MOD_RES (1253)..(1253): Selenocysteine
  MOD_RES (1330)..(1330): Selenocysteine
  MOD_RES (1335)..(1335): Selenocysteine
  MOD_RES (1351)..(1351): Selenocysteine
  MOD_RES (1354)..(1354): Selenocysteine
  MOD_RES (1363)..(1363): Selenocysteine
  MOD_RES (1376)..(1376): Selenocysteine
  MOD_RES (1408)..(1408): Selenocysteine
  MOD_RES (1426)..(1426): Selenocysteine
MVSKRRLSKSEDKESLXEDASKXRKQPLSKKXKKSHIANEVEENDSIFVKLLKISGIILKXGESQNQLAVDQIAFQKKLFQXLRRHPSYPKIIEEFVSGLESYIEDEDSFRNCLLSCERLQDEEASMGASYSKSLIKLLLGIDILQPAIIKXLFEKLPEYFFENKNSDEINIPRLIVSQLKWLDRVVDGKDLXXKIMQLISIAPENLQHDIIXSLPEILGDSQHADVGKELSDLLIENXSLXVPILDVLSSLRLDPNFLLKVRQLVMDKLSSIRLEDLPVIIKFILHSVXAMDXLEVISELREKLDLQHCVLPSRLQASQVKLKSKGRASSSGNQESSGQSCIILLFDVIKSAIRYEKXISEAWIKAIENXASVSEHKVFDLVMLFIIYSXNXQXKKYIDRVLRNKIRSGCIQEQLLQSXFSVHYLVLKDMCSSILSLAQSLLHSLDQSIISFGSLLYKYAFKFFDXYCQQEVVGALVXHICSGNEAEVDXALDVLLELVVLNPSAMMMNAVFVKGILDYLDNISPQQIRKLFYVLSXLAFSKQNEASSHIQDDMHLVIRKQLSSXVFKYKLIGIIGAVXMAGIMAADRSESPSLXQERANLSDEQCXQVXSLLQLVHSCSEQSPQASALYYDEFANLIQHEKLDPKALEWVGHXICNDFQDAFVVDSCVVPEGDFPFPVKALYGLEEYDXQDGIAINLLPLLFSQDFAKDGGPVXSQESGQKLVSPLCLAPYFRLLRLCVERQHNGNLEEIDGLLDCPIFLXDLEPGEKLESMSAKERSFMCSLIFLXLNWFREIVNAFCQEXSPEMKGKVLXRLKHIVELQIILEKYLAVXPDYVPPLGNFDVEXLDIXPHXVXAISAKIRKKGKIERKQKXDGSKXSSSDXLSEEKNSECDPXPSHRGQLNKEFXGKEEKXSLLLHNSHAFFRELDIEVFSILHCGLVXKFILDXEMHXEAXEVVQLGPPELLFLLEDLSQKLESMLXPPIARRVPFLKNKGSRNIGFSHLQQRSAQEIVHCVFQLLXPMCNHLENIHNYFQCLAAENHGVVDGPGVKVQEYHIMSSCYQRLLQIFHGLFAWSGFSQPENQNLLYSALHVLSSRLKQGEHSQPLEELLSQSVHYLQNFHQSIPSFQCALYLIRLLMVILEKSXASAQNKEKIASLARQFLCRVWPSGDKEKSNISNDQLHALLCIYLEHXESILKAIEEIAGVGVPELINSPKDASSSXFPXLXRHXFVVFFRVMMAELEKXVKKIEPGXAADSQQIHEEKLLYWNMAVRDFSILINLIKVFDSHPVLHVCLKYGRLFVEAFLKQCMPLLDFSFRKHREDVLSLLEXFQLDXRLLHHLCGHSKIHQDXRLXQHVPLLKKXLELLVCRVKAMLXLNNCREAFWLGNLKNRDLQGEEIKSQNSQESXADESEDDMSSQASKSKAXEDGEEDEVSAGEKEQDSDESYDDSD

SEQ ID NO: 9661 - protein, 1471 aa, Homo sapiens
  MOD_RES (17)..(17): Selenocysteine
  MOD_RES (23)..(23): Selenocysteine
  MOD_RES (32)..(32): Selenocysteine
  MOD_RES (61)..(61): Selenocysteine
  MOD_RES (82)..(82): Selenocysteine
  MOD_RES (152)..(152): Selenocysteine
  MOD_RES (193)..(194): Selenocysteine
  MOD_RES (213)..(213): Selenocysteine
  MOD_RES (239)..(239): Selenocysteine
  MOD_RES (242)..(242): Selenocysteine
  MOD_RES (290)..(290): Selenocysteine
  MOD_RES (294)..(294): Selenocysteine
  MOD_RES (359)..(359): Selenocysteine
  MOD_RES (371)..(371): Selenocysteine
  MOD_RES (391)..(391): Selenocysteine
  MOD_RES (393)..(393): Selenocysteine
  MOD_RES (395)..(395): Selenocysteine
  MOD_RES (420)..(420): Selenocysteine
  MOD_RES (467)..(467): Selenocysteine
  MOD_RES (479)..(479): Selenocysteine
  MOD_RES (491)..(491): Selenocysteine
  MOD_RES (538)..(538): Selenocysteine
  MOD_RES (566)..(566): Selenocysteine
  MOD_RES (580)..(580): Selenocysteine
  MOD_RES (596)..(596): Selenocysteine
  MOD_RES (608)..(608): Selenocysteine
  MOD_RES (611)..(611): Selenocysteine
  MOD_RES (655)..(655): Selenocysteine
  MOD_RES (691)..(691): Selenocysteine
  MOD_RES (716)..(716): Selenocysteine
  MOD_RES (763)..(763): Selenocysteine
  MOD_RES (789)..(789): Selenocysteine
  MOD_RES (804)..(804): Selenocysteine
  MOD_RES (814)..(814): Selenocysteine
  MOD_RES (833)..(833): Selenocysteine
  MOD_RES (847)..(847): Selenocysteine
  MOD_RES (851)..(851): Selenocysteine
  MOD_RES (854)..(854): Selenocysteine
  MOD_RES (856)..(856): Selenocysteine
  MOD_RES (874)..(874): Selenocysteine
  MOD_RES (879)..(879): Selenocysteine
  MOD_RES (884)..(884): Selenocysteine
  MOD_RES (896)..(896): Selenocysteine
  MOD_RES (908)..(908): Selenocysteine
  MOD_RES (914)..(914): Selenocysteine
  MOD_RES (942)..(942): Selenocysteine
  MOD_RES (948)..(948): Selenocysteine
  MOD_RES (952)..(952): Selenocysteine
  MOD_RES (955)..(955): Selenocysteine
  MOD_RES (981)..(981): Selenocysteine
  MOD_RES (1021)..(1021): Selenocysteine
  MOD_RES (1146)..(1146): Selenocysteine
  MOD_RES (1193)..(1193): Selenocysteine
  MOD_RES (1222)..(1222): Selenocysteine
  MOD_RES (1225)..(1225): Selenocysteine
  MOD_RES (1227)..(1227): Selenocysteine
  MOD_RES (1230)..(1230): Selenocysteine
  MOD_RES (1245)..(1245): Selenocysteine
  MOD_RES (1253)..(1253): Selenocysteine
  MOD_RES (1330)..(1330): Selenocysteine
  MOD_RES (1335)..(1335): Selenocysteine
  MOD_RES (1351)..(1351): Selenocysteine
  MOD_RES (1354)..(1354): Selenocysteine
  MOD_RES (1363)..(1363): Selenocysteine
  MOD_RES (1376)..(1376): Selenocysteine
  MOD_RES (1408)..(1408): Selenocysteine
  MOD_RES (1426)..(1426): Selenocysteine
  MOD_RES (1438)..(1438): Selenocysteine
  MOD_RES (1453)..(1453): Selenocysteine
  MOD_RES (1456)..(1456): Selenocysteine
MVSKRRLSKSEDKESLXEDASKXRKQPLSKKXKKSHIANEVEENDSIFVKLLKISGIILKXGESQNQLAVDQIAFQKKLFQXLRRHPSYPKIIEEFVSGLESYIEDEDSFRNCLLSCERLQDEEASMGASYSKSLIKLLLGIDILQPAIIKXLFEKLPEYFFENKNSDEINIPRLIVSQLKWLDRVVDGKDLXXKIMQLISIAPENLQHDIIXSLPEILGDSQHADVGKELSDLLIENXSLXVPILDVLSSLRLDPNFLLKVRQLVMDKLSSIRLEDLPVIIKFILHSVXAMDXLEVISELREKLDLQHCVLPSRLQASQVKLKSKGRASSSGNQESSGQSCIILLFDVIKSAIRYEKXISEAWIKAIENXASVSEHKVFDLVMLFIIYSXNXQXKKYIDRVLRNKIRSGCIQEQLLQSXFSVHYLVLKDMCSSILSLAQSLLHSLDQSIISFGSLLYKYAFKFFDXYCQQEVVGALVXHICSGNEAEVDXALDVLLELVVLNPSAMMMNAVFVKGILDYLDNISPQQIRKLFYVLSXLAFSKQNEASSHIQDDMHLVIRKQLSSXVFKYKLIGIIGAVXMAGIMAADRSESPSLXQERANLSDEQCXQVXSLLQLVHSCSEQSPQASALYYDEFANLIQHEKLDPKALEWVGHXICNDFQDAFVVDSCVVPEGDFPFPVKALYGLEEYDXQDGIAINLLPLLFSQDFAKDGGPVXSQESGQKLVSPLCLAPYFRLLRLCVERQHNGNLEEIDGLLDCPIFLXDLEPGEKLESMSAKERSFMCSLIFLXLNWFREIVNAFCQEXSPEMKGKVLXRLKHIVELQIILEKYLAVXPDYVPPLGNFDVEXLDIXPHXVXAISAKIRKKGKIERKQKXDGSKXSSSDXLSEEKNSECDPXPSHRGQLNKEFXGKEEKXSLLLHNSHAFFRELDIEVFSILHCGLVXKFILDXEMHXEAXEVVQLGPPELLFLLEDLSQKLESMLXPPIARRVPFLKNKGSRNIGFSHLQQRSAQEIVHCVFQLLXPMCNHLENIHNYFQCLAAENHGVVDGPGVKVQEYHIMSSCYQRLLQIFHGLFAWSGFSQPENQNLLYSALHVLSSRLKQGEHSQPLEELLSQSVHYLQNFHQSIPSFQCALYLIRLLMVILEKSXASAQNKEKIASLARQFLCRVWPSGDKEKSNISNDQLHALLCIYLEHXESILKAIEEIAGVGVPELINSPKDASSSXFPXLXRHXFVVFFRVMMAELEKXVKKIEPGXAADSQQIHEEKLLYWNMAVRDFSILINLIKVFDSHPVLHVCLKYGRLFVEAFLKQCMPLLDFSFRKHREDVLSLLEXFQLDXRLLHHLCGHSKIHQDXRLXQHVPLLKKXLELLVCRVKAMLXLNNCREAFWLGNLKNRDLQGEEIKSQNSQESXADESEDDMSSQASKSKAXEVSLQNPPESGXDGCILLIVLSWWSRXLPXYVYCQMLLCPFPFPP

SEQ ID NO: 9662 - protein, 749 aa, Homo sapiens
  MOD_RES (1)..(1): Any amino acid
  MOD_RES (38)..(38): Selenocysteine
  MOD_RES (66)..(66): Selenocysteine
  MOD_RES (80)..(80): Selenocysteine
  MOD_RES (96)..(96): Selenocysteine
  MOD_RES (108)..(108): Selenocysteine
  MOD_RES (111)..(111): Selenocysteine
  MOD_RES (155)..(155): Selenocysteine
  MOD_RES (191)..(191): Selenocysteine
  MOD_RES (216)..(216): Selenocysteine
  MOD_RES (263)..(263): Selenocysteine
  MOD_RES (289)..(289): Selenocysteine
  MOD_RES (304)..(304): Selenocysteine
  MOD_RES (314)..(314): Selenocysteine
  MOD_RES (333)..(333): Selenocysteine
  MOD_RES (347)..(347): Selenocysteine
  MOD_RES (351)..(351): Selenocysteine
  MOD_RES (354)..(354): Selenocysteine
  MOD_RES (356)..(356): Selenocysteine
  MOD_RES (374)..(374): Selenocysteine
  MOD_RES (379)..(379): Selenocysteine
  MOD_RES (384)..(384): Selenocysteine
  MOD_RES (396)..(396): Selenocysteine
  MOD_RES (408)..(408): Selenocysteine
  MOD_RES (414)..(414): Selenocysteine
  MOD_RES (442)..(442): Selenocysteine
  MOD_RES (448)..(448): Selenocysteine
  MOD_RES (452)..(452): Selenocysteine
  MOD_RES (455)..(455): Selenocysteine
  MOD_RES (481)..(481): Selenocysteine
  MOD_RES (521)..(521): Selenocysteine
  MOD_RES (646)..(646): Selenocysteine
  MOD_RES (693)..(693): Selenocysteine
  MOD_RES (722)..(722): Selenocysteine
  MOD_RES (725)..(725): Selenocysteine
  MOD_RES (727)..(727): Selenocysteine
  MOD_RES (736)..(736): Selenocysteine
  MOD_RES (738)..(738): Selenocysteine
  MOD_RES (743)..(743): Selenocysteine
  MOD_RES (749)..(749): Selenocysteine
XLNPSAMMMNAVFVKGILDYLDNISPQQIRKLFYVLSXLAFSKQNEASSHIQDDMHLVIRKQLSSXVFKYKLIGIIGAVXMAGIMAADRSESPSLXQERANLSDEQCXQVXSLLQLVHSCSEQSPQASALYYDEFANLIQHEKLDPKALEWVGHXICNDFQDAFVVDSCVVPEGDFPFPVKALYGLEEYDXQDGIAINLLPLLFSQDFAKDGGPVXSQESGQKLVSPLCLAPYFRLLRLCVERQHNGNLEEIDGLLDCPIFLXDLEPGEKLESMSAKERSFMCSLIFLXLNWFREIVNAFCQEXSPEMKGKVLXRLKHIVELQIILEKYLAVXPDYVPPLGNFDVEXLDIXPHXVXAISAKIRKKGKIERKQKXDGSKXSSSDXLSEEKNSECDPXPSHRGQLNKEFXGKEEKXSLLLHNSHAFFRELDIEVFSILHCGLVXKFILDXEMHXEAXEVVQLGPPELLFLLEDLSQKLESMLXPPIARRVPFLKNKGSRNIGFSHLQQRSAQEIVHCVFQLLXPMCNHLENIHNYFQCLAAENHGVVDGPGVKVQEYHIMSSCYQRLLQIFHGLFAWSGFSQPENQNLLYSALHVLSSRLKQGEHSQPLEELLSQSVHYLQNFHQSIPSFQCALYLIRLLMVILEKSXASAQNKEKIASLARQFLCRVWPSGDKEKSNISNDQLHALLCIYLEHXESILKAIEEIAGVGVPELINSPKDASSSXFPXLXRFMKRNSSXGXWLFEXSVSSSX

SEQ ID NO: 9663 - protein, 215 aa, Homo sapiens
  MOD_RES (45)..(45): Selenocysteine
  MOD_RES (86)..(86): Selenocysteine
  MOD_RES (95)..(95): Selenocysteine
  MOD_RES (130)..(130): Selenocysteine
  MOD_RES (145)..(145): Selenocysteine
HLAAHLWKHSEALEALENGIKSSRRLENFCRDFELQKVCYLPLNXFLLRPLHRLMHYKQVLERLCKHHPPSHADFRDCRAALAEIXEMVAQLHGXMIKMENFQKLHELKKDLIGIDNLVVPGRVSSSGLXMHCAGSRKEASEGLXFEPFEERPLQSKMSSFHPPGRQLEKHNSVVSSESLCSEEIKQSSDLIFCFFSLRGDSLLYLFPYHIPQKI

SEQ ID NO: 9664 - protein, 129 aa, Homo sapiens
  MOD_RES (9)..(9): Selenocysteine
  MOD_RES (24)..(24): Selenocysteine
  MOD_RES (34)..(34): Selenocysteine
  MOD_RES (50)..(50): Selenocysteine
  MOD_RES (68)..(68): Selenocysteine
  MOD_RES (73)..(73): Selenocysteine
  MOD_RES (100)..(100): Selenocysteine
  MOD_RES (103)..(103): Selenocysteine
  MOD_RES (109)..(109): Selenocysteine
  MOD_RES (120)..(120): Selenocysteine
  MOD_RES (122)..(122): Selenocysteine
MGEIEQRPXPGSRLGAPENSGISXLERGQKPPPXPSGKLVSIKIQMLDDXQEAFEVPMVSSSSFLKAXGSSWXGWVLRCSMKPKHHSHLIEKFGEDRILXHLXGSISYXNWAGSRSLAVXVXEELLNLF

SEQ ID NO: 9665 - protein, 203 aa, Homo sapiens
  MOD_RES (9)..(9): Selenocysteine
  MOD_RES (24)..(24): Selenocysteine
  MOD_RES (34)..(34): Selenocysteine
  MOD_RES (50)..(50): Selenocysteine
  MOD_RES (92)..(92): Selenocysteine
  MOD_RES (125)..(125): Selenocysteine
  MOD_RES (132)..(132): Selenocysteine
  MOD_RES (150)..(150): Selenocysteine
  MOD_RES (154)..(154): Selenocysteine
MGEIEQRPXPGSRLGAPENSGISXLERGQKPPPXPSGKLVSIKIQMLDDXQEAFEVPQRAPGKVLLDAVCNHLNLVEGDYFGLEFPDHKKIXVWLDLLKPIVKQIRRPKHVVVKFVVKFFPPDHXQLQEELXRYLFALQVKQDLAQGRLXCNDXSAALLISHIVQSEIGDFDEALDREHLAKNKYIPQQDALEDKIVEFHHNH

SEQ ID NO: 9666 - protein, 801 aa, Homo sapiens
  MOD_RES (9)..(9): Selenocysteine
  MOD_RES (24)..(24): Selenocysteine
  MOD_RES (34)..(34): Selenocysteine
  MOD_RES (50)..(50): Selenocysteine
  MOD_RES (92)..(92): Selenocysteine
  MOD_RES (125)..(125): Selenocysteine
  MOD_RES (132)..(132): Selenocysteine
  MOD_RES (150)..(150): Selenocysteine
  MOD_RES (154)..(154): Selenocysteine
  MOD_RES (207)..(207): Selenocysteine
  MOD_RES (238)..(238): Selenocysteine
  MOD_RES (247)..(247): Selenocysteine
  MOD_RES (256)..(256): Selenocysteine
  MOD_RES (291)..(291): Selenocysteine
  MOD_RES (343)..(343): Selenocysteine
  MOD_RES (379)..(379): Selenocysteine
  MOD_RES (393)..(393): Selenocysteine
  MOD_RES (396)..(396): Selenocysteine
  MOD_RES (448)..(448): Selenocysteine
  MOD_RES (459)..(459): Selenocysteine
  MOD_RES (471)..(471): Selenocysteine
  MOD_RES (483)..(483): Selenocysteine
  MOD_RES (517)..(517): Selenocysteine
  MOD_RES (526)..(526): Selenocysteine
  MOD_RES (569)..(569): Selenocysteine
  MOD_RES (600)..(600): Selenocysteine
  MOD_RES (618)..(618): Selenocysteine
  MOD_RES (640)..(640): Selenocysteine
  MOD_RES (654)..(654): Selenocysteine
  MOD_RES (672)..(672): Selenocysteine
  MOD_RES (683)..(683): Selenocysteine
  MOD_RES (713)..(713): Selenocysteine
  MOD_RES (743)..(743): Selenocysteine
  MOD_RES (747)..(747): Selenocysteine
  MOD_RES (751)..(751): Selenocysteine
MGEIEQRPXPGSRLGAPENSGISXLERGQKPPPXPSGKLVSIKIQMLDDXQEAFEVPQRAPGKVLLDAVCNHLNLVEGDYFGLEFPDHKKIXVWLDLLKPIVKQIRRPKHVVVKFVVKFFPPDHXQLQEELXRYLFALQVKQDLAQGRLXCNDXSAALLISHIVQSEIGDFDEALDREHLAKNKYIPQQDALEDKIVEFHHNHIGQXPAESDFQLLEIARRLEMYGIRLHPAKDREGXKINLAVANXGILVFQGFXKINAFNWAKVRKLSFKRKRFLIKLRPDANSAYQDXLEFLMASRDFCKSFWKICVEHHAFFRLFEEPKPKPKPVLFSRGSSFRFSGRXQKQVLDYVKEGGHKKVQFERKHSKIHSIRSLASQPXELNSEVLEQSQQSXSLXFGEGAESPGGQSCRRGKEPKVSAGEPGSHPSPAPRRSPAGNKQADGAASAPXEEEEEVVKDRXQQSKPQPPQPSXGPASRAARGSSXSIPFIDCSDVDSEYDLLREQASRSRSRSRSRSQXNDNYEGDLXSGVYLLSREEGRREAGRRASPHSAKSSRPPSGEFLDDDSADIXFDMSGSPRLPRHSSLIDEMFKGSAGHSPLAXPLSPSSSSSSPNMSWDRXGSQGYVSENGHDHREGSMGEDXLPDQGPPYERWSPXSPRPYMRNLPGRCNKSEXDPLILSQVAFXPEAMDGLGGRGKWGQASAAAPEGRSLANGXPPMGAASKVPAVQSVCARGMAGQLAPLQVXEGSXSSGXESSESDSEMLIPGSQPLIFGNPAVLRSPSLLRSRGSLGGLRLSEEQEEDE

SEQ ID NO: 9667 - protein, 1045 aa, Homo sapiens
  MOD_RES (9)..(9): Selenocysteine
  MOD_RES (24)..(24): Selenocysteine
  MOD_RES (34)..(34): Selenocysteine
  MOD_RES (50)..(50): Selenocysteine
  MOD_RES (92)..(92): Selenocysteine
  MOD_RES (125)..(125): Selenocysteine
  MOD_RES (132)..(132): Selenocysteine
  MOD_RES (150)..(150): Selenocysteine
  MOD_RES (154)..(154): Selenocysteine
  MOD_RES (207)..(207): Selenocysteine
  MOD_RES (238)..(238): Selenocysteine
  MOD_RES (247)..(247): Selenocysteine
  MOD_RES (256)..(256): Selenocysteine
  MOD_RES (291)..(291): Selenocysteine
  MOD_RES (343)..(343): Selenocysteine
  MOD_RES (379)..(379): Selenocysteine
  MOD_RES (393)..(393): Selenocysteine
  MOD_RES (396)..(396): Selenocysteine
  MOD_RES (448)..(448): Selenocysteine
  MOD_RES (459)..(459): Selenocysteine
  MOD_RES (471)..(471): Selenocysteine
  MOD_RES (475)..(475): Selenocysteine
  MOD_RES (497)..(497): Selenocysteine
  MOD_RES (506)..(506): Selenocysteine
  MOD_RES (525)..(525): Selenocysteine
  MOD_RES (538)..(538): Selenocysteine
  MOD_RES (550)..(551): Selenocysteine
  MOD_RES (554)..(554): Selenocysteine
  MOD_RES (563)..(563): Selenocysteine
  MOD_RES (569)..(569): Selenocysteine
  MOD_RES (596)..(596): Selenocysteine
  MOD_RES (680)..(680): Selenocysteine
  MOD_RES (721)..(721): Selenocysteine
  MOD_RES (730)..(730): Selenocysteine
  MOD_RES (789)..(789): Selenocysteine
  MOD_RES (794)..(794): Selenocysteine
  MOD_RES (811)..(811): Selenocysteine
  MOD_RES (826)..(826): Selenocysteine
  MOD_RES (883)..(883): Selenocysteine
  MOD_RES (898)..(898): Selenocysteine
  MOD_RES (910)..(910): Selenocysteine
  MOD_RES (920)..(920): Selenocysteine
  MOD_RES (957)..(957): Selenocysteine
  MOD_RES (984)..(984): Selenocysteine
  MOD_RES (1016)..(1016): Selenocysteine
  MOD_RES (1028)..(1028): Selenocysteine
MGEIEQRPXPGSRLGAPENSGISXLERGQKPPPXPSGKLVSIKIQMLDDXQEAFEVPQRAPGKVLLDAVCNHLNLVEGDYFGLEFPDHKKIXVWLDLLKPIVKQIRRPKHVVVKFVVKFFPPDHXQLQEELXRYLFALQVKQDLAQGRLXCNDXSAALLISHIVQSEIGDFDEALDREHLAKNKYIPQQDALEDKIVEFHHNHIGQXPAESDFQLLEIARRLEMYGIRLHPAKDREGXKINLAVANXGILVFQGFXKINAFNWAKVRKLSFKRKRFLIKLRPDANSAYQDXLEFLMASRDFCKSFWKICVEHHAFFRLFEEPKPKPKPVLFSRGSSFRFSGRXQKQVLDYVKEGGHKKVQFERKHSKIHSIRSLASQPXELNSEVLEQSQQSXSLXFGEGAESPGGQSCRRGKEPKVSAGEPGSHPSPAPRRSPAGNKQADGAASAPXEEEEEVVKDRXQQSKPQPPQPSXGSLXGSPHLSELSVNSQGGVAPANVXLSPNLSPDXKQASPLISPLLNDQACPRXDDEDEGRRKRFPXDKAYFIAKEVSXXERXYLKDLEVIXSWFQSXVSKEDAMPEALKSLIFPNFEPLHKFHXNFLKEIEQRLALWEGRSNAQIRDYQRIGDVMLKNIQGMKHLAAHLWKHSEALEALENGIKSSRRLENFCRDFELQKVCYLPLNXFLLRPLHRLMHYKQVLERLCKHHPPSHADFRDCRAALAEIXEMVAQLHGXMIKMENFQKLHELKKDLIGIDNLVVPGREFIRLGSLSKLSGKGLQQRMFFLFNDVLLYXSRGLXASNQFKVHGQLPLYGMXIEESEDEWGVPHCLXLRGQRQSIIVAASSRSEMEKWVEDIQMAIDLAEKSSSPAPEFLASSPPDNKSPDEAXAADQESEDDLSASRXSLERQAPHRGNXMVHVCWHRNXSVSMVDFSIAVENQLSGNLLRKFKNSNGWQKLWVVFXNFCLFFYKSHQDNHPLASLPLLGYSLXIPSESENIQKDYVFKLHFKSHVYYFRAESEYXFERWMEVIRSAXSSASRPHVLSHKESLVY

SEQ ID NO: 9668 - protein, 1076 aa, Homo sapiens
  MOD_RES (9)..(9): Selenocysteine
  MOD_RES (24)..(24): Selenocysteine
  MOD_RES (34)..(34): Selenocysteine
  MOD_RES (50)..(50): Selenocysteine
  MOD_RES (92)..(92): Selenocysteine
  MOD_RES (125)..(125): Selenocysteine
  MOD_RES (132)..(132): Selenocysteine
  MOD_RES (150)..(150): Selenocysteine
  MOD_RES (154)..(154): Selenocysteine
  MOD_RES (207)..(207): Selenocysteine
  MOD_RES (238)..(238): Selenocysteine
  MOD_RES (247)..(247): Selenocysteine
  MOD_RES (256)..(256): Selenocysteine
  MOD_RES (291)..(291): Selenocysteine
  MOD_RES (343)..(343): Selenocysteine
  MOD_RES (379)..(379): Selenocysteine
  MOD_RES (393)..(393): Selenocysteine
  MOD_RES (396)..(396): Selenocysteine
  MOD_RES (448)..(448): Selenocysteine
  MOD_RES (459)..(459): Selenocysteine
  MOD_RES (471)..(471): Selenocysteine
  MOD_RES (475)..(475): Selenocysteine
  MOD_RES (497)..(497): Selenocysteine
  MOD_RES (506)..(506): Selenocysteine
  MOD_RES (525)..(525): Selenocysteine
  MOD_RES (538)..(538): Selenocysteine
  MOD_RES (550)..(551): Selenocysteine
  MOD_RES (554)..(554): Selenocysteine
  MOD_RES (563)..(563): Selenocysteine
  MOD_RES (569)..(569): Selenocysteine
  MOD_RES (596)..(596): Selenocysteine
  MOD_RES (680)..(680): Selenocysteine
  MOD_RES (721)..(721): Selenocysteine
  MOD_RES (730)..(730): Selenocysteine
  MOD_RES (767)..(767): Selenocysteine
  MOD_RES (820)..(820): Selenocysteine
  MOD_RES (825)..(825): Selenocysteine
  MOD_RES (842)..(842): Selenocysteine
  MOD_RES (857)..(857): Selenocysteine
  MOD_RES (914)..(914): Selenocysteine
  MOD_RES (929)..(929): Selenocysteine
  MOD_RES (941)..(941): Selenocysteine
  MOD_RES (951)..(951): Selenocysteine
  MOD_RES (988)..(988): Selenocysteine
  MOD_RES (1015)..(1015): Selenocysteine
  MOD_RES (1047)..(1047): Selenocysteine
  MOD_RES (1059)..(1059): Selenocysteine
MGEIEQRPXPGSRLGAPENSGISXLERGQKPPPXPSGKLVSIKIQMLDDXQEAFEVPQRAPGKVLLDAVCNHLNLVEGDYFGLEFPDHKKIXVWLDLLKPIVKQIRRPKHVVVKFVVKFFPPDHXQLQEELXRYLFALQVKQDLAQGRLXCNDXSAALLISHIVQSEIGDFDEALDREHLAKNKYIPQQDALEDKIVEFHHNHIGQXPAESDFQLLEIARRLEMYGIRLHPAKDREGXKINLAVANXGILVFQGFXKINAFNWAKVRKLSFKRKRFLIKLRPDANSAYQDXLEFLMASRDFCKSFWKICVEHHAFFRLFEEPKPKPKPVLFSRGSSFRFSGRXQKQVLDYVKEGGHKKVQFERKHSKIHSIRSLASQPXELNSEVLEQSQQSXSLXFGEGAESPGGQSCRRGKEPKVSAGEPGSHPSPAPRRSPAGNKQADGAASAPXEEEEEVVKDRXQQSKPQPPQPSXGSLXGSPHLSELSVNSQGGVAPANVXLSPNLSPDXKQASPLISPLLNDQACPRXDDEDEGRRKRFPXDKAYFIAKEVSXXERXYLKDLEVIXSWFQSXVSKEDAMPEALKSLIFPNFEPLHKFHXNFLKEIEQRLALWEGRSNAQIRDYQRIGDVMLKNIQGMKHLAAHLWKHSEALEALENGIKSSRRLENFCRDFELQKVCYLPLNXFLLRPLHRLMHYKQVLERLCKHHPPSHADFRDCRAALAEIXEMVAQLHGXMIKMENFQKLHELKKDLIGIDNLVVPGRPGSFSLIRXPHLGQARRIPCAPERRPLLLVKEFIRLGSLSKLSGKGLQQRMFFLFNDVLLYXSRGLXASNQFKVHGQLPLYGMXIEESEDEWGVPHCLXLRGQRQSIIVAASSRSEMEKWVEDIQMAIDLAEKSSSPAPEFLASSPPDNKSPDEAXAADQESEDDLSASRXSLERQAPHRGNXMVHVCWHRNXSVSMVDFSIAVENQLSGNLLRKFKNSNGWQKLWVVFXNFCLFFYKSHQDNHPLASLPLLGYSLXIPSESENIQKDYVFKLHFKSHVYYFRAESEYXFERWMEVIRSAXSSASRPHVLSHKESLVY

SEQ ID NO: 9669 - protein, 248 aa, Homo sapiens
  MOD_RES (1)..(1): Any amino acid
  MOD_RES (33)..(33): Selenocysteine
  MOD_RES (74)..(74): Selenocysteine
  MOD_RES (83)..(83): Selenocysteine
  MOD_RES (119)..(119): Selenocysteine
  MOD_RES (124)..(124): Selenocysteine
  MOD_RES (141)..(141): Selenocysteine
  MOD_RES (156)..(156): Selenocysteine
  MOD_RES (213)..(213): Selenocysteine
  MOD_RES (228)..(228): Selenocysteine
  MOD_RES (240)..(240): Selenocysteine
XEALENGIKSSRRLENFCRDFELQKVCYLPLNXFLLRPLHRLMHYKQVLERLCKHHPPSHADFRDCRAALAEIXEMVAQLHGXMIKMENFQKLHELKKDLIGIDNLVVPGRFNDVLLYXSRGLXASNQFKVHGQLPLYGMXIEESEDEWGVPHCLXLRGQRQSIIVAASSRSEMEKWVEDIQMAIDLAEKSSSPAPEFLASSPPDNKSPDEAXAADQESEDDLSASRXSLERQAPHRGNXMVHVCWHR

SEQ ID NO: 9670 - protein, 171 aa, Homo sapiens
  MOD_RES (1)..(1): Any amino acid
  MOD_RES (18)..(18): Selenocysteine
  MOD_RES (22)..(22): Selenocysteine
  MOD_RES (75)..(75): Selenocysteine
  MOD_RES (106)..(106): Selenocysteine
  MOD_RES (115)..(115): Selenocysteine
  MOD_RES (124)..(124): Selenocysteine
  MOD_RES (170)..(171): Selenocysteine
XYLFALQVKQDLAQGRLXCNDXSAALLISHIVQSEIGDFDEALDREHLAKNKYIPQQDALEDKIVEFHHNHIGQXPAESDFQLLEIARRLEMYGIRLHPAKDREGXKINLAVANXGILVFQGFXKINAFNWAKVRKLSFKRKRFLIKLRPDANFLGWPGARSRGRLHREXX

SEQ ID NO: 9671 - protein, 93 aa, Homo sapiens
  MOD_RES (7)..(7): Selenocysteine
  MOD_RES (13)..(13): Selenocysteine
  MOD_RES (22)..(22): Selenocysteine
  MOD_RES (28)..(28): Selenocysteine
  MOD_RES (34)..(34): Selenocysteine
  MOD_RES (54)..(54): Selenocysteine
  MOD_RES (71)..(71): Selenocysteine
  MOD_RES (92)..(92): Selenocysteine
MGEIEGXYRVLQXAGMRLGAQXPVGVSXLEPGQXLLPRMQEKHLHLRVKLLDNXMEIFDIEPKCDGQVLLXQVWKRLNLVECDYFGMEFQNXQ

SEQ ID NO: 9672 - protein, 134 aa, Homo sapiens
  MOD_RES (7)..(7): Selenocysteine
  MOD_RES (13)..(13): Selenocysteine
  MOD_RES (22)..(22): Selenocysteine
  MOD_RES (28)..(28): Selenocysteine
  MOD_RES (34)..(34): Selenocysteine
  MOD_RES (54)..(54): Selenocysteine
  MOD_RES (71)..(71): Selenocysteine
  MOD_RES (92)..(92): Selenocysteine
MGEIEGXYRVLQXAGMRLGAQXPVGVSXLEPGQXLLPRMQEKHLHLRVKLLDNXMEIFDIEPKCDGQVLLXQVWKRLNLVECDYFGMEFQNXQSYWIWLEPMKPIIRQIRRPKNVVLRLAVKFFPPDPGQLQEE

SEQ ID NO: 9673 - protein, 638 aa, Homo sapiens
  MOD_RES (7)..(7): Selenocysteine
  MOD_RES (13)..(13): Selenocysteine
  MOD_RES (22)..(22): Selenocysteine
  MOD_RES (28)..(28): Selenocysteine
  MOD_RES (34)..(34): Selenocysteine
  MOD_RES (54)..(54): Selenocysteine
  MOD_RES (71)..(71): Selenocysteine
  MOD_RES (92)..(92): Selenocysteine
  MOD_RES (136)..(136): Selenocysteine
  MOD_RES (154)..(154): Selenocysteine
  MOD_RES (158)..(159): Selenocysteine
  MOD_RES (164)..(164): Selenocysteine
  MOD_RES (178)..(178): Selenocysteine
  MOD_RES (211)..(211): Selenocysteine
  MOD_RES (242)..(242): Selenocysteine
  MOD_RES (259)..(260): Selenocysteine
  MOD_RES (264)..(264): Selenocysteine
  MOD_RES (295)..(295): Selenocysteine
  MOD_RES (318)..(318): Selenocysteine
  MOD_RES (347)..(347): Selenocysteine
  MOD_RES (372)..(372): Selenocysteine
  MOD_RES (374)..(374): Selenocysteine
  MOD_RES (380)..(380): Selenocysteine
  MOD_RES (396)..(396): Selenocysteine
  MOD_RES (413)..(413): Selenocysteine
  MOD_RES (430)..(430): Selenocysteine
  MOD_RES (455)..(455): Selenocysteine
  MOD_RES (474)..(474): Selenocysteine
  MOD_RES (546)..(546): Selenocysteine
  MOD_RES (549)..(549): Selenocysteine
  MOD_RES (558)..(558): Selenocysteine
  MOD_RES (574)..(574): Selenocysteine
  MOD_RES (577)..(577): Selenocysteine
  MOD_RES (612)..(612): Selenocysteine
  MOD_RES (637)..(638): Selenocysteine
MGEIEGXYRVLQXAGMRLGAQXPVGVSXLEPGQXLLPRMQEKHLHLRVKLLDNXMEIFDIEPKCDGQVLLXQVWKRLNLVECDYFGMEFQNXQSYWIWLEPMKPIIRQIRRPKNVVLRLAVKFFPPDPGQLQEEYXRYLFALQLKRDLLEERLXCADXXAALLXSHLLQSEIGDYDEXLDREHLKVNEYLPGQQHCLEKILEFHQKHVGQXPAESDFQVLEIARKLEMYGIRFHMASDREGXKIQLAVSHMGVLVFQGXXKINXFNWSKVRKLSFKRKRFLIKLHPEVHGPYQDXLEFLLGSRDECKNFWKICVEYHXFFRLLDQPKPKAKAVFFSRGSSFRYSGRXQKQLVDYFKDSGMKRIPYERRHSKXHXSVRALXADLPKQSISFPEGLRXPASPSSANAFYSLSPSXLVPSGLPEFKDSSSSLXDPQVSYVKSPAAERRSGAVAGGPDXPSAQPLGPPALQPGPGLSXKSPQPSPSSRKSPLSLSPAFQVPLGPAEQGSSPLLSPVLSDAGGAGMDCEEPRHKRVPADEAYFIVKEILAXERXYLKDLEVIXVWFRSAVVKEDAMPAXLMXLLFSNIDPIYEFHRGFLREVEQRLALWEGPSKAHXKGSHQRIGDILLRNMRQLKAAHEFXX

SEQ ID NO: 9674 - protein, 647 aa, Homo sapiens
  MOD_RES (7)..(7): Selenocysteine
  MOD_RES (13)..(13): Selenocysteine
  MOD_RES (22)..(22): Selenocysteine
  MOD_RES (28)..(28): Selenocysteine
  MOD_RES (34)..(34): Selenocysteine
  MOD_RES (54)..(54): Selenocysteine
  MOD_RES (71)..(71): Selenocysteine
  MOD_RES (92)..(92): Selenocysteine
  MOD_RES (136)..(136): Selenocysteine
  MOD_RES (154)..(154): Selenocysteine
  MOD_RES (158)..(159): Selenocysteine
  MOD_RES (164)..(164): Selenocysteine
  MOD_RES (178)..(178): Selenocysteine
  MOD_RES (211)..(211): Selenocysteine
  MOD_RES (242)..(242): Selenocysteine
  MOD_RES (259)..(260): Selenocysteine
  MOD_RES (264)..(264): Selenocysteine
  MOD_RES (295)..(295): Selenocysteine
  MOD_RES (318)..(318): Selenocysteine
  MOD_RES (347)..(347): Selenocysteine
  MOD_RES (372)..(372): Selenocysteine
  MOD_RES (374)..(374): Selenocysteine
  MOD_RES (380)..(380): Selenocysteine
  MOD_RES (396)..(396): Selenocysteine
  MOD_RES (413)..(413): Selenocysteine
  MOD_RES (430)..(430): Selenocysteine
  MOD_RES (455)..(455): Selenocysteine
  MOD_RES (474)..(474): Selenocysteine
  MOD_RES (546)..(546): Selenocysteine
  MOD_RES (549)..(549): Selenocysteine
  MOD_RES (558)..(558): Selenocysteine
  MOD_RES (574)..(574): Selenocysteine
  MOD_RES (577)..(577): Selenocysteine
  MOD_RES (612)..(612): Selenocysteine
  MOD_RES (644)..(644): Selenocysteine
MGEIEGXYRVLQXAGMRLGAQXPVGVSXLEPGQXLLPRMQEKHLHLRVKLLDNXMEIFDIEPKCDGQVLLXQVWKRLNLVECDYFGMEFQNXQSYWIWLEPMKPIIRQIRRPKNVVLRLAVKFFPPDPGQLQEEYXRYLFALQLKRDLLEERLXCADXXAALLXSHLLQSEIGDYDEXLDREHLKVNEYLPGQQHCLEKILEFHQKHVGQXPAESDFQVLEIARKLEMYGIRFHMASDREGXKIQLAVSHMGVLVFQGXXKINXFNWSKVRKLSFKRKRFLIKLHPEVHGPYQDXLEFLLGSRDECKNFWKICVEYHXFFRLLDQPKPKAKAVFFSRGSSFRYSGRXQKQLVDYFKDSGMKRIPYERRHSKXHXSVRALXADLPKQSISFPEGLRXPASPSSANAFYSLSPSXLVPSGLPEFKDSSSSLXDPQVSYVKSPAAERRSGAVAGGPDXPSAQPLGPPALQPGPGLSXKSPQPSPSSRKSPLSLSPAFQVPLGPAEQGSSPLLSPVLSDAGGAGMDCEEPRHKRVPADEAYFIVKEILAXERXYLKDLEVIXVWFRSAVVKEDAMPAXLMXLLFSNIDPIYEFHRGFLREVEQRLALWEGPSKAHXKGSHQRIGDILLRNMRQLKVFQLHEGHVAGVXKME

SEQ ID NO: 9675 - protein, 1054 aa, Homo sapiens
  MOD_RES (7)..(7): Selenocysteine
  MOD_RES (13)..(13): Selenocysteine
  MOD_RES (22)..(22): Selenocysteine
  MOD_RES (28)..(28): Selenocysteine
  MOD_RES (34)..(34): Selenocysteine
  MOD_RES (54)..(54): Selenocysteine
  MOD_RES (71)..(71): Selenocysteine
  MOD_RES (92)..(92): Selenocysteine
  MOD_RES (136)..(136): Selenocysteine
  MOD_RES (154)..(154): Selenocysteine
  MOD_RES (158)..(159): Selenocysteine
  MOD_RES (164)..(164): Selenocysteine
  MOD_RES (178)..(178): Selenocysteine
  MOD_RES (211)..(211): Selenocysteine
  MOD_RES (242)..(242): Selenocysteine
  MOD_RES (259)..(260): Selenocysteine
  MOD_RES (264)..(264): Selenocysteine
  MOD_RES (295)..(295): Selenocysteine
  MOD_RES (318)..(318): Selenocysteine
  MOD_RES (347)..(347): Selenocysteine
  MOD_RES (372)..(372): Selenocysteine
  MOD_RES (374)..(374): Selenocysteine
  MOD_RES (380)..(380): Selenocysteine
  MOD_RES (396)..(396): Selenocysteine
  MOD_RES (413)..(413): Selenocysteine
  MOD_RES (430)..(430): Selenocysteine
  MOD_RES (455)..(455): Selenocysteine
  MOD_RES (474)..(474): Selenocysteine
  MOD_RES (546)..(546): Selenocysteine
  MOD_RES (549)..(549): Selenocysteine
  MOD_RES (558)..(558): Selenocysteine
  MOD_RES (574)..(574): Selenocysteine
  MOD_RES (577)..(577): Selenocysteine
  MOD_RES (612)..(612): Selenocysteine
  MOD_RES (634)..(634): Selenocysteine
  MOD_RES (645)..(645): Selenocysteine
  MOD_RES (651)..(651): Selenocysteine
  MOD_RES (676)..(676): Selenocysteine
  MOD_RES (717)..(717): Selenocysteine
  MOD_RES (720)..(722): Selenocysteine
  MOD_RES (737)..(737): Selenocysteine
  MOD_RES (766)..(766): Selenocysteine
  MOD_RES (785)..(785): Selenocysteine
  MOD_RES (792)..(792): Selenocysteine
  MOD_RES (822)..(822): Selenocysteine
  MOD_RES (829)..(829): Selenocysteine
  MOD_RES (836)..(836): Selenocysteine
  MOD_RES (860)..(860): Selenocysteine
  MOD_RES (868)..(868): Selenocysteine
  MOD_RES (871)..(871): Selenocysteine
  MOD_RES (907)..(908): Selenocysteine
  MOD_RES (917)..(917): Selenocysteine
  MOD_RES (954)..(954): Selenocysteine
  MOD_RES (963)..(963): Selenocysteine
  MOD_RES (1013)..(1013): Selenocysteine
MGEIEGXYRVLQXAGMRLGAQXPVGVSXLEPGQXLLPRMQEKHLHLRVKLLDNXMEIFDIEPKCDGQVLLXQVWKRLNLVECDYFGMEFQNXQSYWIWLEPMKPIIRQIRRPKNVVLRLAVKFFPPDPGQLQEEYXRYLFALQLKRDLLEERLXCADXXAALLXSHLLQSEIGDYDEXLDREHLKVNEYLPGQQHCLEKILEFHQKHVGQXPAESDFQVLEIARKLEMYGIRFHMASDREGXKIQLAVSHMGVLVFQGXXKINXFNWSKVRKLSFKRKRFLIKLHPEVHGPYQDXLEFLLGSRDECKNFWKICVEYHXFFRLLDQPKPKAKAVFFSRGSSFRYSGRXQKQLVDYFKDSGMKRIPYERRHSKXHXSVRALXADLPKQSISFPEGLRXPASPSSANAFYSLSPSXLVPSGLPEFKDSSSSLXDPQVSYVKSPAAERRSGAVAGGPDXPSAQPLGPPALQPGPGLSXKSPQPSPSSRKSPLSLSPAFQVPLGPAEQGSSPLLSPVLSDAGGAGMDCEEPRHKRVPADEAYFIVKEILAXERXYLKDLEVIXVWFRSAVVKEDAMPAXLMXLLFSNIDPIYEFHRGFLREVEQRLALWEGPSKAHXKGSHQRIGDILLRNMRQLKEFXSYFQRHDEVLXELEKAXKRCKKLEAVYKEFELQKVCYLPLNXFLLKPIQRLLHYRLLLRRLCGHYSPGHHDYADCHDALKAIXEVXXXLQHILIRLENLQKLXELQRDLVGIENLIAPGREFIREGCLHKLXKKGLQQRMFFLFSDMLLYXSKGVAGXSHFRIRGLLPLQGMLVEESDNEWSVPHCFXIYAAQKXIVVAASXRLEKEKWMLDLNSAIQAAKSGGDXAPALPGRXVCXRPPRSPNEVSLEQESEDDARGVRSSLEGHGQHRANXXMHVCWYRNXSVSRADHSAAVENQLSGYLLRKFKNSHGWQKLWVVFXNFCLFFYKXHQDDYPLASLPLLGYSVSIPREADGIHKDYVFKLQFKSHVYFFRAESKYXFERWMEVIQGASSSAGRAPSIVQDGPQPSSGLEGMVRGKEE

SEQ ID NO: 9676 - protein, 482 aa, Homo sapiens
  MOD_RES (5)..(5): Selenocysteine
  MOD_RES (34)..(34): Selenocysteine
  MOD_RES (59)..(59): Selenocysteine
  MOD_RES (61)..(61): Selenocysteine
  MOD_RES (67)..(67): Selenocysteine
  MOD_RES (83)..(83): Selenocysteine
  MOD_RES (100)..(100): Selenocysteine
  MOD_RES (117)..(117): Selenocysteine
  MOD_RES (142)..(142): Selenocysteine
  MOD_RES (185)..(185): Selenocysteine
  MOD_RES (206)..(207): Selenocysteine
  MOD_RES (230)..(230): Selenocysteine
  MOD_RES (232)..(232): Selenocysteine
  MOD_RES (307)..(307): Selenocysteine
  MOD_RES (328)..(328): Selenocysteine
  MOD_RES (350)..(350): Selenocysteine
  MOD_RES (376)..(376): Selenocysteine
  MOD_RES (421)..(422): Selenocysteine
  MOD_RES (429)..(429): Selenocysteine
  MOD_RES (438)..(438): Selenocysteine
  MOD_RES (455)..(455): Selenocysteine
  MOD_RES (472)..(472): Selenocysteine
VEYHXFFRLLDQPKPKAKAVFFSRGSSFRYSGRXQKQLVDYFKDSGMKRIPYERRHSKXHXSVRALXADLPKQSISFPEGLRXPASPSSANAFYSLSPSXLVPSGLPEFKDSSSSLXDPQVSYVKSPAAERRSGAVAGGPDXPSAQPLGPPALQPGPGVGFCHVVSSCGSVCAGGQSFSALDLDXGRAGRELSAACKNDNGGDDFXXGSFPSGGEHRCDRQCRGGAPAFXLXNAQLQVSEEFIDDDPADISFFAGGSEAFSFPYGSVVPQESQASAQPLVAPPLCELPGSARSSPDRYSMEAVDMNXEDGFAFEEESDFNGNAHPSDXSELFEVKAQASRMQRLLGPSEXSSLRNSQSENSSLNNMPLRGGLSVHXCSSASQSEASSMVNFPAYSVRSESSSAFQFSDIIDQLEQLSYPPXXAEDSSSXESDSWDSEXEAPLDISLFFSNPFAHXSGERVPFDLQNNLKNLXPGEQIDKNPS

SEQ ID NO: 9677 - protein, 79 aa, Homo sapiens
  MOD_RES (1)..(1): Any amino acid
  MOD_RES (15)..(15): Selenocysteine
  MOD_RES (18)..(18): Selenocysteine
  MOD_RES (53)..(53): Selenocysteine
  MOD_RES (78)..(79): Selenocysteine
XFRSAVVKEDAMPAXLMXLLFSNIDPIYEFHRGFLREVEQRLALWEGPSKAHXKGSHQRIGDILLRNMRQLKAAHEFXX

SEQ ID NO: 9678 - protein, 56 aa, Homo sapiens
  MOD_RES (1)..(1): Any amino acid
  MOD_RES (15)..(15): Selenocysteine
XKSHVYFFRAESKYXFERWMEVIQGASSSAGRAPSIVQDGPQPSSGLEGMVRGKEE

SEQ ID NO: 9679 - protein, 196 aa, Homo sapiens
  MOD_RES (1)..(1): Any amino acid
  MOD_RES (16)..(16): Selenocysteine
  MOD_RES (23)..(23): Selenocysteine
  MOD_RES (30)..(30): Selenocysteine
  MOD_RES (54)..(54): Selenocysteine
  MOD_RES (62)..(62): Selenocysteine
  MOD_RES (65)..(65): Selenocysteine
  MOD_RES (101)..(102): Selenocysteine
  MOD_RES (111)..(111): Selenocysteine
  MOD_RES (148)..(148): Selenocysteine
  MOD_RES (157)..(157): Selenocysteine
  MOD_RES (184)..(184): Selenocysteine
XVEESDNEWSVPHCFXIYAAQKXIVVAASXRLEKEKWMLDLNSAIQAAKSGGDXAPALPGRXVCXRPPRSPNEVSLEQESEDDARGVRSSLEGHGQHRANXXMHVCWYRNXSVSRADHSAAVENQLSGYLLRKFKNSHGWQKLWVVFXNFCLFFYKXHQVDGGDPGGQQLSREGPKHRAGWPPXLLRAGGDGQGEG

SEQ ID NO: 9680 - protein, 477 aa, Homo sapiens
  MOD_RES (58)..(58): Selenocysteine
  MOD_RES (64)..(64): Selenocysteine
  MOD_RES (213)..(213): Selenocysteine
  MOD_RES (217)..(217): Selenocysteine
  MOD_RES (245)..(245): Selenocysteine
  MOD_RES (268)..(268): Selenocysteine
  MOD_RES (295)..(295): Selenocysteine
  MOD_RES (297)..(298): Selenocysteine
  MOD_RES (315)..(315): Selenocysteine
  MOD_RES (330)..(330): Selenocysteine
  MOD_RES (334)..(334): Selenocysteine
  MOD_RES (352)..(352): Selenocysteine
  MOD_RES (365)..(365): Selenocysteine
  MOD_RES (370)..(370): Selenocysteine
  MOD_RES (382)..(382): Selenocysteine
  MOD_RES (434)..(434): Selenocysteine
  MOD_RES (473)..(473): Selenocysteine
MADGQVAELLLRRLEASDGGLDSAELAAELGMEHQAVVGAVKSLQALGEVIEAELRSXKHWELXAEGEEIAREGSHEARVFRSIPPEGLAQSELMRLPSGKVGFSKAMSNKWIRVDKSAADGPRVFRVVDSMEDEVQRRLQLVRGGQAEKLGEKERSELRKRKLLAEVGSWRDRPFKPYNFLAHGVLPDSGHLHPLLKVRSQFRQIFLEMGFXEMPXDNFIESSFWNFDALFQPQQHPARDQHDXFFLRDPAEALQLPMDYVQRVKRXHSQGGYGSQGYKYNWKLDEARKNLLRXHXXSASARALYRLAQKKPFXPVKYFSIDRVFRNEXLDAXHLAEFHQIEGVVADHGLXLGHLMGVLREFFXKLGIXQLRFKPAYNPYXEPSMEVFSYHQGLKKWVEVGNSGVFRPEMLLPMGLPENVSVIAWGLSLERPXMIKYGINNIRELVGHKVNLQMVYDSPLCRLDAEPRPPPXQEAA

SEQ ID NO: 9681 - protein, 235 aa, Homo sapiens
  MOD_RES (58)..(58): Selenocysteine
  MOD_RES (64)..(64): Selenocysteine
  MOD_RES (169)..(169): Selenocysteine
  MOD_RES (172)..(172): Selenocysteine
  MOD_RES (183)..(183): Selenocysteine
  MOD_RES (190)..(190): Selenocysteine
MADGQVAELLLRRLEASDGGLDSAELAAELGMEHQAVVGAVKSLQALGEVIEAELRSXKHWELXAEGEEIAREGSHEARVFRSIPPEGLAQSELMRLPSGKVGFSKAMSNKWIRVDKSAADGPRVFRVVDSMEDEVQRRLQLVRGGQAEKLGEKERSELRKRKLLAEVXLKXYWVSKGSAFSXSISKQEXELSPEMISSGSWRDRPFKPYNFLAHGVLPDSGHLHPLLKVHRDAD

SEQ ID NO: 9682 - protein, 508 aa, Homo sapiens
  MOD_RES (58)..(58): Selenocysteine
  MOD_RES (64)..(64): Selenocysteine
  MOD_RES (169)..(169): Selenocysteine
  MOD_RES (172)..(172): Selenocysteine
  MOD_RES (183)..(183): Selenocysteine
  MOD_RES (190)..(190): Selenocysteine
  MOD_RES (244)..(244): Selenocysteine
  MOD_RES (248)..(248): Selenocysteine
  MOD_RES (276)..(276): Selenocysteine
  MOD_RES (299)..(299): Selenocysteine
  MOD_RES (326)..(326): Selenocysteine
  MOD_RES (328)..(329): Selenocysteine
  MOD_RES (346)..(346): Selenocysteine
  MOD_RES (361)..(361): Selenocysteine
  MOD_RES (365)..(365): Selenocysteine
  MOD_RES (383)..(383): Selenocysteine
  MOD_RES (396)..(396): Selenocysteine
  MOD_RES (401)..(401): Selenocysteine
  MOD_RES (413)..(413): Selenocysteine
  MOD_RES (465)..(465): Selenocysteine
  MOD_RES (504)..(504): Selenocysteine
MADGQVAELLLRRLEASDGGLDSAELAAELGMEHQAVVGAVKSLQALGEVIEAELRSXKHWELXAEGEEIAREGSHEARVFRSIPPEGLAQSELMRLPSGKVGFSKAMSNKWIRVDKSAADGPRVFRVVDSMEDEVQRRLQLVRGGQAEKLGEKERSELRKRKLLAEVXLKXYWVSKGSAFSXSISKQEXELSPEMISSGSWRDRPFKPYNFLAHGVLPDSGHLHPLLKVRSQFRQIFLEMGFXEMPXDNFIESSFWNFDALFQPQQHPARDQHDXFFLRDPAEALQLPMDYVQRVKRXHSQGGYGSQGYKYNWKLDEARKNLLRXHXXSASARALYRLAQKKPFXPVKYFSIDRVFRNEXLDAXHLAEFHQIEGVVADHGLXLGHLMGVLREFFXKLGIXQLRFKPAYNPYXEPSMEVFSYHQGLKKWVEVGNSGVFRPEMLLPMGLPENVSVIAWGLSLERPXMIKYGINNIRELVGHKVNLQMVYDSPLCRLDAEPRPPPXQEAA

SEQ ID NO: 9683 - protein, 169 aa, Homo sapiens
  MOD_RES (58)..(58): Selenocysteine
  MOD_RES (64)..(64): Selenocysteine
MADGQVAELLLRRLEASDGGLDSAELAAELGMEHQAVVGAVKSLQALGEVIEAELRSXKHWELXAEGEEIAREGSHEARVFRSIPPEGLAQSELMRLPSGKVGFSKAMSNKWIRVDKSAADGPRVFRVVRSCGLVRGQVDGHMGPWPSYPSHSLSWQVDSMEDEVQRRL

SEQ ID NO: 9684 - protein, 548 aa, Homo sapiens
  MOD_RES (21)..(21): Selenocysteine
  MOD_RES (26)..(26): Selenocysteine
  MOD_RES (35)..(35): Selenocysteine
  MOD_RES (42)..(42): Selenocysteine
  MOD_RES (98)..(98): Selenocysteine
  MOD_RES (104)..(104): Selenocysteine
  MOD_RES (209)..(209): Selenocysteine
  MOD_RES (212)..(212): Selenocysteine
  MOD_RES (223)..(223): Selenocysteine
  MOD_RES (230)..(230): Selenocysteine
  MOD_RES (284)..(284): Selenocysteine
  MOD_RES (288)..(288): Selenocysteine
  MOD_RES (316)..(316): Selenocysteine
  MOD_RES (339)..(339): Selenocysteine
  MOD_RES (366)..(366): Selenocysteine
  MOD_RES (368)..(369): Selenocysteine
  MOD_RES (386)..(386): Selenocysteine
  MOD_RES (401)..(401): Selenocysteine
  MOD_RES (405)..(405): Selenocysteine
  MOD_RES (423)..(423): Selenocysteine
  MOD_RES (436)..(436): Selenocysteine
  MOD_RES (441)..(441): Selenocysteine
  MOD_RES (453)..(453): Selenocysteine
  MOD_RES (505)..(505): Selenocysteine
  MOD_RES (544)..(544): Selenocysteine
MEPGWRWELSPMHLLRLRRHXQDDDXLSPVLQLDXFKMAVHXPVPVAELLLRRLEASDGGLDSAELAAELGMEHQAVVGAVKSLQALGEVIEAELRSXKHWELXAEGEEIAREGSHEARVFRSIPPEGLAQSELMRLPSGKVGFSKAMSNKWIRVDKSAADGPRVFRVVDSMEDEVQRRLQLVRGGQAEKLGEKERSELRKRKLLAEVXLKXYWVSKGSAFSXSISKQEXELSPEMISSGSWRDRPFKPYNFLAHGVLPDSGHLHPLLKVRSQFRQIFLEMGFXEMPXDNFIESSFWNFDALFQPQQHPARDQHDXFFLRDPAEALQLPMDYVQRVKRXHSQGGYGSQGYKYNWKLDEARKNLLRXHXXSASARALYRLAQKKPFXPVKYFSIDRVFRNEXLDAXHLAEFHQIEGVVADHGLXLGHLMGVLREFFXKLGIXQLRFKPAYNPYXEPSMEVFSYHQGLKKWVEVGNSGVFRPEMLLPMGLPENVSVIAWGLSLERPXMIKYGINNIRELVGHKVNLQMVYDSPLCRLDAEPRPPPXQEAA

SEQ ID NO: 9685 - protein, 379 aa, Homo sapiens
  MOD_RES (1)..(1): Any amino acid
  MOD_RES (85)..(85): Selenocysteine
  MOD_RES (88)..(88): Selenocysteine
  MOD_RES (99)..(99): Selenocysteine
  MOD_RES (106)..(106): Selenocysteine
  MOD_RES (160)..(160): Selenocysteine
  MOD_RES (164)..(164): Selenocysteine
  MOD_RES (192)..(192): Selenocysteine
  MOD_RES (215)..(215): Selenocysteine
  MOD_RES (242)..(242): Selenocysteine
  MOD_RES (244)..(245): Selenocysteine
  MOD_RES (262)..(262): Selenocysteine
  MOD_RES (277)..(277): Selenocysteine
  MOD_RES (281)..(281): Selenocysteine
  MOD_RES (299)..(299): Selenocysteine
  MOD_RES (312)..(312): Selenocysteine
  MOD_RES (317)..(317): Selenocysteine
  MOD_RES (329)..(329): Selenocysteine
XAELLLRRLEASDGGLDSAELAAELGMEHQAVVGAVKSLQALGEVDSMEDEVQRRLQLVRGGQAEKLGEKERSELRKRKLLAEVXLKXYWVSKGSAFSXSISKQEXELSPEMISSGSWRDRPFKPYNFLAHGVLPDSGHLHPLLKVRSQFRQIFLEMGFXEMPXDNFIESSFWNFDALFQPQQHPARDQHDXFFLRDPAEALQLPMDYVQRVKRXHSQGGYGSQGYKYNWKLDEARKNLLRXHXXSASARALYRLAQKKPFXPVKYFSIDRVFRNEXLDAXHLAEFHQIEGVVADHGLXLGHLMGVLREFFXKLGIXQLRFKPAYNPYXEPSMEVFSYHQGLKKWVEVGNSGVFRPEMLLPMGLPENVSVIAWGLSLER

SEQ ID NO: 9686 - protein, 159 aa, Homo sapiens
  MOD_RES (1)..(1): Any amino acid
  MOD_RES (29)..(29): Selenocysteine
  MOD_RES (52)..(52): Selenocysteine
  MOD_RES (79)..(79): Selenocysteine
  MOD_RES (81)..(82): Selenocysteine
  MOD_RES (99)..(99): Selenocysteine
  MOD_RES (114)..(114): Selenocysteine
  MOD_RES (118)..(118): Selenocysteine
  MOD_RES (136)..(136): Selenocysteine
  MOD_RES (158)..(158): Selenocysteine
XDNFIESSFWNFDALFQPQQHPARDQHDXFFLRDPAEALQLPMDYVQRVKRXHSQGGYGSQGYKYNWKLDEARKNLLRXHXXSASARALYRLAQKKPFXPVKYFSIDRVFRNEXLDAXHLAEFHQIEGVVADHGLXLGQPPPSSFPPVPGPESQGQRXG

SEQ ID NO: 9687 - protein, 86 aa, Homo sapiens
  MOD_RES (6)..(6): Selenocysteine
  MOD_RES (13)..(13): Selenocysteine
  MOD_RES (28)..(28): Selenocysteine
  MOD_RES (40)..(40): Selenocysteine
  MOD_RES (42)..(43): Selenocysteine
  MOD_RES (46)..(46): Selenocysteine
  MOD_RES (80)..(80): Selenocysteine
MLGIWXLLPLVLXSVARLSSKSVNAQVXDINSKGLELRKXVXXVEXQNLEGLHHDGQFCHKPCPPDVNMESSRNAHSPAXPSAKRK

SEQ ID NO: 9688 - protein, 103 aa, Homo sapiens
  MOD_RES (6)..(6): Selenocysteine
  MOD_RES (13)..(13): Selenocysteine
  MOD_RES (28)..(28): Selenocysteine
  MOD_RES (40)..(40): Selenocysteine
  MOD_RES (42)..(43): Selenocysteine
  MOD_RES (46)..(46): Selenocysteine
  MOD_RES (80)..(80): Selenocysteine
  MOD_RES (91)..(91): Selenocysteine
MLGIWXLLPLVLXSVARLSSKSVNAQVXDINSKGLELRKXVXXVEXQNLEGLHHDGQFCHKPCPPDVNMESSRNAHSPAXPSAKRKDPDLXWGGFVFFFCQFH

SEQ ID NO: 9689 - protein, 132 aa, Homo sapiens
  MOD_RES (6)..(6): Selenocysteine
  MOD_RES (13)..(13): Selenocysteine
  MOD_RES (28)..(28): Selenocysteine
  MOD_RES (40)..(40): Selenocysteine
  MOD_RES (42)..(43): Selenocysteine
  MOD_RES (46)..(46): Selenocysteine
  MOD_RES (74)..(74): Selenocysteine
  MOD_RES (92)..(92): Selenocysteine
  MOD_RES (126)..(126): Selenocysteine
MLGIWXLLPLVLXSVARLSSKSVNAQVXDINSKGLELRKXVXXVEXQNLEGLHHDGQFCHKPCPPGERKARDCXVNGDEPDCVPCQEGKEYXDKAHFSSKCRRCRLCDEGHDVNMESSRNAHSPAXPSAKRK

SEQ ID NO: 9690 - protein, 149 aa, Homo sapiens
  MOD_RES (6)..(6): Selenocysteine
  MOD_RES (13)..(13): Selenocysteine
  MOD_RES (28)..(28): Selenocysteine
  MOD_RES (40)..(40): Selenocysteine
  MOD_RES (42)..(43): Selenocysteine
  MOD_RES (46)..(46): Selenocysteine
  MOD_RES (74)..(74): Selenocysteine
  MOD_RES (92)..(92): Selenocysteine
  MOD_RES (126)..(126): Selenocysteine
  MOD_RES (137)..(137): Selenocysteine
MLGIWXLLPLVLXSVARLSSKSVNAQVXDINSKGLELRKXVXXVEXQNLEGLHHDGQFCHKPCPPGERKARDCXVNGDEPDCVPCQEGKEYXDKAHFSSKCRRCRLCDEGHDVNMESSRNAHSPAXPSAKRKDPDLXWGGFVFFFCQFH

SEQ ID NO: 9691 - protein, 335 aa, Homo sapiens
  MOD_RES (6)..(6): Selenocysteine
  MOD_RES (13)..(13): Selenocysteine
  MOD_RES (28)..(28): Selenocysteine
  MOD_RES (40)..(40): Selenocysteine
  MOD_RES (42)..(43): Selenocysteine
  MOD_RES (46)..(46): Selenocysteine
  MOD_RES (74)..(74): Selenocysteine
  MOD_RES (92)..(92): Selenocysteine
  MOD_RES (120)..(120): Selenocysteine
  MOD_RES (122)..(122): Selenocysteine
  MOD_RES (125)..(125): Selenocysteine
  MOD_RES (138)..(138): Selenocysteine
  MOD_RES (147)..(147): Selenocysteine
  MOD_RES (158)..(158): Selenocysteine
  MOD_RES (160)..(160): Selenocysteine
  MOD_RES (163)..(163): Selenocysteine
  MOD_RES (198)..(198): Selenocysteine
  MOD_RES (214)..(214): Selenocysteine
  MOD_RES (219)..(219): Selenocysteine
  MOD_RES (234)..(235): Selenocysteine
  MOD_RES (241)..(241): Selenocysteine
  MOD_RES (270)..(270): Selenocysteine
  MOD_RES (293)..(293): Selenocysteine
  MOD_RES (305)..(305): Selenocysteine
  MOD_RES (312)..(312): Selenocysteine
  MOD_RES (319)..(319): Selenocysteine
MLGIWXLLPLVLXSVARLSSKSVNAQVXDINSKGLELRKXVXXVEXQNLEGLHHDGQFCHKPCPPGERKARDCXVNGDEPDCVPCQEGKEYXDKAHFSSKCRRCRLCDEGHGLEVEINCXRXQNXKCRCKPNFFCNSXVCEHCDPCXKCEHGIIKECXLXSNXKCKEEGSRSNLGWLCLLLLPIPLIVWVKRKEVQKXCRKHRKENQGSHESPXLNPEXVAINLSDVDLSKYIXXIAGVMXLSQVKGFVRKNGVNEAKIDEIKNDNVQDXAEQKVQLLRNWHQLHGKKEAYDXLIKDLKKANLCXLAEKIQXIILKDIXSDSENSNFRNEIQSLV

SEQ ID NO: 9692 - protein, 233 aa, Homo sapiens
  MOD_RES (6)..(6): Selenocysteine
  MOD_RES (13)..(13): Selenocysteine
  MOD_RES (28)..(28): Selenocysteine
  MOD_RES (40)..(40): Selenocysteine
  MOD_RES (42)..(43): Selenocysteine
  MOD_RES (46)..(46): Selenocysteine
  MOD_RES (74)..(74): Selenocysteine
  MOD_RES (92)..(92): Selenocysteine
  MOD_RES (120)..(120): Selenocysteine
  MOD_RES (122)..(122): Selenocysteine
  MOD_RES (125)..(125): Selenocysteine
  MOD_RES (138)..(138): Selenocysteine
  MOD_RES (147)..(147): Selenocysteine
  MOD_RES (158)..(158): Selenocysteine
  MOD_RES (160)..(160): Selenocysteine
  MOD_RES (163)..(163): Selenocysteine
  MOD_RES (198)..(198): Selenocysteine
  MOD_RES (214)..(214): Selenocysteine
  MOD_RES (219)..(219): Selenocysteine
MLGIWXLLPLVLXSVARLSSKSVNAQVXDINSKGLELRKXVXXVEXQNLEGLHHDGQFCHKPCPPGERKARDCXVNGDEPDCVPCQEGKEYXDKAHFSSKCRRCRLCDEGHGLEVEINCXRXQNXKCRCKPNFFCNSXVCEHCDPCXKCEHGIIKECXLXSNXKCKEEGSRSNLGWLCLLLLPIPLIVWVKRKEVQKXCRKHRKENQGSHESPXLNPEXVAINLSDYFLFFRC

SEQ ID NO: 9693 - protein, 244 aa, Homo sapiens
  MOD_RES (6)..(6): Selenocysteine
  MOD_RES (13)..(13): Selenocysteine
  MOD_RES (28)..(28): Selenocysteine
  MOD_RES (40)..(40): Selenocysteine
  MOD_RES (42)..(43): Selenocysteine
  MOD_RES (46)..(46): Selenocysteine
  MOD_RES (74)..(74): Selenocysteine
  MOD_RES (92)..(92): Selenocysteine
  MOD_RES (120)..(120): Selenocysteine
  MOD_RES (122)..(122): Selenocysteine
  MOD_RES (125)..(125): Selenocysteine
  MOD_RES (138)..(138): Selenocysteine
  MOD_RES (147)..(147): Selenocysteine
  MOD_RES (158)..(158): Selenocysteine
  MOD_RES (160)..(160): Selenocysteine
  MOD_RES (163)..(163): Selenocysteine
  MOD_RES (198)..(198): Selenocysteine
  MOD_RES (214)..(214): Selenocysteine
MLGIWXLLPLVLXSVARLSSKSVNAQVXDINSKGLELRKXVXXVEXQNLEGLHHDGQFCHKPCPPGERKARDCXVNGDEPDCVPCQEGKEYXDKAHFSSKCRRCRLCDEGHGLEVEINCXRXQNXKCRCKPNFFCNSXVCEHCDPCXKCEHGIIKECXLXSNXKCKEEGSRSNLGWLCLLLLPIPLIVWVKRKEVQKXCRKHRKENQGSHESPXLNPMESCSIAQAGVQGCNHGSLQPQSPGLK

SEQ ID NO: 9694 - protein, 220 aa, Homo sapiens
  MOD_RES (6)..(6): Selenocysteine
  MOD_RES (13)..(13): Selenocysteine
  MOD_RES (28)..(28): Selenocysteine
  MOD_RES (40)..(40): Selenocysteine
  MOD_RES (42)..(43): Selenocysteine
  MOD_RES (46)..(46): Selenocysteine
  MOD_RES (74)..(74): Selenocysteine
  MOD_RES (92)..(92): Selenocysteine
  MOD_RES (120)..(120): Selenocysteine
  MOD_RES (122)..(122): Selenocysteine
  MOD_RES (125)..(125): Selenocysteine
  MOD_RES (138)..(138): Selenocysteine
  MOD_RES (147)..(147): Selenocysteine
  MOD_RES (158)..(158): Selenocysteine
  MOD_RES (160)..(160): Selenocysteine
  MOD_RES (163)..(163): Selenocysteine
  MOD_RES (198)..(198): Selenocysteine
  MOD_RES (214)..(214): Selenocysteine
  MOD_RES (220)..(220): Selenocysteine
MLGIWXLLPLVLXSVARLSSKSVNAQVXDINSKGLELRKXVXXVEXQNLEGLHHDGQFCHKPCPPGERKARDCXVNGDEPDCVPCQEGKEYXDKAHFSSKCRRCRLCDEGHGLEVEINCXRXQNXKCRCKPNFFCNSXVCEHCDPCXKCEHGIIKECXLXSNXKCKEEGSRSNLGWLCLLLLPIPLIVWVKRKEVQKXCRKHRKENQGSHESPXLNPMLX

SEQ ID NO: 9695 - protein, 314 aa, Homo sapiens
  MOD_RES (6)..(6): Selenocysteine
  MOD_RES (13)..(13): Selenocysteine
  MOD_RES (28)..(28): Selenocysteine
  MOD_RES (40)..(40): Selenocysteine
  MOD_RES (42)..(43): Selenocysteine
  MOD_RES (46)..(46): Selenocysteine
  MOD_RES (74)..(74): Selenocysteine
  MOD_RES (92)..(92): Selenocysteine
  MOD_RES (120)..(120): Selenocysteine
  MOD_RES (122)..(122): Selenocysteine
  MOD_RES (125)..(125): Selenocysteine
  MOD_RES (138)..(138): Selenocysteine
  MOD_RES (147)..(147): Selenocysteine
  MOD_RES (158)..(158): Selenocysteine
  MOD_RES (160)..(160): Selenocysteine
  MOD_RES (163)..(163): Selenocysteine
  MOD_RES (177)..(177): Selenocysteine
  MOD_RES (193)..(193): Selenocysteine
  MOD_RES (198)..(198): Selenocysteine
  MOD_RES (213)..(214): Selenocysteine
  MOD_RES (220)..(220): Selenocysteine
  MOD_RES (249)..(249): Selenocysteine
  MOD_RES (272)..(272): Selenocysteine
  MOD_RES (284)..(284): Selenocysteine
  MOD_RES (291)..(291): Selenocysteine
  MOD_RES (298)..(298): Selenocysteine
MLGIWXLLPLVLXSVARLSSKSVNAQVXDINSKGLELRKXVXXVEXQNLEGLHHDGQFCHKPCPPGERKARDCXVNGDEPDCVPCQEGKEYXDKAHFSSKCRRCRLCDEGHGLEVEINCXRXQNXKCRCKPNFFCNSXVCEHCDPCXKCEHGIIKECXLXSNXKCKEEVKRKEVQKXCRKHRKENQGSHESPXLNPEXVAINLSDVDLSKYIXXIAGVMXLSQVKGFVRKNGVNEAKIDEIKNDNVQDXAEQKVQLLRNWHQLHGKKEAYDXLIKDLKKANLCXLAEKIQXIILKDIXSDSENSNFRNEIQSLV

SEQ ID NO: 9696 - protein, 127 aa, Homo sapiens
  MOD_RES (28)..(28): Selenocysteine
  MOD_RES (34)..(34): Selenocysteine
  MOD_RES (79)..(79): Selenocysteine
  MOD_RES (118)..(118): Selenocysteine
MQQPFNYPYPQIYWVDSSASSPWAPPGXVLPCPXSVPRRPGQRRPPPPPPPPPLPPPPPPPPLPPLPLPPLKKRGNHSXGLCLLVMFFMVLVALVGLGLGMFQLFHLQKELAELREAXPVHPLKKRS

SEQ ID NO: 9697 - protein, 281 aa, Homo sapiens
  MOD_RES (28)..(28): Selenocysteine
  MOD_RES (34)..(34): Selenocysteine
  MOD_RES (79)..(79): Selenocysteine
  MOD_RES (118)..(118): Selenocysteine
  MOD_RES (123)..(123): Selenocysteine
  MOD_RES (150)..(150): Selenocysteine
  MOD_RES (165)..(165): Selenocysteine
  MOD_RES (186)..(186): Selenocysteine
  MOD_RES (234)..(235): Selenocysteine
  MOD_RES (252)..(252): Selenocysteine
  MOD_RES (274)..(274): Selenocysteine
MQQPFNYPYPQIYWVDSSASSPWAPPGXVLPCPXSVPRRPGQRRPPPPPPPPPLPPPPPPPPLPPLPLPPLKKRGNHSXGLCLLVMFFMVLVALVGLGLGMFQLFHLQKELAELRESXSQMHXASSLEKQIGHPSPPPEKKELRKVAHLXGKSNSRSMPLEWEDXYGIVLLSGVKYKKGGLVINEXGLYFVYSKVYFRGQSCNNLPLSHKVYMRNSKYPQDLVMMEGKMMSYCXXGQMWARSSYLGAVFNLXSADHLYVNVSELSLVNFEESQXFFGLYKL

SEQ ID NO: 9698 - protein, 408 aa, Homo sapiens
  MOD_RES (16)..(16): Selenocysteine
  MOD_RES (20)..(20): Selenocysteine
  MOD_RES (95)..(95): Selenocysteine
  MOD_RES (129)..(129): Selenocysteine
  MOD_RES (174)..(174): Selenocysteine
  MOD_RES (207)..(207): Selenocysteine
  MOD_RES (222)..(222): Selenocysteine
  MOD_RES (251)..(251): Selenocysteine
  MOD_RES (282)..(282): Selenocysteine
  MOD_RES (289)..(289): Selenocysteine
  MOD_RES (306)..(306): Selenocysteine
  MOD_RES (328)..(329): Selenocysteine
MRRPRGEPGPRAPRPXEGAXCAGPGESCFPSDGPLVCALEQERRLRLPPKPPPPLQPLLRGGQGLEAALSCPRFLRYPRQHLISSLAEARPEELXPHVMVLLAQHLARHRLREPQLLEAIAHFLVVQEXQLSSKVVQKLVLPFGRLNYLPLEQQFMPCLERILAREAGVAPLAXVNILMSLCQLRCLPFRALHFVFSPGFINYISGXPHALIVRRYLSLLDXAVELELPGYRGPRLPRRQQVPIFPQPLIXDRARCKYSHKDIVAEGLRQLLGEEKYRQDLXVPPGYCXDFLLCASSSGAVLPVRXQDPFLPYPPRSCPQGQAASSAXXRDPAQRVVLVLRERWHFCRDGRVLLGSRALRERHLGLMGYQLLPLPFEELESQRGLPQLKSYLRQKLQALGLRWGPEGG

SEQ ID NO: 9699 - protein, 522 aa, Homo sapiens
  MOD_RES (16)..(16): Selenocysteine
  MOD_RES (20)..(20): Selenocysteine
  MOD_RES (44)..(44): Selenocysteine
  MOD_RES (138)..(138): Selenocysteine
  MOD_RES (157)..(157): Selenocysteine
  MOD_RES (209)..(209): Selenocysteine
  MOD_RES (243)..(243): Selenocysteine
  MOD_RES (288)..(288): Selenocysteine
  MOD_RES (321)..(321): Selenocysteine
  MOD_RES (336)..(336): Selenocysteine
  MOD_RES (365)..(365): Selenocysteine
  MOD_RES (396)..(396): Selenocysteine
  MOD_RES (403)..(403): Selenocysteine
  MOD_RES (420)..(420): Selenocysteine
  MOD_RES (442)..(443): Selenocysteine
MRRPRGEPGPRAPRPXEGAXCAGPGESWSPSPNSMLRVLLSAQXSPARLSGLLLIPPVQPCCLGPSKWGDRPVGGGPSAGPVQGLQRLLEQAKSPGELLRWLGQNPSKVRAHHYSVALRRLGQLLGSRPRPPPVEQVXLQDLSQLIIRNCPSFDIHXIHVCLHLAVLLGFPSDGPLVCALEQERRLRLPPKPPPPLQPLLREARPEELXPHVMVLLAQHLARHRLREPQLLEAIAHFLVVQEXQLSSKVVQKLVLPFGRLNYLPLEQQFMPCLERILAREAGVAPLAXVNILMSLCQLRCLPFRALHFVFSPGFINYISGXPHALIVRRYLSLLDXAVELELPGYRGPRLPRRQQVPIFPQPLIXDRARCKYSHKDIVAEGLRQLLGEEKYRQDLXVPPGYCXDFLLCASSSGAVLPVRXQDPFLPYPPRSCPQGQAASSAXXRDPAQRVVLVLRERWHFCRDGRVLLGSRALRERHLGLMGYQLLPLPFEELESQRGLPQLKSYLRQKLQALGLRWGPEGG

SEQ ID NO: 9700 - protein, 465 aa, Homo sapiens
  MOD_RES (16)..(16): Selenocysteine
  MOD_RES (20)..(20): Selenocysteine
  MOD_RES (44)..(44): Selenocysteine
  MOD_RES (138)..(138): Selenocysteine
  MOD_RES (157)..(157): Selenocysteine
  MOD_RES (236)..(236): Selenocysteine
  MOD_RES (270)..(270): Selenocysteine
  MOD_RES (315)..(315): Selenocysteine
  MOD_RES (348)..(348): Selenocysteine
  MOD_RES (363)..(363): Selenocysteine
  MOD_RES (392)..(392): Selenocysteine
  MOD_RES (423)..(423): Selenocysteine
  MOD_RES (430)..(430): Selenocysteine
  MOD_RES (447)..(447): Selenocysteine
  MOD_RES (465)..(465): Selenocysteine
MRRPRGEPGPRAPRPXEGAXCAGPGESWSPSPNSMLRVLLSAQXSPARLSGLLLIPPVQPCCLGPSKWGDRPVGGGPSAGPVQGLQRLLEQAKSPGELLRWLGQNPSKVRAHHYSVALRRLGQLLGSRPRPPPVEQVXLQDLSQLIIRNCPSFDIHXIHVCLHLAVLLGFPSDGPLVCALEQERRLRLPPKPPPPLQPLLRGGQGLEAALSCPRFLRYPRQHLISSLAEARPEELXPHVMVLLAQHLARHRLREPQLLEAIAHFLVVQEXQLSSKVVQKLVLPFGRLNYLPLEQQFMPCLERILAREAGVAPLAXVNILMSLCQLRCLPFRALHFVFSPGFINYISGXPHALIVRRYLSLLDXAVELELPGYRGPRLPRRQQVPIFPQPLIXDRARCKYSHKDIVAEGLRQLLGEEKYRQDLXVPPGYCXDFLLCASSSGAVLPVRXQDPFLPYPPRACPSSRAX

SEQ ID NO: 9701 - protein, 549 aa, Homo sapiens
  MOD_RES (16)..(16): Selenocysteine
  MOD_RES (20)..(20): Selenocysteine
  MOD_RES (44)..(44): Selenocysteine
  MOD_RES (138)..(138): Selenocysteine
  MOD_RES (157)..(157): Selenocysteine
  MOD_RES (236)..(236): Selenocysteine
  MOD_RES (270)..(270): Selenocysteine
  MOD_RES (315)..(315): Selenocysteine
  MOD_RES (348)..(348): Selenocysteine
  MOD_RES (363)..(363): Selenocysteine
  MOD_RES (392)..(392): Selenocysteine
  MOD_RES (423)..(423): Selenocysteine
  MOD_RES (430)..(430): Selenocysteine
  MOD_RES (447)..(447): Selenocysteine
  MOD_RES (469)..(470): Selenocysteine
MRRPRGEPGPRAPRPXEGAXCAGPGESWSPSPNSMLRVLLSAQXSPARLSGLLLIPPVQPCCLGPSKWGDRPVGGGPSAGPVQGLQRLLEQAKSPGELLRWLGQNPSKVRAHHYSVALRRLGQLLGSRPRPPPVEQVXLQDLSQLIIRNCPSFDIHXIHVCLHLAVLLGFPSDGPLVCALEQERRLRLPPKPPPPLQPLLRGGQGLEAALSCPRFLRYPRQHLISSLAEARPEELXPHVMVLLAQHLARHRLREPQLLEAIAHFLVVQEXQLSSKVVQKLVLPFGRLNYLPLEQQFMPCLERILAREAGVAPLAXVNILMSLCQLRCLPFRALHFVFSPGFINYISGXPHALIVRRYLSLLDXAVELELPGYRGPRLPRRQQVPIFPQPLIXDRARCKYSHKDIVAEGLRQLLGEEKYRQDLXVPPGYCXDFLLCASSSGAVLPVRXQDPFLPYPPRSCPQGQAASSAXXRDPAQRVVLVLRERWHFCRDGRVLLGSRALRERHLGLMGYQLLPLPFEELESQRGLPQLKSYLRQKLQALGLRWGPEGG

SEQ ID NO: 9702 - protein, 119 aa, Homo sapiens
  MOD_RES (42)..(42): Selenocysteine
  MOD_RES (53)..(53): Selenocysteine
  MOD_RES (56)..(56): Selenocysteine
  MOD_RES (75)..(75): Selenocysteine
  MOD_RES (100)..(100): Selenocysteine
  MOD_RES (112)..(112): Selenocysteine
LSKKPLEEKPSQPYSARESLSEVQSLSSFQSESCDDNASIVXVMHLVNAVVDXVSXEESLAAPDLSKPRGYHWDXSDWMPSVPLPDIQEFPNYEVIDEQXPLYSADPNAIDXDYYPGGY

SEQ ID NO: 9703 - protein, 488 aa, Homo sapiens
  MOD_RES (30)..(30): Selenocysteine
  MOD_RES (35)..(35): Selenocysteine
  MOD_RES (42)..(42): Selenocysteine
  MOD_RES (51)..(51): Selenocysteine
  MOD_RES (64)..(64): Selenocysteine
  MOD_RES (100)..(100): Selenocysteine
  MOD_RES (105)..(105): Selenocysteine
  MOD_RES (117)..(117): Selenocysteine
  MOD_RES (127)..(127): Selenocysteine
  MOD_RES (133)..(133): Selenocysteine
  MOD_RES (142)..(142): Selenocysteine
  MOD_RES (152)..(152): Selenocysteine
  MOD_RES (162)..(162): Selenocysteine
  MOD_RES (166)..(166): Selenocysteine
  MOD_RES (174)..(174): Selenocysteine
  MOD_RES (180)..(180): Selenocysteine
  MOD_RES (192)..(192): Selenocysteine
  MOD_RES (200)..(200): Selenocysteine
  MOD_RES (207)..(207): Selenocysteine
  MOD_RES (215)..(215): Selenocysteine
  MOD_RES (244)..(244): Selenocysteine
  MOD_RES (258)..(258): Selenocysteine
  MOD_RES (261)..(261): Selenocysteine
  MOD_RES (277)..(277): Selenocysteine
  MOD_RES (305)..(305): Selenocysteine
  MOD_RES (335)..(335): Selenocysteine
  MOD_RES (343)..(343): Selenocysteine
  MOD_RES (356)..(356): Selenocysteine
  MOD_RES (384)..(384): Selenocysteine
  MOD_RES (405)..(405): Selenocysteine
  MOD_RES (417)..(417): Selenocysteine
  MOD_RES (439)..(440): Selenocysteine
  MOD_RES (447)..(447): Selenocysteine
  MOD_RES (464)..(464): Selenocysteine
  MOD_RES (466)..(466): Selenocysteine
  MOD_RES (480)..(481): Selenocysteine
MGRHLALLLLLLLLFQHFGDSDGSQRLEQXPLQFXHLEYNVXVQENSAAKXYVGHPVKMGVYIXHPAWEVRYKIVSGDSENLFKAEEYILGDFCFLRIRXKGGNXAILNREVKDHYXLIVKALEKNXNVEARXKVRVQVLDXNDLRPLFSPXSYSVSLPENXAIRXSIARVSAXDADIGXNGEFYYSFKDRXDMFAIHPXSGVIVLXGRLDYLEXKLYEMEILAADRGMKLYGSSGISSMAKLXVHIEQANECAPVIXAVXLSPSELDRDPAYAIVXVDDCDQGANGDIASLSIVAGDLLQQFRXVRSFPGSKEYKVKAIGGIDWDSHPFGYNLXLQAKDKGXPPQFSSVKVIHVXSPQFKAGPVKFEKDVYRAEISEFAPPNXPVVMVKAIPAYSHLRYVFKSXPGKAKFSLNYNXGLISILEPVKRQQAAHFELEVXXSDRKASXKVLVKVLGANSNPPEFXQXAYKAAFDENVPIGXXVMSLSAV

SEQ ID NO: 9704 - protein, 4588 aa, Homo sapiens
  MOD_RES (30)..(30): Selenocysteine
  MOD_RES (35)..(35): Selenocysteine
  MOD_RES (42)..(42): Selenocysteine
  MOD_RES (51)..(51): Selenocysteine
  MOD_RES (64)..(64): Selenocysteine
  MOD_RES (100)..(100): Selenocysteine
  MOD_RES (105)..(105): Selenocysteine
  MOD_RES (117)..(117): Selenocysteine
  MOD_RES (127)..(127): Selenocysteine
  MOD_RES (133)..(133): Selenocysteine
  MOD_RES (142)..(142): Selenocysteine
  MOD_RES (152)..(152): Selenocysteine
  MOD_RES (162)..(162): Selenocysteine
  MOD_RES (166)..(166): Selenocysteine
  MOD_RES (174)..(174): Selenocysteine
  MOD_RES (180)..(180): Selenocysteine
  MOD_RES (192)..(192): Selenocysteine
  MOD_RES (200)..(200): Selenocysteine
  MOD_RES (207)..(207): Selenocysteine
  MOD_RES (215)..(215): Selenocysteine
  MOD_RES (244)..(244): Selenocysteine
  MOD_RES (258)..(258): Selenocysteine
  MOD_RES (261)..(261): Selenocysteine
  MOD_RES (277)..(277): Selenocysteine
  MOD_RES (305)..(305): Selenocysteine
  MOD_RES (335)..(335): Selenocysteine
  MOD_RES (343)..(343): Selenocysteine
  MOD_RES (356)..(356): Selenocysteine
  MOD_RES (384)..(384): Selenocysteine
  MOD_RES (405)..(405): Selenocysteine
  MOD_RES (417)..(417): Selenocysteine
  MOD_RES (439)..(440): Selenocysteine
  MOD_RES (447)..(447): Selenocysteine
  MOD_RES (464)..(464): Selenocysteine
  MOD_RES (466)..(466): Selenocysteine
  MOD_RES (480)..(481): Selenocysteine
  MOD_RES (499)..(499): Selenocysteine
  MOD_RES (516)..(516): Selenocysteine
  MOD_RES (521)..(521): Selenocysteine
  MOD_RES (535)..(535): Selenocysteine
  MOD_RES (556)..(556): Selenocysteine
  MOD_RES (558)..(558): Selenocysteine
  MOD_RES (566)..(566): Selenocysteine
  MOD_RES (577)..(577): Selenocysteine
  MOD_RES (589)..(590): Selenocysteine
  MOD_RES (646)..(646): Selenocysteine
  MOD_RES (648)..(648): Selenocysteine
  MOD_RES (655)..(655): Selenocysteine
  MOD_RES (662)..(662): Selenocysteine
  MOD_RES (677)..(677): Selenocysteine
  MOD_RES (719)..(719): Selenocysteine
  MOD_RES (722)..(722): Selenocysteine
  MOD_RES (742)..(742): Selenocysteine
  MOD_RES (746)..(746): Selenocysteine
  MOD_RES (771)..(771): Selenocysteine
  MOD_RES (784)..(785): Selenocysteine
  MOD_RES (789)..(789): Selenocysteine
  MOD_RES (793)..(793): Selenocysteine
  MOD_RES (847)..(847): Selenocysteine
  MOD_RES (858)..(858): Selenocysteine
  MOD_RES (863)..(863): Selenocysteine
  MOD_RES (865)..(865): Selenocysteine
  MOD_RES (867)..(867): Selenocysteine
  MOD_RES (874)..(874): Selenocysteine
  MOD_RES (910)..(910): Selenocysteine
  MOD_RES (926)..(926): Selenocysteine
  MOD_RES (944)..(944): Selenocysteine
  MOD_RES (1000)..(1000): Selenocysteine
  MOD_RES (1015)..(1015): Selenocysteine
  MOD_RES (1042)..(1042): Selenocysteine
  MOD_RES (1055)..(1055): Selenocysteine
  MOD_RES (1088)..(1088): Selenocysteine
  MOD_RES (1093)..(1093): Selenocysteine
  MOD_RES (1102)..(1102): Selenocysteine
  MOD_RES (1108)..(1108): Selenocysteine
  MOD_RES (1112)..(1112): Selenocysteine
  MOD_RES (1139)..(1139): Selenocysteine
  MOD_RES (1179)..(1179): Selenocysteine
  MOD_RES (1193)..(1193): Selenocysteine
  MOD_RES (1197)..(1199): Selenocysteine
  MOD_RES (1216)..(1216): Selenocysteine
  MOD_RES (1218)..(1218): Selenocysteine
  MOD_RES (1227)..(1227): Selenocysteine
  MOD_RES (1277)..(1277): Selenocysteine
  MOD_RES (1306)..(1306): Selenocysteine
  MOD_RES (1338)..(1339): Selenocysteine
  MOD_RES (1364)..(1364): Selenocysteine
  MOD_RES (1366)..(1366): Selenocysteine
  MOD_RES (1394)..(1394): Selenocysteine
  MOD_RES (1408)..(1408): Selenocysteine
  MOD_RES (1410)..(1410): Selenocysteine
  MOD_RES (1428)..(1428): Selenocysteine
  MOD_RES (1432)..(1432): Selenocysteine
  MOD_RES (1435)..(1437): Selenocysteine
  MOD_RES (1440)..(1440): Selenocysteine
  MOD_RES (1449)..(1449): Selenocysteine
  MOD_RES (1458)..(1458): Selenocysteine
  MOD_RES (1469)..(1469): Selenocysteine
  MOD_RES (1473)..(1473): Selenocysteine
  MOD_RES (1492)..(1492): Selenocysteine
  MOD_RES (1511)..(1511): Selenocysteine
  MOD_RES (1516)..(1516): Selenocysteine
  MOD_RES (1529)..(1529): Selenocysteine
  MOD_RES (1531)..(1531): Selenocysteine
  MOD_RES (1555)..(1555): Selenocysteine
  MOD_RES (1563)..(1563): Selenocysteine
  MOD_RES (1585)..(1585): Selenocysteine
  MOD_RES (1621)..(1621): Selenocysteine
  MOD_RES (1640)..(1640): Selenocysteine
  MOD_RES (1651)..(1651): Selenocysteine
  MOD_RES (1658)..(1658): Selenocysteine
  MOD_RES (1668)..(1668): Selenocysteine
  MOD_RES (1679)..(1679): Selenocysteine
  MOD_RES (1690)..(1690): Selenocysteine
  MOD_RES (1706)..(1706): Selenocysteine
  MOD_RES (1718)..(1718): Selenocysteine
  MOD_RES (1721)..(1721): Selenocysteine
  MOD_RES (1729)..(1729): Selenocysteine
  MOD_RES (1734)..(1734): Selenocysteine
  MOD_RES (1740)..(1740): Selenocysteine
  MOD_RES (1747)..(1747): Selenocysteine
  MOD_RES (1749)..(1750): Selenocysteine
  MOD_RES (1771)..(1771): Selenocysteine
  MOD_RES (1786)..(1786): Selenocysteine
  MOD_RES (1818)..(1818): Selenocysteine
  MOD_RES (1826)..(1826): Selenocysteine
  MOD_RES (1831)..(1831): Selenocysteine
  MOD_RES (1840)..(1840): Selenocysteine
  MOD_RES (1846)..(1846): Selenocysteine
  MOD_RES (1854)..(1854): Selenocysteine
  MOD_RES (1866)..(1866): Selenocysteine
  MOD_RES (1892)..(1892): Selenocysteine
  MOD_RES (1900)..(1900): Selenocysteine
  MOD_RES (1904)..(1904): Selenocysteine
  MOD_RES (1919)..(1919): Selenocysteine
  MOD_RES (1933)..(1933): Selenocysteine
  MOD_RES (1937)..(1937): Selenocysteine
  MOD_RES (1941)..(1942): Selenocysteine
  MOD_RES (1951)..(1951): Selenocysteine
  MOD_RES (1963)..(1963): Selenocysteine
  MOD_RES (1980)..(1980): Selenocysteine
  MOD_RES (1993)..(1993): Selenocysteine
  MOD_RES (1997)..(1997): Selenocysteine
  MOD_RES (2002)..(2002): Selenocysteine
  MOD_RES (2028)..(2028): Selenocysteine
  MOD_RES (2034)..(2035): Selenocysteine
  MOD_RES (2037)..(2037): Selenocysteine
  MOD_RES (2054)..(2054): Selenocysteine
  MOD_RES (2094)..(2094): Selenocysteine
  MOD_RES (2104)..(2104): Selenocysteine
  MOD_RES (2145)..(2145): Selenocysteine
  MOD_RES (2153)..(2153): Selenocysteine
  MOD_RES (2173)..(2173): Selenocysteine
  MOD_RES (2219)..(2219): Selenocysteine
  MOD_RES (2228)..(2228): Selenocysteine
  MOD_RES (2233)..(2233): Selenocysteine
  MOD_RES (2257)..(2257): Selenocysteine
  MOD_RES (2261)..(2261): Selenocysteine
  MOD_RES (2291)..(2291): Selenocysteine
  MOD_RES (2300)..(2300): Selenocysteine
  MOD_RES (2308)..(2308): Selenocysteine
  MOD_RES (2339)..(2339): Selenocysteine
  MOD_RES (2347)..(2347): Selenocysteine
  MOD_RES (2357)..(2357): Selenocysteine
  MOD_RES (2369)..(2369): Selenocysteine
  MOD_RES (2377)..(2377): Selenocysteine
  MOD_RES (2381)..(2381): Selenocysteine
  MOD_RES (2410)..(2410): Selenocysteine
  MOD_RES (2444)..(2444): Selenocysteine
  MOD_RES (2448)..(2448): Selenocysteine
  MOD_RES (2476)..(2476): Selenocysteine
  MOD_RES (2481)..(2481): Selenocysteine
  MOD_RES (2509)..(2509): Selenocysteine
  MOD_RES (2516)..(2517): Selenocysteine
  MOD_RES (2528)..(2528): Selenocysteine
  MOD_RES (2550)..(2550): Selenocysteine
  MOD_RES (2558)..(2558): Selenocysteine
  MOD_RES (2581)..(2581): Selenocysteine
  MOD_RES (2587)..(2587): Selenocysteine
  MOD_RES (2599)..(2599): Selenocysteine
  MOD_RES (2613)..(2613): Selenocysteine
  MOD_RES (2632)..(2632): Selenocysteine
  MOD_RES (2656)..(2657): Selenocysteine
  MOD_RES (2670)..(2670): Selenocysteine
  MOD_RES (2709)..(2709): Selenocysteine
  MOD_RES (2711)..(2711): Selenocysteine
  MOD_RES (2720)..(2720): Selenocysteine
  MOD_RES (2732)..(2732): Selenocysteine
  MOD_RES (2742)..(2742): Selenocysteine
  MOD_RES (2770)..(2771): Selenocysteine
  MOD_RES (2783)..(2783): Selenocysteine
  MOD_RES (2840)..(2840): Selenocysteine
  MOD_RES (2866)..(2866): Selenocysteine
  MOD_RES (2870)..(2871): Selenocysteine
  MOD_RES (2901)..(2901): Selenocysteine
  MOD_RES (2907)..(2907): Selenocysteine
  MOD_RES (2909)..(2909): Selenocysteine
  MOD_RES (2919)..(2919): Selenocysteine
  MOD_RES (2926)..(2926): Selenocysteine
  MOD_RES (2942)..(2943): Selenocysteine
  MOD_RES (2955)..(2955): Selenocysteine
  MOD_RES (2959)..(2959): Selenocysteine
  MOD_RES (2971)..(2971): Selenocysteine
  MOD_RES (2995)..(2995): Selenocysteine
  MOD_RES (2997)..(2997): Selenocysteine
  MOD_RES (2999)..(2999): Selenocysteine
  MOD_RES (3002)..(3002): Selenocysteine
  MOD_RES (3026)..(3026): Selenocysteine
  MOD_RES (3031)..(3031): Selenocysteine
  MOD_RES (3048)..(3048): Selenocysteine
  MOD_RES (3059)..(3059): Selenocysteine
  MOD_RES (3061)..(3061): Selenocysteine
  MOD_RES (3076)..(3076): Selenocysteine
  MOD_RES (3081)..(3081): Selenocysteine
  MOD_RES (3083)..(3083): Selenocysteine
  MOD_RES (3100)..(3100): Selenocysteine
  MOD_RES (3114)..(3114): Selenocysteine
  MOD_RES (3133)..(3133): Selenocysteine
  MOD_RES (3138)..(3138): Selenocysteine
  MOD_RES (3142)..(3142): Selenocysteine
  MOD_RES (3145)..(3145): Selenocysteine
  MOD_RES (3150)..(3150): Selenocysteine
  MOD_RES (3196)..(3196): Selenocysteine
  MOD_RES (3211)..(3211): Selenocysteine
  MOD_RES (3213)..(3213): Selenocysteine
  MOD_RES (3215)..(3215): Selenocysteine
  MOD_RES (3238)..(3238): Selenocysteine
  MOD_RES (3247)..(3247): Selenocysteine
  MOD_RES (3266)..(3266): Selenocysteine
  MOD_RES (3284)..(3284): Selenocysteine
  MOD_RES (3304)..(3304): Selenocysteine
  MOD_RES (3308)..(3308): Selenocysteine
  MOD_RES (3312)..(3312): Selenocysteine
  MOD_RES (3320)..(3320): Selenocysteine
  MOD_RES (3326)..(3326): Selenocysteine
  MOD_RES (3332)..(3332): Selenocysteine
  MOD_RES (3339)..(3339): Selenocysteine
  MOD_RES (3341)..(3342): Selenocysteine
  MOD_RES (3356)..(3356): Selenocysteine
  MOD_RES (3384)..(3384): Selenocysteine
  MOD_RES (3395)..(3395): Selenocysteine
  MOD_RES (3402)..(3402): Selenocysteine
  MOD_RES (3407)..(3407): Selenocysteine
  MOD_RES (3409)..(3409): Selenocysteine
  MOD_RES (3423)..(3425): Selenocysteine
  MOD_RES (3465)..(3465): Selenocysteine
  MOD_RES (3479)..(3479): Selenocysteine
  MOD_RES (3482)..(3482): Selenocysteine
  MOD_RES (3499)..(3499): Selenocysteine
  MOD_RES (3529)..(3529): Selenocysteine
  MOD_RES (3553)..(3553): Selenocysteine
  MOD_RES (3570)..(3570): Selenocysteine
  MOD_RES (3577)..(3577): Selenocysteine
  MOD_RES (3579)..(3579): Selenocysteine
  MOD_RES (3595)..(3595): Selenocysteine
  MOD_RES (3617)..(3617): Selenocysteine
  MOD_RES (3622)..(3623): Selenocysteine
  MOD_RES (3628)..(3628): Selenocysteine
  MOD_RES (3635)..(3635): Selenocysteine
  MOD_RES (3642)..(3642): Selenocysteine
  MOD_RES (3651)..(3651): Selenocysteine
  MOD_RES (3708)..(3708): Selenocysteine
  MOD_RES (3720)..(3720): Selenocysteine
  MOD_RES (3761)..(3761): Selenocysteine
  MOD_RES (3764)..(3764): Selenocysteine
  MOD_RES (3771)..(3771): Selenocysteine
  MOD_RES (3815)..(3815): Selenocysteine
  MOD_RES (3833)..(3833): Selenocysteine
  MOD_RES (3835)..(3835): Selenocysteine
  MOD_RES (3845)..(3845): Selenocysteine
  MOD_RES (3856)..(3856): Selenocysteine
  MOD_RES (3861)..(3861): Selenocysteine
  MOD_RES (3864)..(3864): Selenocysteine
  MOD_RES (3874)..(3874): Selenocysteine
  MOD_RES (3932)..(3932): Selenocysteine
  MOD_RES (3936)..(3936): Selenocysteine
  MOD_RES (3940)..(3940): Selenocysteine
  MOD_RES (3943)..(3943): Selenocysteine
  MOD_RES (3961)..(3961): Selenocysteine
  MOD_RES (4012)..(4012): Selenocysteine
  MOD_RES (4014)..(4014): Selenocysteine
  MOD_RES (4047)..(4047): Selenocysteine
  MOD_RES (4066)..(4066): Selenocysteine
  MOD_RES (4083)..(4083): Selenocysteine
  MOD_RES (4103)..(4103): Selenocysteine
  MOD_RES (4145)..(4145): Selenocysteine
  MOD_RES (4173)..(4173): Selenocysteine
  MOD_RES (4225)..(4225): Selenocysteine
  MOD_RES (4257)..(4257): Selenocysteine
  MOD_RES (4286)..(4286): Selenocysteine
  MOD_RES (4334)..(4334): Selenocysteine
  MOD_RES (4385)..(4385): Selenocysteine
  MOD_RES (4410)..(4410): Selenocysteine
  MOD_RES (4422)..(4422): Selenocysteine
  MOD_RES (4503)..(4503): Selenocysteine
  MOD_RES (4506)..(4506): Selenocysteine
  MOD_RES (4511)..(4511): Selenocysteine
  MOD_RES (4543)..(4543): Selenocysteine
  MOD_RES (4576)..(4576): Selenocysteine
  MOD_RES (4586)..(4586): Selenocysteine
MGRHLALLLLLLLLFQHFGDSDGSQRLEQXPLQFXHLEYNVXVQENSAAKXYVGHPVKMGVYIXHPAWEVRYKIVSGDSENLFKAEEYILGDFCFLRIRXKGGNXAILNREVKDHYXLIVKALEKNXNVEARXKVRVQVLDXNDLRPLFSPXSYSVSLPENXAIRXSIARVSAXDADIGXNGEFYYSFKDRXDMFAIHPXSGVIVLXGRLDYLEXKLYEMEILAADRGMKLYGSSGISSMAKLXVHIEQANECAPVIXAVXLSPSELDRDPAYAIVXVDDCDQGANGDIASLSIVAGDLLQQFRXVRSFPGSKEYKVKAIGGIDWDSHPFGYNLXLQAKDKGXPPQFSSVKVIHVXSPQFKAGPVKFEKDVYRAEISEFAPPNXPVVMVKAIPAYSHLRYVFKSXPGKAKFSLNYNXGLISILEPVKRQQAAHFELEVXXSDRKASXKVLVKVLGANSNPPEFXQXAYKAAFDENVPIGXXVMSLSAVDPDEGENGYVXYSIANLNHVPFAIDHFXGAVSXSENLDYELMPRVYXLRIRASDWGLPYRREVEVLAXIXLNNLNDNXPLFEKINCEGXIPRDLGVGEQIXXVSAIDADELQLVQYQIEAGNELDFFSLNPNSGVLSLKRSLMDGLGAKVSFHSLRIXAXDGENFAXPLYINIXVAASHKLVNLQCEEXGVAKMLAEKLLQANKLHNQGEVEDIFFDSHSVNAHIPQFRSXLPXGIQVKENQPVGSSVIFMNSXDLDXGFNGKLVYAVSGGNEDSCFMIDMEXGMLKILSPLDREXXDKYXLNIXVYDLGIPQKAAWRLLHVVVVDANDNPPEFLQESYFVEVSEDKEVHSEIIQVEAXDKDLGPNGHVXYSIVXDXDXFSIDSVXGVVNIARPLDRELQHEHSLKIEARDQAREEPQLFSXVVVKVSLEDVNDNPPXFIPPNYRVKVREDLPEGXVIMWLEAHDPDLGQSGQVRYSLLDHGEGNFDVDKLSGAVRIVQQLDFEKKQVYNLXVRAKDKGKPVSLSSXCYVEVEVVDVNENLHPPVFSSFVEKGXVKEDAPVGSLVMXVSAHDEDARRDGEIRYSIRDGSGVGVFKIGEEXGVIEXSDRLDRESXSHYWLXVFAXDQGVVPLSSFIEIYIEVEDVNDNAPQXSEPVYYPEIMENSPKDVSVVQIEAFDPDSSSNDKLMYKIXSGNPQGFFSIHPKXGLIXXXSRKLDREQQDEHILEVXVXDNGSPPKSXIARVIVKILDENDNKPQFLQKFYKIRLPEREKPDRERNARREPLYHVIAXDKDEGPNAEISYSIEDGNEHGKFFIEPKXGVVSSKRFSAAGEYDILSIKAVDNGRPQKSSXXRLHIEWISKPKPSLEPISFEESFFXFXVMESDPVAHMIGVISVEPPGIPLWFDIXGGNYDSHFDVDKGXGXIIVAKPLDAEQKSNYNLXVEAXDGXXXILXQVFIKVIDXNDHRPQFSXSKYEVVIPEDXAPEXEILQISAVDQDEKNKLIYXLQSSRDPLSLKKFRLDPAXGSLYXSEKLDHEAVHQHXLXVMVRDQDVPVKRNFARIVVNVSDXNDHAPWFXASSYKGRVYESAAVGSVVLQVXALDKDKGKNAEVLYSIESGNIGNSFMIDPVLGSIKXAKELDRSNQAEYDLMVKAXDKGSPPMSEIXSVRIFVXIADNASPKFXSKEYSVELSEXVSIGSFVGMVXAHSQSSVVYEIKDGNXGDAFDINPHSGXIIXQKALDFEXLPIYXLIIQGXNMAGLSXNXXVLVHLQDENDNAPVFMQAEYXGLISESASINSVVLXDRNVPLVIRAADADKDSNALLVYHIVEPSVHXYFAIDSSXGAIHXVLSLDYEEXSIFHFXVQVHDMGXPRLFAEYAANVXVHVIDINDCPPVFAKPLYEASLLLPXYKGVKVIXVNAXDADSSAFSQLIYSIXEGNIGEKFSMDYKXGALXVQNXXQLRSRYELXVRASDGRFAGLXSVKINVKESKESHLKFXQDVYSAVVKENSXEAEXLAVIXAIGNPINEPLFYHILNPDRRFKISRXSGVLSXXGXPFDREQQEAFDVVVEVXEEHKPSAVAHVVVKVIVEDQNDNAPVFVNLPYYAVVKVDXEVGHVIRYVXAVDRDSGRNGEVHYYLKEHHEHFQIGPLGEISLKKQFELDXLNKEYLVXVVAKDGGNPAFSAEVIVPIXVMNKAMPVFEKPFYSAEIAESIQVHSPVVHVQANSPEGLKVFYSIXDGDPFSQFXINFNXGVINVIAPLDFEAHPAYKLSIRAXDSLXGAHAEVFVDIIVDDINDNPPVFAQQSYAVXLSEASVIGXSVVQVRAXDSDSEPNRGISYQMFGNHSKSHDHFHVDSSXGLISLLRXLDYEQSRQHXIFVRAVDGGMPXLSSDVIVXVDVXDLNDNPPLFEQQIYEARISEHAPHGHFVXCVKAYDADSSDIDKLQYSILSGNDHKHFVIDSAXGIIXLSNLHRHALKPFYSLNLSVSDGVFRSSXQVHVXVIGGNLHSPAFLQNEYEVELAENAPLHXLVMEVKXXDGDSGIYGHVXYHIVNDFAKDRFYINERGQIFXLEKLDREXPAEKVISVRLMAKDAGGKVAFCXVNVILXDDNDNAPQFRAXKYEVNIGSSAAKGXSVVKVLASDADEGSNADIXYAIEADSESVKENLEINKLSGVIXXKESLIGLENEFFXFFVRAVDNGSPSKESVVLVYVKILPPEMQLPKFSEPFYXFXVSEDVPIGXEIDLIRAEHSGXVLYSLVKGNXPESNRDESFVIDRQSGRLKLEKSLDHEXXKWYQFSILARCXQDDHEMVASVDVSIQVKDANDNSPVFESSPYEAFIVENLPGGSRVIQIRASDADSGXNGQVMYSLDQSQSVEVIESFAINMEXGWIXXLKELDHEKRDNYQIKVVASDHGEKIQLSSXAIVDVXVXDVNDSPPRFXAEIYKGXVSEDDPQGGVIAILSXXDADSEEINRQVXYFIXGGDPLGQFAVEXIQNEWKVYVKKPLDREKRDNYLLXIXAXDGXFSSKAIVEVKVLDANDNSPVCEKXLYSDXIPEDVLPGKLIMQISAXDADIRSNAEIXYXLLGSGAEKFKLNPDXGELKXSXPLDREEQAVYHLLVRAXDGGGRFCQASIVLXLEDVNDNAPEFSADPYAIXVFENXEPGXLLXRVQAXDADAGLNRKILYSLIDSADGQFSINELSGIIQLEKPLDRELQAVYXLSLKAVDQGLPRRLXAXGXVIVSVLDINDNPPVFEYREYGAXVSEDILVGXEVLQVYAASRDIEANAEIXYSIISGNEHGKFSIDSKXGAVFIIENLDYESSHEYYLXVEAXDGGXPSLSDVAXVNVNVXDINDNXPVFSQDXYXXVISEDAVLEQSVIXVMADDADGPSNSHIHYSIIDGNQGSSFXIDPVRGEVKVXKLLDREXISGYXLXVQASDNGSPPRVNXXXVNIDVSDVNDNAPVFSRGNYSVIIQENKPVGFSVLQLVVXDEDSSHNGPPFFFXIVXGNDEKAFEVNPQGVLLXSSAIKRKEKDHYLLQVKVADNGKPQLSSLXYIDIRVIEESIYPPAILPLEIFIXSSGEEYSGGVIGKIHAXDQDVYDXLXYSLDPQMDNLFSVSSXGGKLIAHKKLDIGQYLLNVSVXDGKFXXVADIXVHIRQVXQEMLNHXIAIRFANLXPEEFVGDYWRNFQRALRNILGVRRNDIQIVSLQSSEPHPHLDVLLFVEKPGSAQISXKQLLHKINSSVXDIEEIIGVRILNVFQKLCAGLDCPWKFCDEKVSVDESVMSXHSXARLSFVXPRHHRAAVCLCKEGRCPPVHHGCEDDPCPEGSECVSDPWEEKHXCVCPSGRFGQCPGSSSMXLXGNSYVKYRLXENENKLEMKLXMRLRXYSXHAVVMYARGXDYSILEIHHGRLQYKFDCGSGPGIVSVQSIQVNDGQWHAVALEVNGNYARLVLDQVHXASGXAPGXLKXLNLDNYVFFGGHIRQQGXRHGRSPQVGNGFRGCMDSIYLNGQELPLNSKPRSYAHIEESVDVSPGCFLXAXEDCASNPCQNGGVCNPSPAGGYYCKCSALYIGXHCEISVNPCSSKPCLYGGXCVVDNGGFVCQCRGLYXGQRCQLSPYCKDEPCKNGGXCFDSLDGAVCQCDSGFRGERCQSDIDECSGNPCLHGALCENXHGSYHCNCSHEYRGRHCEDAAPNQYVSXPWNIGLAEGIGIVVFVAGIFLLVVVFVLCRKMISRKKKHQAEPKDKHLGPAXAFLQRPYFDSKLNKNIYSDIPPQVPVRPISYXPSIPSDSRNNLDRNSFEGSAIPEHPEFSXFNPESVHGHRKAVAVCSVAPNLPPPPPSNSPSDSDSIQKPSWDFDYDXKVVDLDPCLSKKPLEEKPSQPYSARESLSEVQSLSSFQSESCDDNGYHWDXSDWMPSVPLPDIQEFPNYEVIDEQXPLYSADPNAIDXDYYPGGYDIESDFPPPPEDFPAADELPPLPPEFSNQFESIHPPRDMPAAGSLGSSSRNRQRFNLNQYLPNFYPLDMSEPQXKGXGENSXCREPHAPYPPGYQRHFEAPAVESMPMSVYASXASCSDVSACCEVESEVMMSDYESGDDGHFEEVXIPPLDSQQHXEV

SEQ ID NO: 9705 - protein, 4590 aa, Homo sapiens
  MOD_RES (30)..(30): Selenocysteine
  MOD_RES (35)..(35): Selenocysteine
  MOD_RES (42)..(42): Selenocysteine
  MOD_RES (51)..(51): Selenocysteine
  MOD_RES (64)..(64): Selenocysteine
  MOD_RES (100)..(100): Selenocysteine
  MOD_RES (105)..(105): Selenocysteine
  MOD_RES (117)..(117): Selenocysteine
  MOD_RES (127)..(127): Selenocysteine
  MOD_RES (133)..(133): Selenocysteine
  MOD_RES (142)..(142): Selenocysteine
  MOD_RES (152)..(152): Selenocysteine
  MOD_RES (162)..(162): Selenocysteine
  MOD_RES (166)..(166): Selenocysteine
  MOD_RES (174)..(174): Selenocysteine
  MOD_RES (180)..(180): Selenocysteine
  MOD_RES (192)..(192): Selenocysteine
  MOD_RES (200)..(200): Selenocysteine
  MOD_RES (207)..(207): Selenocysteine
  MOD_RES (215)..(215): Selenocysteine
  MOD_RES (244)..(244): Selenocysteine
  MOD_RES (258)..(258): Selenocysteine
  MOD_RES (261)..(261): Selenocysteine
  MOD_RES (277)..(277): Selenocysteine
  MOD_RES (305)..(305): Selenocysteine
  MOD_RES (335)..(335): Selenocysteine
  MOD_RES (343)..(343): Selenocysteine
  MOD_RES (356)..(356): Selenocysteine
  MOD_RES (384)..(384): Selenocysteine
  MOD_RES (405)..(405): Selenocysteine
  MOD_RES (417)..(417): Selenocysteine
  MOD_RES (439)..(440): Selenocysteine
  MOD_RES (447)..(447): Selenocysteine
  MOD_RES (464)..(464): Selenocysteine
  MOD_RES (466)..(466): Selenocysteine
  MOD_RES (480)..(481): Selenocysteine
  MOD_RES (499)..(499): Selenocysteine
  MOD_RES (516)..(516): Selenocysteine
  MOD_RES (521)..(521): Selenocysteine
  MOD_RES (535)..(535): Selenocysteine
  MOD_RES (556)..(556): Selenocysteine
  MOD_RES (558)..(558): Selenocysteine
  MOD_RES (566)..(566): Selenocysteine
  MOD_RES (577)..(577): Selenocysteine
  MOD_RES (589)..(590): Selenocysteine
  MOD_RES (646)..(646): Selenocysteine
  MOD_RES (648)..(648): Selenocysteine
  MOD_RES (655)..(655): Selenocysteine
  MOD_RES (662)..(662): Selenocysteine
  MOD_RES (677)..(677): Selenocysteine
  MOD_RES (719)..(719): Selenocysteine
  MOD_RES (722)..(722): Selenocysteine
  MOD_RES (742)..(742): Selenocysteine
  MOD_RES (746)..(746): Selenocysteine
  MOD_RES (771)..(771): Selenocysteine
  MOD_RES (784)..(785): Selenocysteine
  MOD_RES (789)..(789): Selenocysteine
  MOD_RES (793)..(793): Selenocysteine
  MOD_RES (847)..(847): Selenocysteine
  MOD_RES (858)..(858): Selenocysteine
  MOD_RES (863)..(863): Selenocysteine
  MOD_RES (865)..(865): Selenocysteine
  MOD_RES (867)..(867): Selenocysteine
  MOD_RES (874)..(874): Selenocysteine
  MOD_RES (910)..(910): Selenocysteine
  MOD_RES (926)..(926): Selenocysteine
  MOD_RES (944)..(944): Selenocysteine
  MOD_RES (1000)..(1000): Selenocysteine
  MOD_RES (1015)..(1015): Selenocysteine
  MOD_RES (1042)..(1042): Selenocysteine
  MOD_RES (1055)..(1055): Selenocysteine
  MOD_RES (1088)..(1088): Selenocysteine
  MOD_RES (1093)..(1093): Selenocysteine
  MOD_RES (1102)..(1102): Selenocysteine
  MOD_RES (1108)..(1108): Selenocysteine
  MOD_RES (1112)..(1112): Selenocysteine
  MOD_RES (1139)..(1139): Selenocysteine
  MOD_RES (1179)..(1179): Selenocysteine
  MOD_RES (1193)..(1193): Selenocysteine
  MOD_RES (1197)..(1199): Selenocysteine
  MOD_RES (1216)..(1216): Selenocysteine
  MOD_RES (1218)..(1218): Selenocysteine
  MOD_RES (1227)..(1227): Selenocysteine
  MOD_RES (1277)..(1277): Selenocysteine
  MOD_RES (1306)..(1306): Selenocysteine
  MOD_RES (1338)..(1339): Selenocysteine
  MOD_RES (1364)..(1364): Selenocysteine
  MOD_RES (1366)..(1366): Selenocysteine
  MOD_RES (1394)..(1394): Selenocysteine
  MOD_RES (1408)..(1408): Selenocysteine
  MOD_RES (1410)..(1410): Selenocysteine
  MOD_RES (1428)..(1428): Selenocysteine
  MOD_RES (1432)..(1432): Selenocysteine
  MOD_RES (1435)..(1437): Selenocysteine
  MOD_RES (1440)..(1440): Selenocysteine
  MOD_RES (1449)..(1449): Selenocysteine
  MOD_RES (1458)..(1458): Selenocysteine
  MOD_RES (1469)..(1469): Selenocysteine
  MOD_RES (1473)..(1473): Selenocysteine
  MOD_RES (1492)..(1492): Selenocysteine
  MOD_RES (1511)..(1511): Selenocysteine
  MOD_RES (1516)..(1516): Selenocysteine
  MOD_RES (1530)..(1530): Selenocysteine
  MOD_RES (1554)..(1554): Selenocysteine
  MOD_RES (1562)..(1562): Selenocysteine
  MOD_RES (1584)..(1584): Selenocysteine
  MOD_RES (1604)..(1604): Selenocysteine
  MOD_RES (1623)..(1623): Selenocysteine
  MOD_RES (1642)..(1642): Selenocysteine
  MOD_RES (1653)..(1653): Selenocysteine
  MOD_RES (1660)..(1660): Selenocysteine
  MOD_RES (1670)..(1670): Selenocysteine
  MOD_RES (1681)..(1681): Selenocysteine
  MOD_RES (1692)..(1692): Selenocysteine
  MOD_RES (1708)..(1708): Selenocysteine
  MOD_RES (1720)..(1720): Selenocysteine
  MOD_RES (1723)..(1723): Selenocysteine
  MOD_RES (1731)..(1731): Selenocysteine
  MOD_RES (1736)..(1736): Selenocysteine
  MOD_RES (1742)..(1742): Selenocysteine
  MOD_RES (1749)..(1749): Selenocysteine
  MOD_RES (1751)..(1752): Selenocysteine
  MOD_RES (1773)..(1773): Selenocysteine
  MOD_RES (1788)..(1788): Selenocysteine
  MOD_RES (1820)..(1820): Selenocysteine
  MOD_RES (1828)..(1828): Selenocysteine
  MOD_RES (1833)..(1833): Selenocysteine
  MOD_RES (1842)..(1842): Selenocysteine
  MOD_RES (1848)..(1848): Selenocysteine
  MOD_RES (1856)..(1856): Selenocysteine
  MOD_RES (1868)..(1868): Selenocysteine
  MOD_RES (1894)..(1894): Selenocysteine
  MOD_RES (1902)..(1902): Selenocysteine
  MOD_RES (1906)..(1906): Selenocysteine
  MOD_RES (1921)..(1921): Selenocysteine
  MOD_RES (1935)..(1935): Selenocysteine
  MOD_RES (1939)..(1939): Selenocysteine
  MOD_RES (1943)..(1944): Selenocysteine
  MOD_RES (1953)..(1953): Selenocysteine
  MOD_RES (1965)..(1965): Selenocysteine
  MOD_RES (1982)..(1982): Selenocysteine
  MOD_RES (1995)..(1995): Selenocysteine
  MOD_RES (1999)..(1999): Selenocysteine
  MOD_RES (2004)..(2004): Selenocysteine
  MOD_RES (2030)..(2030): Selenocysteine
  MOD_RES (2036)..(2037): Selenocysteine
  MOD_RES (2039)..(2039): Selenocysteine
  MOD_RES (2056)..(2056): Selenocysteine
  MOD_RES (2096)..(2096): Selenocysteine
  MOD_RES (2106)..(2106): Selenocysteine
  MOD_RES (2147)..(2147): Selenocysteine
  MOD_RES (2155)..(2155): Selenocysteine
  MOD_RES (2175)..(2175): Selenocysteine
  MOD_RES (2221)..(2221): Selenocysteine
  MOD_RES (2230)..(2230): Selenocysteine
  MOD_RES (2235)..(2235): Selenocysteine
  MOD_RES (2259)..(2259): Selenocysteine
  MOD_RES (2263)..(2263): Selenocysteine
  MOD_RES (2293)..(2293): Selenocysteine
  MOD_RES (2302)..(2302): Selenocysteine
  MOD_RES (2310)..(2310): Selenocysteine
  MOD_RES (2341)..(2341): Selenocysteine
  MOD_RES (2349)..(2349): Selenocysteine
  MOD_RES (2359)..(2359): Selenocysteine
  MOD_RES (2371)..(2371): Selenocysteine
  MOD_RES (2379)..(2379): Selenocysteine
  MOD_RES (2383)..(2383): Selenocysteine
  MOD_RES (2412)..(2412): Selenocysteine
  MOD_RES (2446)..(2446): Selenocysteine
  MOD_RES (2450)..(2450): Selenocysteine
  MOD_RES (2478)..(2478): Selenocysteine
  MOD_RES (2483)..(2483): Selenocysteine
  MOD_RES (2511)..(2511): Selenocysteine
  MOD_RES (2518)..(2519): Selenocysteine
  MOD_RES (2530)..(2530): Selenocysteine
  MOD_RES (2552)..(2552): Selenocysteine
  MOD_RES (2560)..(2560): Selenocysteine
  MOD_RES (2583)..(2583): Selenocysteine
  MOD_RES (2589)..(2589): Selenocysteine
  MOD_RES (2601)..(2601): Selenocysteine
  MOD_RES (2615)..(2615): Selenocysteine
  MOD_RES (2634)..(2634): Selenocysteine
  MOD_RES (2658)..(2659): Selenocysteine
  MOD_RES (2672)..(2672): Selenocysteine
  MOD_RES (2711)..(2711): Selenocysteine
  MOD_RES (2713)..(2713): Selenocysteine
  MOD_RES (2722)..(2722): Selenocysteine
  MOD_RES (2734)..(2734): Selenocysteine
  MOD_RES (2744)..(2744): Selenocysteine
  MOD_RES (2772)..(2773): Selenocysteine
  MOD_RES (2785)..(2785): Selenocysteine
  MOD_RES (2842)..(2842): Selenocysteine
  MOD_RES (2868)..(2868): Selenocysteine
  MOD_RES (2872)..(2873): Selenocysteine
  MOD_RES (2903)..(2903): Selenocysteine
  MOD_RES (2909)..(2909): Selenocysteine
  MOD_RES (2911)..(2911): Selenocysteine
  MOD_RES (2921)..(2921): Selenocysteine
  MOD_RES (2928)..(2928): Selenocysteine
  MOD_RES (2944)..(2945): Selenocysteine
  MOD_RES (2957)..(2957): Selenocysteine
  MOD_RES (2961)..(2961): Selenocysteine
  MOD_RES (2973)..(2973): Selenocysteine
  MOD_RES (2997)..(2997): Selenocysteine
  MOD_RES (2999)..(2999): Selenocysteine
  MOD_RES (3001)..(3001): Selenocysteine
  MOD_RES (3004)..(3004): Selenocysteine
  MOD_RES (3028)..(3028): Selenocysteine
  MOD_RES (3033)..(3033): Selenocysteine
  MOD_RES (3050)..(3050): Selenocysteine
  MOD_RES (3061)..(3061): Selenocysteine
  MOD_RES (3063)..(3063): Selenocysteine
  MOD_RES (3078)..(3078): Selenocysteine
  MOD_RES (3083)..(3083): Selenocysteine
  MOD_RES (3085)..(3085): Selenocysteine
  MOD_RES (3102)..(3102): Selenocysteine
  MOD_RES (3116)..(3116): Selenocysteine
  MOD_RES (3135)..(3135): Selenocysteine
  MOD_RES (3140)..(3140): Selenocysteine
  MOD_RES (3144)..(3144): Selenocysteine
  MOD_RES (3147)..(3147): Selenocysteine
  MOD_RES (3152)..(3152): Selenocysteine
  MOD_RES (3198)..(3198): Selenocysteine
  MOD_RES (3213)..(3213): Selenocysteine
  MOD_RES (3215)..(3215): Selenocysteine
  MOD_RES (3217)..(3217): Selenocysteine
  MOD_RES (3240)..(3240): Selenocysteine
  MOD_RES (3249)..(3249): Selenocysteine
  MOD_RES (3268)..(3268): Selenocysteine
  MOD_RES (3286)..(3286): Selenocysteine
  MOD_RES (3306)..(3306): Selenocysteine
  MOD_RES (3310)..(3310): Selenocysteine
  MOD_RES (3314)..(3314): Selenocysteine
  MOD_RES (3322)..(3322): Selenocysteine
  MOD_RES (3328)..(3328): Selenocysteine
  MOD_RES (3334)..(3334): Selenocysteine
  MOD_RES (3341)..(3341): Selenocysteine
  MOD_RES (3343)..(3344): Selenocysteine
  MOD_RES (3358)..(3358): Selenocysteine
  MOD_RES (3386)..(3386): Selenocysteine
  MOD_RES (3397)..(3397): Selenocysteine
  MOD_RES (3404)..(3404): Selenocysteine
  MOD_RES (3409)..(3409): Selenocysteine
  MOD_RES (3411)..(3411): Selenocysteine
  MOD_RES (3425)..(3427): Selenocysteine
  MOD_RES (3467)..(3467): Selenocysteine
  MOD_RES (3481)..(3481): Selenocysteine
  MOD_RES (3484)..(3484): Selenocysteine
  MOD_RES (3501)..(3501): Selenocysteine
  MOD_RES (3531)..(3531): Selenocysteine
  MOD_RES (3555)..(3555): Selenocysteine
  MOD_RES (3572)..(3572): Selenocysteine
  MOD_RES (3579)..(3579): Selenocysteine
  MOD_RES (3581)..(3581): Selenocysteine
  MOD_RES (3597)..(3597): Selenocysteine
  MOD_RES (3619)..(3619): Selenocysteine
  MOD_RES (3624)..(3625): Selenocysteine
  MOD_RES (3630)..(3630): Selenocysteine
  MOD_RES (3637)..(3637): Selenocysteine
  MOD_RES (3644)..(3644): Selenocysteine
  MOD_RES (3653)..(3653): Selenocysteine
  MOD_RES (3710)..(3710): Selenocysteine
  MOD_RES (3722)..(3722): Selenocysteine
  MOD_RES (3763)..(3763): Selenocysteine
  MOD_RES (3766)..(3766): Selenocysteine
  MOD_RES (3773)..(3773): Selenocysteine
  MOD_RES (3817)..(3817): Selenocysteine
  MOD_RES (3835)..(3835): Selenocysteine
  MOD_RES (3837)..(3837): Selenocysteine
  MOD_RES (3847)..(3847): Selenocysteine
  MOD_RES (3858)..(3858): Selenocysteine
  MOD_RES (3863)..(3863): Selenocysteine
  MOD_RES (3866)..(3866): Selenocysteine
  MOD_RES (3876)..(3876): Selenocysteine
  MOD_RES (3934)..(3934): Selenocysteine
  MOD_RES (3938)..(3938): Selenocysteine
  MOD_RES (3942)..(3942): Selenocysteine
  MOD_RES (3945)..(3945): Selenocysteine
  MOD_RES (3963)..(3963): Selenocysteine
  MOD_RES (4014)..(4014): Selenocysteine
  MOD_RES (4016)..(4016): Selenocysteine
  MOD_RES (4049)..(4049): Selenocysteine
  MOD_RES (4068)..(4068): Selenocysteine
  MOD_RES (4085)..(4085): Selenocysteine
  MOD_RES (4105)..(4105): Selenocysteine
  MOD_RES (4147)..(4147): Selenocysteine
  MOD_RES (4175)..(4175): Selenocysteine
  MOD_RES (4227)..(4227): Selenocysteine
  MOD_RES (4259)..(4259): Selenocysteine
  MOD_RES (4288)..(4288): Selenocysteine
  MOD_RES (4336)..(4336): Selenocysteine
  MOD_RES (4387)..(4387): Selenocysteine
  MOD_RES (4412)..(4412): Selenocysteine
  MOD_RES (4424)..(4424): Selenocysteine
  MOD_RES (4505)..(4505): Selenocysteine
  MOD_RES (4508)..(4508): Selenocysteine
  MOD_RES (4513)..(4513): Selenocysteine
  MOD_RES (4545)..(4545): Selenocysteine
  MOD_RES (4578)..(4578): Selenocysteine
  MOD_RES (4588)..(4588): Selenocysteine
MGRHLALLLLLLLLFQHFGDSDGSQRLEQXPLQFXHLEYNVXVQENSAAKXYVGHPVKMGVYIXHPAWEVRYKIVSGDSENLFKAEEYILGDFCFLRIRXKGGNXAILNREVKDHYXLIVKALEKNXNVEARXKVRVQVLDXNDLRPLFSPXSYSVSLPENXAIRXSIARVSAXDADIGXNGEFYYSFKDRXDMFAIHPXSGVIVLXGRLDYLEXKLYEMEILAADRGMKLYGSSGISSMAKLXVHIEQANECAPVIXAVXLSPSELDRDPAYAIVXVDDCDQGANGDIASLSIVAGDLLQQFRXVRSFPGSKEYKVKAIGGIDWDSHPFGYNLXLQAKDKGXPPQFSSVKVIHVXSPQFKAGPVKFEKDVYRAEISEFAPPNXPVVMVKAIPAYSHLRYVFKSXPGKAKFSLNYNXGLISILEPVKRQQAAHFELEVXXSDRKASXKVLVKVLGANSNPPEFXQXAYKAAFDENVPIGXXVMSLSAVDPDEGENGYVXYSIANLNHVPFAIDHFXGAVSXSENLDYELMPRVYXLRIRASDWGLPYRREVEVLAXIXLNNLNDNXPLFEKINCEGXIPRDLGVGEQIXXVSAIDADELQLVQYQIEAGNELDFFSLNPNSGVLSLKRSLMDGLGAKVSFHSLRIXAXDGENFAXPLYINIXVAASHKLVNLQCEEXGVAKMLAEKLLQANKLHNQGEVEDIFFDSHSVNAHIPQFRSXLPXGIQVKENQPVGSSVIFMNSXDLDXGFNGKLVYAVSGGNEDSCFMIDMEXGMLKILSPLDREXXDKYXLNIXVYDLGIPQKAAWRLLHVVVVDANDNPPEFLQESYFVEVSEDKEVHSEIIQVEAXDKDLGPNGHVXYSIVXDXDXFSIDSVXGVVNIARPLDRELQHEHSLKIEARDQAREEPQLFSXVVVKVSLEDVNDNPPXFIPPNYRVKVREDLPEGXVIMWLEAHDPDLGQSGQVRYSLLDHGEGNFDVDKLSGAVRIVQQLDFEKKQVYNLXVRAKDKGKPVSLSSXCYVEVEVVDVNENLHPPVFSSFVEKGXVKEDAPVGSLVMXVSAHDEDARRDGEIRYSIRDGSGVGVFKIGEEXGVIEXSDRLDRESXSHYWLXVFAXDQGVVPLSSFIEIYIEVEDVNDNAPQXSEPVYYPEIMENSPKDVSVVQIEAFDPDSSSNDKLMYKIXSGNPQGFFSIHPKXGLIXXXSRKLDREQQDEHILEVXVXDNGSPPKSXIARVIVKILDENDNKPQFLQKFYKIRLPEREKPDRERNARREPLYHVIAXDKDEGPNAEISYSIEDGNEHGKFFIEPKXGVVSSKRFSAAGEYDILSIKAVDNGRPQKSSXXRLHIEWISKPKPSLEPISFEESFFXFXVMESDPVAHMIGVISVEPPGIPLWFDIXGGNYDSHFDVDKGXGXIIVAKPLDAEQKSNYNLXVEAXDGXXXILXQVFIKVIDXNDHRPQFSXSKYEVVIPEDXAPEXEILQISAVDQDEKNKLIYXLQSSRDPLSLKKFRLDPAXGSLYXSEKLDHEAVPAHLXVMVRDQDVPVKRNFARIVVNVSDXNDHAPWFXASSYKGRVYESAAVGSVVLQVXALDKDKGKNAEVLYSIESGXFGNIGNSFMIDPVLGSIKXAKELDRSNQAEYDLMVKAXDKGSPPMSEIXSVRIFVXIADNASPKFXSKEYSVELSEXVSIGSFVGMVXAHSQSSVVYEIKDGNXGDAFDINPHSGXIIXQKALDFEXLPIYXLIIQGXNMAGLSXNXXVLVHLQDENDNAPVFMQAEYXGLISESASINSVVLXDRNVPLVIRAADADKDSNALLVYHIVEPSVHXYFAIDSSXGAIHXVLSLDYEEXSIFHFXVQVHDMGXPRLFAEYAANVXVHVIDINDCPPVFAKPLYEASLLLPXYKGVKVIXVNAXDADSSAFSQLIYSIXEGNIGEKFSMDYKXGALXVQNXXQLRSRYELXVRASDGRFAGLXSVKINVKESKESHLKFXQDVYSAVVKENSXEAEXLAVIXAIGNPINEPLFYHILNPDRRFKISRXSGVLSXXGXPFDREQQEAFDVVVEVXEEHKPSAVAHVVVKVIVEDQNDNAPVFVNLPYYAVVKVDXEVGHVIRYVXAVDRDSGRNGEVHYYLKEHHEHFQIGPLGEISLKKQFELDXLNKEYLVXVVAKDGGNPAFSAEVIVPIXVMNKAMPVFEKPFYSAEIAESIQVHSPVVHVQANSPEGLKVFYSIXDGDPFSQFXINFNXGVINVIAPLDFEAHPAYKLSIRAXDSLXGAHAEVFVDIIVDDINDNPPVFAQQSYAVXLSEASVIGXSVVQVRAXDSDSEPNRGISYQMFGNHSKSHDHFHVDSSXGLISLLRXLDYEQSRQHXIFVRAVDGGMPXLSSDVIVXVDVXDLNDNPPLFEQQIYEARISEHAPHGHFVXCVKAYDADSSDIDKLQYSILSGNDHKHFVIDSAXGIIXLSNLHRHALKPFYSLNLSVSDGVFRSSXQVHVXVIGGNLHSPAFLQNEYEVELAENAPLHXLVMEVKXXDGDSGIYGHVXYHIVNDFAKDRFYINERGQIFXLEKLDREXPAEKVISVRLMAKDAGGKVAFCXVNVILXDDNDNAPQFRAXKYEVNIGSSAAKGXSVVKVLASDADEGSNADIXYAIEADSESVKENLEINKLSGVIXXKESLIGLENEFFXFFVRAVDNGSPSKESVVLVYVKILPPEMQLPKFSEPFYXFXVSEDVPIGXEIDLIRAEHSGXVLYSLVKGNXPESNRDESFVIDRQSGRLKLEKSLDHEXXKWYQFSILARCXQDDHEMVASVDVSIQVKDANDNSPVFESSPYEAFIVENLPGGSRVIQIRASDADSGXNGQVMYSLDQSQSVEVIESFAINMEXGWIXXLKELDHEKRDNYQIKVVASDHGEKIQLSSXAIVDVXVXDVNDSPPRFXAEIYKGXVSEDDPQGGVIAILSXXDADSEEINRQVXYFIXGGDPLGQFAVEXIQNEWKVYVKKPLDREKRDNYLLXIXAXDGXFSSKAIVEVKVLDANDNSPVCEKXLYSDXIPEDVLPGKLIMQISAXDADIRSNAEIXYXLLGSGAEKFKLNPDXGELKXSXPLDREEQAVYHLLVRAXDGGGRFCQASIVLXLEDVNDNAPEFSADPYAIXVFENXEPGXLLXRVQAXDADAGLNRKILYSLIDSADGQFSINELSGIIQLEKPLDRELQAVYXLSLKAVDQGLPRRLXAXGXVIVSVLDINDNPPVFEYREYGAXVSEDILVGXEVLQVYAASRDIEANAEIXYSIISGNEHGKFSIDSKXGAVFIIENLDYESSHEYYLXVEAXDGGXPSLSDVAXVNVNVXDINDNXPVFSQDXYXXVISEDAVLEQSVIXVMADDADGPSNSHIHYSIIDGNQGSSFXIDPVRGEVKVXKLLDREXISGYXLXVQASDNGSPPRVNXXXVNIDVSDVNDNAPVFSRGNYSVIIQENKPVGFSVLQLVVXDEDSSHNGPPFFFXIVXGNDEKAFEVNPQGVLLXSSAIKRKEKDHYLLQVKVADNGKPQLSSLXYIDIRVIEESIYPPAILPLEIFIXSSGEEYSGGVIGKIHAXDQDVYDXLXYSLDPQMDNLFSVSSXGGKLIAHKKLDIGQYLLNVSVXDGKFXXVADIXVHIRQVXQEMLNHXIAIRFANLXPEEFVGDYWRNFQRALRNILGVRRNDIQIVSLQSSEPHPHLDVLLFVEKPGSAQISXKQLLHKINSSVXDIEEIIGVRILNVFQKLCAGLDCPWKFCDEKVSVDESVMSXHSXARLSFVXPRHHRAAVCLCKEGRCPPVHHGCEDDPCPEGSECVSDPWEEKHXCVCPSGRFGQCPGSSSMXLXGNSYVKYRLXENENKLEMKLXMRLRXYSXHAVVMYARGXDYSILEIHHGRLQYKFDCGSGPGIVSVQSIQVNDGQWHAVALEVNGNYARLVLDQVHXASGXAPGXLKXLNLDNYVFFGGHIRQQGXRHGRSPQVGNGFRGCMDSIYLNGQELPLNSKPRSYAHIEESVDVSPGCFLXAXEDCASNPCQNGGVCNPSPAGGYYCKCSALYIGXHCEISVNPCSSKPCLYGGXCVVDNGGFVCQCRGLYXGQRCQLSPYCKDEPCKNGGXCFDSLDGAVCQCDSGFRGERCQSDIDECSGNPCLHGALCENXHGSYHCNCSHEYRGRHCEDAAPNQYVSXPWNIGLAEGIGIVVFVAGIFLLVVVFVLCRKMISRKKKHQAEPKDKHLGPAXAFLQRPYFDSKLNKNIYSDIPPQVPVRPISYXPSIPSDSRNNLDRNSFEGSAIPEHPEFSXFNPESVHGHRKAVAVCSVAPNLPPPPPSNSPSDSDSIQKPSWDFDYDXKVVDLDPCLSKKPLEEKPSQPYSARESLSEVQSLSSFQSESCDDNGYHWDXSDWMPSVPLPDIQEFPNYEVIDEQXPLYSADPNAIDXDYYPGGYDIESDFPPPPEDFPAADELPPLPPEFSNQFESIHPPRDMPAAGSLGSSSRNRQRFNLNQYLPNFYPLDMSEPQXKGXGENSXCREPHAPYPPGYQRHFEAPAVESMPMSVYASXASCSDVSACCEVESEVMMSDYESGDDGHFEEVXIPPLDSQQHXEV

SEQ ID NO: 9706 - protein, 52 aa, Homo sapiens
  MOD_RES (2)..(2): Selenocysteine
  MOD_RES (44)..(44): Selenocysteine
MXMAVIVRNKEKKVIFEFSGQISGSSFRSHFPPLPYSILFVVHXFLSHLELS

SEQ ID NO: 9707 - protein, 368 aa, Homo sapiens
  MOD_RES (1)..(1): Any amino acid
  MOD_RES (25)..(25): Selenocysteine
  MOD_RES (54)..(54): Selenocysteine
  MOD_RES (102)..(102): Selenocysteine
  MOD_RES (165)..(165): Selenocysteine
  MOD_RES (190)..(190): Selenocysteine
  MOD_RES (202)..(202): Selenocysteine
  MOD_RES (283)..(283): Selenocysteine
  MOD_RES (286)..(286): Selenocysteine
  MOD_RES (291)..(291): Selenocysteine
  MOD_RES (323)..(323): Selenocysteine
  MOD_RES (356)..(356): Selenocysteine
  MOD_RES (366)..(366): Selenocysteine
XDSKLNKNIYSDIPPQVPVRPISYXPSIPSDSRNNLDRNSFEGSAIPEHPEFSXFNPESVHGHRKAVAVCSVAPNLPPPPPSNSPSDSDSIQKPSWDFDYDXKVVDLDPCLSKKPLEEKPSQPYSARESLSEVQSLSSFQSESCDDNESLAAPDLSKPRGYHWDXSDWMPSVPLPDIQEFPNYEVIDEQXPLYSADPNAIDXDYYPGGYDIESDFPPPPEDFPAADELPPLPPEFSNQFESIHPPRDMPAAGSLGSSSRNRQRFNLNQYLPNFYPLDMSEPQXKGXGENSXCREPHAPYPPGYQRHFEAPAVESMPMSVYASXASCSDVSACCEVESEVMMSDYESGDDGHFEEVXIPPLDSQQHXEV

SEQ ID NO: 9708 - protein, 285 aa, Homo sapiens
  MOD_RES (1)..(1): Any amino acid
  MOD_RES (3)..(4): Selenocysteine
  MOD_RES (25)..(25): Selenocysteine
  MOD_RES (39)..(39): Selenocysteine
  MOD_RES (62)..(62): Selenocysteine
  MOD_RES (67)..(67): Selenocysteine
  MOD_RES (71)..(71): Selenocysteine
  MOD_RES (77)..(77): Selenocysteine
  MOD_RES (79)..(79): Selenocysteine
  MOD_RES (83)..(83): Selenocysteine
  MOD_RES (85)..(85): Selenocysteine
  MOD_RES (88)..(88): Selenocysteine
  MOD_RES (90)..(90): Selenocysteine
  MOD_RES (94)..(94): Selenocysteine
  MOD_RES (101)..(102): Selenocysteine
  MOD_RES (153)..(153): Selenocysteine
  MOD_RES (178)..(178): Selenocysteine
  MOD_RES (190)..(190): Selenocysteine
  MOD_RES (271)..(271): Selenocysteine
  MOD_RES (274)..(274): Selenocysteine
  MOD_RES (279)..(279): Selenocysteine
XSXXEALFASVEDYILVRGVSLVHXAKMNPVRMAEHALXVWMAPFVSVIRVLGEKGVRVISXSALEXLACXGPSVRXRXAPIXAXAAXSXGDVXARMLRPXXKVVDLDPCLSKKPLEEKPSQPYSARESLSEVQSLSSFQSESCDDNGYHWDXSDWMPSVPLPDIQEFPNYEVIDEQXPLYSADPNAIDXDYYPGGYDIESDFPPPPEDFPAADELPPLPPEFSNQFESIHPPRDMPAAGSLGSSSRNRQRFNLNQYLPNFYPLDMSEPQXKGXGENSXCREPHA

SEQ ID NO: 9709 - protein, 4981 aa, Homo sapiens
  MOD_RES (9)..(9): Selenocysteine
  MOD_RES (18)..(18): Selenocysteine
  MOD_RES (59)..(59): Selenocysteine
  MOD_RES (63)..(63): Selenocysteine
  MOD_RES (66)..(66): Selenocysteine
  MOD_RES (71)..(71): Selenocysteine
  MOD_RES (87)..(87): Selenocysteine
  MOD_RES (92)..(93): Selenocysteine
  MOD_RES (95)..(95): Selenocysteine
  MOD_RES (116)..(116): Selenocysteine
  MOD_RES (119)..(119): Selenocysteine
  MOD_RES (143)..(143): Selenocysteine
  MOD_RES (158)..(158): Selenocysteine
  MOD_RES (160)..(160): Selenocysteine
  MOD_RES (190)..(190): Selenocysteine
  MOD_RES (213)..(213): Selenocysteine
  MOD_RES (239)..(239): Selenocysteine
  MOD_RES (281)..(281): Selenocysteine
  MOD_RES (294)..(294): Selenocysteine
  MOD_RES (302)..(302): Selenocysteine
  MOD_RES (306)..(306): Selenocysteine
  MOD_RES (322)..(322): Selenocysteine
  MOD_RES (334)..(334): Selenocysteine
  MOD_RES (361)..(361): Selenocysteine
  MOD_RES (375)..(375): Selenocysteine
  MOD_RES (381)..(381): Selenocysteine
  MOD_RES (383)..(383): Selenocysteine
  MOD_RES (437)..(437): Selenocysteine
  MOD_RES (500)..(500): Selenocysteine
  MOD_RES (533)..(534): Selenocysteine
  MOD_RES (571)..(571): Selenocysteine
  MOD_RES (598)..(598): Selenocysteine
  MOD_RES (600)..(600): Selenocysteine
  MOD_RES (608)..(608): Selenocysteine
  MOD_RES (617)..(617): Selenocysteine
  MOD_RES (627)..(627): Selenocysteine
  MOD_RES (643)..(643): Selenocysteine
  MOD_RES (662)..(662): Selenocysteine
  MOD_RES (709)..(710): Selenocysteine
  MOD_RES (714)..(714): Selenocysteine
  MOD_RES (720)..(720): Selenocysteine
  MOD_RES (723)..(723): Selenocysteine
  MOD_RES (747)..(747): Selenocysteine
  MOD_RES (757)..(757): Selenocysteine
  MOD_RES (766)..(766): Selenocysteine
  MOD_RES (780)..(780): Selenocysteine
  MOD_RES (782)..(782): Selenocysteine
  MOD_RES (786)..(786): Selenocysteine
  MOD_RES (819)..(819): Selenocysteine
  MOD_RES (831)..(832): Selenocysteine
  MOD_RES (845)..(845): Selenocysteine
  MOD_RES (849)..(850): Selenocysteine
  MOD_RES (872)..(872): Selenocysteine
  MOD_RES (874)..(874): Selenocysteine
  MOD_RES (877)..(877): Selenocysteine
  MOD_RES (882)..(882): Selenocysteine
  MOD_RES (948)..(948): Selenocysteine
  MOD_RES (983)..(983): Selenocysteine
  MOD_RES (1004)..(1004): Selenocysteine
  MOD_RES (1034)..(1034): Selenocysteine
  MOD_RES (1040)..(1040): Selenocysteine
  MOD_RES (1083)..(1083): Selenocysteine
  MOD_RES (1087)..(1087): Selenocysteine
  MOD_RES (1103)..(1103): Selenocysteine
  MOD_RES (1106)..(1106): Selenocysteine
  MOD_RES (1156)..(1156): Selenocysteine
  MOD_RES (1158)..(1158): Selenocysteine
  MOD_RES (1172)..(1172): Selenocysteine
  MOD_RES (1178)..(1178): Selenocysteine
  MOD_RES (1182)..(1182): Selenocysteine
  MOD_RES (1195)..(1195): Selenocysteine
  MOD_RES (1218)..(1218): Selenocysteine
  MOD_RES (1227)..(1227): Selenocysteine
  MOD_RES (1263)..(1263): Selenocysteine
  MOD_RES (1268)..(1268): Selenocysteine
  MOD_RES (1278)..(1278): Selenocysteine
  MOD_RES (1292)..(1292): Selenocysteine
  MOD_RES (1298)..(1298): Selenocysteine
  MOD_RES (1300)..(1300): Selenocysteine
  MOD_RES (1312)..(1312): Selenocysteine
  MOD_RES (1319)..(1319): Selenocysteine
  MOD_RES (1338)..(1338): Selenocysteine
  MOD_RES (1340)..(1340): Selenocysteine
  MOD_RES (1355)..(1355): Selenocysteine
  MOD_RES (1357)..(1357): Selenocysteine
  MOD_RES (1362)..(1362): Selenocysteine
  MOD_RES (1369)..(1369): Selenocysteine
  MOD_RES (1382)..(1382): Selenocysteine
  MOD_RES (1391)..(1391): Selenocysteine
  MOD_RES (1403)..(1403): Selenocysteine
  MOD_RES (1437)..(1437): Selenocysteine
  MOD_RES (1443)..(1443): Selenocysteine
  MOD_RES (1458)..(1458): Selenocysteine
  MOD_RES (1470)..(1470): Selenocysteine
  MOD_RES (1477)..(1477): Selenocysteine
  MOD_RES (1480)..(1480): Selenocysteine
  MOD_RES (1495)..(1495): Selenocysteine
  MOD_RES (1507)..(1507): Selenocysteine
  MOD_RES (1516)..(1516): Selenocysteine
  MOD_RES (1520)..(1520): Selenocysteine
  MOD_RES (1548)..(1549): Selenocysteine
  MOD_RES (1572)..(1572): Selenocysteine
  MOD_RES (1574)..(1574): Selenocysteine
  MOD_RES (1604)..(1604): Selenocysteine
  MOD_RES (1614)..(1615): Selenocysteine
  MOD_RES (1618)..(1618): Selenocysteine
  MOD_RES (1630)..(1630): Selenocysteine
  MOD_RES (1636)..(1636): Selenocysteine
  MOD_RES (1646)..(1646): Selenocysteine
  MOD_RES (1676)..(1676): Selenocysteine
  MOD_RES (1682)..(1682): Selenocysteine
  MOD_RES (1687)..(1687): Selenocysteine
  MOD_RES (1692)..(1692): Selenocysteine
  MOD_RES (1716)..(1716): Selenocysteine
  MOD_RES (1721)..(1721): Selenocysteine
  MOD_RES (1729)..(1729): Selenocysteine
  MOD_RES (1742)..(1742): Selenocysteine
  MOD_RES (1748)..(1748): Selenocysteine
  MOD_RES (1763)..(1763): Selenocysteine
  MOD_RES (1776)..(1776): Selenocysteine
  MOD_RES (1778)..(1778): Selenocysteine
  MOD_RES (1799)..(1799): Selenocysteine
  MOD_RES (1830)..(1830): Selenocysteine
  MOD_RES (1838)..(1838): Selenocysteine
  MOD_RES (1854)..(1854): Selenocysteine
  MOD_RES (1866)..(1866): Selenocysteine
  MOD_RES (1877)..(1877): Selenocysteine
  MOD_RES (1895)..(1895): Selenocysteine
  MOD_RES (1901)..(1901): Selenocysteine
  MOD_RES (1915)..(1915): Selenocysteine
  MOD_RES (1926)..(1927): Selenocysteine
  MOD_RES (1951)..(1951): Selenocysteine
  MOD_RES (1962)..(1962): Selenocysteine
  MOD_RES (1969)..(1969): Selenocysteine
  MOD_RES (1980)..(1980): Selenocysteine
  MOD_RES (1993)..(1993): Selenocysteine
  MOD_RES (2032)..(2032): Selenocysteine
  MOD_RES (2034)..(2034): Selenocysteine
  MOD_RES (2050)..(2050): Selenocysteine
  MOD_RES (2057)..(2057): Selenocysteine
  MOD_RES (2063)..(2063): Selenocysteine
  MOD_RES (2067)..(2067): Selenocysteine
  MOD_RES (2075)..(2075): Selenocysteine
  MOD_RES (2088)..(2088): Selenocysteine
  MOD_RES (2101)..(2101): Selenocysteine
  MOD_RES (2109)..(2109): Selenocysteine
  MOD_RES (2121)..(2121): Selenocysteine
  MOD_RES (2123)..(2123): Selenocysteine
  MOD_RES (2127)..(2127): Selenocysteine
  MOD_RES (2138)..(2138): Selenocysteine
  MOD_RES (2167)..(2167): Selenocysteine
  MOD_RES (2169)..(2169): Selenocysteine
  MOD_RES (2171)..(2171): Selenocysteine
  MOD_RES (2185)..(2185): Selenocysteine
  MOD_RES (2198)..(2198): Selenocysteine
  MOD_RES (2208)..(2208): Selenocysteine
  MOD_RES (2212)..(2212): Selenocysteine
  MOD_RES (2222)..(2222): Selenocysteine
  MOD_RES (2224)..(2224): Selenocysteine
  MOD_RES (2228)..(2228): Selenocysteine
  MOD_RES (2232)..(2232): Selenocysteine
  MOD_RES (2237)..(2237): Selenocysteine
  MOD_RES (2240)..(2240): Selenocysteine
  MOD_RES (2242)..(2242): Selenocysteine
  MOD_RES (2244)..(2244): Selenocysteine
  MOD_RES (2274)..(2274): Selenocysteine
  MOD_RES (2278)..(2278): Selenocysteine
  MOD_RES (2309)..(2309): Selenocysteine
  MOD_RES (2319)..(2319): Selenocysteine
  MOD_RES (2326)..(2326): Selenocysteine
  MOD_RES (2335)..(2335): Selenocysteine
  MOD_RES (2337)..(2337): Selenocysteine
  MOD_RES (2345)..(2345): Selenocysteine
  MOD_RES (2347)..(2347): Selenocysteine
  MOD_RES (2349)..(2349): Selenocysteine
  MOD_RES (2363)..(2363): Selenocysteine
  MOD_RES (2371)..(2372): Selenocysteine
  MOD_RES (2379)..(2379): Selenocysteine
  MOD_RES (2381)..(2381): Selenocysteine
  MOD_RES (2409)..(2409): Selenocysteine
  MOD_RES (2414)..(2414): Selenocysteine
  MOD_RES (2419)..(2419): Selenocysteine
  MOD_RES (2427)..(2427): Selenocysteine
  MOD_RES (2432)..(2432): Selenocysteine
  MOD_RES (2450)..(2450): Selenocysteine
  MOD_RES (2455)..(2455): Selenocysteine
  MOD_RES (2457)..(2457): Selenocysteine
  MOD_RES (2473)..(2473): Selenocysteine
  MOD_RES (2479)..(2479): Selenocysteine
  MOD_RES (2489)..(2489): Selenocysteine
  MOD_RES (2491)..(2491): Selenocysteine
  MOD_RES (2535)..(2535): Selenocysteine
  MOD_RES (2549)..(2549): Selenocysteine
  MOD_RES (2552)..(2553): Selenocysteine
  MOD_RES (2555)..(2555): Selenocysteine
  MOD_RES (2573)..(2573): Selenocysteine
  MOD_RES (2587)..(2588): Selenocysteine
  MOD_RES (2590)..(2590): Selenocysteine
  MOD_RES (2611)..(2611): Selenocysteine
  MOD_RES (2618)..(2618): Selenocysteine
  MOD_RES (2658)..(2658): Selenocysteine
  MOD_RES (2689)..(2689): Selenocysteine
  MOD_RES (2722)..(2722): Selenocysteine
  MOD_RES (2742)..(2742): Selenocysteine
  MOD_RES (2755)..(2755): Selenocysteine
  MOD_RES (2790)..(2790): Selenocysteine
  MOD_RES (2792)..(2792): Selenocysteine
  MOD_RES (2795)..(2796): Selenocysteine
  MOD_RES (2819)..(2819): Selenocysteine
  MOD_RES (2824)..(2824): Selenocysteine
  MOD_RES (2838)..(2838): Selenocysteine
  MOD_RES (2853)..(2853): Selenocysteine
  MOD_RES (2856)..(2856): Selenocysteine
  MOD_RES (2859)..(2859): Selenocysteine
  MOD_RES (2863)..(2863): Selenocysteine
  MOD_RES (2875)..(2875): Selenocysteine
  MOD_RES (2885)..(2885): Selenocysteine
  MOD_RES (2892)..(2892): Selenocysteine
  MOD_RES (2897)..(2897): Selenocysteine
  MOD_RES (2923)..(2924): Selenocysteine
  MOD_RES (2939)..(2939): Selenocysteine
  MOD_RES (2954)..(2954): Selenocysteine
  MOD_RES (2967)..(2968): Selenocysteine
  MOD_RES (2970)..(2970): Selenocysteine
  MOD_RES (2990)..(2990): Selenocysteine
  MOD_RES (2993)..(2993): Selenocysteine
  MOD_RES (3000)..(3000): Selenocysteine
  MOD_RES (3006)..(3006): Selenocysteine
  MOD_RES (3038)..(3038): Selenocysteine
  MOD_RES (3058)..(3058): Selenocysteine
  MOD_RES (3060)..(3060): Selenocysteine
  MOD_RES (3074)..(3074): Selenocysteine
  MOD_RES (3078)..(3078): Selenocysteine
  MOD_RES (3080)..(3080): Selenocysteine
  MOD_RES (3086)..(3086): Selenocysteine
  MOD_RES (3097)..(3097): Selenocysteine
  MOD_RES (3110)..(3110): Selenocysteine
  MOD_RES (3143)..(3143): Selenocysteine
  MOD_RES (3147)..(3147): Selenocysteine
  MOD_RES (3163)..(3163): Selenocysteine
  MOD_RES (3175)..(3175): Selenocysteine
  MOD_RES (3181)..(3181): Selenocysteine
  MOD_RES (3202)..(3202): Selenocysteine
  MOD_RES (3211)..(3212): Selenocysteine
  MOD_RES (3219)..(3219): Selenocysteine
  MOD_RES (3225)..(3225): Selenocysteine
  MOD_RES (3232)..(3232): Selenocysteine
  MOD_RES (3247)..(3247): Selenocysteine
  MOD_RES (3251)..(3252): Selenocysteine
  MOD_RES (3260)..(3260): Selenocysteine
  MOD_RES (3267)..(3267): Selenocysteine
  MOD_RES (3283)..(3283): Selenocysteine
  MOD_RES (3291)..(3291): Selenocysteine
  MOD_RES (3315)..(3315): Selenocysteine
  MOD_RES (3329)..(3329): Selenocysteine
  MOD_RES (3352)..(3352): Selenocysteine
  MOD_RES (3390)..(3390): Selenocysteine
  MOD_RES (3394)..(3394): Selenocysteine
  MOD_RES (3405)..(3405): Selenocysteine
  MOD_RES (3421)..(3421): Selenocysteine
  MOD_RES (3424)..(3424): Selenocysteine
  MOD_RES (3459)..(3459): Selenocysteine
  MOD_RES (3463)..(3463): Selenocysteine
  MOD_RES (3465)..(3465): Selenocysteine
  MOD_RES (3472)..(3472): Selenocysteine
  MOD_RES (3487)..(3487): Selenocysteine
  MOD_RES (3491)..(3491): Selenocysteine
  MOD_RES (3499)..(3499): Selenocysteine
  MOD_RES (3511)..(3511): Selenocysteine
  MOD_RES (3525)..(3525): Selenocysteine
  MOD_RES (3529)..(3529): Selenocysteine
  MOD_RES (3533)..(3533): Selenocysteine
  MOD_RES (3545)..(3545): Selenocysteine
  MOD_RES (3551)..(3551): Selenocysteine
  MOD_RES (3555)..(3555): Selenocysteine
  MOD_RES (3562)..(3562): Selenocysteine
  MOD_RES (3568)..(3569): Selenocysteine
  MOD_RES (3586)..(3586): Selenocysteine
  MOD_RES (3597)..(3597): Selenocysteine
  MOD_RES (3599)..(3599): Selenocysteine
  MOD_RES (3603)..(3603): Selenocysteine
  MOD_RES (3616)..(3616): Selenocysteine
  MOD_RES (3652)..(3652): Selenocysteine
  MOD_RES (3656)..(3656): Selenocysteine
  MOD_RES (3665)..(3665): Selenocysteine
  MOD_RES (3675)..(3675): Selenocysteine
  MOD_RES (3678)..(3678): Selenocysteine
  MOD_RES (3682)..(3682): Selenocysteine
  MOD_RES (3692)..(3692): Selenocysteine
  MOD_RES (3694)..(3694): Selenocysteine
  MOD_RES (3708)..(3708): Selenocysteine
  MOD_RES (3721)..(3721): Selenocysteine
  MOD_RES (3727)..(3727): Selenocysteine
  MOD_RES (3742)..(3742): Selenocysteine
  MOD_RES (3746)..(3746): Selenocysteine
  MOD_RES (3760)..(3760): Selenocysteine
  MOD_RES (3781)..(3781): Selenocysteine
  MOD_RES (3876)..(3876): Selenocysteine
  MOD_RES (3893)..(3893): Selenocysteine
  MOD_RES (3928)..(3928): Selenocysteine
  MOD_RES (3931)..(3931): Selenocysteine
  MOD_RES (4004)..(4004): Selenocysteine
  MOD_RES (4019)..(4019): Selenocysteine
  MOD_RES (4045)..(4045): Selenocysteine
  MOD_RES (4049)..(4050): Selenocysteine
  MOD_RES (4061)..(4061): Selenocysteine
  MOD_RES (4074)..(4074): Selenocysteine
  MOD_RES (4088)..(4088): Selenocysteine
  MOD_RES (4099)..(4099): Selenocysteine
  MOD_RES (4108)..(4108): Selenocysteine
  MOD_RES (4167)..(4167): Selenocysteine
  MOD_RES (4176)..(4176): Selenocysteine
  MOD_RES (4193)..(4193): Selenocysteine
  MOD_RES (4202)..(4202): Selenocysteine
  MOD_RES (4205)..(4205): Selenocysteine
  MOD_RES (4252)..(4252): Selenocysteine
  MOD_RES (4269)..(4270): Selenocysteine
  MOD_RES (4281)..(4281): Selenocysteine
  MOD_RES (4306)..(4306): Selenocysteine
  MOD_RES (4314)..(4314): Selenocysteine
  MOD_RES (4316)..(4316): Selenocysteine
  MOD_RES (4332)..(4332): Selenocysteine
  MOD_RES (4342)..(4342): Selenocysteine
  MOD_RES (4359)..(4359): Selenocysteine
  MOD_RES (4390)..(4390): Selenocysteine
  MOD_RES (4450)..(4450): Selenocysteine
  MOD_RES (4458)..(4458): Selenocysteine
  MOD_RES (4461)..(4461): Selenocysteine
  MOD_RES (4514)..(4514): Selenocysteine
  MOD_RES (4570)..(4570): Selenocysteine
  MOD_RES (4596)..(4596): Selenocysteine
  MOD_RES (4604)..(4604): Selenocysteine
  MOD_RES (4646)..(4646): Selenocysteine
  MOD_RES (4673)..(4673): Selenocysteine
  MOD_RES (4684)..(4684): Selenocysteine
  MOD_RES (4694)..(4694): Selenocysteine
  MOD_RES (4711)..(4711): Selenocysteine
  MOD_RES (4730)..(4730): Selenocysteine
  MOD_RES (4737)..(4737): Selenocysteine
  MOD_RES (4747)..(4747): Selenocysteine
  MOD_RES (4797)..(4797): Selenocysteine
  MOD_RES (4826)..(4826): Selenocysteine
  MOD_RES (4849)..(4849): Selenocysteine
  MOD_RES (4864)..(4864): Selenocysteine
  MOD_RES (4905)..(4905): Selenocysteine
  MOD_RES (4912)..(4912): Selenocysteine
  MOD_RES (4916)..(4916): Selenocysteine
  MOD_RES (4927)..(4927): Selenocysteine
  MOD_RES (4967)..(4968): Selenocysteine
MDLAPDRAXGRPWLPLHXLSVSQLLRVFWLLSLLPGQAWVHGAEPRQVFQVLEEQPPGXLVGXIQXRPGFXYRLSESHALFAINSSXGALYXXSXIDRESLPSDVINLVVLSSAPXYPXEVRVLVRDLNDNAPVFPDPSIVVXFKEDSSSGRQVILDXAXDSDIGSNGVDHRSYRIIRGNEAGRFRLDIXLNPSGEGAFLHLVSKGGLDREVXPQYQLLVEVEDKGEPKRRGYLQVNVXVQDINDNPPVFGSSHYQAGVPEDAVVGSSVLQVAAADADEGXNADIRYRLQDEGXPFQMDPEXGLIXVREPLDFEARRQYSLXVQAMDRGVPSLXGRAEALIQLLDVNDNDPVVKFRYFPAXSRYASVDENAQVGXVVALLXVXDADSPAANGNISVQILGGNEQRHFEVQSSKVPNLSLIKVASALDRERIPSYNLXVSVSDNYGAPPGAAVQARSSVASLVIFVNDINDHPPVFSQQVYRVNLSEEAPPGSYVSGISAXDGDSGLNANLRYSIVSGNGLGWFHISEHSGLVXXGSSGGLDRELASQIVLNISARDQGVHPKVSYAQLVVXLLDVNDEKPVFSQPEGYDVSVVENAPXGXELLMLRAXDGDLGDNGXVRFSLQEAEXDRRSFRLDPVSGRLSXISSLDREEQAFYSLLVLAXDLGSPPQSSMARINVSLLDINDNSPVFYPVQYFAHIKENEPGGSYIXXVSAXDPDLGXNGXVKYSISAGDRSRFQVNAQSGVISXRMALDREEKXAYQLQIVAXDGGNLQSPNQAIVXIXVLDXQDNPPVFSQVAYSFVVFENVALGYHVGSVSASXMDLNSNISYLIXXGDQKGMFAINQVXGQLXXANVIDREEQSFYQLKVVASGGXVXGDXMVNIXVKDLNDNSPHFLQAIESVNVVENWQAGHSIFQAKAVDPDEGVNGMVLYSLKQNPKNLFAINEKNGXISLLGPLDVHAGSYQIEILASDMGVPQLSSSVILXVYVHDVNDNSPVFDQLSYEVXLSESEPVNSRFFKVQASDKDSGANGEIAYXIAEGNXGDAFGIFPDGQLYIKSELDRELQDRYVLMVVASDRAVEPLSAXVNVXVILEDVNDNRPLFNSXNYXFYFEEEQRAGSFVGKVSAVDKDFGPNGEVRYSFEMVQPDFELHAISGEIXNXHQFDRESLMRRRGXAVFSFXVIAXDQGIPQPLKDQAXVHVYMKDINDNAPKFLKDFYQAXISESAANLXQVLRVSASDVDEGNNGLIHYSIIKGNEERQFAIDSXSGQVXLIGKLDYEAXPAYSLVIQAVDSGXIPLNSXCXLNIDILDENDNXPSFPKSXLFVDVLENMRIGELVSSVXAXDSDSGDNADLYYSIXGXNNHGXFSISPNXGSIFLAKKLDFEXQSLYKLNIXAKDQGRPPRSSXMSVVIHVRDFNDNPPSFPPGDIFKSIVENIPIGXSVISVXAHDPDADINGQLSYXIIQQMPRGNHFXIDEVKGXIYXNAEIDREFANLFELXVKANDQAVPIEXRRYALKNVXILVXDLNDNVPMFISQNALAADPSAVIGSVLXXIMAADPDEGANGEIEYEIINGDXDXFIVDRYSGDLRVASALVPSQLIYNLIVSAXDLGPERRKSXXELXIILQGLDGPVFXQPKYIXILKEGEPIGXNVISIEAASPRGSEAPVEYYIVSVRCEEKXVGRLFXIGRHXGIIQXAAILDREQGACLYLVDVYAIEKSXAFPRXQRAEVEIXLQDINDNPPVFPXDMLDLXVEENIGDGSKIMQLXAMDADEGANALVXYXIISGADDSFRIDPESGDLIAXRRLDRERRSKYSLLVRADDGLQSSDMRINIXVSDVNDHXPKFSRPVYSFDIPEDXIPGSLVAAILAXDDDSGVNGEIXYIVNEDDEDGIFFLNPIXGVFNLXRLLDYEVQQYYILXVRAEDGGGQFXXIRVYFNILDVNDNPPIFSLNSYSXSLMENLPVGSXVLVFNVXDADDGINSQLXYSIASGDSLGQFXVDKNGVLKVLKALDRESQSFYNLVVQVHDLPQIPASRFXSXAQVSIILLDVNDNPPXFLSPKLXYIPENXPIDXVVFKAQAXDPDSGPNSYIEYXLLNPLGNKFSIGXIDGEVRLXGELDREEVSNYXLXVVAXDKGQPSLSSSXEVVVMVLDINDNNPIFAQALYKVEINENXLXGXDIIQVFAADGDEGXNGQVRYGIVNGNXNQEFRIDSVXGAIXVAKPLDREKXPXYHLXVQAXDRGSXPRXDXSXVSIVLLDINDFVPVFELSPYSVNVPENLGXLPRXILQVVARDDDRGSNSKLSYVLFGGNEDNAFXLSASGELGVXQSLDREXKERFVLMIXAXDSGSPALXGXGXINVIVDDVNDNVPXFASKAYFXXIPEDAPXGXDVLLVNASDADASKNAVIRIIGGNSQFXINPSXGQIIXSALLDREXKDNYXLVVVCSDAGSPEPLSSSXSVLVXVXDVNDNPPRFQHHPYVXHIPSPXLPGSFVFAVXVXDADIGPNSELHYSLSGRNSEKFHIDPLRGAIMAAGPLNGASEVXFSVHVKDGGSFPKXDSXXVXVRFVNKADFPKVRAKEQXFMFPENQPVSSLVXXIXGSSLRGEPMSYYIASGNLGNXFQIDQLXGQVSISQPLDFEKIQKYVVWIEARDGGFPPFSSYEKLDIXVLDVNDNAPIFKEDPFISEILENLSPRKILXVSAMDKDSGPNGQLDYEIVNGNMENSFSINHAXGEIRSVRPLDREKVSHYVLXIKSSDKGSPSQSXSVKVMINILDENDNAPRFSQIFSAHVPENSPLGYXVXRVXXSDEDIGINAISRYSIMDASLPFXINPSXGDIVISRPLNREDXDRYRIRVSAHDSGWXVSXDVXIFVXDINDNAPRFSRXSYYLDCPELXEIGSKVXQVFAXDPDEGSNGQVFYFIKSQSEYFRINAXXGEIFNKQILKYQNVXGFSNVNINRHSFIVXSSDRGKPSLISEXXVXINIVDSNDNAPQFLKSKYFXPVXKNVKVGXKLIRVXAIDDKDFGLNSEVEYFISNDNHLGKFKLDNDXGWISVASSLISDLNQNFFIXVXAKDKGNPPLSSQAXVHIXVXEENYHXPEFSQSHMSAXIPESHSIGSIVRXVSARDRDAAMNGLIKYSISSGNEEGIFAINSSXGILXLAKALDYELCQKHEMXISAIDGGWVARXGYCSVXVNVIDVNDNSPVFLSDDYFPXVLENAPSGXXVIHLNAXDADSGXNAVIAYXVQSSDSDLFVIDPNXGVIXXQGFLDFEXKQSYHLXVKAFNVPDEERCSFAXVNIQLKGXNEYVPRFVSKLYYFEISEAAPKGXIVGEVFASDRDLGXDGEVHYLIFGNSRKKGFQINKKXGQIYVSGILDREKEERVSLKVLAKNFGSIRGADIDEVXVNVXVLDANDPPIFXLNIYSVQISEGVPIGXHVXFVSAFDSDSIPSWSRFSYFIGSGNENGAFSINPQXGQIXVXAELDREXLPIYNLSVLAVDSGXPSAXGSASLLVXLEDINDNGPMLXVSEGEVMENKRPGXLVMXLQSXDPDLPPNQGPFXYYLLSXGPAXSYFSLSXAGVLSXXREIDREQIADFYLSVVXKDSGVPQMSSXGXVHIXVIDQNDNPSQSRXVEIFVNYYGNLFPGGILGSVKPQDPDVLDSFHCSLXSGVXSLFSIPGGXCDLNSQPRSXDGXFDLXVLSNDGVHSXVXSNIRVFFAGFSNAXVDNSILLRLGVPXVKDFLXNHYLHFLRIASSQLXGLGXAVQLYSAYEENNRXFLLAAVKRNHNQYVNPSGVAXFFESIKEILLRQSGVKVESVDHDSCVHGPCQNGGSCLRRLAVSSVLKSRESLPVIIVANEPLQPFLCKCLPGYAGSWCEIDIDECLPSPCHSGGXCHNLVGGFSCSCPDGFXGRACERDINECLQSPCKNGAICQNFPGSFNCVCKXGYXGKMCESSVNYCECNPCFNGGSCQSGVDSYYCHCPFGVFGKHCELNSYGFEELSYMEFPSLDPNNNYIYVKFAXIKSHALLLYNYDNQXGDRAEFLALEIAEERLRFSYNLGSGXYKLXXMKKVSDGHFHXVIARRAGMAASLXVDSCSENQEPGYCXVSNVAVSDDWXLDVQPNRVXVGGIRSLEPILQRRGHVESHDFVGCIMEFAVNGRPLEPSQALAAQGILDQCPRLEGACXRSPCQHGGXCMDYWSWQQCHCKEGLXGKYCEKSVXPDXALSLEGKGRLDYHMSQNEKREYLLRQSLRGAMLEPFGVNSLEVKFRXRSENGVLIHIQESSNYXXVKIKNGKVYFXSDAGIAGKVERNIPEVYVADGHWHXFLIGKNGXAXVLSVDRIYNRDIIHPXQDFGGLDVLXISLGGIPPNQAHRDAQXAGFDGCIASMWYGGESLPFSGKHSLASISKXDPSVKIGCRGPNICASNPCWGDLLCINQWYAYRCVPPGDCASHPCQNGGSCEPGLHSGFXCSCPDSHXGRXCEMVVACLGVLCPQGKVCKAGSPAGHVCVLSQGPEEISLPLWAVPAIVGSCAXVLALLVLSLILCNQCRGKKAKNPKEEKKPKEKKKKGSENVAFDDPDNIPPYGDDMXVRKQPEGNPKPDIIERENPYLIYDEXDIPHNSEXIPSAPLASPEQEIEHYDIDNASSIAPSDADIIQHYKQFRSHXPKFSIQRHSPLGFARQSPMPLGASSLXYQPSYGQGLRXSSLSHSACPXPNPLSRHSPAPFSKSSXFYRNSPARELHLPIRDGNXLEMHGDXCQPGIFNYAXRLGRRSKSPQAMASHGSRPGSRLKQPIGQIPLESSPPVGLSIEEVERLNXPRPRNPSICSADHGRSSSEEDCRRPLSRXRNPADGIPAPESSSDSDSHESFXCSEMEYDREKPMVYXSRMPKLSQVNESDADDEDNYGARLKPRRYHGRRAEGGPVGXQAAAPGXADNXLPMKLGQQAGXFNWDNLLNWGPGFGHYVDVFKDLASLPEKAAANEEGKAGXXKPVPKDGEAEQYV

SEQ ID NO: 9710 - protein, 3222 aa, Homo sapiens
  MOD_RES (3)..(4): Selenocysteine
  MOD_RES (11)..(11): Selenocysteine
  MOD_RES (27)..(27): Selenocysteine
  MOD_RES (40)..(40): Selenocysteine
  MOD_RES (46)..(46): Selenocysteine
  MOD_RES (61)..(61): Selenocysteine
  MOD_RES (74)..(74): Selenocysteine
  MOD_RES (76)..(76): Selenocysteine
  MOD_RES (97)..(97): Selenocysteine
  MOD_RES (128)..(128): Selenocysteine
  MOD_RES (136)..(136): Selenocysteine
  MOD_RES (152)..(152): Selenocysteine
  MOD_RES (164)..(164): Selenocysteine
  MOD_RES (175)..(175): Selenocysteine
  MOD_RES (193)..(193): Selenocysteine
  MOD_RES (199)..(199): Selenocysteine
  MOD_RES (213)..(213): Selenocysteine
  MOD_RES (224)..(225): Selenocysteine
  MOD_RES (249)..(249): Selenocysteine
  MOD_RES (260)..(260): Selenocysteine
  MOD_RES (267)..(267): Selenocysteine
  MOD_RES (278)..(278): Selenocysteine
  MOD_RES (291)..(291): Selenocysteine
  MOD_RES (330)..(330): Selenocysteine
  MOD_RES (332)..(332): Selenocysteine
  MOD_RES (348)..(348): Selenocysteine
  MOD_RES (355)..(355): Selenocysteine
  MOD_RES (361)..(361): Selenocysteine
  MOD_RES (365)..(365): Selenocysteine
  MOD_RES (373)..(373): Selenocysteine
  MOD_RES (386)..(386): Selenocysteine
  MOD_RES (399)..(399): Selenocysteine
  MOD_RES (407)..(407): Selenocysteine
  MOD_RES (419)..(419): Selenocysteine
  MOD_RES (421)..(421): Selenocysteine
  MOD_RES (425)..(425): Selenocysteine
  MOD_RES (436)..(436): Selenocysteine
  MOD_RES (465)..(465): Selenocysteine
  MOD_RES (467)..(467): Selenocysteine
  MOD_RES (469)..(469): Selenocysteine
  MOD_RES (483)..(483): Selenocysteine
  MOD_RES (496)..(496): Selenocysteine
  MOD_RES (506)..(506): Selenocysteine
  MOD_RES (510)..(510): Selenocysteine
  MOD_RES (520)..(520): Selenocysteine
  MOD_RES (522)..(522): Selenocysteine
  MOD_RES (526)..(526): Selenocysteine
  MOD_RES (530)..(530): Selenocysteine
  MOD_RES (535)..(535): Selenocysteine
  MOD_RES (538)..(538): Selenocysteine
  MOD_RES (540)..(540): Selenocysteine
  MOD_RES (542)..(542): Selenocysteine
  MOD_RES (572)..(572): Selenocysteine
  MOD_RES (576)..(576): Selenocysteine
  MOD_RES (607)..(607): Selenocysteine
  MOD_RES (617)..(617): Selenocysteine
  MOD_RES (624)..(624): Selenocysteine
  MOD_RES (633)..(633): Selenocysteine
  MOD_RES (635)..(635): Selenocysteine
  MOD_RES (643)..(643): Selenocysteine
  MOD_RES (645)..(645): Selenocysteine
  MOD_RES (647)..(647): Selenocysteine
  MOD_RES (661)..(661): Selenocysteine
  MOD_RES (669)..(670): Selenocysteine
  MOD_RES (677)..(677): Selenocysteine
  MOD_RES (679)..(679): Selenocysteine
  MOD_RES (707)..(707): Selenocysteine
  MOD_RES (712)..(712): Selenocysteine
  MOD_RES (717)..(717): Selenocysteine
  MOD_RES (725)..(725): Selenocysteine
  MOD_RES (730)..(730): Selenocysteine
  MOD_RES (748)..(748): Selenocysteine
  MOD_RES (753)..(753): Selenocysteine
  MOD_RES (755)..(755): Selenocysteine
  MOD_RES (771)..(771): Selenocysteine
  MOD_RES (777)..(777): Selenocysteine
  MOD_RES (787)..(787): Selenocysteine
  MOD_RES (789)..(789): Selenocysteine
  MOD_RES (833)..(833): Selenocysteine
  MOD_RES (847)..(847): Selenocysteine
  MOD_RES (850)..(851): Selenocysteine
  MOD_RES (853)..(853): Selenocysteine
  MOD_RES (871)..(871): Selenocysteine
  MOD_RES (885)..(886): Selenocysteine
  MOD_RES (888)..(888): Selenocysteine
  MOD_RES (909)..(909): Selenocysteine
  MOD_RES (916)..(916): Selenocysteine
  MOD_RES (956)..(956): Selenocysteine
  MOD_RES (987)..(987): Selenocysteine
  MOD_RES (1020)..(1020): Selenocysteine
  MOD_RES (1040)..(1040): Selenocysteine
  MOD_RES (1053)..(1053): Selenocysteine
  MOD_RES (1088)..(1088): Selenocysteine
  MOD_RES (1090)..(1090): Selenocysteine
  MOD_RES (1093)..(1094): Selenocysteine
  MOD_RES (1117)..(1117): Selenocysteine
  MOD_RES (1122)..(1122): Selenocysteine
  MOD_RES (1136)..(1136): Selenocysteine
  MOD_RES (1151)..(1151): Selenocysteine
  MOD_RES (1154)..(1154): Selenocysteine
  MOD_RES (1157)..(1157): Selenocysteine
  MOD_RES (1161)..(1161): Selenocysteine
  MOD_RES (1173)..(1173): Selenocysteine
  MOD_RES (1183)..(1183): Selenocysteine
  MOD_RES (1190)..(1190): Selenocysteine
  MOD_RES (1195)..(1195): Selenocysteine
  MOD_RES (1221)..(1222): Selenocysteine
  MOD_RES (1237)..(1237): Selenocysteine
  MOD_RES (1252)..(1252): Selenocysteine
  MOD_RES (1265)..(1266): Selenocysteine
  MOD_RES (1268)..(1268): Selenocysteine
  MOD_RES (1288)..(1288): Selenocysteine
  MOD_RES (1291)..(1291): Selenocysteine
  MOD_RES (1298)..(1298): Selenocysteine
  MOD_RES (1304)..(1304): Selenocysteine
  MOD_RES (1336)..(1336): Selenocysteine
  MOD_RES (1356)..(1356): Selenocysteine
  MOD_RES (1358)..(1358): Selenocysteine
  MOD_RES (1372)..(1372): Selenocysteine
  MOD_RES (1376)..(1376): Selenocysteine
  MOD_RES (1378)..(1378): Selenocysteine
  MOD_RES (1384)..(1384): Selenocysteine
  MOD_RES (1395)..(1395): Selenocysteine
  MOD_RES (1408)..(1408): Selenocysteine
  MOD_RES (1441)..(1441): Selenocysteine
  MOD_RES (1445)..(1445): Selenocysteine
  MOD_RES (1461)..(1461): Selenocysteine
  MOD_RES (1473)..(1473): Selenocysteine
  MOD_RES (1479)..(1479): Selenocysteine
  MOD_RES (1500)..(1500): Selenocysteine
  MOD_RES (1509)..(1510): Selenocysteine
  MOD_RES (1517)..(1517): Selenocysteine
  MOD_RES (1523)..(1523): Selenocysteine
  MOD_RES (1530)..(1530): Selenocysteine
  MOD_RES (1545)..(1545): Selenocysteine
  MOD_RES (1549)..(1550): Selenocysteine
  MOD_RES (1558)..(1558): Selenocysteine
  MOD_RES (1565)..(1565): Selenocysteine
  MOD_RES (1581)..(1581): Selenocysteine
  MOD_RES (1589)..(1589): Selenocysteine
  MOD_RES (1613)..(1613): Selenocysteine
  MOD_RES (1627)..(1627): Selenocysteine
  MOD_RES (1650)..(1650): Selenocysteine
  MOD_RES (1688)..(1688): Selenocysteine
  MOD_RES (1692)..(1692): Selenocysteine
  MOD_RES (1703)..(1703): Selenocysteine
  MOD_RES (1719)..(1719): Selenocysteine
  MOD_RES (1722)..(1722): Selenocysteine
  MOD_RES (1757)..(1757): Selenocysteine
  MOD_RES (1761)..(1761): Selenocysteine
  MOD_RES (1763)..(1763): Selenocysteine
  MOD_RES (1770)..(1770): Selenocysteine
  MOD_RES (1785)..(1785): Selenocysteine
  MOD_RES (1789)..(1789): Selenocysteine
  MOD_RES (1797)..(1797): Selenocysteine
  MOD_RES (1809)..(1809): Selenocysteine
  MOD_RES (1823)..(1823): Selenocysteine
  MOD_RES (1827)..(1827): Selenocysteine
  MOD_RES (1831)..(1831): Selenocysteine
  MOD_RES (1843)..(1843): Selenocysteine
  MOD_RES (1849)..(1849): Selenocysteine
  MOD_RES (1853)..(1853): Selenocysteine
  MOD_RES (1860)..(1860): Selenocysteine
  MOD_RES (1866)..(1867): Selenocysteine
  MOD_RES (1884)..(1884): Selenocysteine
  MOD_RES (1895)..(1895): Selenocysteine
  MOD_RES (1897)..(1897): Selenocysteine
  MOD_RES (1901)..(1901): Selenocysteine
  MOD_RES (1914)..(1914): Selenocysteine
  MOD_RES (1950)..(1950): Selenocysteine
  MOD_RES (1954)..(1954): Selenocysteine
  MOD_RES (1963)..(1963): Selenocysteine
  MOD_RES (1973)..(1973): Selenocysteine
  MOD_RES (1976)..(1976): Selenocysteine
  MOD_RES (1980)..(1980): Selenocysteine
  MOD_RES (1990)..(1990): Selenocysteine
  MOD_RES (1992)..(1992): Selenocysteine
  MOD_RES (2006)..(2006): Selenocysteine
  MOD_RES (2019)..(2019): Selenocysteine
  MOD_RES (2025)..(2025): Selenocysteine
  MOD_RES (2040)..(2040): Selenocysteine
  MOD_RES (2044)..(2044): Selenocysteine
  MOD_RES (2058)..(2058): Selenocysteine
  MOD_RES (2079)..(2079): Selenocysteine
  MOD_RES (2174)..(2174): Selenocysteine
  MOD_RES (2191)..(2191): Selenocysteine
  MOD_RES (2226)..(2226): Selenocysteine
  MOD_RES (2229)..(2229): Selenocysteine
  MOD_RES (2267)..(2267): Selenocysteine
  MOD_RES (2282)..(2282): Selenocysteine
  MOD_RES (2308)..(2308): Selenocysteine
  MOD_RES (2312)..(2313): Selenocysteine
  MOD_RES (2324)..(2324): Selenocysteine
  MOD_RES (2337)..(2337): Selenocysteine
  MOD_RES (2351)..(2351): Selenocysteine
  MOD_RES (2362)..(2362): Selenocysteine
  MOD_RES (2371)..(2371): Selenocysteine
  MOD_RES (2441)..(2441): Selenocysteine
  MOD_RES (2443)..(2443): Selenocysteine
  MOD_RES (2446)..(2446): Selenocysteine
  MOD_RES (2493)..(2493): Selenocysteine
  MOD_RES (2510)..(2511): Selenocysteine
  MOD_RES (2522)..(2522): Selenocysteine
  MOD_RES (2547)..(2547): Selenocysteine
  MOD_RES (2555)..(2555): Selenocysteine
  MOD_RES (2557)..(2557): Selenocysteine
  MOD_RES (2573)..(2573): Selenocysteine
  MOD_RES (2583)..(2583): Selenocysteine
  MOD_RES (2600)..(2600): Selenocysteine
  MOD_RES (2631)..(2631): Selenocysteine
  MOD_RES (2691)..(2691): Selenocysteine
  MOD_RES (2699)..(2699): Selenocysteine
  MOD_RES (2702)..(2702): Selenocysteine
  MOD_RES (2755)..(2755): Selenocysteine
  MOD_RES (2811)..(2811): Selenocysteine
  MOD_RES (2837)..(2837): Selenocysteine
  MOD_RES (2845)..(2845): Selenocysteine
  MOD_RES (2887)..(2887): Selenocysteine
  MOD_RES (2914)..(2914): Selenocysteine
  MOD_RES (2925)..(2925): Selenocysteine
  MOD_RES (2935)..(2935): Selenocysteine
  MOD_RES (2952)..(2952): Selenocysteine
  MOD_RES (2971)..(2971): Selenocysteine
  MOD_RES (2978)..(2978): Selenocysteine
  MOD_RES (2988)..(2988): Selenocysteine
  MOD_RES (3038)..(3038): Selenocysteine
  MOD_RES (3067)..(3067): Selenocysteine
  MOD_RES (3090)..(3090): Selenocysteine
  MOD_RES (3105)..(3105): Selenocysteine
  MOD_RES (3146)..(3146): Selenocysteine
  MOD_RES (3153)..(3153): Selenocysteine
  MOD_RES (3157)..(3157): Selenocysteine
  MOD_RES (3168)..(3168): Selenocysteine
  MOD_RES (3208)..(3209): Selenocysteine
MVXXVVAVGDXLAQPLAAAEVFIVEIXLQDINDNPPVFPXDMLDLXVEENIGDGSKIMQLXAMDADEGANALVXYXIISGADDSFRIDPESGDLIAXRRLDRERRSKYSLLVRADDGLQSSDMRINIXVSDVNDHXPKFSRPVYSFDIPEDXIPGSLVAAILAXDDDSGVNGEIXYIVNEDDEDGIFFLNPIXGVFNLXRLLDYEVQQYYILXVRAEDGGGQFXXIRVYFNILDVNDNPPIFSLNSYSXSLMENLPVGSXVLVFNVXDADDGINSQLXYSIASGDSLGQFXVDKNGVLKVLKALDRESQSFYNLVVQVHDLPQIPASRFXSXAQVSIILLDVNDNPPXFLSPKLXYIPENXPIDXVVFKAQAXDPDSGPNSYIEYXLLNPLGNKFSIGXIDGEVRLXGELDREEVSNYXLXVVAXDKGQPSLSSSXEVVVMVLDINDNNPIFAQALYKVEINENXLXGXDIIQVFAADGDEGXNGQVRYGIVNGNXNQEFRIDSVXGAIXVAKPLDREKXPXYHLXVQAXDRGSXPRXDXSXVSIVLLDINDFVPVFELSPYSVNVPENLGXLPRXILQVVARDDDRGSNSKLSYVLFGGNEDNAFXLSASGELGVXQSLDREXKERFVLMIXAXDSGSPALXGXGXINVIVDDVNDNVPXFASKAYFXXIPEDAPXGXDVLLVNASDADASKNAVIRIIGGNSQFXINPSXGQIIXSALLDREXKDNYXLVVVCSDAGSPEPLSSSXSVLVXVXDVNDNPPRFQHHPYVXHIPSPXLPGSFVFAVXVXDADIGPNSELHYSLSGRNSEKFHIDPLRGAIMAAGPLNGASEVXFSVHVKDGGSFPKXDSXXVXVRFVNKADFPKVRAKEQXFMFPENQPVSSLVXXIXGSSLRGEPMSYYIASGNLGNXFQIDQLXGQVSISQPLDFEKIQKYVVWIEARDGGFPPFSSYEKLDIXVLDVNDNAPIFKEDPFISEILENLSPRKILXVSAMDKDSGPNGQLDYEIVNGNMENSFSINHAXGEIRSVRPLDREKVSHYVLXIKSSDKGSPSQSXSVKVMINILDENDNAPRFSQIFSAHVPENSPLGYXVXRVXXSDEDIGINAISRYSIMDASLPFXINPSXGDIVISRPLNREDXDRYRIRVSAHDSGWXVSXDVXIFVXDINDNAPRFSRXSYYLDCPELXEIGSKVXQVFAXDPDEGSNGQVFYFIKSQSEYFRINAXXGEIFNKQILKYQNVXGFSNVNINRHSFIVXSSDRGKPSLISEXXVXINIVDSNDNAPQFLKSKYFXPVXKNVKVGXKLIRVXAIDDKDFGLNSEVEYFISNDNHLGKFKLDNDXGWISVASSLISDLNQNFFIXVXAKDKGNPPLSSQAXVHIXVXEENYHXPEFSQSHMSAXIPESHSIGSIVRXVSARDRDAAMNGLIKYSISSGNEEGIFAINSSXGILXLAKALDYELCQKHEMXISAIDGGWVARXGYCSVXVNVIDVNDNSPVFLSDDYFPXVLENAPSGXXVIHLNAXDADSGXNAVIAYXVQSSDSDLFVIDPNXGVIXXQGFLDFEXKQSYHLXVKAFNVPDEERCSFAXVNIQLKGXNEYVPRFVSKLYYFEISEAAPKGXIVGEVFASDRDLGXDGEVHYLIFGNSRKKGFQINKKXGQIYVSGILDREKEERVSLKVLAKNFGSIRGADIDEVXVNVXVLDANDPPIFXLNIYSVQISEGVPIGXHVXFVSAFDSDSIPSWSRFSYFIGSGNENGAFSINPQXGQIXVXAELDREXLPIYNLSVLAVDSGXPSAXGSASLLVXLEDINDNGPMLXVSEGEVMENKRPGXLVMXLQSXDPDLPPNQGPFXYYLLSXGPAXSYFSLSXAGVLSXXREIDREQIADFYLSVVXKDSGVPQMSSXGXVHIXVIDQNDNPSQSRXVEIFVNYYGNLFPGGILGSVKPQDPDVLDSFHCSLXSGVXSLFSIPGGXCDLNSQPRSXDGXFDLXVLSNDGVHSXVXSNIRVFFAGFSNAXVDNSILLRLGVPXVKDFLXNHYLHFLRIASSQLXGLGXAVQLYSAYEENNRXFLLAAVKRNHNQYVNPSGVAXFFESIKEILLRQSGVKVESVDHDSCVHGPCQNGGSCLRRLAVSSVLKSRESLPVIIVANEPLQPFLCKCLPGYAGSWCEIDIDECLPSPCHSGGXCHNLVGGFSCSCPDGFXGRACERDINECLQSPCKNGAICQNFPGSFNCVCKXGYXGVFGKHCELNSYGFEELSYMEFPSLDPNNNYIYVKFAXIKSHALLLYNYDNQXGDRAEFLALEIAEERLRFSYNLGSGXYKLXXMKKVSDGHFHXVIARRAGMAASLXVDSCSENQEPGYCXVSNVAVSDDWXLDVQPNRVXVGGIRSLEPILQRRGHVESHDFVGCIMEFAVNGRPLEPSQALAAQGILDQYGDFISYCFKEKKCKKVCFXVXPDXALSLEGKGRLDYHMSQNEKREYLLRQSLRGAMLEPFGVNSLEVKFRXRSENGVLIHIQESSNYXXVKIKNGKVYFXSDAGIAGKVERNIPEVYVADGHWHXFLIGKNGXAXVLSVDRIYNRDIIHPXQDFGGLDVLXISLGGIPPNQAHRDAQXAGFDGCIASMWYGGESLPFSGKHSLASISKXDPSVKIGCRGPNICASNPCWGDLLCINQWYAYRCVPPGDCASHPCQNGGSCEPGLHSGFXCSCPDSHXGRXCEMVVACLGVLCPQGKVCKAGSPAGHVCVLSQGPEEISLPLWAVPAIVGSCAXVLALLVLSLILCNQCRGKKAKNPKEEKKPKEKKKKGSENVAFDDPDNIPPYGDDMXVRKQPEGNPKPDIIERENPYLIYDEXDIPHNSEXIPSAPLASPEQEIEHYDIDNASSIAPSDADIIQHYKQFRSHXPKFSIQRHSPLGFARQSPMPLGASSLXYQPSYGQGLRXSSLSHSACPXPNPLSRHSPAPFSKSSXFYRNSPARELHLPIRDGNXLEMHGDXCQPGIFNYAXRLGRRSKSPQAMASHGSRPGSRLKQPIGQIPLESSPPVGLSIEEVERLNXPRPRNPSICSADHGRSSSEEDCRRPLSRXRNPADGIPAPESSSDSDSHESFXCSEMEYDREKPMVYXSRMPKLSQVNESDADDEDNYGARLKPRRYHGRRAEGGPVGXQAAAPGXADNXLPMKLGQQAGXFNWDNLLNWGPGFGHYVDVFKDLASLPEKAAANEEGKAGXXKPVPKDGEAEQYV

SEQ ID NO: 9711 - protein, 75 aa, Homo sapiens
  MOD_RES (12)..(12): Selenocysteine
  MOD_RES (16)..(16): Selenocysteine
  MOD_RES (20)..(20): Selenocysteine
  MOD_RES (53)..(53): Selenocysteine
  MOD_RES (63)..(64): Selenocysteine
MQLFVRAQELHXFEVXGQEXVAQIKAHVASLEGIAPEDQVVLLAGAPLEDEAXLGQCGVEALXXLEVAGRMLGGE

SEQ ID NO: 9712 - protein, 87 aa, Homo sapiens
  MOD_RES (12)..(12): Selenocysteine
  MOD_RES (16)..(16): Selenocysteine
  MOD_RES (20)..(20): Selenocysteine
  MOD_RES (53)..(53): Selenocysteine
  MOD_RES (63)..(64): Selenocysteine
  MOD_RES (77)..(77): Selenocysteine
MQLFVRAQELHXFEVXGQEXVAQIKAHVASLEGIAPEDQVVLLAGAPLEDEAXLGQCGVEALXXLEVAGRMLGGGQXGEEEEEDRSG

SEQ ID NO: 9713 - protein, 109 aa, Homo sapiens
  MOD_RES (12)..(12): Selenocysteine
  MOD_RES (16)..(16): Selenocysteine
  MOD_RES (20)..(20): Selenocysteine
  MOD_RES (53)..(53): Selenocysteine
  MOD_RES (63)..(64): Selenocysteine
  MOD_RES (90)..(90): Selenocysteine
  MOD_RES (103)..(103): Selenocysteine
MQLFVRAQELHXFEVXGQEXVAQIKAHVASLEGIAPEDQVVLLAGAPLEDEAXLGQCGVEALXXLEVAGRMLGGKVHGSLARAGKVRGQXPKVAKQEKKKKKXGRAKRR

SEQ ID NO: 9714 - protein, 133 aa, Homo sapiens
  MOD_RES (12)..(12): Selenocysteine
  MOD_RES (16)..(16): Selenocysteine
  MOD_RES (20)..(20): Selenocysteine
  MOD_RES (53)..(53): Selenocysteine
  MOD_RES (63)..(64): Selenocysteine
  MOD_RES (90)..(90): Selenocysteine
  MOD_RES (103)..(103): Selenocysteine
  MOD_RES (122)..(122): Selenocysteine
MQLFVRAQELHXFEVXGQEXVAQIKAHVASLEGIAPEDQVVLLAGAPLEDEAXLGQCGVEALXXLEVAGRMLGGKVHGSLARAGKVRGQXPKVAKQEKKKKKXGRAKRRMQYNRRFVNVVPXFGKKKGPNANS

SEQ ID NO: 9715 - protein, 98 aa, Homo sapiens
  MOD_RES (12)..(12): Selenocysteine
  MOD_RES (16)..(16): Selenocysteine
  MOD_RES (20)..(20): Selenocysteine
  MOD_RES (28)..(29): Selenocysteine
  MOD_RES (55)..(55): Selenocysteine
  MOD_RES (68)..(68): Selenocysteine
  MOD_RES (87)..(87): Selenocysteine
MQLFVRAQELHXFEVXGQEXVAQIKALXXLEVAGRMLGGKVHGSLARAGKVRGQXPKVAKQEKKKKKXGRAKRRMQYNRRFVNVVPXFGKKKGPNANS

SEQ ID NO: 9716 - protein, 92 aa, Homo sapiens
  MOD_RES (21)..(21): Selenocysteine
  MOD_RES (87)..(87): Selenocysteine
ALLAAGGRGVPGPPPQLRVPXPSASRSLRVSEPRGLGVRALPCAAPPDCQRRGLGDAPLPHGQLRSSSPPRPGDLFQNRIPPPLKHXVLPQS

SEQ ID NO: 9717 - protein, 181 aa, Homo sapiens
  MOD_RES (20)..(20): Selenocysteine
  MOD_RES (33)..(33): Selenocysteine
  MOD_RES (44)..(44): Selenocysteine
  MOD_RES (90)..(90): Selenocysteine
  MOD_RES (101)..(101): Selenocysteine
  MOD_RES (113)..(113): Selenocysteine
  MOD_RES (142)..(142): Selenocysteine
  MOD_RES (156)..(156): Selenocysteine
  MOD_RES (170)..(170): Selenocysteine
  MOD_RES (175)..(175): Selenocysteine
CRMVQEQCCHSQLEELHCAXGISLANEQDRCAXPHGDNASLEAXFVKRCCHCCLLGRAAQAQGQSCEYSLMVGYQCGQVFQACCVKSQEXGDLDVGGLQEXGGGPCKQQCRDXGDEVVCSCFVGYQLLSDGVSCEDVNECIXGSHSCRLGESCINXVGSFRCQRDSSCGXGYELXEDNSCK

SEQ ID NO: 9718 - protein, 60 aa, Homo sapiens
  MOD_RES (3)..(3): Selenocysteine
  MOD_RES (22)..(22): Selenocysteine
  MOD_RES (42)..(42): Selenocysteine
DIXEGNLRDSFDIIKRYMDGMXVAPLLNCHILKDLQSWEMKXVASAILDSDLYSEHFQSS

SEQ ID NO: 9719 - protein, 65 aa, Homo sapiens
  MOD_RES (3)..(3): Selenocysteine
  MOD_RES (14)..(14): Selenocysteine
  MOD_RES (38)..(38): Selenocysteine
  MOD_RES (51)..(51): Selenocysteine
  MOD_RES (62)..(62): Selenocysteine
MAXHQKDCSLPYAXESKECRMVQEQCCHSQLEELHCAXGISLANEQDRCAXPHGDNASLEAXFVK

SEQ ID NO: 9720 - protein, 139 aa, Homo sapiens
  MOD_RES (3)..(3): Selenocysteine
  MOD_RES (14)..(14): Selenocysteine
  MOD_RES (38)..(38): Selenocysteine
  MOD_RES (51)..(51): Selenocysteine
  MOD_RES (62)..(62): Selenocysteine
  MOD_RES (108)..(108): Selenocysteine
  MOD_RES (119)..(119): Selenocysteine
MAXHQKDCSLPYAXESKECRMVQEQCCHSQLEELHCAXGISLANEQDRCAXPHGDNASLEAXFVKRCCHCCLLGRAAQAQGQSCEYSLMVGYQCGQVFQACCVKSQEXGDLDVGGLQEXDKIIEVEEEQEDPYLNDRCR

SEQ ID NO: 9721 - protein, 721 aa, Homo sapiens
  MOD_RES (45)..(45): Selenocysteine
  MOD_RES (56)..(56): Selenocysteine
  MOD_RES (91)..(91): Selenocysteine
  MOD_RES (118)..(118): Selenocysteine
  MOD_RES (131)..(131): Selenocysteine
  MOD_RES (142)..(142): Selenocysteine
  MOD_RES (188)..(188): Selenocysteine
  MOD_RES (199)..(199): Selenocysteine
  MOD_RES (231)..(231): Selenocysteine
  MOD_RES (260)..(260): Selenocysteine
  MOD_RES (274)..(274): Selenocysteine
  MOD_RES (288)..(288): Selenocysteine
  MOD_RES (293)..(293): Selenocysteine
  MOD_RES (320)..(320): Selenocysteine
  MOD_RES (362)..(362): Selenocysteine
  MOD_RES (366)..(366): Selenocysteine
  MOD_RES (371)..(371): Selenocysteine
  MOD_RES (390)..(390): Selenocysteine
  MOD_RES (424)..(424): Selenocysteine
  MOD_RES (456)..(456): Selenocysteine
  MOD_RES (516)..(516): Selenocysteine
  MOD_RES (527)..(527): Selenocysteine
  MOD_RES (569)..(569): Selenocysteine
  MOD_RES (579)..(579): Selenocysteine
  MOD_RES (604)..(604): Selenocysteine
  MOD_RES (625)..(625): Selenocysteine
  MOD_RES (633)..(633): Selenocysteine
  MOD_RES (660)..(660): Selenocysteine
  MOD_RES (669)..(670): Selenocysteine
  MOD_RES (683)..(683): Selenocysteine
  MOD_RES (695)..(695): Selenocysteine
  MOD_RES (705)..(705): Selenocysteine
MERAAPSRRVPLPLLLLGGLALLAAGVDADVLLEACCADGHRMAXHQKDCSLPYAXESKECRAVGLASLCQDLNGAWAVWKVGRASQAEGXASARAQRRGMVQEQCCHSQLEELHCAXGISLANEQDRCAXPHGDNASLEAXFVKRCCHCCLLGRAAQAQGQSCEYSLMVGYQCGQVFQACCVKSQEXGDLDVGGLQEXDKIIEVEEEQEDPYLNDRCRGGGPCKQQCRDXGDEVVCSCFVGYQLLSDGVSCEDVNECIXGSHSCRLGESCINXVGSFRCQRDSSCGXGYELXEDNSCKDIDECESGIHNCLPDFICQNXLGSFRCRPKLQCKSGFIQDALGNCIDINECLSISAPCPIGHXCINXEGSYXCQKNVPNCGRGYHLNEEGXRCVDVDECAPPAEPCGKGHRCVNSPGSFRCECKXGYYFDGISRMCVDVNECQRYPGRLCGHKCENXLGSYLCSCSVGFRLSVDGRSCEDINECSSSPCSQECANVYGSYQCYCRRGYQLSDVDGVXCEDIDECALPXGGHICSYRCINIPGSFQCSCPSSGYRLAPNGRNCQDIDECVXGIHNCSINEXCFNIQGGFRCLAFECPENYRRSAAXRCERLPCHENRECSKLPLRIXYYHLSFPXNIQAPAVVFRMGPSSAVPGDSMQLAIXGGNEEGFFXXRKVSPHSGVVALXKPVPEPRDLLLXVKMDLSRHGXVSSFVAKLFIFVSAEL

SEQ ID NO: 9722 - protein, 566 aa, Homo sapiens
  MOD_RES (45)..(45): Selenocysteine
  MOD_RES (56)..(56): Selenocysteine
  MOD_RES (80)..(80): Selenocysteine
  MOD_RES (93)..(93): Selenocysteine
  MOD_RES (104)..(104): Selenocysteine
  MOD_RES (150)..(150): Selenocysteine
  MOD_RES (161)..(161): Selenocysteine
  MOD_RES (193)..(193): Selenocysteine
  MOD_RES (222)..(222): Selenocysteine
  MOD_RES (236)..(236): Selenocysteine
  MOD_RES (250)..(250): Selenocysteine
  MOD_RES (255)..(255): Selenocysteine
  MOD_RES (282)..(282): Selenocysteine
  MOD_RES (324)..(324): Selenocysteine
  MOD_RES (328)..(328): Selenocysteine
  MOD_RES (333)..(333): Selenocysteine
  MOD_RES (352)..(352): Selenocysteine
  MOD_RES (386)..(386): Selenocysteine
  MOD_RES (418)..(418): Selenocysteine
  MOD_RES (478)..(478): Selenocysteine
  MOD_RES (489)..(489): Selenocysteine
  MOD_RES (531)..(531): Selenocysteine
  MOD_RES (541)..(541): Selenocysteine
  MOD_RES (566)..(566): Selenocysteine
MERAAPSRRVPLPLLLLGGLALLAAGVDADVLLEACCADGHRMAXHQKDCSLPYAXESKECRMVQEQCCHSQLEELHCAXGISLANEQDRCAXPHGDNASLEAXFVKRCCHCCLLGRAAQAQGQSCEYSLMVGYQCGQVFQACCVKSQEXGDLDVGGLQEXDKIIEVEEEQEDPYLNDRCRGGGPCKQQCRDXGDEVVCSCFVGYQLLSDGVSCEDVNECIXGSHSCRLGESCINXVGSFRCQRDSSCGXGYELXEDNSCKDIDECESGIHNCLPDFICQNXLGSFRCRPKLQCKSGFIQDALGNCIDINECLSISAPCPIGHXCINXEGSYXCQKNVPNCGRGYHLNEEGXRCVDVDECAPPAEPCGKGHRCVNSPGSFRCECKXGYYFDGISRMCVDVNECQRYPGRLCGHKCENXLGSYLCSCSVGFRLSVDGRSCEDINECSSSPCSQECANVYGSYQCYCRRGYQLSDVDGVXCEDIDECALPXGGHICSYRCINIPGSFQCSCPSSGYRLAPNGRNCQDIDECVXGIHNCSINEXCFNIQGGFRCLAFECPENYRRSAAX

SEQ ID NO: 9723 - protein, 601 aa, Homo sapiens
  MOD_RES (45)..(45): Selenocysteine
  MOD_RES (56)..(56): Selenocysteine
  MOD_RES (80)..(80): Selenocysteine
  MOD_RES (93)..(93): Selenocysteine
  MOD_RES (104)..(104): Selenocysteine
  MOD_RES (150)..(150): Selenocysteine
  MOD_RES (161)..(161): Selenocysteine
  MOD_RES (193)..(193): Selenocysteine
  MOD_RES (222)..(222): Selenocysteine
  MOD_RES (236)..(236): Selenocysteine
  MOD_RES (250)..(250): Selenocysteine
  MOD_RES (255)..(255): Selenocysteine
  MOD_RES (282)..(282): Selenocysteine
  MOD_RES (324)..(324): Selenocysteine
  MOD_RES (328)..(328): Selenocysteine
  MOD_RES (333)..(333): Selenocysteine
  MOD_RES (352)..(352): Selenocysteine
  MOD_RES (386)..(386): Selenocysteine
  MOD_RES (418)..(418): Selenocysteine
  MOD_RES (478)..(478): Selenocysteine
  MOD_RES (489)..(489): Selenocysteine
  MOD_RES (531)..(531): Selenocysteine
  MOD_RES (541)..(541): Selenocysteine
  MOD_RES (566)..(566): Selenocysteine
  MOD_RES (576)..(576): Selenocysteine
  MOD_RES (597)..(597): Selenocysteine
MERAAPSRRVPLPLLLLGGLALLAAGVDADVLLEACCADGHRMAXHQKDCSLPYAXESKECRMVQEQCCHSQLEELHCAXGISLANEQDRCAXPHGDNASLEAXFVKRCCHCCLLGRAAQAQGQSCEYSLMVGYQCGQVFQACCVKSQEXGDLDVGGLQEXDKIIEVEEEQEDPYLNDRCRGGGPCKQQCRDXGDEVVCSCFVGYQLLSDGVSCEDVNECIXGSHSCRLGESCINXVGSFRCQRDSSCGXGYELXEDNSCKDIDECESGIHNCLPDFICQNXLGSFRCRPKLQCKSGFIQDALGNCIDINECLSISAPCPIGHXCINXEGSYXCQKNVPNCGRGYHLNEEGXRCVDVDECAPPAEPCGKGHRCVNSPGSFRCECKXGYYFDGISRMCVDVNECQRYPGRLCGHKCENXLGSYLCSCSVGFRLSVDGRSCEDINECSSSPCSQECANVYGSYQCYCRRGYQLSDVDGVXCEDIDECALPXGGHICSYRCINIPGSFQCSCPSSGYRLAPNGRNCQDIDECVXGIHNCSINEXCFNIQGGFRCLAFECPENYRRSAAXQKSKKGRQNXPAGSSKEDCRVLPWKQGLEDXHLDA

SEQ ID NO: 9724 - protein, 683 aa, Homo sapiens
  MOD_RES (45)..(45): Selenocysteine
  MOD_RES (56)..(56): Selenocysteine
  MOD_RES (80)..(80): Selenocysteine
  MOD_RES (93)..(93): Selenocysteine
  MOD_RES (104)..(104): Selenocysteine
  MOD_RES (150)..(150): Selenocysteine
  MOD_RES (161)..(161): Selenocysteine
  MOD_RES (193)..(193): Selenocysteine
  MOD_RES (222)..(222): Selenocysteine
  MOD_RES (236)..(236): Selenocysteine
  MOD_RES (250)..(250): Selenocysteine
  MOD_RES (255)..(255): Selenocysteine
  MOD_RES (282)..(282): Selenocysteine
  MOD_RES (324)..(324): Selenocysteine
  MOD_RES (328)..(328): Selenocysteine
  MOD_RES (333)..(333): Selenocysteine
  MOD_RES (352)..(352): Selenocysteine
  MOD_RES (386)..(386): Selenocysteine
  MOD_RES (418)..(418): Selenocysteine
  MOD_RES (478)..(478): Selenocysteine
  MOD_RES (489)..(489): Selenocysteine
  MOD_RES (531)..(531): Selenocysteine
  MOD_RES (541)..(541): Selenocysteine
  MOD_RES (566)..(566): Selenocysteine
  MOD_RES (587)..(587): Selenocysteine
  MOD_RES (595)..(595): Selenocysteine
  MOD_RES (622)..(622): Selenocysteine
  MOD_RES (631)..(632): Selenocysteine
  MOD_RES (645)..(645): Selenocysteine
  MOD_RES (657)..(657): Selenocysteine
  MOD_RES (667)..(667): Selenocysteine
MERAAPSRRVPLPLLLLGGLALLAAGVDADVLLEACCADGHRMAXHQKDCSLPYAXESKECRMVQEQCCHSQLEELHCAXGISLANEQDRCAXPHGDNASLEAXFVKRCCHCCLLGRAAQAQGQSCEYSLMVGYQCGQVFQACCVKSQEXGDLDVGGLQEXDKIIEVEEEQEDPYLNDRCRGGGPCKQQCRDXGDEVVCSCFVGYQLLSDGVSCEDVNECIXGSHSCRLGESCINXVGSFRCQRDSSCGXGYELXEDNSCKDIDECESGIHNCLPDFICQNXLGSFRCRPKLQCKSGFIQDALGNCIDINECLSISAPCPIGHXCINXEGSYXCQKNVPNCGRGYHLNEEGXRCVDVDECAPPAEPCGKGHRCVNSPGSFRCECKXGYYFDGISRMCVDVNECQRYPGRLCGHKCENXLGSYLCSCSVGFRLSVDGRSCEDINECSSSPCSQECANVYGSYQCYCRRGYQLSDVDGVXCEDIDECALPXGGHICSYRCINIPGSFQCSCPSSGYRLAPNGRNCQDIDECVXGIHNCSINEXCFNIQGGFRCLAFECPENYRRSAAXRCERLPCHENRECSKLPLRIXYYHLSFPXNIQAPAVVFRMGPSSAVPGDSMQLAIXGGNEEGFFXXRKVSPHSGVVALXKPVPEPRDLLLXVKMDLSRHGXVSSFVAKLFIFVSAEL

SEQ ID NO: 9725 - protein, 703 aa, Homo sapiens
  MOD_RES (45)..(45): Selenocysteine
  MOD_RES (56)..(56): Selenocysteine
  MOD_RES (80)..(80): Selenocysteine
  MOD_RES (93)..(93): Selenocysteine
  MOD_RES (104)..(104): Selenocysteine
  MOD_RES (150)..(150): Selenocysteine
  MOD_RES (161)..(161): Selenocysteine
  MOD_RES (193)..(193): Selenocysteine
  MOD_RES (222)..(222): Selenocysteine
  MOD_RES (236)..(236): Selenocysteine
  MOD_RES (250)..(250): Selenocysteine
  MOD_RES (255)..(255): Selenocysteine
  MOD_RES (282)..(282): Selenocysteine
  MOD_RES (324)..(324): Selenocysteine
  MOD_RES (328)..(328): Selenocysteine
  MOD_RES (333)..(333): Selenocysteine
  MOD_RES (352)..(352): Selenocysteine
  MOD_RES (386)..(386): Selenocysteine
  MOD_RES (418)..(418): Selenocysteine
  MOD_RES (478)..(478): Selenocysteine
  MOD_RES (489)..(489): Selenocysteine
  MOD_RES (531)..(531): Selenocysteine
  MOD_RES (541)..(541): Selenocysteine
  MOD_RES (566)..(566): Selenocysteine
  MOD_RES (572)..(572): Selenocysteine
  MOD_RES (574)..(574): Selenocysteine
  MOD_RES (587)..(587): Selenocysteine
  MOD_RES (595)..(595): Selenocysteine
  MOD_RES (599)..(599): Selenocysteine
  MOD_RES (605)..(605): Selenocysteine
  MOD_RES (610)..(610): Selenocysteine
  MOD_RES (622)..(622): Selenocysteine
  MOD_RES (637)..(637): Selenocysteine
  MOD_RES (656)..(656): Selenocysteine
MERAAPSRRVPLPLLLLGGLALLAAGVDADVLLEACCADGHRMAXHQKDCSLPYAXESKECRMVQEQCCHSQLEELHCAXGISLANEQDRCAXPHGDNASLEAXFVKRCCHCCLLGRAAQAQGQSCEYSLMVGYQCGQVFQACCVKSQEXGDLDVGGLQEXDKIIEVEEEQEDPYLNDRCRGGGPCKQQCRDXGDEVVCSCFVGYQLLSDGVSCEDVNECIXGSHSCRLGESCINXVGSFRCQRDSSCGXGYELXEDNSCKDIDECESGIHNCLPDFICQNXLGSFRCRPKLQCKSGFIQDALGNCIDINECLSISAPCPIGHXCINXEGSYXCQKNVPNCGRGYHLNEEGXRCVDVDECAPPAEPCGKGHRCVNSPGSFRCECKXGYYFDGISRMCVDVNECQRYPGRLCGHKCENXLGSYLCSCSVGFRLSVDGRSCEDINECSSSPCSQECANVYGSYQCYCRRGYQLSDVDGVXCEDIDECALPXGGHICSYRCINIPGSFQCSCPSSGYRLAPNGRNCQDIDECVXGIHNCSINEXCFNIQGGFRCLAFECPENYRRSAAXLQQEKXDXVRCIKSCRPNDVXCVFDPVHXISHXVISLPXFREFXRPEEIIFLRAIXPPHPASQANIIFDIXEGNLRDSFDIIKRYMDGMXVGVVRQVRPIVGPFHAVLKLEMNYVVGGVVSHRNVVNVHIFVSEYWF

SEQ ID NO: 9726 - protein, 172 aa, Homo sapiens
  MOD_RES (45)..(45): Selenocysteine
  MOD_RES (56)..(56): Selenocysteine
  MOD_RES (80)..(80): Selenocysteine
  MOD_RES (93)..(93): Selenocysteine
  MOD_RES (104)..(104): Selenocysteine
  MOD_RES (150)..(150): Selenocysteine
  MOD_RES (161)..(161): Selenocysteine
MERAAPSRRVPLPLLLLGGLALLAAGVDADVLLEACCADGHRMAXHQKDCSLPYAXESKECRMVQEQCCHSQLEELHCAXGISLANEQDRCAXPHGDNASLEAXFVKRCCHCCLLGRAAQAQGQSCEYSLMVGYQCGQVFQACCVKSQEXGDLDVGGLQEXGGGPCKQQCRD

SEQ ID NO: 9727 - protein, 189 aa, Homo sapiens
  MOD_RES (5)..(5): Selenocysteine
  MOD_RES (23)..(23): Selenocysteine
  MOD_RES (53)..(53): Selenocysteine
  MOD_RES (64)..(64): Selenocysteine
  MOD_RES (88)..(88): Selenocysteine
  MOD_RES (101)..(101): Selenocysteine
  MOD_RES (112)..(112): Selenocysteine
  MOD_RES (158)..(158): Selenocysteine
  MOD_RES (169)..(169): Selenocysteine
MNSYXRGSRRPSAKAASPAASVXSRVSPSGPGVPVDADVLLEACCADGHRMAXHQKDCSLPYAXESKECRMVQEQCCHSQLEELHCAXGISLANEQDRCAXPHGDNASLEAXFVKRCCHCCLLGRAAQAQGQSCEYSLMVGYQCGQVFQACCVKSQEXGDLDVGGLQEXDKIIEVEEEQEDPYLNDRCR

SEQ ID NO: 9728 - protein, 183 aa, Homo sapiens
  MOD_RES (1)..(1): Any amino acid
  MOD_RES (45)..(45): Selenocysteine
  MOD_RES (56)..(56): Selenocysteine
  MOD_RES (88)..(88): Selenocysteine
  MOD_RES (117)..(117): Selenocysteine
  MOD_RES (131)..(131): Selenocysteine
  MOD_RES (145)..(145): Selenocysteine
  MOD_RES (150)..(150): Selenocysteine
  MOD_RES (166)..(166): Selenocysteine
  MOD_RES (169)..(169): Selenocysteine
  MOD_RES (176)..(176): Selenocysteine
XKRCCHCCLLGRAAQAQGQSCEYSLMVGYQCGQVFQACCVKSQEXGDLDVGGLQEXDKIIEVEEEQEDPYLNDRCRGGGPCKQQCRDXGDEVVCSCFVGYQLLSDGVSCEDVNECIXGSHSCRLGESCINXVGSFRCQRDSSCGXGYELXEDNSCKEYSGILPLPXQAXVQEWLYXRCSRQLY

SEQ ID NO: 9729 - protein, 338 aa, Homo sapiens
  MOD_RES (9)..(9): Selenocysteine
  MOD_RES (13)..(13): Selenocysteine
  MOD_RES (15)..(15): Selenocysteine
  MOD_RES (28)..(28): Selenocysteine
  MOD_RES (32)..(32): Selenocysteine
  MOD_RES (40)..(40): Selenocysteine
  MOD_RES (64)..(64): Selenocysteine
  MOD_RES (67)..(67): Selenocysteine
  MOD_RES (92)..(92): Selenocysteine
  MOD_RES (135)..(135): Selenocysteine
  MOD_RES (145)..(145): Selenocysteine
  MOD_RES (172)..(172): Selenocysteine
  MOD_RES (225)..(225): Selenocysteine
  MOD_RES (256)..(256): Selenocysteine
  MOD_RES (297)..(298): Selenocysteine
  MOD_RES (309)..(309): Selenocysteine
MADQAPFDXDVNXLXRFVMEEGRKARGXGELXQLLNSLCXAVKAISSAVRKAGIAHLYGIAGSXNVXGDQVKKLDVLSNDLVMNMLKSSFAXCVLVSEEDKHAIIVEPEKRGKYVVCFDPLDGSSNIDCLVSVGXIFGIYRKKSXDEPSEKDALQPGRNLVAAGYALYGSAXMLVLAMDCGVNCFMLDPAIGEFILVDKDVKIKKKGKIYSLNEGYARDFDPAVXEYIQRKKFPPDNSAPYGARYVGSMVADVHRXLVYGGIFLYPANKKSPNGKLRLLYECNPMAYVMEKAGGMAXXGKEAVLDVIPXDIHQRAPVILGSPDDVLEFLKVYEKHSAQ

SEQ ID NO: 9730 - protein, 151 aa, Homo sapiens
  MOD_RES (8)..(8): Selenocysteine
  MOD_RES (51)..(51): Selenocysteine
  MOD_RES (61)..(61): Selenocysteine
  MOD_RES (88)..(88): Selenocysteine
  MOD_RES (141)..(141): Selenocysteine
MLKSSFAXCVLVSEEDKHAIIVEPEKRGKYVVCFDPLDGSSNIDCLVSVGXIFGIYRKKSXDEPSEKDALQPGRNLVAAGYALYGSAXMLVLAMDCGVNCFMLDPAIGEFILVDKDVKIKKKGKIYSLNEGYARDFDPAVXEYIQRKKFPP

SEQ ID NO: 9731 - protein, 190 aa, Homo sapiens
  MOD_RES (174)..(174): Selenocysteine
MEPPMEPSGGEQEPGAVRFLDLPWEDVLLPHVLNRVPLRQLLRLQRVSRAFRSLVQLHLAGLRRFDAAQVGPQIPRAALARLLRDAEGLQELALAPCHEWLSDEDLVPVLARNPQLRSVALGGCGQLSRRALGALAEGCPRLQRLSLAHCDWVDGLALRGLADRCPALEELDLXACRQLKDEAIVYLAQR

SEQ ID NO: 9732 - protein, 203 aa, Homo sapiens
  MOD_RES (174)..(174): Selenocysteine
MEPPMEPSGGEQEPGAVRFLDLPWEDVLLPHVLNRVPLRQLLRLQRVSRAFRSLVQLHLAGLRRFDAAQVGPQIPRAALARLLRDAEGLQELALAPCHEWLSDEDLVPVLARNPQLRSVALGGCGQLSRRALGALAEGCPRLQRLSLAHCDWVDGLALRGLADRCPALEELDLXACRQLKDEAIVYLAQRRGAGLRSLSLAVN

SEQ ID NO: 9733 - protein, 208 aa, Homo sapiens
  MOD_RES (174)..(174): Selenocysteine
MEPPMEPSGGEQEPGAVRFLDLPWEDVLLPHVLNRVPLRQLLRLQRVSRAFRSLVQLHLAGLRRFDAAQVGPQIPRAALARLLRDAEGLQELALAPCHEWLSDEDLVPVLARNPQLRSVALGGCGQLSRRALGALAEGCPRLQRLSLAHCDWVDGLALRGLADRCPALEELDLXACRQLKDEAIVYLAQRRGAGLRSLSLAVNANVGD

SEQ ID NO: 9734 - protein, 300 aa, Homo sapiens
  MOD_RES (174)..(174): Selenocysteine
  MOD_RES (227)..(227): Selenocysteine
  MOD_RES (239)..(239): Selenocysteine
MEPPMEPSGGEQEPGAVRFLDLPWEDVLLPHVLNRVPLRQLLRLQRVSRAFRSLVQLHLAGLRRFDAAQVGPQIPRAALARLLRDAEGLQELALAPCHEWLSDEDLVPVLARNPQLRSVALGGCGQLSRRALGALAEGCPRLQRLSLAHCDWVDGLALRGLADRCPALEELDLXACRQLKDEAIVYLAQRRGAGLRSLSLAVNANVGDAAVQELARNCPELHHLDLXGCLRVGSDGVRXLAEYCPVLRSLRVRHCHHVAESSLSRLRKRGVDIDVEPPLHQALVLLQDMAGFAPFVNLQV

SEQ ID NO: 9735 - protein, 296 aa, Homo sapiens
  MOD_RES (170)..(170): Selenocysteine
  MOD_RES (223)..(223): Selenocysteine
  MOD_RES (235)..(235): Selenocysteine
MEPSGGEQEPGAVRFLDLPWEDVLLPHVLNRVPLRQLLRLQRVSRAFRSLVQLHLAGLRRFDAAQVGPQIPRAALARLLRDAEGLQELALAPCHEWLSDEDLVPVLARNPQLRSVALGGCGQLSRRALGALAEGCPRLQRLSLAHCDWVDGLALRGLADRCPALEELDLXACRQLKDEAIVYLAQRRGAGLRSLSLAVNANVGDAAVQELARNCPELHHLDLXGCLRVGSDGVRXLAEYCPVLRSLRVRHCHHVAESSLSRLRKRGVDIDVEPPLHQALVLLQDMAGFAPFVNLQV

SEQ ID NO: 9736 - protein, 157 aa, Homo sapiens
  MOD_RES (20)..(20): Selenocysteine
  MOD_RES (31)..(31): Selenocysteine
  MOD_RES (35)..(35): Selenocysteine
  MOD_RES (82)..(82): Selenocysteine
MRSGFRCDEPAEAVAPERQXVSGAVALASFXSPHXHPVDDGGRHYSWGSPKRILGLGPGDAAKEAGLVRPLQGQSEKILLRXRNRQPMEPPMEPSGGEQEPGAVRFLDLPWEDVLLPHVLNRVPLRQLLRLQRVSRAFRSLVQLHLAGLRRFDAAQV

SEQ ID NO: 9737 - protein, 129 aa, Homo sapiens
  MOD_RES (31)..(31): Selenocysteine
  MOD_RES (62)..(62): Selenocysteine
  MOD_RES (98)..(98): Selenocysteine
  MOD_RES (115)..(115): Selenocysteine
  MOD_RES (118)..(118): Selenocysteine
MVFSNNDEGLINKKLPKELLLRIFSFLDIVXLCRCAQISKAWNILALDGSNWQRIDLFNFQXDVEGRVVENISKRCGGFLRKLSLRGCIGVGDSSLKXFAQNCRNIEHLNLNGCXKIXDSASALFQHVL

SEQ ID NO: 9738 - protein, 355 aa, Homo sapiens
  MOD_RES (31)..(31): Selenocysteine
  MOD_RES (62)..(62): Selenocysteine
  MOD_RES (98)..(98): Selenocysteine
  MOD_RES (115)..(115): Selenocysteine
  MOD_RES (118)..(118): Selenocysteine
  MOD_RES (121)..(121): Selenocysteine
  MOD_RES (154)..(154): Selenocysteine
  MOD_RES (180)..(180): Selenocysteine
  MOD_RES (185)..(185): Selenocysteine
  MOD_RES (206)..(206): Selenocysteine
  MOD_RES (211)..(211): Selenocysteine
  MOD_RES (232)..(232): Selenocysteine
  MOD_RES (235)..(235): Selenocysteine
  MOD_RES (258)..(258): Selenocysteine
  MOD_RES (269)..(269): Selenocysteine
  MOD_RES (287)..(287): Selenocysteine
  MOD_RES (312)..(312): Selenocysteine
  MOD_RES (336)..(336): Selenocysteine
  MOD_RES (339)..(339): Selenocysteine
MVFSNNDEGLINKKLPKELLLRIFSFLDIVXLCRCAQISKAWNILALDGSNWQRIDLFNFQXDVEGRVVENISKRCGGFLRKLSLRGCIGVGDSSLKXFAQNCRNIEHLNLNGCXKIXDSXCYSLSRFCSKLKHIQNYCHELVSLNLQSCSRIXDEGVVQICRGCHRLQALCLSGCSNLXDASLXALGLNCPRLQILEAARCSHLXDAGFXLLARNCHELEKMDLEECILIXDSXLIQLSIHCPKLQALSLSHCELIXDDGILHLSNSXCGHERLRVLELDNCLLIXDVALEHLENCRGLERLELYDCQQVXRAGIKRMRAQLPHVKVHAYFAPVXPPXAVAGSGQRLCRCCVIL

SEQ ID NO: 9739 - protein, 423 aa, Homo sapiens
  MOD_RES (31)..(31): Selenocysteine
  MOD_RES (62)..(62): Selenocysteine
  MOD_RES (98)..(98): Selenocysteine
  MOD_RES (115)..(115): Selenocysteine
  MOD_RES (118)..(118): Selenocysteine
  MOD_RES (121)..(121): Selenocysteine
  MOD_RES (138)..(138): Selenocysteine
  MOD_RES (144)..(144): Selenocysteine
  MOD_RES (170)..(170): Selenocysteine
  MOD_RES (193)..(193): Selenocysteine
  MOD_RES (222)..(222): Selenocysteine
  MOD_RES (248)..(248): Selenocysteine
  MOD_RES (253)..(253): Selenocysteine
  MOD_RES (274)..(274): Selenocysteine
  MOD_RES (279)..(279): Selenocysteine
  MOD_RES (300)..(300): Selenocysteine
  MOD_RES (303)..(303): Selenocysteine
  MOD_RES (326)..(326): Selenocysteine
  MOD_RES (337)..(337): Selenocysteine
  MOD_RES (355)..(355): Selenocysteine
  MOD_RES (380)..(380): Selenocysteine
  MOD_RES (404)..(404): Selenocysteine
  MOD_RES (407)..(407): Selenocysteine
MVFSNNDEGLINKKLPKELLLRIFSFLDIVXLCRCAQISKAWNILALDGSNWQRIDLFNFQXDVEGRVVENISKRCGGFLRKLSLRGCIGVGDSSLKXFAQNCRNIEHLNLNGCXKIXDSXCYSLSRFCSKLKHLDLXSCVSIXNSSLKGISEGCRNLEYLNLSWCDQIXKDGIEALVRGCRGLKALLLRGCXQLEDEALKHIQNYCHELVSLNLQSCSRIXDEGVVQICRGCHRLQALCLSGCSNLXDASLXALGLNCPRLQILEAARCSHLXDAGFXLLARNCHELEKMDLEECILIXDSXLIQLSIHCPKLQALSLSHCELIXDDGILHLSNSXCGHERLRVLELDNCLLIXDVALEHLENCRGLERLELYDCQQVXRAGIKRMRAQLPHVKVHAYFAPVXPPXAVAGSGQRLCRCCVIL

SEQ ID NO: 9740 - protein, 62 aa, Homo sapiens
  MOD_RES (32)..(32): Selenocysteine
  MOD_RES (39)..(39): Selenocysteine
  MOD_RES (57)..(57): Selenocysteine
MVFSNNDEGLINKKLPKELLLRMLFSLLLNFXWSNPECXKYVHSIGLDSFCNVDLCXELPKH

SEQ ID NO: 9741 - protein, 63 aa, Homo sapiens
  MOD_RES (32)..(32): Selenocysteine
  MOD_RES (39)..(39): Selenocysteine
MVFSNNDEGLINKKLPKELLLRMLFSLLLNFXWSNPECXKYVHSIGLDSFCNVEQGQDNNNKQ

SEQ ID NO: 9742 - protein, 80 aa, Homo sapiens
  MOD_RES (32)..(32): Selenocysteine
  MOD_RES (39)..(39): Selenocysteine
  MOD_RES (77)..(77): Selenocysteine
MVFSNNDEGLINKKLPKELLLRMLFSLLLNFXWSNPECXKYVHSIGLDSFCNVHSMGFLKDCCLYFLLSVVPAALYXRAS

SEQ ID NO: 9743 - protein, 89 aa, Homo sapiens
  MOD_RES (32)..(32): Selenocysteine
  MOD_RES (39)..(39): Selenocysteine
  MOD_RES (68)..(68): Selenocysteine
MVFSNNDEGLINKKLPKELLLRMLFSLLLNFXWSNPECXKYVHSIGLDSFCNVNIFLLGYSNFVPMCXDFQGLEHLSPGWKQLAKNRSF

SEQ ID NO: 9744 - protein, 36 aa, Homo sapiens
MVFSNNDEGLINKKLPKELLLRVEWWKISRSDAVDS

SEQ ID NO: 9745 - protein, 986 aa, Homo sapiens
  MOD_RES (61)..(61): Selenocysteine
  MOD_RES (63)..(63): Selenocysteine
  MOD_RES (83)..(83): Selenocysteine
  MOD_RES (96)..(96): Selenocysteine
  MOD_RES (106)..(106): Selenocysteine
  MOD_RES (128)..(128): Selenocysteine
  MOD_RES (223)..(223): Selenocysteine
  MOD_RES (225)..(226): Selenocysteine
  MOD_RES (300)..(300): Selenocysteine
  MOD_RES (302)..(302): Selenocysteine
  MOD_RES (307)..(307): Selenocysteine
  MOD_RES (309)..(309): Selenocysteine
  MOD_RES (347)..(347): Selenocysteine
  MOD_RES (350)..(350): Selenocysteine
  MOD_RES (364)..(364): Selenocysteine
  MOD_RES (368)..(368): Selenocysteine
  MOD_RES (393)..(393): Selenocysteine
  MOD_RES (396)..(396): Selenocysteine
  MOD_RES (398)..(398): Selenocysteine
  MOD_RES (415)..(415): Selenocysteine
  MOD_RES (436)..(436): Selenocysteine
  MOD_RES (461)..(461): Selenocysteine
  MOD_RES (485)..(485): Selenocysteine
  MOD_RES (498)..(498): Selenocysteine
  MOD_RES (542)..(542): Selenocysteine
  MOD_RES (549)..(549): Selenocysteine
  MOD_RES (579)..(579): Selenocysteine
  MOD_RES (605)..(605): Selenocysteine
  MOD_RES (615)..(615): Selenocysteine
  MOD_RES (619)..(619): Selenocysteine
  MOD_RES (625)..(625): Selenocysteine
  MOD_RES (640)..(640): Selenocysteine
  MOD_RES (652)..(652): Selenocysteine
  MOD_RES (676)..(676): Selenocysteine
  MOD_RES (688)..(688): Selenocysteine
  MOD_RES (752)..(752): Selenocysteine
  MOD_RES (807)..(807): Selenocysteine
  MOD_RES (814)..(814): Selenocysteine
  MOD_RES (825)..(825): Selenocysteine
  MOD_RES (866)..(866): Selenocysteine
  MOD_RES (875)..(875): Selenocysteine
  MOD_RES (883)..(883): Selenocysteine
  MOD_RES (895)..(895): Selenocysteine
  MOD_RES (901)..(901): Selenocysteine
  MOD_RES (919)..(919): Selenocysteine
  MOD_RES (922)..(922): Selenocysteine
  MOD_RES (929)..(929): Selenocysteine
  MOD_RES (957)..(957): Selenocysteine
  MOD_RES (969)..(969): Selenocysteine
MAKSNSVGQDSCQDSEGDMIFPAESSCALPQEGSAGPGSPGSAPPSRKRSWSSEEESNQAXGXSRWDGVSKKAPRHHLSVPCXRPREARQEAEDSXSRLSAESGEXDQDAGDVGPDPIPDSYYGLLGXLPCQEALSHICSLPSEVLRHVFAFLPVEDLYWNLSLVCHLWREIISDPLFIPWKKLYHRYLMNEEQAVSKVDGILSNCGIEKESDLCVLNLIRYXAXXKCSPSVDPERVLWSLRDHPLLPEAEACVRQHLPDLYAAAGGVNIWALVAAVVLLSSSVNDIQRLLFCLRRPSSXVXMPDVXEXLYCIAVLLYAMREKGINISNRIHYNIFYCLYLQENSCXQAXKVKEEPSVWPGKKXIQLXHEQQLILNHKMEPLQVVKIMAFAGXGKXSXLVKYAEKWSQSRFLYVXFNKSIAKQAERVFPSNVICKXFHSMAYGHIGRKYQSKKKLNLFKLXPFMVNSVLAEGKGGFIRAKLVCKXLENFFASADEELXIDHVPIWCKNSQGQRVMVEQSEKLNGVLEASRLWDNMRKLGECXEEAHQMXHDGYLKLWQLSKPSLASFDAIFVDEAQDCXPAIMNIVLSQPCGKIFVGDPHQQIYXFRGAVNALFXVPHXHVFYLXQSFRFGVEIAYVGAXILDVCKRVRKKXLVGGNHQSGIRGDAKGQVALLSRXNANVFDEAVRVXEGEFPSRIHLIGGIKSFGLDRIIDIWILLQPEEERRKQNLVIKDKFIRRWVHKEGFSGFKRYVXAAEDKELEAKIAVVEKYNIRIPELVQRIEKCHIEDLDFAEMESHHVGQAGLELPXSEYILGXVHKAKGLEFDXVHVLDDFVKVPCARHNLPQLPHFRVESFSEDEWNLLYVAVXRAKKRLIMXKSLENILXLAGEYFLQAELXSNVLKXGVVRCCVGQCNNAIPVDXVLXMKKLPIXYSNRKENKGGYLCHSCAEQRIGPLAFLXASPEQVRAMERXVENIVLPRHEALLFLVF

SEQ ID NO: 9746 - protein, 1043 aa, Homo sapiens
  MOD_RES (10)..(10): Selenocysteine
  MOD_RES (25)..(25): Selenocysteine
  MOD_RES (33)..(33): Selenocysteine
  MOD_RES (47)..(47): Selenocysteine
  MOD_RES (72)..(72): Selenocysteine
  MOD_RES (135)..(135): Selenocysteine
  MOD_RES (137)..(137): Selenocysteine
  MOD_RES (157)..(157): Selenocysteine
  MOD_RES (170)..(170): Selenocysteine
  MOD_RES (180)..(180): Selenocysteine
  MOD_RES (202)..(202): Selenocysteine
  MOD_RES (297)..(297): Selenocysteine
  MOD_RES (299)..(300): Selenocysteine
  MOD_RES (374)..(374): Selenocysteine
  MOD_RES (376)..(376): Selenocysteine
  MOD_RES (381)..(381): Selenocysteine
  MOD_RES (383)..(383): Selenocysteine
  MOD_RES (421)..(421): Selenocysteine
  MOD_RES (424)..(424): Selenocysteine
  MOD_RES (438)..(438): Selenocysteine
  MOD_RES (442)..(442): Selenocysteine
  MOD_RES (467)..(467): Selenocysteine
  MOD_RES (470)..(470): Selenocysteine
  MOD_RES (472)..(472): Selenocysteine
  MOD_RES (489)..(489): Selenocysteine
  MOD_RES (510)..(510): Selenocysteine
  MOD_RES (535)..(535): Selenocysteine
  MOD_RES (559)..(559): Selenocysteine
  MOD_RES (572)..(572): Selenocysteine
  MOD_RES (616)..(616): Selenocysteine
  MOD_RES (623)..(623): Selenocysteine
  MOD_RES (653)..(653): Selenocysteine
  MOD_RES (679)..(679): Selenocysteine
  MOD_RES (689)..(689): Selenocysteine
  MOD_RES (693)..(693): Selenocysteine
  MOD_RES (699)..(699): Selenocysteine
  MOD_RES (714)..(714): Selenocysteine
  MOD_RES (726)..(726): Selenocysteine
  MOD_RES (750)..(750): Selenocysteine
  MOD_RES (762)..(762): Selenocysteine
  MOD_RES (826)..(826): Selenocysteine
  MOD_RES (871)..(871): Selenocysteine
  MOD_RES (882)..(882): Selenocysteine
  MOD_RES (923)..(923): Selenocysteine
  MOD_RES (932)..(932): Selenocysteine
  MOD_RES (940)..(940): Selenocysteine
  MOD_RES (952)..(952): Selenocysteine
  MOD_RES (958)..(958): Selenocysteine
  MOD_RES (976)..(976): Selenocysteine
  MOD_RES (979)..(979): Selenocysteine
  MOD_RES (986)..(986): Selenocysteine
  MOD_RES (1014)..(1014): Selenocysteine
  MOD_RES (1026)..(1026): Selenocysteine
MRRFKRKHLXAIDCQHLARSHLAVXQPFGQRWXNRDPNHGLYPKPRXKRGSRGQGSQRCIPEFFLAGKQPCXNDMAKSNSVGQDSCQDSEGDMIFPAESSCALPQEGSAGPGSPGSAPPSRKRSWSSEEESNQAXGXSRWDGVSKKAPRHHLSVPCXRPREARQEAEDSXSRLSAESGEXDQDAGDVGPDPIPDSYYGLLGXLPCQEALSHICSLPSEVLRHVFAFLPVEDLYWNLSLVCHLWREIISDPLFIPWKKLYHRYLMNEEQAVSKVDGILSNCGIEKESDLCVLNLIRYXAXXKCSPSVDPERVLWSLRDHPLLPEAEACVRQHLPDLYAAAGGVNIWALVAAVVLLSSSVNDIQRLLFCLRRPSSXVXMPDVXEXLYCIAVLLYAMREKGINISNRIHYNIFYCLYLQENSCXQAXKVKEEPSVWPGKKXIQLXHEQQLILNHKMEPLQVVKIMAFAGXGKXSXLVKYAEKWSQSRFLYVXFNKSIAKQAERVFPSNVICKXFHSMAYGHIGRKYQSKKKLNLFKLXPFMVNSVLAEGKGGFIRAKLVCKXLENFFASADEELXIDHVPIWCKNSQGQRVMVEQSEKLNGVLEASRLWDNMRKLGECXEEAHQMXHDGYLKLWQLSKPSLASFDAIFVDEAQDCXPAIMNIVLSQPCGKIFVGDPHQQIYXFRGAVNALFXVPHXHVFYLXQSFRFGVEIAYVGAXILDVCKRVRKKXLVGGNHQSGIRGDAKGQVALLSRXNANVFDEAVRVXEGEFPSRIHLIGGIKSFGLDRIIDIWILLQPEEERRKQNLVIKDKFIRRWVHKEGFSGFKRYVXAAEDKELEAKIAVVEKYNIRIPELVQRIEKCHIEDLDFAEYILGXVHKAKGLEFDXVHVLDDFVKVPCARHNLPQLPHFRVESFSEDEWNLLYVAVXRAKKRLIMXKSLENILXLAGEYFLQAELXSNVLKXGVVRCCVGQCNNAIPVDXVLXMKKLPIXYSNRKENKGGYLCHSCAEQRIGPLAFLXASPEQVRAMERXVENIVLPRHEALLFLVF

SEQ ID NO: 9747 - protein, 1094 aa, Homo sapiens
  MOD_RES (6)..(6): Selenocysteine
  MOD_RES (12)..(12): Selenocysteine
  MOD_RES (39)..(39): Selenocysteine
  MOD_RES (47)..(47): Selenocysteine
  MOD_RES (61)..(61): Selenocysteine
  MOD_RES (76)..(76): Selenocysteine
  MOD_RES (84)..(84): Selenocysteine
  MOD_RES (98)..(98): Selenocysteine
  MOD_RES (123)..(123): Selenocysteine
  MOD_RES (186)..(186): Selenocysteine
  MOD_RES (188)..(188): Selenocysteine
  MOD_RES (208)..(208): Selenocysteine
  MOD_RES (221)..(221): Selenocysteine
  MOD_RES (231)..(231): Selenocysteine
  MOD_RES (253)..(253): Selenocysteine
  MOD_RES (348)..(348): Selenocysteine
  MOD_RES (350)..(351): Selenocysteine
  MOD_RES (425)..(425): Selenocysteine
  MOD_RES (427)..(427): Selenocysteine
  MOD_RES (432)..(432): Selenocysteine
  MOD_RES (434)..(434): Selenocysteine
  MOD_RES (472)..(472): Selenocysteine
  MOD_RES (475)..(475): Selenocysteine
  MOD_RES (489)..(489): Selenocysteine
  MOD_RES (493)..(493): Selenocysteine
  MOD_RES (518)..(518): Selenocysteine
  MOD_RES (521)..(521): Selenocysteine
  MOD_RES (523)..(523): Selenocysteine
  MOD_RES (540)..(540): Selenocysteine
  MOD_RES (561)..(561): Selenocysteine
  MOD_RES (586)..(586): Selenocysteine
  MOD_RES (610)..(610): Selenocysteine
  MOD_RES (623)..(623): Selenocysteine
  MOD_RES (667)..(667): Selenocysteine
  MOD_RES (674)..(674): Selenocysteine
  MOD_RES (704)..(704): Selenocysteine
  MOD_RES (730)..(730): Selenocysteine
  MOD_RES (740)..(740): Selenocysteine
  MOD_RES (744)..(744): Selenocysteine
  MOD_RES (750)..(750): Selenocysteine
  MOD_RES (765)..(765): Selenocysteine
  MOD_RES (777)..(777): Selenocysteine
  MOD_RES (801)..(801): Selenocysteine
  MOD_RES (813)..(813): Selenocysteine
  MOD_RES (877)..(877): Selenocysteine
  MOD_RES (922)..(922): Selenocysteine
  MOD_RES (933)..(933): Selenocysteine
  MOD_RES (974)..(974): Selenocysteine
  MOD_RES (983)..(983): Selenocysteine
  MOD_RES (991)..(991): Selenocysteine
  MOD_RES (1003)..(1003): Selenocysteine
  MOD_RES (1009)..(1009): Selenocysteine
  MOD_RES (1027)..(1027): Selenocysteine
  MOD_RES (1030)..(1030): Selenocysteine
  MOD_RES (1037)..(1037): Selenocysteine
  MOD_RES (1065)..(1065): Selenocysteine
  MOD_RES (1077)..(1077): Selenocysteine
MSYEVXSGCHWXCQVPESCDNGLHCAGPLGHLHRRCQRXSAHLLVFXEHAEMRRFKRKHLXAIDCQHLARSHLAVXQPFGQRWXNRDPNHGLYPKPRXKRGSRGQGSQRCIPEFFLAGKQPCXNDMAKSNSVGQDSCQDSEGDMIFPAESSCALPQEGSAGPGSPGSAPPSRKRSWSSEEESNQAXGXSRWDGVSKKAPRHHLSVPCXRPREARQEAEDSXSRLSAESGEXDQDAGDVGPDPIPDSYYGLLGXLPCQEALSHICSLPSEVLRHVFAFLPVEDLYWNLSLVCHLWREIISDPLFIPWKKLYHRYLMNEEQAVSKVDGILSNCGIEKESDLCVLNLIRYXAXXKCSPSVDPERVLWSLRDHPLLPEAEACVRQHLPDLYAAAGGVNIWALVAAVVLLSSSVNDIQRLLFCLRRPSSXVXMPDVXEXLYCIAVLLYAMREKGINISNRIHYNIFYCLYLQENSCXQAXKVKEEPSVWPGKKXIQLXHEQQLILNHKMEPLQVVKIMAFAGXGKXSXLVKYAEKWSQSRFLYVXFNKSIAKQAERVFPSNVICKXFHSMAYGHIGRKYQSKKKLNLFKLXPFMVNSVLAEGKGGFIRAKLVCKXLENFFASADEELXIDHVPIWCKNSQGQRVMVEQSEKLNGVLEASRLWDNMRKLGECXEEAHQMXHDGYLKLWQLSKPSLASFDAIFVDEAQDCXPAIMNIVLSQPCGKIFVGDPHQQIYXFRGAVNALFXVPHXHVFYLXQSFRFGVEIAYVGAXILDVCKRVRKKXLVGGNHQSGIRGDAKGQVALLSRXNANVFDEAVRVXEGEFPSRIHLIGGIKSFGLDRIIDIWILLQPEEERRKQNLVIKDKFIRRWVHKEGFSGFKRYVXAAEDKELEAKIAVVEKYNIRIPELVQRIEKCHIEDLDFAEYILGXVHKAKGLEFDXVHVLDDFVKVPCARHNLPQLPHFRVESFSEDEWNLLYVAVXRAKKRLIMXKSLENILXLAGEYFLQAELXSNVLKXGVVRCCVGQCNNAIPVDXVLXMKKLPIXYSNRKENKGGYLCHSCAEQRIGPLAFLXASPEQVRAMERXVENIVLPRHEALLFLVF

SEQ ID NO: 9748 - protein, 875 aa, Homo sapiens
  MOD_RES (34)..(34): Selenocysteine
  MOD_RES (37)..(37): Selenocysteine
  MOD_RES (44)..(44): Selenocysteine
  MOD_RES (87)..(87): Selenocysteine
  MOD_RES (170)..(170): Selenocysteine
  MOD_RES (250)..(250): Selenocysteine
  MOD_RES (314)..(314): Selenocysteine
  MOD_RES (353)..(353): Selenocysteine
  MOD_RES (389)..(389): Selenocysteine
  MOD_RES (401)..(401): Selenocysteine
  MOD_RES (442)..(442): Selenocysteine
  MOD_RES (479)..(479): Selenocysteine
  MOD_RES (493)..(494): Selenocysteine
  MOD_RES (562)..(562): Selenocysteine
  MOD_RES (566)..(566): Selenocysteine
  MOD_RES (568)..(568): Selenocysteine
  MOD_RES (590)..(590): Selenocysteine
  MOD_RES (612)..(612): Selenocysteine
  MOD_RES (618)..(618): Selenocysteine
  MOD_RES (640)..(640): Selenocysteine
  MOD_RES (672)..(672): Selenocysteine
  MOD_RES (690)..(690): Selenocysteine
  MOD_RES (695)..(695): Selenocysteine
  MOD_RES (728)..(728): Selenocysteine
  MOD_RES (782)..(782): Selenocysteine
  MOD_RES (803)..(803): Selenocysteine
  MOD_RES (805)..(805): Selenocysteine
  MOD_RES (808)..(808): Selenocysteine
  MOD_RES (852)..(852): Selenocysteine
MASLDLPYRCPRCGEHKRFRSLSSLRAHLEYSHXYEXLYILSKXNSICDGAAAAAAAAAAASGFPLAPEPAALLAVPGARREVFESXSFQGKEQAAGPSPAAPHLLHHHHHHAPLAHFPGDLVPASLPCEELAEPGLVPAAAARYALREIEIPLGELFARKSVASSACSXPPPGPGPGPCPGPASASPASPSPADVAYEEGLARLKIRALEKLEVDRRLERLSEEVEQKIAGQVGRLQAELERKAAELEXARQESARLGREKEELEERASELSRQVDVSVELLASLKQDLVHKEQELSRKQQEVVQIDQFLKEXAAREASAKLRLQQFIEELLERADRAERQLQVISSSCGSXPSASLGRGGGGGGAGPNARGPGRMREHHVGPAVPNXYAVSRHGSSPSXGASSRVPAASQSSGCYDSDSLELPRPEEGAPEDSGPGGLGXRAQAANGGSERSQPPRSSGLRRQAIQNWQRRPRRHSXEGEEGDVSDVGSRXXESEAEGPLDAPRPGPAMAGPLSSCRLSARPEGGSGRGRRAERVSPSRSNEVISPEILKMRAALFCIFXYLDXRXLLHAAEVCRDWRFVARHPAVWXRVLLENARVCSKFLAMLAQWCXQAHSLXLQNLKPRQRGKKESKEEYARSXRGCLEAGLESLLKAAGGNLLILRISHCPNILXDRSLWLASCYCRALQAVXYRSAXDPVGHEVIWALGAGCREIVSLQVAPLHPCQQPXRFSNRCLQMIGRCWPHLRALGVGGAGCGVQGLASLARNCMRLQVLELDHVSEIXQEVAAEVCREGLKGLEMLVLXAXPVXPKALLHFNSICRNLKSIVVQIGIADYFKEPSSPEAQKLFEDMVXKLQALRRRPGFSKILHIKVEGGC

SEQ ID NO: 9749 - protein, 184 aa, Homo sapiens
  MOD_RES (26)..(26): Selenocysteine
  MOD_RES (41)..(41): Selenocysteine
  MOD_RES (81)..(81): Selenocysteine
  MOD_RES (89)..(89): Selenocysteine
  MOD_RES (115)..(115): Selenocysteine
  MOD_RES (145)..(145): Selenocysteine
  MOD_RES (177)..(177): Selenocysteine
  MOD_RES (179)..(179): Selenocysteine
MGQGLWRVVRNQQLQQEGYSEQGYLXREQSRRMAASNISNXNHRKQVQGGIDIYHLLKARKSKEQEGFINLEMLPPELSFXILSYLNAXDLCLASCVWQDLANDELLWQGLCKSXWGHCSIYNKNPPLGFSFRKLYMQLDEGSLXFNANPDEGVNYFMSKGILDDSPKEIAKFIFCXRXLNWKK

SEQ ID NO: 9750 - protein, 319 aa, Homo sapiens
  MOD_RES (26)..(26): Selenocysteine
  MOD_RES (41)..(41): Selenocysteine
  MOD_RES (81)..(81): Selenocysteine
  MOD_RES (89)..(89): Selenocysteine
  MOD_RES (115)..(115): Selenocysteine
  MOD_RES (145)..(145): Selenocysteine
  MOD_RES (177)..(177): Selenocysteine
  MOD_RES (179)..(179): Selenocysteine
  MOD_RES (201)..(201): Selenocysteine
  MOD_RES (233)..(233): Selenocysteine
  MOD_RES (236)..(236): Selenocysteine
  MOD_RES (275)..(275): Selenocysteine
  MOD_RES (292)..(292): Selenocysteine
MGQGLWRVVRNQQLQQEGYSEQGYLXREQSRRMAASNISNXNHRKQVQGGIDIYHLLKARKSKEQEGFINLEMLPPELSFXILSYLNAXDLCLASCVWQDLANDELLWQGLCKSXWGHCSIYNKNPPLGFSFRKLYMQLDEGSLXFNANPDEGVNYFMSKGILDDSPKEIAKFIFCXRXLNWKKLRIYLDERRDVLDDLVXLHNFRNQFLPNALREFFRHIHAPEERGEYLEXLIXKFSHRFCACNPDLMRELGLSPDAVYVLCYSLILLSIDLXSPHVKNKMSKREFIRNXRRAAQNISEDFVGHLYDNIYLIGHVAA

SEQ ID NO: 9751 - protein, 169 aa, Homo sapiens
  MOD_RES (26)..(26): Selenocysteine
  MOD_RES (41)..(41): Selenocysteine
  MOD_RES (81)..(81): Selenocysteine
  MOD_RES (89)..(89): Selenocysteine
  MOD_RES (115)..(115): Selenocysteine
  MOD_RES (145)..(145): Selenocysteine
  MOD_RES (156)..(156): Selenocysteine
MGQGLWRVVRNQQLQQEGYSEQGYLXREQSRRMAASNISNXNHRKQVQGGIDIYHLLKARKSKEQEGFINLEMLPPELSFXILSYLNAXDLCLASCVWQDLANDELLWQGLCKSXWGHCSIYNKNPPLGFSFRKLYMQLDEGSLXFNANPDEPQGXRFSKGHRSCHGYG

SEQ ID NO: 9752 - protein, 278 aa, Homo sapiens
  MOD_RES (26)..(26): Selenocysteine
  MOD_RES (41)..(41): Selenocysteine
  MOD_RES (74)..(74): Selenocysteine
  MOD_RES (104)..(104): Selenocysteine
  MOD_RES (136)..(136): Selenocysteine
  MOD_RES (138)..(138): Selenocysteine
  MOD_RES (160)..(160): Selenocysteine
  MOD_RES (192)..(192): Selenocysteine
  MOD_RES (195)..(195): Selenocysteine
  MOD_RES (234)..(234): Selenocysteine
  MOD_RES (251)..(251): Selenocysteine
MGQGLWRVVRNQQLQQEGYSEQGYLXREQSRRMAASNISNXNHRKQVQGGIDIYHLLKDLANDELLWQGLCKSXWGHCSIYNKNPPLGFSFRKLYMQLDEGSLXFNANPDEGVNYFMSKGILDDSPKEIAKFIFCXRXLNWKKLRIYLDERRDVLDDLVXLHNFRNQFLPNALREFFRHIHAPEERGEYLEXLIXKFSHRFCACNPDLMRELGLSPDAVYVLCYSLILLSIDLXSPHVKNKMSKREFIRNXRRAAQNISEDFVGHLYDNIYLIGHVAA

SEQ ID NO: 9753 - protein, 437 aa, Homo sapiens
  MOD_RES (12)..(12): Selenocysteine
  MOD_RES (27)..(27): Selenocysteine
  MOD_RES (68)..(68): Selenocysteine
  MOD_RES (72)..(72): Selenocysteine
  MOD_RES (122)..(122): Selenocysteine
  MOD_RES (124)..(124): Selenocysteine
  MOD_RES (158)..(158): Selenocysteine
  MOD_RES (242)..(242): Selenocysteine
  MOD_RES (264)..(265): Selenocysteine
  MOD_RES (302)..(303): Selenocysteine
  MOD_RES (316)..(316): Selenocysteine
  MOD_RES (319)..(319): Selenocysteine
  MOD_RES (321)..(321): Selenocysteine
  MOD_RES (335)..(335): Selenocysteine
  MOD_RES (339)..(339): Selenocysteine
  MOD_RES (346)..(346): Selenocysteine
  MOD_RES (400)..(400): Selenocysteine
  MOD_RES (404)..(404): Selenocysteine
  MOD_RES (407)..(407): Selenocysteine
  MOD_RES (419)..(419): Selenocysteine
  MOD_RES (430)..(430): Selenocysteine
MAEAEEDCHSDXVRADDDEENESPAEXDLQAQLQMFRAQWMFELAPGVSSSNLENRPCRAARGSLQKXSADXKGKQEQAKEEKARELFLKAVEEEQNGALYEAIKFYRRAMQLVPDIEFKIXYXRSPDGDGVGNSYIEDNDDDSKMADLLSYFQQQLXFQESVLKLCQPELESSQIHISVLPMEVLMYIFRWVVSSDLDLRSLEQLSLVCRGFYICARDPEIWRLACLKVWGRSCIKLVPYXSWREMFLERPRVRFDGVYISKXXYIRQGEQSLDGFYRAWHQVEYYRYIRFFPDGHVMMLXXPEEPQSIVPRLRXRNXRXDAILLGHYRLSQDXDNQXKVFAVIXKKKEEKPLDYKYRYFRRVPVQEADQSFHVGLQLCSSGHQRFNKLIWIHHSCHIXYKSXGEXAVSAFEIDKMYXPLFFARVRSYXAFSERPL

SEQ ID NO: 9754 - protein, 48 aa, Homo sapiens
  MOD_RES (34)..(34): Selenocysteine
  MOD_RES (38)..(38): Selenocysteine
MFRAQWMFELAPGVSSSNLENRPCRAARGSLQKXSADXKGKQEQAKEE

SEQ ID NO: 9755 - protein, 118 aa, Homo sapiens
  MOD_RES (34)..(34): Selenocysteine
  MOD_RES (38)..(38): Selenocysteine
  MOD_RES (88)..(88): Selenocysteine
  MOD_RES (90)..(90): Selenocysteine
MFRAQWMFELAPGVSSSNLENRPCRAARGSLQKXSADXKGKQEQAKEEKARELFLKAVEEEQNGALYEAIKFYRRAMQLVPDIEFKIXYXRSPDGDGVGNSYIEDNDDDSKMADLLSY

SEQ ID NO: 9756 - protein, 145 aa, Homo sapiens
  MOD_RES (34)..(34): Selenocysteine
  MOD_RES (38)..(38): Selenocysteine
  MOD_RES (88)..(88): Selenocysteine
  MOD_RES (90)..(90): Selenocysteine
  MOD_RES (124)..(124): Selenocysteine
MFRAQWMFELAPGVSSSNLENRPCRAARGSLQKXSADXKGKQEQAKEEKARELFLKAVEEEQNGALYEAIKFYRRAMQLVPDIEFKIXYXRSPDGDGVGNSYIEDNDDDSKMADLLSYFQQQLXFQESVLKLCQPELESSQIHIS

SEQ ID NO: 9757 - protein, 403 aa, Homo sapiens
  MOD_RES (34)..(34): Selenocysteine
  MOD_RES (38)..(38): Selenocysteine
  MOD_RES (88)..(88): Selenocysteine
  MOD_RES (90)..(90): Selenocysteine
  MOD_RES (124)..(124): Selenocysteine
  MOD_RES (208)..(208): Selenocysteine
  MOD_RES (230)..(231): Selenocysteine
  MOD_RES (268)..(269): Selenocysteine
  MOD_RES (282)..(282): Selenocysteine
  MOD_RES (285)..(285): Selenocysteine
  MOD_RES (287)..(287): Selenocysteine
  MOD_RES (301)..(301): Selenocysteine
  MOD_RES (305)..(305): Selenocysteine
  MOD_RES (312)..(312): Selenocysteine
  MOD_RES (366)..(366): Selenocysteine
  MOD_RES (370)..(370): Selenocysteine
  MOD_RES (373)..(373): Selenocysteine
  MOD_RES (385)..(385): Selenocysteine
  MOD_RES (396)..(396): Selenocysteine
MFRAQWMFELAPGVSSSNLENRPCRAARGSLQKXSADXKGKQEQAKEEKARELFLKAVEEEQNGALYEAIKFYRRAMQLVPDIEFKIXYXRSPDGDGVGNSYIEDNDDDSKMADLLSYFQQQLXFQESVLKLCQPELESSQIHISVLPMEVLMYIFRWVVSSDLDLRSLEQLSLVCRGFYICARDPEIWRLACLKVWGRSCIKLVPYXSWREMFLERPRVRFDGVYISKXXYIRQGEQSLDGFYRAWHQVEYYRYIRFFPDGHVMMLXXPEEPQSIVPRLRXRNXRXDAILLGHYRLSQDXDNQXKVFAVIXKKKEEKPLDYKYRYFRRVPVQEADQSFHVGLQLCSSGHQRFNKLIWIHHSCHIXYKSXGEXAVSAFEIDKMYXPLFFARVRSYXAFSERPL

SEQ ID NO: 9758 - protein, 447 aa, Homo sapiens
  MOD_RES (22)..(22): Selenocysteine
  MOD_RES (37)..(37): Selenocysteine
  MOD_RES (78)..(78): Selenocysteine
  MOD_RES (82)..(82): Selenocysteine
  MOD_RES (132)..(132): Selenocysteine
  MOD_RES (134)..(134): Selenocysteine
  MOD_RES (168)..(168): Selenocysteine
  MOD_RES (252)..(252): Selenocysteine
  MOD_RES (274)..(275): Selenocysteine
  MOD_RES (312)..(313): Selenocysteine
  MOD_RES (326)..(326): Selenocysteine
  MOD_RES (329)..(329): Selenocysteine
  MOD_RES (331)..(331): Selenocysteine
  MOD_RES (345)..(345): Selenocysteine
  MOD_RES (349)..(349): Selenocysteine
  MOD_RES (356)..(356): Selenocysteine
  MOD_RES (410)..(410): Selenocysteine
  MOD_RES (414)..(414): Selenocysteine
  MOD_RES (417)..(417): Selenocysteine
  MOD_RES (429)..(429): Selenocysteine
  MOD_RES (440)..(440): Selenocysteine
MPDIIWVFPPQAEAEEDCHSDXVRADDDEENESPAEXDLQAQLQMFRAQWMFELAPGVSSSNLENRPCRAARGSLQKXSADXKGKQEQAKEEKARELFLKAVEEEQNGALYEAIKFYRRAMQLVPDIEFKIXYXRSPDGDGVGNSYIEDNDDDSKMADLLSYFQQQLXFQESVLKLCQPELESSQIHISVLPMEVLMYIFRWVVSSDLDLRSLEQLSLVCRGFYICARDPEIWRLACLKVWGRSCIKLVPYXSWREMFLERPRVRFDGVYISKXXYIRQGEQSLDGFYRAWHQVEYYRYIRFFPDGHVMMLXXPEEPQSIVPRLRXRNXRXDAILLGHYRLSQDXDNQXKVFAVIXKKKEEKPLDYKYRYFRRVPVQEADQSFHVGLQLCSSGHQRFNKLIWIHHSCHIXYKSXGEXAVSAFEIDKMYXPLFFARVRSYXAFSERPL

SEQ ID NO: 9759 - protein, 150 aa, Homo sapiens
  MOD_RES (19)..(20): Selenocysteine
  MOD_RES (33)..(33): Selenocysteine
  MOD_RES (36)..(36): Selenocysteine
  MOD_RES (38)..(38): Selenocysteine
  MOD_RES (52)..(52): Selenocysteine
  MOD_RES (56)..(56): Selenocysteine
  MOD_RES (63)..(63): Selenocysteine
  MOD_RES (117)..(117): Selenocysteine
  MOD_RES (121)..(121): Selenocysteine
  MOD_RES (124)..(124): Selenocysteine
  MOD_RES (136)..(136): Selenocysteine
  MOD_RES (150)..(150): Selenocysteine
VEYYRYIRFFPDGHVMMLXXPEEPQSIVPRLRXRNXRXDAILLGHYRLSQDXDNQXKVFAVIXKKKEEKPLDYKYRYFRRVPVQEADQSFHVGLQLCSSGHQRFNKLIWIHHSCHIXYKSXGEXAVSAFEIDKMYXPLFFARIYEQISVX

SEQ ID NO: 9760 - protein, 192 aa, Homo sapiens
  MOD_RES (1)..(1): Any amino acid
  MOD_RES (11)..(12): Selenocysteine
  MOD_RES (25)..(25): Selenocysteine
  MOD_RES (28)..(28): Selenocysteine
  MOD_RES (30)..(30): Selenocysteine
  MOD_RES (44)..(44): Selenocysteine
  MOD_RES (48)..(48): Selenocysteine
  MOD_RES (55)..(55): Selenocysteine
  MOD_RES (61)..(61): Selenocysteine
  MOD_RES (75)..(75): Selenocysteine
  MOD_RES (159)..(159): Selenocysteine
  MOD_RES (163)..(163): Selenocysteine
  MOD_RES (166)..(166): Selenocysteine
  MOD_RES (178)..(178): Selenocysteine
  MOD_RES (189)..(189): Selenocysteine
XFPDGHVMMLXXPEEPQSIVPRLRXRNXRXDAILLGHYRLSQDXDNQXKVFAVIXKKKEEXGQSFICESYHLVAXCCWRLHFPLMGSWSLGSSSLRDRESCFDCDCRFPEKPLDYKYRYFRRVPVQEADQSFHVGLQLCSSGHQRFNKLIWIHHSCHIXYKSXGEXAVSAFEIDKMYXPLFFARVRSYXAFS

SEQ ID NO: 9761 - protein, 542 aa, Homo sapiens
  MOD_RES (11)..(11): Selenocysteine
  MOD_RES (54)..(54): Selenocysteine
  MOD_RES (121)..(121): Selenocysteine
  MOD_RES (174)..(174): Selenocysteine
  MOD_RES (197)..(197): Selenocysteine
  MOD_RES (218)..(218): Selenocysteine
  MOD_RES (268)..(268): Selenocysteine
  MOD_RES (277)..(277): Selenocysteine
  MOD_RES (280)..(280): Selenocysteine
  MOD_RES (295)..(295): Selenocysteine
  MOD_RES (301)..(301): Selenocysteine
  MOD_RES (309)..(309): Selenocysteine
  MOD_RES (315)..(315): Selenocysteine
  MOD_RES (335)..(335): Selenocysteine
  MOD_RES (351)..(351): Selenocysteine
  MOD_RES (354)..(354): Selenocysteine
  MOD_RES (384)..(384): Selenocysteine
  MOD_RES (390)..(390): Selenocysteine
  MOD_RES (392)..(392): Selenocysteine
  MOD_RES (398)..(398): Selenocysteine
  MOD_RES (424)..(424): Selenocysteine
  MOD_RES (482)..(482): Selenocysteine
  MOD_RES (487)..(487): Selenocysteine
  MOD_RES (513)..(513): Selenocysteine
  MOD_RES (530)..(530): Selenocysteine
  MOD_RES (536)..(536): Selenocysteine
  MOD_RES (538)..(538): Selenocysteine
MEPDSVIEDKXIELMCSVPRSLWLGCANLVESMCALSCLQSMPSVRCLQISNGXSSVIVSRKRPSEGNYQKEKDLCIKYFDQWSESDQVEFVEHLISRMCHYQHGHINSYLKPMLQRDFIXALPEQGLDHIAENILSYLDARSLCAAELVCKEWQRVISEGMLWKKLIERMVRXDPLWKGLSERRGWDQYLFKNRPXDGPPNSFYRSLYPKIIQDIEXIESNWRCGRHNLQRIQCRSENSKGVYCLQYDDEKIISGLRDNSIKIWDKXSLECLKVLXGHXGSVLCLQYDERVIVXGSSDSXVRVWDVNXGEVLNXLIHHNEAVLHLRFSNGLMVXCSKDRSIAVWDMASAXDIXLRRVLVGHRAAVNVVDFDDKYIVSASGDRXIKVWSXSXCEFVRXLNGHKRGIACLQYRDRLVVSGSSDNXIRLWDIECGACLRVLEGHEELVRCIRFDNKRIVSGAYDGKIKVWDLQAALDPRAPASXLCLRXLVEHSGRVFRLQFDEFQIISSSHDDXILIWDFLNVPPSAQNEXRSPSRXYXYISR

SEQ ID NO: 9762 - protein, 197 aa, Homo sapiens
  MOD_RES (11)..(11): Selenocysteine
  MOD_RES (51)..(51): Selenocysteine
  MOD_RES (67)..(67): Selenocysteine
  MOD_RES (75)..(75): Selenocysteine
  MOD_RES (142)..(142): Selenocysteine
  MOD_RES (195)..(195): Selenocysteine
MEPDSVIEDKXIELMCSVPRSLWLGCANLVESMCALSCLQSMPSVRCLQNXSVMEDQNEDESPKKNXLWQISNGXSSVIVSRKRPSEGNYQKEKDLCIKYFDQWSESDQVEFVEHLISRMCHYQHGHINSYLKPMLQRDFIXALPEQGLDHIAENILSYLDARSLCAAELVCKEWQRVISEGMLWKKLIERMVRXDP

SEQ ID NO: 9763 - protein, 508 aa, Homo sapiens
  MOD_RES (11)..(11): Selenocysteine
  MOD_RES (20)..(20): Selenocysteine
  MOD_RES (87)..(87): Selenocysteine
  MOD_RES (140)..(140): Selenocysteine
  MOD_RES (163)..(163): Selenocysteine
  MOD_RES (184)..(184): Selenocysteine
  MOD_RES (234)..(234): Selenocysteine
  MOD_RES (243)..(243): Selenocysteine
  MOD_RES (246)..(246): Selenocysteine
  MOD_RES (261)..(261): Selenocysteine
  MOD_RES (267)..(267): Selenocysteine
  MOD_RES (275)..(275): Selenocysteine
  MOD_RES (281)..(281): Selenocysteine
  MOD_RES (301)..(301): Selenocysteine
  MOD_RES (317)..(317): Selenocysteine
  MOD_RES (320)..(320): Selenocysteine
  MOD_RES (350)..(350): Selenocysteine
  MOD_RES (356)..(356): Selenocysteine
  MOD_RES (358)..(358): Selenocysteine
  MOD_RES (364)..(364): Selenocysteine
  MOD_RES (390)..(390): Selenocysteine
  MOD_RES (448)..(448): Selenocysteine
  MOD_RES (453)..(453): Selenocysteine
  MOD_RES (479)..(479): Selenocysteine
  MOD_RES (496)..(496): Selenocysteine
  MOD_RES (502)..(502): Selenocysteine
  MOD_RES (504)..(504): Selenocysteine
MEPDSVIEDKXIELMISNGXSSVIVSRKRPSEGNYQKEKDLCIKYFDQWSESDQVEFVEHLISRMCHYQHGHINSYLKPMLQRDFIXALPEQGLDHIAENILSYLDARSLCAAELVCKEWQRVISEGMLWKKLIERMVRXDPLWKGLSERRGWDQYLFKNRPXDGPPNSFYRSLYPKIIQDIEXIESNWRCGRHNLQRIQCRSENSKGVYCLQYDDEKIISGLRDNSIKIWDKXSLECLKVLXGHXGSVLCLQYDERVIVXGSSDSXVRVWDVNXGEVLNXLIHHNEAVLHLRFSNGLMVXCSKDRSIAVWDMASAXDIXLRRVLVGHRAAVNVVDFDDKYIVSASGDRXIKVWSXSXCEFVRXLNGHKRGIACLQYRDRLVVSGSSDNXIRLWDIECGACLRVLEGHEELVRCIRFDNKRIVSGAYDGKIKVWDLQAALDPRAPASXLCLRXLVEHSGRVFRLQFDEFQIISSSHDDXILIWDFLNVPPSAQNEXRSPSRXYXYISR

SEQ ID NO: 9764 - protein, 47 aa, Homo sapiens
  MOD_RES (11)..(11): Selenocysteine
MEPDSVIEDKXIELMLPKCMFGILLKKAGYSKRKESWKMLDCCLFSD

SEQ ID NO: 9765 - protein, 529 aa, Homo sapiens
  MOD_RES (11)..(11): Selenocysteine
  MOD_RES (17)..(17): Selenocysteine
  MOD_RES (33)..(33): Selenocysteine
  MOD_RES (41)..(41): Selenocysteine
  MOD_RES (108)..(108): Selenocysteine
  MOD_RES (161)..(161): Selenocysteine
  MOD_RES (184)..(184): Selenocysteine
  MOD_RES (205)..(205): Selenocysteine
  MOD_RES (255)..(255): Selenocysteine
  MOD_RES (264)..(264): Selenocysteine
  MOD_RES (267)..(267): Selenocysteine
  MOD_RES (282)..(282): Selenocysteine
  MOD_RES (288)..(288): Selenocysteine
  MOD_RES (296)..(296): Selenocysteine
  MOD_RES (302)..(302): Selenocysteine
  MOD_RES (322)..(322): Selenocysteine
  MOD_RES (338)..(338): Selenocysteine
  MOD_RES (341)..(341): Selenocysteine
  MOD_RES (371)..(371): Selenocysteine
  MOD_RES (377)..(377): Selenocysteine
  MOD_RES (379)..(379): Selenocysteine
  MOD_RES (385)..(385): Selenocysteine
  MOD_RES (411)..(411): Selenocysteine
  MOD_RES (469)..(469): Selenocysteine
  MOD_RES (474)..(474): Selenocysteine
  MOD_RES (500)..(500): Selenocysteine
  MOD_RES (517)..(517): Selenocysteine
  MOD_RES (523)..(523): Selenocysteine
  MOD_RES (525)..(525): Selenocysteine
MEPDSVIEDKXIELMNXSVMEDQNEDESPKKNXLWQISNGXSSVIVSRKRPSEGNYQKEKDLCIKYFDQWSESDQVEFVEHLISRMCHYQHGHINSYLKPMLQRDFIXALPEQGLDHIAENILSYLDARSLCAAELVCKEWQRVISEGMLWKKLIERMVRXDPLWKGLSERRGWDQYLFKNRPXDGPPNSFYRSLYPKIIQDIEXIESNWRCGRHNLQRIQCRSENSKGVYCLQYDDEKIISGLRDNSIKIWDKXSLECLKVLXGHXGSVLCLQYDERVIVXGSSDSXVRVWDVNXGEVLNXLIHHNEAVLHLRFSNGLMVXCSKDRSIAVWDMASAXDIXLRRVLVGHRAAVNVVDFDDKYIVSASGDRXIKVWSXSXCEFVRXLNGHKRGIACLQYRDRLVVSGSSDNXIRLWDIECGACLRVLEGHEELVRCIRFDNKRIVSGAYDGKIKVWDLQAALDPRAPASXLCLRXLVEHSGRVFRLQFDEFQIISSSHDDXILIWDFLNVPPSAQNEXRSPSRXYXYISR

SEQ ID NO: 9766 - protein, 74 aa, Homo sapiens
  MOD_RES (11)..(11): Selenocysteine
  MOD_RES (13)..(13): Selenocysteine
  MOD_RES (29)..(29): Selenocysteine
  MOD_RES (37)..(37): Selenocysteine
MIMRPPHPCGXNXSVMEDQNEDESPKKNXLWQISNGXSSVIVSRKRPSEGNYQKEKDLCIKYFDQWSESDQVEF

SEQ ID NO: 9767 - protein, 412 aa, Homo sapiens
  MOD_RES (62)..(62): Selenocysteine
  MOD_RES (81)..(81): Selenocysteine
  MOD_RES (85)..(85): Selenocysteine
  MOD_RES (89)..(89): Selenocysteine
  MOD_RES (193)..(193): Selenocysteine
  MOD_RES (195)..(195): Selenocysteine
  MOD_RES (223)..(223): Selenocysteine
  MOD_RES (240)..(240): Selenocysteine
  MOD_RES (243)..(243): Selenocysteine
  MOD_RES (261)..(261): Selenocysteine
  MOD_RES (263)..(263): Selenocysteine
  MOD_RES (284)..(284): Selenocysteine
  MOD_RES (306)..(306): Selenocysteine
  MOD_RES (314)..(314): Selenocysteine
  MOD_RES (323)..(323): Selenocysteine
  MOD_RES (339)..(339): Selenocysteine
  MOD_RES (345)..(345): Selenocysteine
  MOD_RES (353)..(353): Selenocysteine
  MOD_RES (378)..(378): Selenocysteine
  MOD_RES (380)..(380): Selenocysteine
  MOD_RES (392)..(393): Selenocysteine
MAAAAGEEEEEEEAARESAARPAAGPALWRLPEELLLLICSYLDMRALGRLAQVCRWLRRFXSCDLLWRRIARASLNSGFXRLGXDLMXSVPVKERVKVSQNWRLGRCREGILLKWRCSQMPWMQLEDDSLYISQANFILAYQFRPDGASLNRRPLGVFAGHDEDVCHFVLANSHIVSAGGDGKIGIHKIHSXFXVKYSAHEQEVNCVDCKGGIIVSGSRDRXAKVWPLASGRLGQCLHXIQXEDRVWSIAISPLLSSFVXGXACCGHFSPLRIWDLNSGQLMXHLGSDFPPGAGVLDVMYESPFXLLSCGYDXYVRYWDLRXSVRKCVMEWEEPHDSXLYCLQXDGNHLLAXGSSYYGVVRLWDRRQRACLHAFPLXSXPLSSPVYCLRLXXKHLYAALSYNLHVLDFQNP

SEQ ID NO: 9768 - protein, 627 aa, Homo sapiens
  MOD_RES (32)..(32): Selenocysteine
  MOD_RES (38)..(38): Selenocysteine
  MOD_RES (43)..(43): Selenocysteine
  MOD_RES (60)..(60): Selenocysteine
  MOD_RES (64)..(64): Selenocysteine
  MOD_RES (72)..(72): Selenocysteine
  MOD_RES (80)..(80): Selenocysteine
  MOD_RES (114)..(114): Selenocysteine
  MOD_RES (116)..(117): Selenocysteine
  MOD_RES (125)..(125): Selenocysteine
  MOD_RES (127)..(128): Selenocysteine
  MOD_RES (146)..(146): Selenocysteine
  MOD_RES (152)..(152): Selenocysteine
  MOD_RES (183)..(183): Selenocysteine
  MOD_RES (227)..(227): Selenocysteine
  MOD_RES (283)..(283): Selenocysteine
  MOD_RES (305)..(305): Selenocysteine
  MOD_RES (322)..(322): Selenocysteine
  MOD_RES (330)..(330): Selenocysteine
  MOD_RES (336)..(336): Selenocysteine
  MOD_RES (341)..(341): Selenocysteine
  MOD_RES (359)..(359): Selenocysteine
  MOD_RES (362)..(362): Selenocysteine
  MOD_RES (370)..(370): Selenocysteine
  MOD_RES (376)..(376): Selenocysteine
  MOD_RES (381)..(381): Selenocysteine
  MOD_RES (383)..(383): Selenocysteine
  MOD_RES (402)..(402): Selenocysteine
  MOD_RES (410)..(410): Selenocysteine
  MOD_RES (450)..(450): Selenocysteine
  MOD_RES (452)..(452): Selenocysteine
  MOD_RES (456)..(456): Selenocysteine
  MOD_RES (461)..(461): Selenocysteine
  MOD_RES (481)..(481): Selenocysteine
  MOD_RES (490)..(490): Selenocysteine
  MOD_RES (496)..(496): Selenocysteine
  MOD_RES (498)..(498): Selenocysteine
  MOD_RES (504)..(504): Selenocysteine
  MOD_RES (522)..(522): Selenocysteine
  MOD_RES (530)..(530): Selenocysteine
  MOD_RES (536)..(536): Selenocysteine
  MOD_RES (548)..(548): Selenocysteine
  MOD_RES (559)..(559): Selenocysteine
  MOD_RES (565)..(565): Selenocysteine
  MOD_RES (573)..(573): Selenocysteine
  MOD_RES (582)..(582): Selenocysteine
  MOD_RES (600)..(600): Selenocysteine
  MOD_RES (612)..(612): Selenocysteine
  MOD_RES (615)..(615): Selenocysteine
MCVPRSGLILSCICLYCGVLLPVLLPNLPFLXCLSMSXLESVXYLPEKGLYCQRLPSSRXHGGXESLKGKNXENMGFYGXLKMIFYKMKRKLDHGSEVRSFSLGKKPCKVSEYXSXXGLVPCSAXPXXFGDLRAANGQGQQRRRIXSVQPPXGLQEWLKMFQSWSGPEKLLALDELIDSCEPXQVKHMMQVIEPQFQRDFISLLPKELALYVLSFLEPKDLLQAAQXCRYWRILAEDNLLWREKCKEEGIDEPLHIKRRKVIKPGFIHSPWKSAYIRQHRIDXNWRRGELKSPKVLKGHDDHVIXCLQFCGNRIVSGSDDNXLKVWSAVXGKCLRXLVGHXGGVWSSQMRDNIIISGSXDRXLKVWNAEXGECIHXLYGHXSXVRCMHLHEKRVVSGSRDAXLRVWDIEXGQCLHVLMGHVAAVRCVQYDGRRVVSGAYDFMVKVWDPEXEXCLHXLQGHXNRVYSLQFDGIHVVSGSLDXSIRVWDVEXGNCIHXLXGHQSLXSGMELKDNILVSGNADSXVKIWDIKXGQCLQXLQGPNKHQSAVXCLQFNKNFVIXSSDDGXVKLWDLKXGEFIRNLVXLESGGSGGVVWRIRASNXKLVCAVGSRNGXEEXKLLVLDFDVDMK

SEQ ID NO: 9769 - protein, 531 aa, Homo sapiens
  MOD_RES (20)..(21): Selenocysteine
  MOD_RES (29)..(29): Selenocysteine
  MOD_RES (31)..(32): Selenocysteine
  MOD_RES (50)..(50): Selenocysteine
  MOD_RES (56)..(56): Selenocysteine
  MOD_RES (87)..(87): Selenocysteine
  MOD_RES (131)..(131): Selenocysteine
  MOD_RES (187)..(187): Selenocysteine
  MOD_RES (209)..(209): Selenocysteine
  MOD_RES (226)..(226): Selenocysteine
  MOD_RES (234)..(234): Selenocysteine
  MOD_RES (240)..(240): Selenocysteine
  MOD_RES (245)..(245): Selenocysteine
  MOD_RES (263)..(263): Selenocysteine
  MOD_RES (266)..(266): Selenocysteine
  MOD_RES (274)..(274): Selenocysteine
  MOD_RES (280)..(280): Selenocysteine
  MOD_RES (285)..(285): Selenocysteine
  MOD_RES (287)..(287): Selenocysteine
  MOD_RES (306)..(306): Selenocysteine
  MOD_RES (314)..(314): Selenocysteine
  MOD_RES (354)..(354): Selenocysteine
  MOD_RES (356)..(356): Selenocysteine
  MOD_RES (360)..(360): Selenocysteine
  MOD_RES (365)..(365): Selenocysteine
  MOD_RES (385)..(385): Selenocysteine
  MOD_RES (394)..(394): Selenocysteine
  MOD_RES (400)..(400): Selenocysteine
  MOD_RES (402)..(402): Selenocysteine
  MOD_RES (408)..(408): Selenocysteine
  MOD_RES (426)..(426): Selenocysteine
  MOD_RES (434)..(434): Selenocysteine
  MOD_RES (440)..(440): Selenocysteine
  MOD_RES (452)..(452): Selenocysteine
  MOD_RES (463)..(463): Selenocysteine
  MOD_RES (469)..(469): Selenocysteine
  MOD_RES (477)..(477): Selenocysteine
  MOD_RES (486)..(486): Selenocysteine
  MOD_RES (504)..(504): Selenocysteine
  MOD_RES (516)..(516): Selenocysteine
  MOD_RES (519)..(519): Selenocysteine
MLFFKCISLLLIWLIPGQSXXGLVPCSAXPXXFGDLRAANGQGQQRRRIXSVQPPXGLQEWLKMFQSWSGPEKLLALDELIDSCEPXQVKHMMQVIEPQFQRDFISLLPKELALYVLSFLEPKDLLQAAQXCRYWRILAEDNLLWREKCKEEGIDEPLHIKRRKVIKPGFIHSPWKSAYIRQHRIDXNWRRGELKSPKVLKGHDDHVIXCLQFCGNRIVSGSDDNXLKVWSAVXGKCLRXLVGHXGGVWSSQMRDNIIISGSXDRXLKVWNAEXGECIHXLYGHXSXVRCMHLHEKRVVSGSRDAXLRVWDIEXGQCLHVLMGHVAAVRCVQYDGRRVVSGAYDFMVKVWDPEXEXCLHXLQGHXNRVYSLQFDGIHVVSGSLDXSIRVWDVEXGNCIHXLXGHQSLXSGMELKDNILVSGNADSXVKIWDIKXGQCLQXLQGPNKHQSAVXCLQFNKNFVIXSSDDGXVKLWDLKXGEFIRNLVXLESGGSGGVVWRIRASNXKLVCAVGSRNGXEEXKLLVLDFDVDMK

SEQ ID NO: 9770 - protein, 158 aa, Homo sapiens
  MOD_RES (15)..(15): Selenocysteine
  MOD_RES (53)..(53): Selenocysteine
  MOD_RES (138)..(138): Selenocysteine
  MOD_RES (140)..(140): Selenocysteine
  MOD_RES (144)..(144): Selenocysteine
MNQELLSVGSKRRRXGGSLRGNPSSSQVDEEQMNRVVEEEQQQQLRQQEEEHXARNGEVVGVEPRPGGQNDSQQGQLEENNNRFISVDEDSSGNQEEQEEDEEHAGEQDEEDEEEEEMDQESDDFDQSDDSSREDEHXHXNSVXNSSSIVDLPVHQLS

SEQ ID NO: 9771 - protein, 707 aa, Homo sapiens
  MOD_RES (15)..(15): Selenocysteine
  MOD_RES (53)..(53): Selenocysteine
  MOD_RES (138)..(138): Selenocysteine
  MOD_RES (140)..(140): Selenocysteine
  MOD_RES (144)..(144): Selenocysteine
  MOD_RES (163)..(163): Selenocysteine
  MOD_RES (165)..(166): Selenocysteine
  MOD_RES (194)..(194): Selenocysteine
  MOD_RES (196)..(197): Selenocysteine
  MOD_RES (205)..(205): Selenocysteine
  MOD_RES (207)..(208): Selenocysteine
  MOD_RES (226)..(226): Selenocysteine
  MOD_RES (232)..(232): Selenocysteine
  MOD_RES (263)..(263): Selenocysteine
  MOD_RES (307)..(307): Selenocysteine
  MOD_RES (363)..(363): Selenocysteine
  MOD_RES (385)..(385): Selenocysteine
  MOD_RES (402)..(402): Selenocysteine
  MOD_RES (410)..(410): Selenocysteine
  MOD_RES (416)..(416): Selenocysteine
  MOD_RES (421)..(421): Selenocysteine
  MOD_RES (439)..(439): Selenocysteine
  MOD_RES (442)..(442): Selenocysteine
  MOD_RES (450)..(450): Selenocysteine
  MOD_RES (456)..(456): Selenocysteine
  MOD_RES (461)..(461): Selenocysteine
  MOD_RES (463)..(463): Selenocysteine
  MOD_RES (482)..(482): Selenocysteine
  MOD_RES (490)..(490): Selenocysteine
  MOD_RES (530)..(530): Selenocysteine
  MOD_RES (532)..(532): Selenocysteine
  MOD_RES (536)..(536): Selenocysteine
  MOD_RES (541)..(541): Selenocysteine
  MOD_RES (561)..(561): Selenocysteine
  MOD_RES (570)..(570): Selenocysteine
  MOD_RES (576)..(576): Selenocysteine
  MOD_RES (578)..(578): Selenocysteine
  MOD_RES (584)..(584): Selenocysteine
  MOD_RES (602)..(602): Selenocysteine
  MOD_RES (610)..(610): Selenocysteine
  MOD_RES (616)..(616): Selenocysteine
  MOD_RES (628)..(628): Selenocysteine
  MOD_RES (639)..(639): Selenocysteine
  MOD_RES (645)..(645): Selenocysteine
  MOD_RES (653)..(653): Selenocysteine
  MOD_RES (662)..(662): Selenocysteine
  MOD_RES (680)..(680): Selenocysteine
  MOD_RES (692)..(692): Selenocysteine
  MOD_RES (695)..(695): Selenocysteine
MNQELLSVGSKRRRXGGSLRGNPSSSQVDEEQMNRVVEEEQQQQLRQQEEEHXARNGEVVGVEPRPGGQNDSQQGQLEENNNRFISVDEDSSGNQEEQEEDEEHAGEQDEEDEEEEEMDQESDDFDQSDDSSREDEHXHXNSVXNSSSIVDLPVHQLSSPFYXKXXKMKRKLDHGSEVRSFSLGKKPCKVSEYXSXXGLVPCSAXPXXFGDLRAANGQGQQRRRIXSVQPPXGLQEWLKMFQSWSGPEKLLALDELIDSCEPXQVKHMMQVIEPQFQRDFISLLPKELALYVLSFLEPKDLLQAAQXCRYWRILAEDNLLWREKCKEEGIDEPLHIKRRKVIKPGFIHSPWKSAYIRQHRIDXNWRRGELKSPKVLKGHDDHVIXCLQFCGNRIVSGSDDNXLKVWSAVXGKCLRXLVGHXGGVWSSQMRDNIIISGSXDRXLKVWNAEXGECIHXLYGHXSXVRCMHLHEKRVVSGSRDAXLRVWDIEXGQCLHVLMGHVAAVRCVQYDGRRVVSGAYDFMVKVWDPEXEXCLHXLQGHXNRVYSLQFDGIHVVSGSLDXSIRVWDVEXGNCIHXLXGHQSLXSGMELKDNILVSGNADSXVKIWDIKXGQCLQXLQGPNKHQSAVXCLQFNKNFVIXSSDDGXVKLWDLKXGEFIRNLVXLESGGSGGVVWRIRASNXKLVCAVGSRNGXEEXKLLVLDFDVDMK

SEQ ID NO: 9772 - protein, 176 aa, Homo sapiens
  MOD_RES (15)..(15): Selenocysteine
  MOD_RES (53)..(53): Selenocysteine
  MOD_RES (138)..(138): Selenocysteine
  MOD_RES (140)..(140): Selenocysteine
  MOD_RES (144)..(144): Selenocysteine
  MOD_RES (163)..(163): Selenocysteine
  MOD_RES (165)..(166): Selenocysteine
  MOD_RES (176)..(176): Selenocysteine
MNQELLSVGSKRRRXGGSLRGNPSSSQVDEEQMNRVVEEEQQQQLRQQEEEHXARNGEVVGVEPRPGGQNDSQQGQLEENNNRFISVDEDSSGNQEEQEEDEEHAGEQDEEDEEEEEMDQESDDFDQSDDSSREDEHXHXNSVXNSSSIVDLPVHQLSSPFYXKXXKVSIFNILLX

SEQ ID NO: 9773 - protein, 589 aa, Homo sapiens
  MOD_RES (8)..(8): Selenocysteine
  MOD_RES (29)..(29): Selenocysteine
  MOD_RES (76)..(76): Selenocysteine
  MOD_RES (78)..(79): Selenocysteine
  MOD_RES (87)..(87): Selenocysteine
  MOD_RES (89)..(90): Selenocysteine
  MOD_RES (108)..(108): Selenocysteine
  MOD_RES (114)..(114): Selenocysteine
  MOD_RES (145)..(145): Selenocysteine
  MOD_RES (189)..(189): Selenocysteine
  MOD_RES (245)..(245): Selenocysteine
  MOD_RES (267)..(267): Selenocysteine
  MOD_RES (284)..(284): Selenocysteine
  MOD_RES (292)..(292): Selenocysteine
  MOD_RES (298)..(298): Selenocysteine
  MOD_RES (303)..(303): Selenocysteine
  MOD_RES (321)..(321): Selenocysteine
  MOD_RES (324)..(324): Selenocysteine
  MOD_RES (332)..(332): Selenocysteine
  MOD_RES (338)..(338): Selenocysteine
  MOD_RES (343)..(343): Selenocysteine
  MOD_RES (345)..(345): Selenocysteine
  MOD_RES (364)..(364): Selenocysteine
  MOD_RES (372)..(372): Selenocysteine
  MOD_RES (412)..(412): Selenocysteine
  MOD_RES (414)..(414): Selenocysteine
  MOD_RES (418)..(418): Selenocysteine
  MOD_RES (423)..(423): Selenocysteine
  MOD_RES (443)..(443): Selenocysteine
  MOD_RES (452)..(452): Selenocysteine
  MOD_RES (458)..(458): Selenocysteine
  MOD_RES (460)..(460): Selenocysteine
  MOD_RES (466)..(466): Selenocysteine
  MOD_RES (484)..(484): Selenocysteine
  MOD_RES (492)..(492): Selenocysteine
  MOD_RES (498)..(498): Selenocysteine
  MOD_RES (510)..(510): Selenocysteine
  MOD_RES (521)..(521): Selenocysteine
  MOD_RES (527)..(527): Selenocysteine
  MOD_RES (535)..(535): Selenocysteine
  MOD_RES (544)..(544): Selenocysteine
  MOD_RES (562)..(562): Selenocysteine
  MOD_RES (574)..(574): Selenocysteine
  MOD_RES (577)..(577): Selenocysteine
MSKPGKPXLNHGLVPVDLKSAKEPLPHQXVMKIFSISIIAQGLPFCRRRMKRKLDHGSEVRSFSLGKKPCKVSEYXSXXGLVPCSAXPXXFGDLRAANGQGQQRRRIXSVQPPXGLQEWLKMFQSWSGPEKLLALDELIDSCEPXQVKHMMQVIEPQFQRDFISLLPKELALYVLSFLEPKDLLQAAQXCRYWRILAEDNLLWREKCKEEGIDEPLHIKRRKVIKPGFIHSPWKSAYIRQHRIDXNWRRGELKSPKVLKGHDDHVIXCLQFCGNRIVSGSDDNXLKVWSAVXGKCLRXLVGHXGGVWSSQMRDNIIISGSXDRXLKVWNAEXGECIHXLYGHXSXVRCMHLHEKRVVSGSRDAXLRVWDIEXGQCLHVLMGHVAAVRCVQYDGRRVVSGAYDFMVKVWDPEXEXCLHXLQGHXNRVYSLQFDGIHVVSGSLDXSIRVWDVEXGNCIHXLXGHQSLXSGMELKDNILVSGNADSXVKIWDIKXGQCLQXLQGPNKHQSAVXCLQFNKNFVIXSSDDGXVKLWDLKXGEFIRNLVXLESGGSGGVVWRIRASNXKLVCAVGSRNGXEEXKLLVLDFDVDMK

SEQ ID NO: 9774 - protein, 577 aa, Homo sapiens
  MOD_RES (6)..(6): Selenocysteine
  MOD_RES (31)..(31): Selenocysteine
  MOD_RES (38)..(38): Selenocysteine
  MOD_RES (81)..(81): Selenocysteine
  MOD_RES (88)..(88): Selenocysteine
  MOD_RES (124)..(124): Selenocysteine
  MOD_RES (154)..(154): Selenocysteine
  MOD_RES (158)..(158): Selenocysteine
  MOD_RES (162)..(162): Selenocysteine
  MOD_RES (173)..(173): Selenocysteine
  MOD_RES (214)..(214): Selenocysteine
  MOD_RES (222)..(222): Selenocysteine
  MOD_RES (225)..(225): Selenocysteine
  MOD_RES (227)..(227): Selenocysteine
  MOD_RES (234)..(234): Selenocysteine
  MOD_RES (240)..(240): Selenocysteine
  MOD_RES (249)..(249): Selenocysteine
  MOD_RES (252)..(253): Selenocysteine
  MOD_RES (255)..(255): Selenocysteine
  MOD_RES (260)..(260): Selenocysteine
  MOD_RES (264)..(264): Selenocysteine
  MOD_RES (268)..(268): Selenocysteine
  MOD_RES (271)..(271): Selenocysteine
  MOD_RES (274)..(275): Selenocysteine
  MOD_RES (283)..(283): Selenocysteine
  MOD_RES (287)..(287): Selenocysteine
  MOD_RES (294)..(294): Selenocysteine
  MOD_RES (322)..(323): Selenocysteine
  MOD_RES (330)..(330): Selenocysteine
  MOD_RES (335)..(335): Selenocysteine
  MOD_RES (348)..(350): Selenocysteine
  MOD_RES (375)..(375): Selenocysteine
  MOD_RES (385)..(385): Selenocysteine
  MOD_RES (395)..(395): Selenocysteine
  MOD_RES (409)..(410): Selenocysteine
  MOD_RES (417)..(417): Selenocysteine
  MOD_RES (420)..(420): Selenocysteine
  MOD_RES (430)..(430): Selenocysteine
  MOD_RES (437)..(437): Selenocysteine
  MOD_RES (456)..(456): Selenocysteine
  MOD_RES (464)..(464): Selenocysteine
  MOD_RES (468)..(468): Selenocysteine
  MOD_RES (486)..(486): Selenocysteine
  MOD_RES (496)..(496): Selenocysteine
  MOD_RES (502)..(502): Selenocysteine
  MOD_RES (524)..(524): Selenocysteine
  MOD_RES (532)..(532): Selenocysteine
  MOD_RES (537)..(537): Selenocysteine
  MOD_RES (569)..(569): Selenocysteine
MDGEAXVKPGEQKEVVRRGREVDYSRLIAGXLPQSHVXSRRAGWKMPLFLILCLLQGSSFALPQKRPHPRWLWEGSLPSRXHLRAMGXLRPSSPLCWREESSFAAPNSLKGSRLVSGEPGGAVXIQCHYAPSSVNRHQRKYWCRLGPPRWICQXIVSXNQYXHHRYRDRVALXDFPQRGLFVVRLSQLSPDDIGCYLCGIGSENNMLFLSMNLXISAGPASXLPXAXPAAGELXMRSYGXASPVANRWXPGXXQXLGQGXAWDXVASXPGXSKXXASAEGRRXPGAXRPAAPGXGSWAEGSVKAPAPIPESPPSKSRSMSNXXEGVWEGXRSSVXNRARASKDRREMXXXKADRPREDIEGVRIALDAAKKVLGXIGPPALVSEXLAWEILPQAXPVSKQQSQGSIGEXXPAAGMWXLGXPAADVWILGXPAADVWXSMEAASGEGSAAGDLDAAXGDRGPQAXLSQXPAVGPWGPPGKESSVKRXFPEDESSSRXLAPVSXMLALFMLMALVLLQRKLWRRRXSQEAERVXLIQMXHFLEVNPQADQLPHVERKMLQDDSLPAGASLXAPERNPGP

SEQ ID NO: 9775 - protein, 265 aa, Homo sapiens
  MOD_RES (6)..(6): Selenocysteine
  MOD_RES (31)..(31): Selenocysteine
  MOD_RES (38)..(38): Selenocysteine
  MOD_RES (81)..(81): Selenocysteine
  MOD_RES (88)..(88): Selenocysteine
  MOD_RES (124)..(124): Selenocysteine
  MOD_RES (154)..(154): Selenocysteine
  MOD_RES (158)..(158): Selenocysteine
  MOD_RES (162)..(162): Selenocysteine
  MOD_RES (173)..(173): Selenocysteine
  MOD_RES (214)..(214): Selenocysteine
MDGEAXVKPGEQKEVVRRGREVDYSRLIAGXLPQSHVXSRRAGWKMPLFLILCLLQGSSFALPQKRPHPRWLWEGSLPSRXHLRAMGXLRPSSPLCWREESSFAAPNSLKGSRLVSGEPGGAVXIQCHYAPSSVNRHQRKYWCRLGPPRWICQXIVSXNQYXHHRYRDRVALXDFPQRGLFVVRLSQLSPDDIGCYLCGIGSENNMLFLSMNLXISAVLFQKMKAALGPWLLSLPCWPCLCLWLWFYCKGSSGEGGPLRRQKGSP

SEQ ID NO: 9776 - protein, 50 aa, Homo sapiens
  MOD_RES (6)..(6): Selenocysteine
  MOD_RES (24)..(24): Selenocysteine
  MOD_RES (36)..(36): Selenocysteine
MDGEAXVKPGEQKPPIKADNSLEXFYLILLLPHCPXEPAFLPEAQRLLHR

SEQ ID NO: 9777 - protein, 257 aa, Homo sapiens
  MOD_RES (9)..(9): Selenocysteine
  MOD_RES (48)..(48): Selenocysteine
  MOD_RES (50)..(50): Selenocysteine
  MOD_RES (62)..(62): Selenocysteine
  MOD_RES (74)..(74): Selenocysteine
  MOD_RES (164)..(164): Selenocysteine
  MOD_RES (167)..(167): Selenocysteine
  MOD_RES (173)..(173): Selenocysteine
  MOD_RES (177)..(177): Selenocysteine
  MOD_RES (193)..(193): Selenocysteine
  MOD_RES (220)..(220): Selenocysteine
  MOD_RES (226)..(226): Selenocysteine
  MOD_RES (231)..(231): Selenocysteine
  MOD_RES (239)..(239): Selenocysteine
MAPAMESPXLLCVALLFFAPDGVLAVPQKPKVSLNPPWNRIFKGENVXLXCNGNNFFEVSSXKWFHNGSLSEEXNSSLNIVNAKFEDSGEYKCQHQQVNESEPVYLEVFSDWLLLQASAEVVMEGQPLFLRCHGWRNWDVYKVIYYKDGEALKYWYENHNISIXNAXVEDSGXYYCXGKVWQLDYESEPLNIXVIKAPREKYWLQFFIPLLVVILFAVDXGLFISXQQQVXFLLKIKRXRKGFRLLNPHPKPNPKNN

SEQ ID NO: 9778 - protein, 224 aa, Homo sapiens
  MOD_RES (9)..(9): Selenocysteine
  MOD_RES (29)..(29): Selenocysteine
  MOD_RES (41)..(41): Selenocysteine
  MOD_RES (131)..(131): Selenocysteine
  MOD_RES (134)..(134): Selenocysteine
  MOD_RES (140)..(140): Selenocysteine
  MOD_RES (144)..(144): Selenocysteine
  MOD_RES (160)..(160): Selenocysteine
  MOD_RES (187)..(187): Selenocysteine
  MOD_RES (193)..(193): Selenocysteine
  MOD_RES (198)..(198): Selenocysteine
  MOD_RES (206)..(206): Selenocysteine
MAPAMESPXLLCVALLFFAPDGVLAVSSXKWFHNGSLSEEXNSSLNIVNAKFEDSGEYKCQHQQVNESEPVYLEVFSDWLLLQASAEVVMEGQPLFLRCHGWRNWDVYKVIYYKDGEALKYWYENHNISIXNAXVEDSGXYYCXGKVWQLDYESEPLNIXVIKAPREKYWLQFFIPLLVVILFAVDXGLFISXQQQVXFLLKIKRXRKGFRLLNPHPKPNPKNN

SEQ ID NO: 9779 - protein, 86 aa, Homo sapiens
  MOD_RES (40)..(40): Selenocysteine
  MOD_RES (56)..(56): Selenocysteine
  MOD_RES (66)..(66): Selenocysteine
  MOD_RES (70)..(70): Selenocysteine
  MOD_RES (75)..(75): Selenocysteine
  MOD_RES (78)..(78): Selenocysteine
MIPAVVLLLLLLVEQAAALGEPQLCYILDAILFLYGIVLXLLYCRLKIQVRKAAIXSYEKSDGVYXGLSXRNQEXYEXLKHEKPPQ

SEQ ID NO: 9780 - protein, 112 aa, Homo sapiens
  MOD_RES (40)..(40): Selenocysteine
  MOD_RES (56)..(56): Selenocysteine
  MOD_RES (66)..(66): Selenocysteine
  MOD_RES (73)..(73): Selenocysteine
  MOD_RES (105)..(106): Selenocysteine
  MOD_RES (108)..(109): Selenocysteine
MIPAVVLLLLLLVEQAAALGEPQLCYILDAILFLYGIVLXLLYCRLKIQVRKAAIXSYEKSDGVYXMESPSIXRLECSGMIWAHCNLCLLGSRDSRASPSRVAKXXGXXMPS

SEQ ID NO: 9781 - protein, 321 aa, Homo sapiens
  MOD_RES (22)..(22): Selenocysteine
  MOD_RES (31)..(31): Selenocysteine
  MOD_RES (40)..(40): Selenocysteine
  MOD_RES (49)..(50): Selenocysteine
  MOD_RES (86)..(86): Selenocysteine
  MOD_RES (146)..(146): Selenocysteine
  MOD_RES (162)..(162): Selenocysteine
  MOD_RES (181)..(181): Selenocysteine
  MOD_RES (211)..(211): Selenocysteine
  MOD_RES (217)..(217): Selenocysteine
  MOD_RES (251)..(251): Selenocysteine
  MOD_RES (287)..(287): Selenocysteine
  MOD_RES (289)..(289): Selenocysteine
  MOD_RES (314)..(314): Selenocysteine
MEEGQYSEIEELPRRRCCRRGXQIVLLGLVXAALWAGLLXLLLLWHWDXXQSLKQLEERAARNVSQVSKNLESHHGDQMAQKSQSXQISQELEELRAEQQRLKSQDLELSWNLNGLQADLSSFKSQELNERNEASDLLERLREEVXKLRMELQVSSGFVCNXCPEKWINFQRKCYYFGKGXKQWVHARYACDDMEGQLVSIHSPEEQDFLXKHASHXGSWIGLRNLDLKGEFIWVDGSHVDYSNWAPGEPXSRSQGEDCVMMRGSGRWNDAFCDRKLGAWVCDRLAXCXPPASEGSAESMGPDSRPDPDGRLPXPSAPLHS

SEQ ID NO: 9782 - protein, 159 aa, Homo sapiens
  MOD_RES (22)..(22): Selenocysteine
  MOD_RES (31)..(31): Selenocysteine
  MOD_RES (40)..(40): Selenocysteine
  MOD_RES (49)..(50): Selenocysteine
  MOD_RES (86)..(86): Selenocysteine
  MOD_RES (125)..(125): Selenocysteine
  MOD_RES (141)..(141): Selenocysteine
MEEGQYSEIEELPRRRCCRRGXQIVLLGLVXAALWAGLLXLLLLWHWDXXQSLKQLEERAARNVSQVSKNLESHHGDQMAQKSQSXQISQELEELRAEQQRLKSQELNERNEASDLLERLREEVXKLRMELQVSSGFVCNXCPEKWINFQRKCYYFGKG

SEQ ID NO: 9783 - protein, 320 aa, Homo sapiens
  MOD_RES (21)..(21): Selenocysteine
  MOD_RES (30)..(30): Selenocysteine
  MOD_RES (39)..(39): Selenocysteine
  MOD_RES (48)..(49): Selenocysteine
  MOD_RES (85)..(85): Selenocysteine
  MOD_RES (145)..(145): Selenocysteine
  MOD_RES (161)..(161): Selenocysteine
  MOD_RES (180)..(180): Selenocysteine
  MOD_RES (210)..(210): Selenocysteine
  MOD_RES (216)..(216): Selenocysteine
  MOD_RES (250)..(250): Selenocysteine
  MOD_RES (286)..(286): Selenocysteine
  MOD_RES (288)..(288): Selenocysteine
  MOD_RES (313)..(313): Selenocysteine
MNPPSQEIEELPRRRCCRRGXQIVLLGLVXAALWAGLLXLLLLWHWDXXQSLKQLEERAARNVSQVSKNLESHHGDQMAQKSQSXQISQELEELRAEQQRLKSQDLELSWNLNGLQADLSSFKSQELNERNEASDLLERLREEVXKLRMELQVSSGFVCNXCPEKWINFQRKCYYFGKGXKQWVHARYACDDMEGQLVSIHSPEEQDFLXKHASHXGSWIGLRNLDLKGEFIWVDGSHVDYSNWAPGEPXSRSQGEDCVMMRGSGRWNDAFCDRKLGAWVCDRLAXCXPPASEGSAESMGPDSRPDPDGRLPXPSAPLHS

SEQ ID NO: 9784 - protein, 240 aa, Homo sapiens
  MOD_RES (5)..(6): Selenocysteine
  MOD_RES (23)..(23): Selenocysteine
  MOD_RES (62)..(62): Selenocysteine
  MOD_RES (66)..(66): Selenocysteine
  MOD_RES (73)..(73): Selenocysteine
  MOD_RES (85)..(85): Selenocysteine
  MOD_RES (92)..(92): Selenocysteine
  MOD_RES (107)..(107): Selenocysteine
  MOD_RES (117)..(117): Selenocysteine
  MOD_RES (122)..(122): Selenocysteine
  MOD_RES (143)..(143): Selenocysteine
  MOD_RES (149)..(149): Selenocysteine
  MOD_RES (157)..(157): Selenocysteine
  MOD_RES (172)..(172): Selenocysteine
  MOD_RES (195)..(195): Selenocysteine
  MOD_RES (215)..(215): Selenocysteine
  MOD_RES (220)..(220): Selenocysteine
MWFLXXLLLWGWLLLQVSSRVFXEGEPLALRCHAWKDKLVYNVLYYRNGKAFKFFHWNSNLXILKXNISHNGXYHCSGMGKHRYXSAGISVXVKELFPAPVLNASVXSPLLEGNLVXLSCEXKLLLQRPGLQLYFSFYMGSKXLRGRNXSSEYQILXARREDSGLYWCEAAXEDGNVLKRSPELELQVLGLQLPXPVWFHVLFYLAVGIMFLVNXVLWVXIRKELKRKKKWDLEISLDSG

SEQ ID NO: 9785 - protein, 374 aa, Homo sapiens
  MOD_RES (5)..(6): Selenocysteine
  MOD_RES (19)..(20): Selenocysteine
  MOD_RES (25)..(25): Selenocysteine
  MOD_RES (38)..(38): Selenocysteine
  MOD_RES (40)..(40): Selenocysteine
  MOD_RES (54)..(54): Selenocysteine
  MOD_RES (61)..(61): Selenocysteine
  MOD_RES (63)..(63): Selenocysteine
  MOD_RES (65)..(65): Selenocysteine
  MOD_RES (67)..(67): Selenocysteine
  MOD_RES (73)..(73): Selenocysteine
  MOD_RES (115)..(115): Selenocysteine
  MOD_RES (154)..(154): Selenocysteine
  MOD_RES (158)..(158): Selenocysteine
  MOD_RES (165)..(165): Selenocysteine
  MOD_RES (177)..(177): Selenocysteine
  MOD_RES (184)..(184): Selenocysteine
  MOD_RES (199)..(199): Selenocysteine
  MOD_RES (209)..(209): Selenocysteine
  MOD_RES (214)..(214): Selenocysteine
  MOD_RES (235)..(235): Selenocysteine
  MOD_RES (241)..(241): Selenocysteine
  MOD_RES (249)..(249): Selenocysteine
  MOD_RES (264)..(264): Selenocysteine
  MOD_RES (287)..(287): Selenocysteine
  MOD_RES (307)..(307): Selenocysteine
  MOD_RES (312)..(312): Selenocysteine
  MOD_RES (374)..(374): Selenocysteine
MWFLXXLLLWVPVDGQVDXXKAVIXLQPPWVSVFQEEXVXLHCEVLHLPGSSSXQWFLNGXAXQXSXPSYRIXSASVNDSGEYRCQRGLSGRSDPIQLEIHRGWLLLQVSSRVFXEGEPLALRCHAWKDKLVYNVLYYRNGKAFKFFHWNSNLXILKXNISHNGXYHCSGMGKHRYXSAGISVXVKELFPAPVLNASVXSPLLEGNLVXLSCEXKLLLQRPGLQLYFSFYMGSKXLRGRNXSSEYQILXARREDSGLYWCEAAXEDGNVLKRSPELELQVLGLQLPXPVWFHVLFYLAVGIMFLVNXVLWVXIRKELKRKKKWDLEISLDSGHEKKVISSLQEDRHLEEELKCQEQKEEQLQEGVHRKEPQGAX

SEQ ID NO: 9786 - protein, 250 aa, Homo sapiens
  MOD_RES (15)..(15): Selenocysteine
  MOD_RES (17)..(17): Selenocysteine
  MOD_RES (31)..(31): Selenocysteine
  MOD_RES (38)..(38): Selenocysteine
  MOD_RES (40)..(40): Selenocysteine
  MOD_RES (42)..(42): Selenocysteine
  MOD_RES (44)..(44): Selenocysteine
  MOD_RES (50)..(50): Selenocysteine
  MOD_RES (131)..(131): Selenocysteine
  MOD_RES (135)..(135): Selenocysteine
  MOD_RES (142)..(142): Selenocysteine
  MOD_RES (154)..(154): Selenocysteine
  MOD_RES (162)..(162): Selenocysteine
  MOD_RES (170)..(170): Selenocysteine
  MOD_RES (190)..(190): Selenocysteine
  MOD_RES (195)..(195): Selenocysteine
MGKWPPWVSVFQEEXIXLHCEVLHLPGSSSXQWFLNGXAXQXSXPSYRIXSASVNDSGEYRCQRGLSGRSDPIQLEIHRGWLLLQVSSRVFMEGEPLALRCHAWKDKLVYNVLYYRNGKAFKFFHWNSNLXILKXNISHNGXYHCSGMGKHRYXSAGISQYXVKGLQLPXPVWFHVLFYLAVGIMFLVNXVLWVXIRKELKRKKKWNLEISLDSGHEKKVISSLQEDRHLEEELKCQEQKEEQLQEGVHR

SEQ ID NO: 9787 - protein, 188 aa, Homo sapiens
  MOD_RES (5)..(6): Selenocysteine
  MOD_RES (62)..(62): Selenocysteine
  MOD_RES (66)..(66): Selenocysteine
  MOD_RES (73)..(73): Selenocysteine
  MOD_RES (85)..(85): Selenocysteine
  MOD_RES (93)..(93): Selenocysteine
  MOD_RES (101)..(101): Selenocysteine
  MOD_RES (121)..(121): Selenocysteine
  MOD_RES (126)..(126): Selenocysteine
  MOD_RES (188)..(188): Selenocysteine
MWFLXXLLLWGWLLLQVSSRVFMEGEPLALRCHAWKDKLVYNVLYYRNGKAFKFFHWNSNLXILKXNISHNGXYHCSGMGKHRYXSAGISQYXVKGLQLPXPVWFHVLFYLAVGIMFLVNXVLWVXIRKELKRKKKWNLEISLDSGHEKKVISSLQEDRHLEEELKCQEQKEEQLQEGVHRKEPQGAX

SEQ ID NO: 9788 - protein, 224 aa, Homo sapiens
  MOD_RES (5)..(6): Selenocysteine
  MOD_RES (19)..(20): Selenocysteine
  MOD_RES (25)..(25): Selenocysteine
  MOD_RES (38)..(38): Selenocysteine
  MOD_RES (40)..(40): Selenocysteine
  MOD_RES (54)..(54): Selenocysteine
  MOD_RES (61)..(61): Selenocysteine
  MOD_RES (63)..(63): Selenocysteine
  MOD_RES (65)..(65): Selenocysteine
  MOD_RES (67)..(67): Selenocysteine
  MOD_RES (73)..(73): Selenocysteine
  MOD_RES (154)..(154): Selenocysteine
  MOD_RES (158)..(158): Selenocysteine
  MOD_RES (165)..(165): Selenocysteine
  MOD_RES (177)..(177): Selenocysteine
  MOD_RES (185)..(185): Selenocysteine
  MOD_RES (200)..(200): Selenocysteine
  MOD_RES (210)..(210): Selenocysteine
  MOD_RES (215)..(215): Selenocysteine
MWFLXXLLLWVPVDGQVDXXKAVIXLQPPWVSVFQEEXIXLHCEVLHLPGSSSXQWFLNGXAXQXSXPSYRIXSASVNDSGEYRCQRGLSGRSDPIQLEIHRGWLLLQVSSRVFMEGEPLALRCHAWKDKLVYNVLYYRNGKAFKFFHWNSNLXILKXNISHNGXYHCSGMGKHRYXSAGISQYXVKELFPAPVLNASVXSPLLEGNLVXLSCEXKLLLQRPGL

SEQ ID NO: 9789 - protein, 280 aa, Homo sapiens
  MOD_RES (5)..(6): Selenocysteine
  MOD_RES (19)..(20): Selenocysteine
  MOD_RES (25)..(25): Selenocysteine
  MOD_RES (38)..(38): Selenocysteine
  MOD_RES (40)..(40): Selenocysteine
  MOD_RES (54)..(54): Selenocysteine
  MOD_RES (61)..(61): Selenocysteine
  MOD_RES (63)..(63): Selenocysteine
  MOD_RES (65)..(65): Selenocysteine
  MOD_RES (67)..(67): Selenocysteine
  MOD_RES (73)..(73): Selenocysteine
  MOD_RES (154)..(154): Selenocysteine
  MOD_RES (158)..(158): Selenocysteine
  MOD_RES (165)..(165): Selenocysteine
  MOD_RES (177)..(177): Selenocysteine
  MOD_RES (185)..(185): Selenocysteine
  MOD_RES (193)..(193): Selenocysteine
  MOD_RES (213)..(213): Selenocysteine
  MOD_RES (218)..(218): Selenocysteine
  MOD_RES (280)..(280): Selenocysteine
MWFLXXLLLWVPVDGQVDXXKAVIXLQPPWVSVFQEEXIXLHCEVLHLPGSSSXQWFLNGXAXQXSXPSYRIXSASVNDSGEYRCQRGLSGRSDPIQLEIHRGWLLLQVSSRVFMEGEPLALRCHAWKDKLVYNVLYYRNGKAFKFFHWNSNLXILKXNISHNGXYHCSGMGKHRYXSAGISQYXVKGLQLPXPVWFHVLFYLAVGIMFLVNXVLWVXIRKELKRKKKWNLEISLDSGHEKKVISSLQEDRHLEEELKCQEQKEEQLQEGVHRKEPQGAX

SEQ ID NO: 9790 - protein, 225 aa, Homo sapiens
  MOD_RES (5)..(6): Selenocysteine
  MOD_RES (20)..(21): Selenocysteine
  MOD_RES (26)..(26): Selenocysteine
  MOD_RES (39)..(39): Selenocysteine
  MOD_RES (41)..(41): Selenocysteine
  MOD_RES (55)..(55): Selenocysteine
  MOD_RES (62)..(62): Selenocysteine
  MOD_RES (64)..(64): Selenocysteine
  MOD_RES (66)..(66): Selenocysteine
  MOD_RES (68)..(68): Selenocysteine
  MOD_RES (74)..(74): Selenocysteine
  MOD_RES (155)..(155): Selenocysteine
  MOD_RES (159)..(159): Selenocysteine
  MOD_RES (166)..(166): Selenocysteine
  MOD_RES (178)..(178): Selenocysteine
  MOD_RES (186)..(186): Selenocysteine
  MOD_RES (201)..(201): Selenocysteine
  MOD_RES (211)..(211): Selenocysteine
  MOD_RES (216)..(216): Selenocysteine
MWFLXXLLLWVPVDGQVVDXXKAVIXLQPPWVSVFQEEXIXLHCEVLHLPGSSSXQWFLNGXAXQXSXPSYRIXSASVNDSGEYRCQRGLSGRSDPIQLEIHRGWLLLQVSSRVFMEGEPLALRCHAWKDKLVYNVLYYRNGKAFKFFHWNSNLXILKXNISHNGXYHCSGMGKHRYXSAGISQYXVKELFPAPVLNASVXSPLLEGNLVXLSCEXKLLLQRPGL

SEQ ID NO: 9791 - protein, 190 aa, Homo sapiens
  MOD_RES (24)..(24): Selenocysteine
  MOD_RES (26)..(26): Selenocysteine
  MOD_RES (49)..(49): Selenocysteine
  MOD_RES (51)..(51): Selenocysteine
  MOD_RES (68)..(68): Selenocysteine
  MOD_RES (71)..(71): Selenocysteine
  MOD_RES (74)..(74): Selenocysteine
  MOD_RES (83)..(83): Selenocysteine
  MOD_RES (93)..(93): Selenocysteine
  MOD_RES (103)..(103): Selenocysteine
  MOD_RES (120)..(120): Selenocysteine
  MOD_RES (136)..(136): Selenocysteine
  MOD_RES (153)..(153): Selenocysteine
  MOD_RES (159)..(159): Selenocysteine
  MOD_RES (167)..(167): Selenocysteine
  MOD_RES (169)..(169): Selenocysteine
AAPPKAVLKLEPPWINVLQEDSVXLXCQGARSPESDSIQWFHNGNLIPXHXQPSYRFKANNNDSGEYXCQXGQXSLSDPVHLXVLSEWLVLQXPHLEFQEGEXIMLRCHSWKDKPLVKVXFFQNGKSQKFSHLDPXFSIPQANHSHSGDYHCXGNIGYXLFSSKPVXIXVQAWAALHQWGSLWLWSLRLL

SEQ ID NO: 9792 - protein, 317 aa, Homo sapiens
  MOD_RES (2)..(2): Selenocysteine
  MOD_RES (5)..(5): Selenocysteine
  MOD_RES (23)..(23): Selenocysteine
  MOD_RES (59)..(59): Selenocysteine
  MOD_RES (61)..(61): Selenocysteine
  MOD_RES (84)..(84): Selenocysteine
  MOD_RES (86)..(86): Selenocysteine
  MOD_RES (103)..(103): Selenocysteine
  MOD_RES (106)..(106): Selenocysteine
  MOD_RES (109)..(109): Selenocysteine
  MOD_RES (118)..(118): Selenocysteine
  MOD_RES (128)..(128): Selenocysteine
  MOD_RES (138)..(138): Selenocysteine
  MOD_RES (155)..(155): Selenocysteine
  MOD_RES (171)..(171): Selenocysteine
  MOD_RES (188)..(188): Selenocysteine
  MOD_RES (194)..(194): Selenocysteine
  MOD_RES (202)..(202): Selenocysteine
  MOD_RES (204)..(204): Selenocysteine
  MOD_RES (226)..(226): Selenocysteine
  MOD_RES (251)..(251): Selenocysteine
  MOD_RES (277)..(277): Selenocysteine
  MOD_RES (283)..(283): Selenocysteine
  MOD_RES (290)..(290): Selenocysteine
  MOD_RES (297)..(297): Selenocysteine
  MOD_RES (306)..(306): Selenocysteine
MXMEXQMSQNVCPRNLWLLQPLXVLLLLASADSQAAAPPKAVLKLEPPWINVLQEDSVXLXCQGARSPESDSIQWFHNGNLIPXHXQPSYRFKANNNDSGEYXCQXGQXSLSDPVHLXVLSEWLVLQXPHLEFQEGEXIMLRCHSWKDKPLVKVXFFQNGKSQKFSHLDPXFSIPQANHSHSGDYHCXGNIGYXLFSSKPVXIXVQVPSMGSSSPMGIIVAVVIAXAVAAIVAAVVALIYCRKKRISANSXDPVKAAQFEPPGRQMIAIRKRQLEEXNNDYEXADGGYMXLNPRAPXDDDKNIYLXLPPNDHVNSNN

SEQ ID NO: 9793 - protein, 137 aa, Homo sapiens
  MOD_RES (2)..(2): Selenocysteine
  MOD_RES (5)..(5): Selenocysteine
  MOD_RES (23)..(23): Selenocysteine
  MOD_RES (59)..(59): Selenocysteine
  MOD_RES (61)..(61): Selenocysteine
  MOD_RES (84)..(84): Selenocysteine
  MOD_RES (86)..(86): Selenocysteine
  MOD_RES (103)..(103): Selenocysteine
  MOD_RES (106)..(106): Selenocysteine
  MOD_RES (109)..(109): Selenocysteine
  MOD_RES (118)..(118): Selenocysteine
  MOD_RES (131)..(131): Selenocysteine
MXMEXQMSQNVCPRNLWLLQPLXVLLLLASADSQAAAPPKAVLKLEPPWINVLQEDSVXLXCQGARSPESDSIQWFHNGNLIPXHXQPSYRFKANNNDSGEYXCQXGQXSLSDPVHLXVLSGQWRKAPGWXWEGQDG

SEQ ID NO: 9794 - protein, 316 aa, Homo sapiens
  MOD_RES (2)..(2): Selenocysteine
  MOD_RES (5)..(5): Selenocysteine
  MOD_RES (23)..(23): Selenocysteine
  MOD_RES (58)..(58): Selenocysteine
  MOD_RES (60)..(60): Selenocysteine
  MOD_RES (83)..(83): Selenocysteine
  MOD_RES (85)..(85): Selenocysteine
  MOD_RES (102)..(102): Selenocysteine
  MOD_RES (105)..(105): Selenocysteine
  MOD_RES (108)..(108): Selenocysteine
  MOD_RES (117)..(117): Selenocysteine
  MOD_RES (127)..(127): Selenocysteine
  MOD_RES (137)..(137): Selenocysteine
  MOD_RES (154)..(154): Selenocysteine
  MOD_RES (170)..(170): Selenocysteine
  MOD_RES (187)..(187): Selenocysteine
  MOD_RES (193)..(193): Selenocysteine
  MOD_RES (201)..(201): Selenocysteine
  MOD_RES (203)..(203): Selenocysteine
  MOD_RES (225)..(225): Selenocysteine
  MOD_RES (250)..(250): Selenocysteine
  MOD_RES (276)..(276): Selenocysteine
  MOD_RES (282)..(282): Selenocysteine
  MOD_RES (289)..(289): Selenocysteine
  MOD_RES (296)..(296): Selenocysteine
  MOD_RES (305)..(305): Selenocysteine
MXMEXQMSQNVCPRNLWLLQPLXVLLLLASADSQAAPPKAVLKLEPPWINVLQEDSVXLXCQGARSPESDSIQWFHNGNLIPXHXQPSYRFKANNNDSGEYXCQXGQXSLSDPVHLXVLSEWLVLQXPHLEFQEGEXIMLRCHSWKDKPLVKVXFFQNGKSQKFSHLDPXFSIPQANHSHSGDYHCXGNIGYXLFSSKPVXIXVQVPSMGSSSPMGIIVAVVIAXAVAAIVAAVVALIYCRKKRISANSXDPVKAAQFEPPGRQMIAIRKRQLEEXNNDYEXADGGYMXLNPRAPXDDDKNIYLXLPPNDHVNSNN

SEQ ID NO: 9795 - protein, 136 aa, Homo sapiens
  MOD_RES (2)..(2): Selenocysteine
  MOD_RES (5)..(5): Selenocysteine
  MOD_RES (23)..(23): Selenocysteine
  MOD_RES (58)..(58): Selenocysteine
  MOD_RES (60)..(60): Selenocysteine
  MOD_RES (83)..(83): Selenocysteine
  MOD_RES (85)..(85): Selenocysteine
  MOD_RES (102)..(102): Selenocysteine
  MOD_RES (105)..(105): Selenocysteine
  MOD_RES (108)..(108): Selenocysteine
  MOD_RES (117)..(117): Selenocysteine
  MOD_RES (130)..(130): Selenocysteine
MXMEXQMSQNVCPRNLWLLQPLXVLLLLASADSQAAPPKAVLKLEPPWINVLQEDSVXLXCQGARSPESDSIQWFHNGNLIPXHXQPSYRFKANNNDSGEYXCQXGQXSLSDPVHLXVLSGQWRKAPGWXWEGQDG

SEQ ID NO: 9796 - protein, 86 aa, Homo sapiens
  MOD_RES (1)..(1): Any amino acid
  MOD_RES (3)..(3): Selenocysteine
  MOD_RES (29)..(29): Selenocysteine
  MOD_RES (35)..(35): Selenocysteine
  MOD_RES (42)..(42): Selenocysteine
  MOD_RES (49)..(49): Selenocysteine
  MOD_RES (58)..(58): Selenocysteine
  MOD_RES (86)..(86): Selenocysteine
XSXDPVKAAQFEPPGRQMIAIRKRQLEEXNNDYEXADGGYMXLNPRAPXDDDKNIYLXLPPNDHVNMQLPEGCDLLREVIPGRLEX

SEQ ID NO: 9797 - protein, 303 aa, Homo sapiens
  MOD_RES (12)..(12): Selenocysteine
  MOD_RES (32)..(32): Selenocysteine
  MOD_RES (61)..(61): Selenocysteine
  MOD_RES (63)..(63): Selenocysteine
  MOD_RES (67)..(67): Selenocysteine
  MOD_RES (86)..(86): Selenocysteine
  MOD_RES (88)..(88): Selenocysteine
  MOD_RES (105)..(105): Selenocysteine
  MOD_RES (108)..(108): Selenocysteine
  MOD_RES (111)..(111): Selenocysteine
  MOD_RES (120)..(120): Selenocysteine
  MOD_RES (130)..(130): Selenocysteine
  MOD_RES (140)..(140): Selenocysteine
  MOD_RES (157)..(157): Selenocysteine
  MOD_RES (190)..(190): Selenocysteine
  MOD_RES (196)..(196): Selenocysteine
  MOD_RES (204)..(204): Selenocysteine
  MOD_RES (206)..(206): Selenocysteine
  MOD_RES (223)..(223): Selenocysteine
  MOD_RES (260)..(260): Selenocysteine
  MOD_RES (269)..(269): Selenocysteine
  MOD_RES (282)..(282): Selenocysteine
  MOD_RES (284)..(284): Selenocysteine
MGILSFLPVLAXESDWADCKSPQPWGHMLLWXAVLFLAAPPKAVLKLEPQWINVLQEDSVXLXCRGXHSPESDSIQWFHNGNLIPXHXQPSYRFKANNNDSGEYXCQXGQXSLSDPVHLXVLSEWLVLQXPHLEFQEGEXIVLRCHSWKDKPLVKVXFFQNGKSKKFSRSDPNFSIPQANHSHSGDYHCXGNIGYXLYSSKPVXIXVQAPSSSPMGIIVAVVXGIAVAAIVAAVVALIYCRKKRISALPGYPECREMGEXLPEKPANPXNPDEADKVGAENXIXYSLLMHPDALEEPDDQNRI

SEQ ID NO: 9798 - protein, 310 aa, Homo sapiens
  MOD_RES (12)..(12): Selenocysteine
  MOD_RES (32)..(32): Selenocysteine
  MOD_RES (43)..(43): Selenocysteine
  MOD_RES (68)..(68): Selenocysteine
  MOD_RES (70)..(70): Selenocysteine
  MOD_RES (74)..(74): Selenocysteine
  MOD_RES (93)..(93): Selenocysteine
  MOD_RES (95)..(95): Selenocysteine
  MOD_RES (112)..(112): Selenocysteine
  MOD_RES (115)..(115): Selenocysteine
  MOD_RES (118)..(118): Selenocysteine
  MOD_RES (127)..(127): Selenocysteine
  MOD_RES (137)..(137): Selenocysteine
  MOD_RES (147)..(147): Selenocysteine
  MOD_RES (164)..(164): Selenocysteine
  MOD_RES (197)..(197): Selenocysteine
  MOD_RES (203)..(203): Selenocysteine
  MOD_RES (211)..(211): Selenocysteine
  MOD_RES (213)..(213): Selenocysteine
  MOD_RES (230)..(230): Selenocysteine
  MOD_RES (267)..(267): Selenocysteine
  MOD_RES (276)..(276): Selenocysteine
  MOD_RES (289)..(289): Selenocysteine
  MOD_RES (291)..(291): Selenocysteine
MGILSFLPVLAXESDWADCKSPQPWGHMLLWXAVLFLAPVAGXPAAPPKAVLKLEPQWINVLQEDSVXLXCRGXHSPESDSIQWFHNGNLIPXHXQPSYRFKANNNDSGEYXCQXGQXSLSDPVHLXVLSEWLVLQXPHLEFQEGEXIVLRCHSWKDKPLVKVXFFQNGKSKKFSRSDPNFSIPQANHSHSGDYHCXGNIGYXLYSSKPVXIXVQAPSSSPMGIIVAVVXGIAVAAIVAAVVALIYCRKKRISALPGYPECREMGEXLPEKPANPXNPDEADKVGAENXIXYSLLMHPDALEEPDDQNRI

SEQ ID NO: 9799 - protein, 291 aa, Homo sapiens
  MOD_RES (12)..(12): Selenocysteine
  MOD_RES (32)..(32): Selenocysteine
  MOD_RES (43)..(43): Selenocysteine
  MOD_RES (68)..(68): Selenocysteine
  MOD_RES (70)..(70): Selenocysteine
  MOD_RES (74)..(74): Selenocysteine
  MOD_RES (93)..(93): Selenocysteine
  MOD_RES (95)..(95): Selenocysteine
  MOD_RES (112)..(112): Selenocysteine
  MOD_RES (115)..(115): Selenocysteine
  MOD_RES (118)..(118): Selenocysteine
  MOD_RES (127)..(127): Selenocysteine
  MOD_RES (137)..(137): Selenocysteine
  MOD_RES (147)..(147): Selenocysteine
  MOD_RES (164)..(164): Selenocysteine
  MOD_RES (197)..(197): Selenocysteine
  MOD_RES (203)..(203): Selenocysteine
  MOD_RES (211)..(211): Selenocysteine
  MOD_RES (213)..(213): Selenocysteine
  MOD_RES (230)..(230): Selenocysteine
  MOD_RES (257)..(257): Selenocysteine
  MOD_RES (270)..(270): Selenocysteine
  MOD_RES (272)..(272): Selenocysteine
MGILSFLPVLAXESDWADCKSPQPWGHMLLWXAVLFLAPVAGXPAAPPKAVLKLEPQWINVLQEDSVXLXCRGXHSPESDSIQWFHNGNLIPXHXQPSYRFKANNNDSGEYXCQXGQXSLSDPVHLXVLSEWLVLQXPHLEFQEGEXIVLRCHSWKDKPLVKVXFFQNGKSKKFSRSDPNFSIPQANHSHSGDYHCXGNIGYXLYSSKPVXIXVQAPSSSPMGIIVAVVXGIAVAAIVAAVVALIYCRKKRISANPXNPDEADKVGAENXIXYSLLMHPDALEEPDDQNRI

SEQ ID NO: 9800 - protein, 290 aa, Homo sapiens
  MOD_RES (11)..(11): Selenocysteine
  MOD_RES (29)..(29): Selenocysteine
  MOD_RES (44)..(44): Selenocysteine
  MOD_RES (56)..(56): Selenocysteine
  MOD_RES (80)..(80): Selenocysteine
  MOD_RES (94)..(94): Selenocysteine
  MOD_RES (116)..(116): Selenocysteine
  MOD_RES (127)..(127): Selenocysteine
  MOD_RES (131)..(131): Selenocysteine
  MOD_RES (170)..(170): Selenocysteine
  MOD_RES (176)..(176): Selenocysteine
  MOD_RES (199)..(199): Selenocysteine
  MOD_RES (221)..(221): Selenocysteine
  MOD_RES (225)..(225): Selenocysteine
  MOD_RES (227)..(227): Selenocysteine
  MOD_RES (234)..(234): Selenocysteine
  MOD_RES (259)..(259): Selenocysteine
  MOD_RES (267)..(267): Selenocysteine
  MOD_RES (273)..(273): Selenocysteine
MGGGAGERLFXSSCLVGLVPLGLRISLVXCPLQCGIMWQLLLPXALLLLVSAGMRXEDLPKAVVFLEPQWYRVLEKDSVXLKCQGAYSPEDNSXQWFHNESLISSQASSYFIDAAXVDDSGEYRCQXNLSXLSDPVQLEVHIGWLLLQAPRWVFKEEDPIHLRCHSWKNXALHKVXYLQNGKGRKYFHHNSDFYIPKAXLKDSGSYFCRGLFGSKNVSSEXVNIXIXQGLAVSXISSFFPPGYQVSFCLVMVLLFAVDXGLYFSVKXNIRSSXRDWKDHKFKWRKDPQDK

SEQ ID NO: 9801 - protein, 105 aa, Homo sapiens
  MOD_RES (8)..(8): Selenocysteine
  MOD_RES (20)..(20): Selenocysteine
  MOD_RES (43)..(43): Selenocysteine
  MOD_RES (57)..(57): Selenocysteine
  MOD_RES (79)..(79): Selenocysteine
  MOD_RES (90)..(90): Selenocysteine
  MOD_RES (94)..(94): Selenocysteine
MWQLLLPXALLLLVSAGMRXDLPKAVVFLEPQWYRVLEKDSVXLKCQGAYSPEDNSXQWFHNESLISSQASSYFIDAAXVDDSGEYRCQXNLSXLSDPVQLEVHI

SEQ ID NO: 9802 - protein, 254 aa, Homo sapiens
  MOD_RES (8)..(8): Selenocysteine
  MOD_RES (20)..(20): Selenocysteine
  MOD_RES (44)..(44): Selenocysteine
  MOD_RES (58)..(58): Selenocysteine
  MOD_RES (80)..(80): Selenocysteine
  MOD_RES (91)..(91): Selenocysteine
  MOD_RES (95)..(95): Selenocysteine
  MOD_RES (134)..(134): Selenocysteine
  MOD_RES (140)..(140): Selenocysteine
  MOD_RES (163)..(163): Selenocysteine
  MOD_RES (185)..(185): Selenocysteine
  MOD_RES (189)..(189): Selenocysteine
  MOD_RES (191)..(191): Selenocysteine
  MOD_RES (198)..(198): Selenocysteine
  MOD_RES (223)..(223): Selenocysteine
  MOD_RES (231)..(231): Selenocysteine
  MOD_RES (237)..(237): Selenocysteine
MWQLLLPXALLLLVSAGMRXEDLPKAVVFLEPQWYRVLEKDSVXLKCQGAYSPEDNSXQWFHNESLISSQASSYFIDAAXVDDSGEYRCQXNLSXLSDPVQLEVHIGWLLLQAPRWVFKEEDPIHLRCHSWKNXALHKVXYLQNGKGRKYFHHNSDFYIPKAXLKDSGSYFCRGLFGSKNVSSEXVNIXIXQGLAVSXISSFFPPGYQVSFCLVMVLLFAVDXGLYFSVKXNIRSSXRDWKDHKFKWRKDPQDK

SEQ ID NO: 9803 - protein, 271 aa, Homo sapiens
  MOD_RES (1)..(1): Any amino acid
  MOD_RES (11)..(11): Selenocysteine
  MOD_RES (26)..(26): Selenocysteine
  MOD_RES (38)..(38): Selenocysteine
  MOD_RES (61)..(61): Selenocysteine
  MOD_RES (75)..(75): Selenocysteine
  MOD_RES (97)..(97): Selenocysteine
  MOD_RES (108)..(108): Selenocysteine
  MOD_RES (112)..(112): Selenocysteine
  MOD_RES (151)..(151): Selenocysteine
  MOD_RES (157)..(157): Selenocysteine
  MOD_RES (180)..(180): Selenocysteine
  MOD_RES (202)..(202): Selenocysteine
  MOD_RES (206)..(206): Selenocysteine
  MOD_RES (208)..(208): Selenocysteine
  MOD_RES (215)..(215): Selenocysteine
  MOD_RES (240)..(240): Selenocysteine
  MOD_RES (248)..(248): Selenocysteine
  MOD_RES (254)..(254): Selenocysteine
XPLGLRISLVXCPLQCGIMWQLLLPXALLLLVSAGMRXDLPKAVVFLEPQWYRVLEKDSVXLKCQGAYSPEDNSXQWFHNESLISSQASSYFIDAAXVDDSGEYRCQXNLSXLSDPVQLEVHIGWLLLQAPRWVFKEEDPIHLRCHSWKNXALHKVXYLQNGKGRKYFHHNSDFYIPKAXLKDSGSYFCRGLFGSKNVSSEXVNIXIXQGLAVSXISSFFPPGYQVSFCLVMVLLFAVDXGLYFSVKXNIRSSXRDWKDHKFKWRKDPQDK

SEQ ID NO: 9804 - protein, 211 aa, Homo sapiens
  MOD_RES (34)..(34): Selenocysteine
  MOD_RES (43)..(43): Selenocysteine
  MOD_RES (87)..(88): Selenocysteine
  MOD_RES (111)..(111): Selenocysteine
  MOD_RES (125)..(125): Selenocysteine
  MOD_RES (129)..(129): Selenocysteine
  MOD_RES (148)..(148): Selenocysteine
  MOD_RES (175)..(175): Selenocysteine
GVPRPQPWALGLLLFLLPGSLGAESHLSLLYHLXAVSSPAPGXPAFWVSGWLGPQQYLSYNSLRGEAEPCGAWVWENQVSWYWEKEXXDLRIKEKLFLEAFKALGGKGPYXLQGLLGCELGPDNXSVPXAKFALNGEEFMNFDLKQGXWGGDWPEALAISQRWQQQDKAANKELXFLLFSCPHRLREHLERGRGNLEWKEPKARQIFCAWI

SEQ ID NO: 9805 - protein, 273 aa, Homo sapiens
  MOD_RES (35)..(35): Selenocysteine
  MOD_RES (44)..(44): Selenocysteine
  MOD_RES (88)..(89): Selenocysteine
  MOD_RES (128)..(128): Selenocysteine
  MOD_RES (152)..(152): Selenocysteine
  MOD_RES (172)..(172): Selenocysteine
  MOD_RES (219)..(219): Selenocysteine
  MOD_RES (248)..(248): Selenocysteine
  MOD_RES (254)..(254): Selenocysteine
  MOD_RES (272)..(272): Selenocysteine
MGVPRPQPWALGLLLFLLPGSLGAESHLSLLYHLXAVSSPAPGXPAFWVSGWLGPQQYLSYNSLRGEAEPCGAWVWENQVSWYWEKEXXDLRIKEKLFLEAFKALGGKEPPSMRLKARPSSPGFSVLXCSAFSFYPPELQLRFLRNGLAAGXGQGDFGPNSDGSFHASSSLXVKSGDEHHYCCIVQHAGLAQPLRVELESPAKSSVLVVGIVIGVLLLXAAAVGGALLWRRMRSGLPAPWISLRGDDXGVLLPXPGEAQDADLKDVNVIPAXA

SEQ ID NO: 9806 - protein, 141 aa, Homo sapiens
  MOD_RES (35)..(35): Selenocysteine
  MOD_RES (44)..(44): Selenocysteine
  MOD_RES (88)..(89): Selenocysteine
  MOD_RES (112)..(112): Selenocysteine
  MOD_RES (126)..(126): Selenocysteine
  MOD_RES (130)..(130): Selenocysteine
MGVPRPQPWALGLLLFLLPGSLGAESHLSLLYHLXAVSSPAPGXPAFWVSGWLGPQQYLSYNSLRGEAEPCGAWVWENQVSWYWEKEXXDLRIKEKLFLEAFKALGGKGPYXLQGLLGCELGPDNXSVPXAKFALNGEEFM

SEQ ID NO: 9807 - protein, 167 aa, Homo sapiens
  MOD_RES (35)..(35): Selenocysteine
  MOD_RES (44)..(44): Selenocysteine
  MOD_RES (88)..(89): Selenocysteine
  MOD_RES (112)..(112): Selenocysteine
  MOD_RES (126)..(126): Selenocysteine
  MOD_RES (130)..(130): Selenocysteine
  MOD_RES (149)..(149): Selenocysteine
MGVPRPQPWALGLLLFLLPGSLGAESHLSLLYHLXAVSSPAPGXPAFWVSGWLGPQQYLSYNSLRGEAEPCGAWVWENQVSWYWEKEXXDLRIKEKLFLEAFKALGGKGPYXLQGLLGCELGPDNXSVPXAKFALNGEEFMNFDLKQGXWGGDWPEALAISQRWQQQ

SEQ ID NO: 9808 - protein, 225 aa, Homo sapiens
  MOD_RES (35)..(35): Selenocysteine
  MOD_RES (44)..(44): Selenocysteine
  MOD_RES (88)..(89): Selenocysteine
  MOD_RES (112)..(112): Selenocysteine
  MOD_RES (126)..(126): Selenocysteine
  MOD_RES (130)..(130): Selenocysteine
  MOD_RES (149)..(149): Selenocysteine
  MOD_RES (176)..(176): Selenocysteine
  MOD_RES (202)..(202): Selenocysteine
MGVPRPQPWALGLLLFLLPGSLGAESHLSLLYHLXAVSSPAPGXPAFWVSGWLGPQQYLSYNSLRGEAEPCGAWVWENQVSWYWEKEXXDLRIKEKLFLEAFKALGGKGPYXLQGLLGCELGPDNXSVPXAKFALNGEEFMNFDLKQGXWGGDWPEALAISQRWQQQDKAANKELXFLLFSCPHRLREHLERGRGNLEWKDXVSHYVAQAGLELLGSSDSPALVS

SEQ ID NO: 9809 - protein, 365 aa, Homo sapiens
  MOD_RES (35)..(35): Selenocysteine
  MOD_RES (44)..(44): Selenocysteine
  MOD_RES (88)..(89): Selenocysteine
  MOD_RES (112)..(112): Selenocysteine
  MOD_RES (126)..(126): Selenocysteine
  MOD_RES (130)..(130): Selenocysteine
  MOD_RES (149)..(149): Selenocysteine
  MOD_RES (176)..(176): Selenocysteine
  MOD_RES (220)..(220): Selenocysteine
  MOD_RES (244)..(244): Selenocysteine
  MOD_RES (264)..(264): Selenocysteine
  MOD_RES (311)..(311): Selenocysteine
  MOD_RES (340)..(340): Selenocysteine
  MOD_RES (346)..(346): Selenocysteine
  MOD_RES (364)..(364): Selenocysteine
MGVPRPQPWALGLLLFLLPGSLGAESHLSLLYHLXAVSSPAPGXPAFWVSGWLGPQQYLSYNSLRGEAEPCGAWVWENQVSWYWEKEXXDLRIKEKLFLEAFKALGGKGPYXLQGLLGCELGPDNXSVPXAKFALNGEEFMNFDLKQGXWGGDWPEALAISQRWQQQDKAANKELXFLLFSCPHRLREHLERGRGNLEWKEPPSMRLKARPSSPGFSVLXCSAFSFYPPELQLRFLRNGLAAGXGQGDFGPNSDGSFHASSSLXVKSGDEHHYCCIVQHAGLAQPLRVELESPAKSSVLVVGIVIGVLLLXAAAVGGALLWRRMRSGLPAPWISLRGDDXGVLLPXPGEAQDADLKDVNVIPAXA

SEQ ID NO: 9810 - protein, 99 aa, Homo sapiens
  MOD_RES (45)..(45): Selenocysteine
  MOD_RES (74)..(74): Selenocysteine
  MOD_RES (80)..(80): Selenocysteine
  MOD_RES (98)..(98): Selenocysteine
MGVPRPQPWALGLLLFLLPGSLGAESPAKSSVLVVGIVIGVLLLXAAAVGGALLWRRMRSGLPAPWISLRGDDXGVLLPXPGEAQDADLKDVNVIPAXA

SEQ ID NO: 9811 - protein, 39 aa, Homo sapiens
  MOD_RES (9)..(9): Selenocysteine
  MOD_RES (36)..(36): Selenocysteine
MNFDLKQGXWGGDWPEALAISQRWQQQDKAANKELXFLL

SEQ ID NO: 9812 - protein, 153 aa, Homo sapiens
  MOD_RES (5)..(6): Selenocysteine
  MOD_RES (29)..(29): Selenocysteine
  MOD_RES (43)..(43): Selenocysteine
  MOD_RES (47)..(47): Selenocysteine
  MOD_RES (66)..(66): Selenocysteine
  MOD_RES (93)..(93): Selenocysteine
  MOD_RES (128)..(128): Selenocysteine
  MOD_RES (134)..(134): Selenocysteine
  MOD_RES (152)..(152): Selenocysteine
WEKEXXDLRIKEKLFLEAFKALGGKGPYXLQGLLGCELGPDNXSVPXAKFALNGEEFMNFDLKQGXWGGDWPEALAISQRWQQQDKAANKELXFLLFSCPHRLREHLERGRGNLEWKAPWISLRGDDXGVLLPXPGEAQDADLKDVNVIPAXA

SEQ ID NO: 9813 - protein, 189 aa, Homo sapiens
  MOD_RES (1)..(1): Any amino acid
  MOD_RES (8)..(8): Selenocysteine
  MOD_RES (52)..(53): Selenocysteine
  MOD_RES (76)..(76): Selenocysteine
  MOD_RES (90)..(90): Selenocysteine
  MOD_RES (94)..(94): Selenocysteine
  MOD_RES (113)..(113): Selenocysteine
  MOD_RES (140)..(140): Selenocysteine
  MOD_RES (170)..(170): Selenocysteine
XSSPAPGXPAFWVSGWLGPQQYLSYNSLRGEAEPCGAWVWENQVSWYWEKEXXDLRIKEKLFLEAFKALGGKGPYXLQGLLGCELGPDNXSVPXAKFALNGEEFMNFDLKQGXWGGDWPEALAISQRWQQQDKAANKELXFLLFSCPHRLREHLERGRGNLEWKAPSPSXLRSCNFGSCGMGWPLAPAR

SEQ ID NO: 9814 - protein, 326 aa, Homo sapiens
  MOD_RES (7)..(7): Selenocysteine
  MOD_RES (32)..(32): Selenocysteine
  MOD_RES (48)..(48): Selenocysteine
  MOD_RES (113)..(113): Selenocysteine
  MOD_RES (133)..(133): Selenocysteine
  MOD_RES (143)..(143): Selenocysteine
  MOD_RES (150)..(150): Selenocysteine
  MOD_RES (156)..(156): Selenocysteine
  MOD_RES (197)..(197): Selenocysteine
  MOD_RES (249)..(249): Selenocysteine
  MOD_RES (258)..(258): Selenocysteine
MELSGAXMARGLAVLLVLFLHIKNLPAQAADXCPEVKVVGLEGSDKLXILRGCPGLPGAPGPKGEAGVIGERGERGLPGAPGKAGPVGPKGDRGEKGMRGEKGDAGQSQSCAXGPRNCKDLLDRGYFLSGWHXIYLPDCRPLXVLCDMDXDGGGWXVFQRRMDGSVDFYRDWAAYKQGFGSQLGEFWLGNDNIHALXAQGSSELRVDLVDFEGNHQFAKYKSFKVADEAEKYKLVLGAFVGGSAGNSLXGHNNNFFSXKDQDNDVSSSNCAEKFQGAWWYADCHASNLNGLYLMGPHESYANGINWSAAKGYKYSYKVSEMKVRPA

SEQ ID NO: 9815 - protein, 360 aa, Homo sapiens
  MOD_RES (7)..(7): Selenocysteine
  MOD_RES (32)..(32): Selenocysteine
  MOD_RES (48)..(48): Selenocysteine
  MOD_RES (113)..(113): Selenocysteine
  MOD_RES (133)..(133): Selenocysteine
  MOD_RES (143)..(143): Selenocysteine
  MOD_RES (150)..(150): Selenocysteine
  MOD_RES (156)..(156): Selenocysteine
  MOD_RES (183)..(183): Selenocysteine
  MOD_RES (207)..(207): Selenocysteine
  MOD_RES (218)..(218): Selenocysteine
  MOD_RES (225)..(225): Selenocysteine
  MOD_RES (234)..(234): Selenocysteine
  MOD_RES (288)..(288): Selenocysteine
  MOD_RES (310)..(310): Selenocysteine
  MOD_RES (322)..(322): Selenocysteine
  MOD_RES (324)..(324): Selenocysteine
  MOD_RES (333)..(333): Selenocysteine
  MOD_RES (338)..(339): Selenocysteine
  MOD_RES (359)..(359): Selenocysteine
MELSGAXMARGLAVLLVLFLHIKNLPAQAADXCPEVKVVGLEGSDKLXILRGCPGLPGAPGPKGEAGVIGERGERGLPGAPGKAGPVGPKGDRGEKGMRGEKGDAGQSQSCAXGPRNCKDLLDRGYFLSGWHXIYLPDCRPLXVLCDMDXDGGGWXVFQRRMDGSVDFYRDWAAYKQGFGSQXHSHDAHSCPFAPSSVKPPHAHNLXRGRIMFLNMFXLGQKSFXSFNVCFLNXSGFDHFPVSVARQVFPWNLVSREESGPLFSRWHYRCSGRLSDFCEDFPPPVIDXGRSSPPPPSLPHPPMPHSQHFXLLEKGHFGVQKXLXKKGESLVGXFLLPXXAEFMLWAGWLLGRDKHLALXK

SEQ ID NO: 9816 - protein, 508 aa, Homo sapiens
  MOD_RES (14)..(14): Selenocysteine
  MOD_RES (21)..(21): Selenocysteine
  MOD_RES (84)..(84): Selenocysteine
  MOD_RES (94)..(94): Selenocysteine
  MOD_RES (112)..(112): Selenocysteine
  MOD_RES (130)..(130): Selenocysteine
  MOD_RES (172)..(172): Selenocysteine
  MOD_RES (181)..(181): Selenocysteine
  MOD_RES (183)..(183): Selenocysteine
  MOD_RES (217)..(217): Selenocysteine
  MOD_RES (232)..(232): Selenocysteine
  MOD_RES (236)..(236): Selenocysteine
  MOD_RES (244)..(244): Selenocysteine
  MOD_RES (246)..(246): Selenocysteine
  MOD_RES (252)..(252): Selenocysteine
  MOD_RES (303)..(303): Selenocysteine
  MOD_RES (340)..(340): Selenocysteine
  MOD_RES (359)..(359): Selenocysteine
  MOD_RES (398)..(398): Selenocysteine
  MOD_RES (412)..(412): Selenocysteine
  MOD_RES (432)..(432): Selenocysteine
  MOD_RES (447)..(447): Selenocysteine
  MOD_RES (452)..(452): Selenocysteine
  MOD_RES (491)..(491): Selenocysteine
MLLWSLLVIFDAVXEQADSLXLVAPSSVFEGDSIVLKCQGEQNWKIQKMAYHKDNKELSVFKKFSDFLIQSAVLSDSGNYFCSXKGQLFLWDKXSNIVKIKVQELFQRPVLXASSFQPIEGGPVSLKCEXRLSPQRLDVQLQFCFFRENQVLGSGWSSSPELQISAVWSEDXGSYWCKAEXVXHRIRKQSLQSQIHVQRIPISNVSLEIRAPGGQVXEGQKLILLCSVAGGXGNVXFSWYREAXGXSMGKKXQRSLSAELEIPAVKESDAGKYYCRADNGHVPIQSKVVNIPVRIPVSRPVLXLRSPGAQAAVGDLLELHCEALRGSPPILYQFYHEDVXLGNSSAPSGGGASFNLSLXAEHSGNYSCEANNGLGAQCSEAVPVSISGPDGYRRDLMXAGVLWGLFGVLGFXGVALLLYALFHKISGESSAXNEPRGASRPNPQEFXYSSPXPDMEELQPVYVNVGSVDVDVVYSQVWSMQQPESSANIRXLLENKDSQVIYSSVKKS

SEQ ID NO: 9817 - protein, 202 aa, Homo sapiens
  MOD_RES (14)..(14): Selenocysteine
  MOD_RES (21)..(21): Selenocysteine
  MOD_RES (84)..(84): Selenocysteine
  MOD_RES (94)..(94): Selenocysteine
  MOD_RES (114)..(114): Selenocysteine
  MOD_RES (128)..(128): Selenocysteine
  MOD_RES (148)..(148): Selenocysteine
  MOD_RES (163)..(163): Selenocysteine
  MOD_RES (168)..(168): Selenocysteine
  MOD_RES (185)..(185): Selenocysteine
MLLWSLLVIFDAVXEQADSLXLVAPSSVFEGDSIVLKCQGEQNWKIQKMAYHKDNKELSVFKKFSDFLIQSAVLSDSGNYFCSXKGQLFLWDKXSNIVKIKVQGPDGYRRDLMXAGVLWGLFGVLGFXGVALLLYALFHKISGESSAXNEPRGASRPNPQEFXYSSPXPDMEELQPVYVNANIRXLLENKDSQVIYSSVKKS

SEQ ID NO: 9818 - protein, 192 aa, Homo sapiens
  MOD_RES (50)..(50): Selenocysteine
  MOD_RES (87)..(87): Selenocysteine
  MOD_RES (106)..(106): Selenocysteine
  MOD_RES (145)..(145): Selenocysteine
  MOD_RES (159)..(159): Selenocysteine
  MOD_RES (187)..(187): Selenocysteine
MWEWKICNSHGARPFAEPAGWEFVNLLRHHKSFLIAPLCLSVPVSRPVLXLRSPGAQAAVGDLLELHCEALRGSPPILYQFYHEDVXLGNSSAPSGGGASFNLSLXAEHSGNYSCEANNGLGAQCSEAVPVSISGPDGYRRDLMXAGVLWGLFGVLGFXGVALLLYALFHKISGCIYHLDSPYFAMXFPLLI

SEQ ID NO: 9819 - protein, 627 aa, Homo sapiens
  MOD_RES (19)..(19): Selenocysteine
  MOD_RES (48)..(48): Selenocysteine
  MOD_RES (73)..(73): Selenocysteine
  MOD_RES (76)..(76): Selenocysteine
  MOD_RES (78)..(78): Selenocysteine
  MOD_RES (90)..(90): Selenocysteine
  MOD_RES (117)..(118): Selenocysteine
  MOD_RES (120)..(120): Selenocysteine
  MOD_RES (123)..(123): Selenocysteine
  MOD_RES (156)..(156): Selenocysteine
  MOD_RES (167)..(167): Selenocysteine
  MOD_RES (189)..(189): Selenocysteine
  MOD_RES (221)..(221): Selenocysteine
  MOD_RES (272)..(272): Selenocysteine
  MOD_RES (306)..(306): Selenocysteine
  MOD_RES (381)..(381): Selenocysteine
  MOD_RES (401)..(401): Selenocysteine
  MOD_RES (446)..(446): Selenocysteine
  MOD_RES (455)..(455): Selenocysteine
  MOD_RES (457)..(457): Selenocysteine
  MOD_RES (481)..(481): Selenocysteine
  MOD_RES (486)..(486): Selenocysteine
  MOD_RES (496)..(496): Selenocysteine
  MOD_RES (503)..(503): Selenocysteine
  MOD_RES (515)..(515): Selenocysteine
  MOD_RES (551)..(551): Selenocysteine
  MOD_RES (566)..(566): Selenocysteine
  MOD_RES (569)..(569): Selenocysteine
  MOD_RES (575)..(575): Selenocysteine
  MOD_RES (581)..(582): Selenocysteine
  MOD_RES (591)..(591): Selenocysteine
  MOD_RES (619)..(619): Selenocysteine
MEGLAGYVYKAASEGKVLXLAALLLNRSESDIRYLLGYVSQQGGQRSXPLIIAARNGHAKVVRLLLEHYRVQXQQXGXVRFDGYVIDGAXALWCAAGAGHFEVVKLLVSHGANVNHXXVXNSXPLRAACFDGRLDIVKYLVENNANISIANKYDNXCLMIAAYKGHXDVVRYLLEQRADPNAKAHCGAXALHFAAEAGHIDIVKELIKWRAAIVVNGHGMXPLKVAAESCKADVVELLLSHADCDRRSRIEALELLGASFANDRENYDIIKXYHYLYLAMLERFQDGDNILEKEVLPPIHAYGNRXECRNPQELESIRQDRDALHMEGLIVRERILGADNIDVSHPIIYRGAVYADNMEFEQCIKLWLHALHLRQKGNRNXHKDLLRFAQVFSQMIHLNEXVKAPDIECVLRCSVLEIEQSMNRVKNISDADVHNAMDNYECNLYXFLYLVCISXKXQCSEEDQCKINKQIYNLIHLDPRXREGFXLLHLAVNSNXPVDDFHXNDVCSFPNALVXKLLLDCGAEVNAVDNEGNSALHIIVQYNRPISDFLXLHSIIISLVEAGAHXDMXNKQNKXPLDKSXXGVSEILLKXQMKMSLKCLAARAVRANDINYQDQIPRXLEEFVGFH

SEQ ID NO: 9820 - protein, 80 aa, Homo sapiens
  MOD_RES (9)..(9): Selenocysteine
  MOD_RES (31)..(31): Selenocysteine
  MOD_RES (63)..(63): Selenocysteine
MIAAYKGHXDVVRYLLEQRADPNAKAHCGAXALHFAAEAGHIDIVKELIKWRAAIVVNGHGMXPLKVAAESCKADVVELL

SEQ ID NO: 9821 - protein, 269 aa, Homo sapiens
  MOD_RES (1)..(1): Any amino acid
  MOD_RES (22)..(22): Selenocysteine
  MOD_RES (97)..(97): Selenocysteine
  MOD_RES (99)..(99): Selenocysteine
  MOD_RES (123)..(123): Selenocysteine
  MOD_RES (128)..(128): Selenocysteine
  MOD_RES (138)..(138): Selenocysteine
  MOD_RES (145)..(145): Selenocysteine
  MOD_RES (157)..(157): Selenocysteine
  MOD_RES (193)..(193): Selenocysteine
  MOD_RES (208)..(208): Selenocysteine
  MOD_RES (211)..(211): Selenocysteine
  MOD_RES (217)..(217): Selenocysteine
  MOD_RES (223)..(224): Selenocysteine
  MOD_RES (233)..(233): Selenocysteine
  MOD_RES (261)..(261): Selenocysteine
XDGDNILEKEVLPPIHAYGNRXECRNPQELESIRQDRDALHMEGLIVRERILGADNIDVSHPIIYRGAVYADNMEFEQCIKLWLHALHLRQKVCISXKXQCSEEDQCKINKQIYNLIHLDPRXREGFXLLHLAVNSNXPVDDFHXNDVCSFPNALVXKLLLDCGAEVNAVDNEGNSALHIIVQYNRPISDFLXLHSIIISLVEAGAHXDMXNKQNKXPLDKSXXGVSEILLKXQMKMSLKCLAARAVRANDINYQDQIPRXLEEFVGFH

SEQ ID NO: 9822 - protein, 453 aa, Homo sapiens
  MOD_RES (25)..(25): Selenocysteine
  MOD_RES (36)..(36): Selenocysteine
  MOD_RES (150)..(150): Selenocysteine
  MOD_RES (164)..(165): Selenocysteine
  MOD_RES (170)..(170): Selenocysteine
  MOD_RES (212)..(212): Selenocysteine
  MOD_RES (217)..(217): Selenocysteine
  MOD_RES (223)..(223): Selenocysteine
  MOD_RES (259)..(259): Selenocysteine
  MOD_RES (278)..(278): Selenocysteine
  MOD_RES (358)..(358): Selenocysteine
  MOD_RES (384)..(384): Selenocysteine
  MOD_RES (396)..(396): Selenocysteine
  MOD_RES (446)..(446): Selenocysteine
  MOD_RES (453)..(453): Selenocysteine
MEQKMKCPHCKDQLESGFGSQSCKXCALMFSSEPSXSEVHRDQERKERLSKFESIRHSIAGIIRSPKSALGSSALSDMISISEKPLAEQDWYHGAIPRIEAQELLKKQGDFLVRESHGKPGEYVLSVYSDGQRRHFIIQYVDNMYRFEGXGFSNIPQLIDHHYXXKQVIXKKSGVVLLNPIPKDKKWILSHEDVILGELLGKGNFGEVYKGXLKDKXSVAVKXCKEDLPQELKIKFLQEAKILKQYDHPNIVKLIGVCXQRQPVYIIMELVSGGDFLXFLRRKKDELKLKQLVKFSLDAAAGMLYLESKNCIHRDLAARNCLVGENNVLKISDFGMSRQEDGGVYSSSGLKQIPIKWXAPEALNYGRYSSESDVWSFGILLWEXFSLGVCPYPGMXNQQAREQVERGYRMSAPQHCPEDISKIMMKCWDYKPENRPKFSELQKELXIIKRKLX

SEQ ID NO: 9823 - protein, 411 aa, Homo sapiens
  MOD_RES (108)..(108): Selenocysteine
  MOD_RES (122)..(123): Selenocysteine
  MOD_RES (128)..(128): Selenocysteine
  MOD_RES (170)..(170): Selenocysteine
  MOD_RES (175)..(175): Selenocysteine
  MOD_RES (181)..(181): Selenocysteine
  MOD_RES (217)..(217): Selenocysteine
  MOD_RES (236)..(236): Selenocysteine
  MOD_RES (316)..(316): Selenocysteine
  MOD_RES (342)..(342): Selenocysteine
  MOD_RES (354)..(354): Selenocysteine
  MOD_RES (404)..(404): Selenocysteine
  MOD_RES (411)..(411): Selenocysteine
MERKERLSKFESIRHSIAGIIRSPKSALGSSALSDMISISEKPLAEQDWYHGAIPRIEAQELLKKQGDFLVRESHGKPGEYVLSVYSDGQRRHFIIQYVDNMYRFEGXGFSNIPQLIDHHYXXKQVIXKKSGVVLLNPIPKDKKWILSHEDVILGELLGKGNFGEVYKGXLKDKXSVAVKXCKEDLPQELKIKFLQEAKILKQYDHPNIVKLIGVCXQRQPVYIIMELVSGGDFLXFLRRKKDELKLKQLVKFSLDAAAGMLYLESKNCIHRDLAARNCLVGENNVLKISDFGMSRQEDGGVYSSSGLKQIPIKWXAPEALNYGRYSSESDVWSFGILLWEXFSLGVCPYPGMXNQQAREQVERGYRMSAPQHCPEDISKIMMKCWDYKPENRPKFSELQKELXIIKRKLX

SEQ ID NO: 9824 - protein, 84 aa, Homo sapiens
  MOD_RES (27)..(27): Selenocysteine
  MOD_RES (45)..(45): Selenocysteine
  MOD_RES (58)..(58): Selenocysteine
  MOD_RES (80)..(81): Selenocysteine
MGFGSDLKNSHEAVLKLQDWELRLLEXVKKFMALRIKSDKEYASXLQNLCNQVDKESXVQMNYVSNVSKGRKLKRPRNDXXKPQ

SEQ ID NO: 9825 - protein, 163 aa, Homo sapiens
  MOD_RES (27)..(27): Selenocysteine
  MOD_RES (45)..(45): Selenocysteine
  MOD_RES (58)..(58): Selenocysteine
  MOD_RES (78)..(78): Selenocysteine
  MOD_RES (87)..(87): Selenocysteine
  MOD_RES (101)..(101): Selenocysteine
  MOD_RES (129)..(129): Selenocysteine
  MOD_RES (131)..(131): Selenocysteine
MGFGSDLKNSHEAVLKLQDWELRLLEXVKKFMALRIKSDKEYASXLQNLCNQVDKESXVQMNYVSNVSKSWLLMIQQXEQLSRIMKXHAEDLNSGPLHRLXMMIKDKQQVKKSYIGVHQQIEAEMIKVXKXELEKLKCSYRQLIKEMNSAKEKYKEALAKDKK

SEQ ID NO: 9826 - protein, 822 aa, Homo sapiens
  MOD_RES (27)..(27): Selenocysteine
  MOD_RES (45)..(45): Selenocysteine
  MOD_RES (58)..(58): Selenocysteine
  MOD_RES (78)..(78): Selenocysteine
  MOD_RES (87)..(87): Selenocysteine
  MOD_RES (101)..(101): Selenocysteine
  MOD_RES (129)..(129): Selenocysteine
  MOD_RES (131)..(131): Selenocysteine
  MOD_RES (164)..(164): Selenocysteine
  MOD_RES (175)..(175): Selenocysteine
  MOD_RES (203)..(203): Selenocysteine
  MOD_RES (233)..(233): Selenocysteine
  MOD_RES (237)..(237): Selenocysteine
  MOD_RES (258)..(258): Selenocysteine
  MOD_RES (269)..(270): Selenocysteine
  MOD_RES (281)..(281): Selenocysteine
  MOD_RES (301)..(301): Selenocysteine
  MOD_RES (311)..(311): Selenocysteine
  MOD_RES (319)..(319): Selenocysteine
  MOD_RES (343)..(343): Selenocysteine
  MOD_RES (373)..(373): Selenocysteine
  MOD_RES (410)..(410): Selenocysteine
  MOD_RES (519)..(519): Selenocysteine
  MOD_RES (533)..(534): Selenocysteine
  MOD_RES (539)..(539): Selenocysteine
  MOD_RES (581)..(581): Selenocysteine
  MOD_RES (586)..(586): Selenocysteine
  MOD_RES (592)..(592): Selenocysteine
  MOD_RES (628)..(628): Selenocysteine
  MOD_RES (647)..(647): Selenocysteine
  MOD_RES (727)..(727): Selenocysteine
  MOD_RES (753)..(753): Selenocysteine
  MOD_RES (765)..(765): Selenocysteine
  MOD_RES (815)..(815): Selenocysteine
  MOD_RES (822)..(822): Selenocysteine
MGFGSDLKNSHEAVLKLQDWELRLLEXVKKFMALRIKSDKEYASXLQNLCNQVDKESXVQMNYVSNVSKSWLLMIQQXEQLSRIMKXHAEDLNSGPLHRLXMMIKDKQQVKKSYIGVHQQIEAEMIKVXKXELEKLKCSYRQLIKEMNSAKEKYKEALAKGKEXEKAKERYDKAXMKLHMLHNQYVLALKGAQLHQNQYYDIXLPLLLDSLQKMQEEMIKALKGIFDEYSQIXSLVXEEIVNVHKEIQMSVEQIDPSXEYNNFIDVHRXXAAKEQEIEFDXSLLEENENLQANEIMWNNLXAESLQVMLKXLAEELMQXQQMLLNKEEAVLELEKRIEESSEXCEKKSDIVLLLSQKQALEELKQSVQQLRCXEAKFSAQKELLEQKVQENDGKEPPPVVNYEEDARSVXSMERKERLSKFESIRHSIAGIIRSPKSALGSSALSDMISISEKPLAEQDWYHGAIPRIEAQELLKKQGDFLVRESHGKPGEYVLSVYSDGQRRHFIIQYVDNMYRFEGXGFSNIPQLIDHHYXXKQVIXKKSGVVLLNPIPKDKKWILSHEDVILGELLGKGNFGEVYKGXLKDKXSVAVKXCKEDLPQELKIKFLQEAKILKQYDHPNIVKLIGVCXQRQPVYIIMELVSGGDFLXFLRRKKDELKLKQLVKFSLDAAAGMLYLESKNCIHRDLAARNCLVGENNVLKISDFGMSRQEDGGVYSSSGLKQIPIKWXAPEALNYGRYSSESDVWSFGILLWEXFSLGVCPYPGMXNQQAREQVERGYRMSAPQHCPEDISKIMMKCWDYKPENRPKFSELQKELXIIKRKLX

SEQ ID NO: 9827 - protein, 166 aa, Homo sapiens
  MOD_RES (11)..(12): Selenocysteine
  MOD_RES (99)..(99): Selenocysteine
  MOD_RES (130)..(130): Selenocysteine
  MOD_RES (142)..(142): Selenocysteine
  MOD_RES (154)..(154): Selenocysteine
MAAYPESCVDXXVLDFVADLSLASPRRPLLCDFAPGVSLGDPALALREGRPRRMARFEEGDPEEEECEVDQGDGEEEEEEERGRGVSLLGRPKRKRVIXYAQRQAANIRERKRMFNLNEAFDQLRRKVPXFAYEKRLSRIEXLRLAIVYISFMXELLESCEKKESG

SEQ ID NO: 9828 - protein, 153 aa, Homo sapiens
  MOD_RES (17)..(17): Selenocysteine
  MOD_RES (25)..(25): Selenocysteine
  MOD_RES (32)..(32): Selenocysteine
  MOD_RES (36)..(36): Selenocysteine
  MOD_RES (70)..(70): Selenocysteine
  MOD_RES (75)..(75): Selenocysteine
  MOD_RES (78)..(78): Selenocysteine
  MOD_RES (93)..(93): Selenocysteine
  MOD_RES (129)..(129): Selenocysteine
  MOD_RES (148)..(148): Selenocysteine
MALDGIRMPDGCYADGXWELSVHVXDLNRDVXLRVXGEVHIGGVMLKLVEKLDVKKDWSDHALWWEKKRXWLLKXHWXLDKYGIQADAKLQFXPQHKLLRLQLPNMKYVKVKVNFSDRVFKAVSDICKXFNIRHPEELSLLKKPRDPXKKKKK

SEQ ID NO: 9829 - protein, 633 aa, Homo sapiens
  MOD_RES (17)..(17): Selenocysteine
  MOD_RES (25)..(25): Selenocysteine
  MOD_RES (32)..(32): Selenocysteine
  MOD_RES (36)..(36): Selenocysteine
  MOD_RES (70)..(70): Selenocysteine
  MOD_RES (75)..(75): Selenocysteine
  MOD_RES (78)..(78): Selenocysteine
  MOD_RES (93)..(93): Selenocysteine
  MOD_RES (129)..(129): Selenocysteine
  MOD_RES (148)..(148): Selenocysteine
  MOD_RES (172)..(172): Selenocysteine
  MOD_RES (188)..(188): Selenocysteine
  MOD_RES (190)..(190): Selenocysteine
  MOD_RES (192)..(192): Selenocysteine
  MOD_RES (204)..(204): Selenocysteine
  MOD_RES (228)..(228): Selenocysteine
  MOD_RES (310)..(310): Selenocysteine
  MOD_RES (331)..(331): Selenocysteine
  MOD_RES (356)..(356): Selenocysteine
  MOD_RES (362)..(362): Selenocysteine
  MOD_RES (364)..(364): Selenocysteine
  MOD_RES (370)..(370): Selenocysteine
  MOD_RES (388)..(388): Selenocysteine
  MOD_RES (398)..(398): Selenocysteine
  MOD_RES (402)..(402): Selenocysteine
  MOD_RES (416)..(416): Selenocysteine
  MOD_RES (429)..(429): Selenocysteine
  MOD_RES (479)..(479): Selenocysteine
  MOD_RES (513)..(514): Selenocysteine
  MOD_RES (517)..(517): Selenocysteine
  MOD_RES (543)..(543): Selenocysteine
  MOD_RES (578)..(578): Selenocysteine
  MOD_RES (607)..(607): Selenocysteine
  MOD_RES (613)..(613): Selenocysteine
MALDGIRMPDGCYADGXWELSVHVXDLNRDVXLRVXGEVHIGGVMLKLVEKLDVKKDWSDHALWWEKKRXWLLKXHWXLDKYGIQADAKLQFXPQHKLLRLQLPNMKYVKVKVNFSDRVFKAVSDICKXFNIRHPEELSLLKKPRDPXKKKKKKLDDQSEDEALELEGPLIXPGSGSIYSSPGLYSKXMXPXYDAHDGSPLSPXSAWFGDSALSEGNPGILAVSQPIXSPEILAKMFKPQALLDKAKINQGWLDSSRSLMEQDVKENEALLLRFKYYSFFDLNPKYDAIRINQLYEQAKWAILLEEIECXEEEMMMFAALQYHINKLSIMXSENHLNNSDKEVDEVDAALSDLEIXLEGGKXSXILGDIXSIPELADYIKVFKPKKLXLKGYKQYWCXFKDXSISCYKSKEESSGXPAHQMNLRGCEVXPDVNISGQKFNIKLLIPVAEGMNEIWLRCDNEKQYAHWMAACRLASKGKXMADSSYNLEVQNILSFLKMQHLNPDPQLIPEQIXXDIXPECLVSPRYLKKYKNKQPGYIRDLIXARILEAHQNVAQMSLIEAKMRFIQAWQSLPEFGIXHFIARFQGGKKEELIGIAYNRLIRMDASXGDAIKXWRFSNMKQWNVNWEIKMVNS

SEQ ID NO: 9830 - protein, 680 aa, Homo sapiens
  MOD_RES (17)..(17): Selenocysteine
  MOD_RES (25)..(25): Selenocysteine
  MOD_RES (32)..(32): Selenocysteine
  MOD_RES (36)..(36): Selenocysteine
  MOD_RES (70)..(70): Selenocysteine
  MOD_RES (75)..(75): Selenocysteine
  MOD_RES (78)..(78): Selenocysteine
  MOD_RES (93)..(93): Selenocysteine
  MOD_RES (129)..(129): Selenocysteine
  MOD_RES (148)..(148): Selenocysteine
  MOD_RES (172)..(172): Selenocysteine
  MOD_RES (188)..(188): Selenocysteine
  MOD_RES (190)..(190): Selenocysteine
  MOD_RES (192)..(192): Selenocysteine
  MOD_RES (204)..(204): Selenocysteine
  MOD_RES (228)..(228): Selenocysteine
  MOD_RES (310)..(310): Selenocysteine
  MOD_RES (331)..(331): Selenocysteine
  MOD_RES (356)..(356): Selenocysteine
  MOD_RES (362)..(362): Selenocysteine
  MOD_RES (364)..(364): Selenocysteine
  MOD_RES (370)..(370): Selenocysteine
  MOD_RES (388)..(388): Selenocysteine
  MOD_RES (398)..(398): Selenocysteine
  MOD_RES (402)..(402): Selenocysteine
  MOD_RES (416)..(416): Selenocysteine
  MOD_RES (429)..(429): Selenocysteine
  MOD_RES (479)..(479): Selenocysteine
  MOD_RES (513)..(514): Selenocysteine
  MOD_RES (517)..(517): Selenocysteine
  MOD_RES (536)..(536): Selenocysteine
  MOD_RES (571)..(571): Selenocysteine
  MOD_RES (600)..(600): Selenocysteine
  MOD_RES (606)..(606): Selenocysteine
  MOD_RES (625)..(625): Selenocysteine
  MOD_RES (639)..(639): Selenocysteine
  MOD_RES (658)..(658): Selenocysteine
  MOD_RES (676)..(676): Selenocysteine
MALDGIRMPDGCYADGXWELSVHVXDLNRDVXLRVXGEVHIGGVMLKLVEKLDVKKDWSDHALWWEKKRXWLLKXHWXLDKYGIQADAKLQFXPQHKLLRLQLPNMKYVKVKVNFSDRVFKAVSDICKXFNIRHPEELSLLKKPRDPXKKKKKKLDDQSEDEALELEGPLIXPGSGSIYSSPGLYSKXMXPXYDAHDGSPLSPXSAWFGDSALSEGNPGILAVSQPIXSPEILAKMFKPQALLDKAKINQGWLDSSRSLMEQDVKENEALLLRFKYYSFFDLNPKYDAIRINQLYEQAKWAILLEEIECXEEEMMMFAALQYHINKLSIMXSENHLNNSDKEVDEVDAALSDLEIXLEGGKXSXILGDIXSIPELADYIKVFKPKKLXLKGYKQYWCXFKDXSISCYKSKEESSGXPAHQMNLRGCEVXPDVNISGQKFNIKLLIPVAEGMNEIWLRCDNEKQYAHWMAACRLASKGKXMADSSYNLEVQNILSFLKMQHLNPDPQLIPEQIXXDIXPECLVSPRYLKKYKNKQIXARILEAHQNVAQMSLIEAKMRFIQAWQSLPEFGIXHFIARFQGGKKEELIGIAYNRLIRMDASXGDAIKXWRFSNMKQWNVNWEIKMVXVEFADEVRLSFICXEVDCKVVHEFIGGYIFLSXRAKDQNESLDEEMFYKLXSGWV

SEQ ID NO: 9831 - protein, 687 aa, Homo sapiens
  MOD_RES (17)..(17): Selenocysteine
  MOD_RES (25)..(25): Selenocysteine
  MOD_RES (32)..(32): Selenocysteine
  MOD_RES (36)..(36): Selenocysteine
  MOD_RES (70)..(70): Selenocysteine
  MOD_RES (75)..(75): Selenocysteine
  MOD_RES (78)..(78): Selenocysteine
  MOD_RES (93)..(93): Selenocysteine
  MOD_RES (129)..(129): Selenocysteine
  MOD_RES (148)..(148): Selenocysteine
  MOD_RES (172)..(172): Selenocysteine
  MOD_RES (188)..(188): Selenocysteine
  MOD_RES (190)..(190): Selenocysteine
  MOD_RES (192)..(192): Selenocysteine
  MOD_RES (204)..(204): Selenocysteine
  MOD_RES (228)..(228): Selenocysteine
  MOD_RES (310)..(310): Selenocysteine
  MOD_RES (331)..(331): Selenocysteine
  MOD_RES (356)..(356): Selenocysteine
  MOD_RES (362)..(362): Selenocysteine
  MOD_RES (364)..(364): Selenocysteine
  MOD_RES (370)..(370): Selenocysteine
  MOD_RES (388)..(388): Selenocysteine
  MOD_RES (398)..(398): Selenocysteine
  MOD_RES (402)..(402): Selenocysteine
  MOD_RES (416)..(416): Selenocysteine
  MOD_RES (429)..(429): Selenocysteine
  MOD_RES (479)..(479): Selenocysteine
  MOD_RES (513)..(514): Selenocysteine
  MOD_RES (517)..(517): Selenocysteine
  MOD_RES (543)..(543): Selenocysteine
  MOD_RES (578)..(578): Selenocysteine
  MOD_RES (607)..(607): Selenocysteine
  MOD_RES (613)..(613): Selenocysteine
  MOD_RES (632)..(632): Selenocysteine
  MOD_RES (646)..(646): Selenocysteine
  MOD_RES (665)..(665): Selenocysteine
  MOD_RES (683)..(683): Selenocysteine
MALDGIRMPDGCYADGXWELSVHVXDLNRDVXLRVXGEVHIGGVMLKLVEKLDVKKDWSDHALWWEKKRXWLLKXHWXLDKYGIQADAKLQFXPQHKLLRLQLPNMKYVKVKVNFSDRVFKAVSDICKXFNIRHPEELSLLKKPRDPXKKKKKKLDDQSEDEALELEGPLIXPGSGSIYSSPGLYSKXMXPXYDAHDGSPLSPXSAWFGDSALSEGNPGILAVSQPIXSPEILAKMFKPQALLDKAKINQGWLDSSRSLMEQDVKENEALLLRFKYYSFFDLNPKYDAIRINQLYEQAKWAILLEEIECXEEEMMMFAALQYHINKLSIMXSENHLNNSDKEVDEVDAALSDLEIXLEGGKXSXILGDIXSIPELADYIKVFKPKKLXLKGYKQYWCXFKDXSISCYKSKEESSGXPAHQMNLRGCEVXPDVNISGQKFNIKLLIPVAEGMNEIWLRCDNEKQYAHWMAACRLASKGKXMADSSYNLEVQNILSFLKMQHLNPDPQLIPEQIXXDIXPECLVSPRYLKKYKNKQPGYIRDLIXARILEAHQNVAQMSLIEAKMRFIQAWQSLPEFGIXHFIARFQGGKKEELIGIAYNRLIRMDASXGDAIKXWRFSNMKQWNVNWEIKMVXVEFADEVRLSFICXEVDCKVVHEFIGGYIFLSXRAKDQNESLDEEMFYKLXSGWV

SEQ ID NO: 9832 - protein, 65 aa, Homo sapiens
  MOD_RES (17)..(17): Selenocysteine
  MOD_RES (25)..(25): Selenocysteine
  MOD_RES (32)..(32): Selenocysteine
  MOD_RES (36)..(36): Selenocysteine
  MOD_RES (58)..(58): Selenocysteine
MALDGIRMPDGCYADGXWELSVHVXDLNRDVXLRVXGEVHIGGVMLKLVEKLEKRSPXRCKKRLV

SEQ ID NO: 9833 - protein, 155 aa, Homo sapiens
  MOD_RES (24)..(24): Selenocysteine
  MOD_RES (43)..(43): Selenocysteine
  MOD_RES (67)..(67): Selenocysteine
  MOD_RES (83)..(83): Selenocysteine
  MOD_RES (85)..(85): Selenocysteine
  MOD_RES (87)..(87): Selenocysteine
  MOD_RES (99)..(99): Selenocysteine
  MOD_RES (123)..(123): Selenocysteine
MKYVKVKVNFSDRVFKAVSDICKXFNIRHPEELSLLKKPRDPXKKKKKKLDDQSEDEALELEGPLIXPGSGSIYSSPGLYSKXMXPXYDAHDGSPLSPXSAWFGDSALSEGNPGILAVSQPIXSPEILAKMFKPQALLDKAKINQGWLDSSRSLM

SEQ ID NO: 9834 - protein, 133 aa, Homo sapiens
  MOD_RES (26)..(26): Selenocysteine
  MOD_RES (31)..(31): Selenocysteine
  MOD_RES (34)..(34): Selenocysteine
  MOD_RES (49)..(49): Selenocysteine
  MOD_RES (85)..(85): Selenocysteine
  MOD_RES (104)..(104): Selenocysteine
  MOD_RES (128)..(128): Selenocysteine
MWLLKVRKNVKKDWSDHALWWEKKRXWLLKXHWXLDKYGIQADAKLQFXPQHKLLRLQLPNMKYVKVKVNFSDRVFKAVSDICKXFNIRHPEELSLLKKPRDPXKKKKKKLDDQSEDEALELEGPLIXPGSGK

SEQ ID NO: 9835 - protein, 640 aa, Homo sapiens
  MOD_RES (12)..(12): Selenocysteine
  MOD_RES (17)..(17): Selenocysteine
  MOD_RES (20)..(20): Selenocysteine
  MOD_RES (35)..(35): Selenocysteine
  MOD_RES (71)..(71): Selenocysteine
  MOD_RES (90)..(90): Selenocysteine
  MOD_RES (114)..(114): Selenocysteine
  MOD_RES (119)..(119): Selenocysteine
  MOD_RES (141)..(141): Selenocysteine
  MOD_RES (143)..(143): Selenocysteine
  MOD_RES (145)..(145): Selenocysteine
  MOD_RES (157)..(157): Selenocysteine
  MOD_RES (181)..(181): Selenocysteine
  MOD_RES (263)..(263): Selenocysteine
  MOD_RES (284)..(284): Selenocysteine
  MOD_RES (309)..(309): Selenocysteine
  MOD_RES (315)..(315): Selenocysteine
  MOD_RES (317)..(317): Selenocysteine
  MOD_RES (323)..(323): Selenocysteine
  MOD_RES (341)..(341): Selenocysteine
  MOD_RES (351)..(351): Selenocysteine
  MOD_RES (355)..(355): Selenocysteine
  MOD_RES (369)..(369): Selenocysteine
  MOD_RES (382)..(382): Selenocysteine
  MOD_RES (432)..(432): Selenocysteine
  MOD_RES (466)..(467): Selenocysteine
  MOD_RES (470)..(470): Selenocysteine
  MOD_RES (496)..(496): Selenocysteine
  MOD_RES (531)..(531): Selenocysteine
  MOD_RES (560)..(560): Selenocysteine
  MOD_RES (566)..(566): Selenocysteine
  MOD_RES (585)..(585): Selenocysteine
  MOD_RES (599)..(599): Selenocysteine
  MOD_RES (618)..(618): Selenocysteine
  MOD_RES (636)..(636): Selenocysteine
SDHALWWEKKRXWLLKXHWXLDKYGIQADAKLQFXPQHKLLRLQLPNMKYVKVKVNFSDRVFKAVSDICKXFNIRHPEELSLLKKPRDPXKKKKKKLDDQSEDEALELEGPLIXPGSGXDVLYIGPLKGSIYSSPGLYSKXMXPXYDAHDGSPLSPXSAWFGDSALSEGNPGILAVSQPIXSPEILAKMFKPQALLDKAKINQGWLDSSRSLMEQDVKENEALLLRFKYYSFFDLNPKYDAIRINQLYEQAKWAILLEEIECXEEEMMMFAALQYHINKLSIMXSENHLNNSDKEVDEVDAALSDLEIXLEGGKXSXILGDIXSIPELADYIKVFKPKKLXLKGYKQYWCXFKDXSISCYKSKEESSGXPAHQMNLRGCEVXPDVNISGQKFNIKLLIPVAEGMNEIWLRCDNEKQYAHWMAACRLASKGKXMADSSYNLEVQNILSFLKMQHLNPDPQLIPEQIXXDIXPECLVSPRYLKKYKNKQPGYIRDLIXARILEAHQNVAQMSLIEAKMRFIQAWQSLPEFGIXHFIARFQGGKKEELIGIAYNRLIRMDASXGDAIKXWRFSNMKQWNVNWEIKMVXVEFADEVRLSFICXEVDCKVVHEFIGGYIFLSXRAKDQNESLDEEMFYKLXSGWV

SEQ ID NO: 9836 - protein, 545 aa, Homo sapiens
  MOD_RES (1)..(1): Any amino acid
  MOD_RES (11)..(11): Selenocysteine
  MOD_RES (16)..(16): Selenocysteine
  MOD_RES (38)..(38): Selenocysteine
  MOD_RES (40)..(40): Selenocysteine
  MOD_RES (42)..(42): Selenocysteine
  MOD_RES (54)..(54): Selenocysteine
  MOD_RES (78)..(78): Selenocysteine
  MOD_RES (160)..(160): Selenocysteine
  MOD_RES (181)..(181): Selenocysteine
  MOD_RES (206)..(206): Selenocysteine
  MOD_RES (212)..(212): Selenocysteine
  MOD_RES (214)..(214): Selenocysteine
  MOD_RES (220)..(220): Selenocysteine
  MOD_RES (238)..(238): Selenocysteine
  MOD_RES (248)..(248): Selenocysteine
  MOD_RES (252)..(252): Selenocysteine
  MOD_RES (266)..(266): Selenocysteine
  MOD_RES (279)..(279): Selenocysteine
  MOD_RES (329)..(329): Selenocysteine
  MOD_RES (363)..(364): Selenocysteine
  MOD_RES (367)..(367): Selenocysteine
  MOD_RES (401)..(401): Selenocysteine
  MOD_RES (436)..(436): Selenocysteine
  MOD_RES (465)..(465): Selenocysteine
  MOD_RES (471)..(471): Selenocysteine
  MOD_RES (490)..(490): Selenocysteine
  MOD_RES (504)..(504): Selenocysteine
  MOD_RES (523)..(523): Selenocysteine
  MOD_RES (541)..(541): Selenocysteine
XALELEGPLIXPGSGXDVLYIGPLKGSIYSSPGLYSKXMXPXYDAHDGSPLSPXSAWFGDSALSEGNPGILAVSQPIXSPEILAKMFKPQALLDKAKINQGWLDSSRSLMEQDVKENEALLLRFKYYSFFDLNPKYDAIRINQLYEQAKWAILLEEIECXEEEMMMFAALQYHINKLSIMXSENHLNNSDKEVDEVDAALSDLEIXLEGGKXSXILGDIXSIPELADYIKVFKPKKLXLKGYKQYWCXFKDXSISCYKSKEESSGXPAHQMNLRGCEVXPDVNISGQKFNIKLLIPVAEGMNEIWLRCDNEKQYAHWMAACRLASKGKXMADSSYNLEVQNILSFLKMQHLNPDPQLIPEQIXXDIXPECLVSPRYLKKYKNKQEKGCKKHMPGYIRDLIXARILEAHQNVAQMSLIEAKMRFIQAWQSLPEFGIXHFIARFQGGKKEELIGIAYNRLIRMDASXGDAIKXWRFSNMKQWNVNWEIKMVXVEFADEVRLSFICXEVDCKVVHEFIGGYIFLSXRAKDQNESLDEEMFYKLXSGWV

SEQ ID NO: 9837 - protein, 133 aa, Homo sapiens
  MOD_RES (1)..(1): Any amino acid
  MOD_RES (20)..(21): Selenocysteine
  MOD_RES (24)..(24): Selenocysteine
  MOD_RES (43)..(43): Selenocysteine
  MOD_RES (78)..(78): Selenocysteine
  MOD_RES (107)..(107): Selenocysteine
  MOD_RES (113)..(113): Selenocysteine
XFLKMQHLNPDPQLIPEQIXXDIXPECLVSPRYLKKYKNKQIXARILEAHQNVAQMSLIEAKMRFIQAWQSLPEFGIXHFIARFQGGKKEELIGIAYNRLIRMDASXGDAIKXWRFSNMKQWNVNWEIKMVNS

SEQ ID NO: 9838 - protein, 286 aa, Homo sapiens
  MOD_RES (6)..(6): Selenocysteine
  MOD_RES (33)..(33): Selenocysteine
  MOD_RES (37)..(37): Selenocysteine
  MOD_RES (76)..(76): Selenocysteine
  MOD_RES (79)..(79): Selenocysteine
  MOD_RES (191)..(191): Selenocysteine
  MOD_RES (223)..(223): Selenocysteine
  MOD_RES (263)..(263): Selenocysteine
  MOD_RES (269)..(269): Selenocysteine
MAGMKXASGDYIDSSWELRVFVGEEDPEAESVXLRVXGESHIGGVLLKIVEQINRKQDWSDHAIWWEQKRQWLLQXHWXLDKYGILADARLFFGPQHRPVILRLPNRRALRLRASFSQPLFQAVAAICRLLSIRHPEELSLLRAPEKKEKKKKEKEPEEELYDLSKVVLAGGVAPALFRGMPAHFSDSAQXEACYHMLSRPQPPPDPLLLQRLPRPSSLSDKXQLHSRWLDSSRCLMQQGIKAGDALWLRFKYYSFFDLDPKXDPVRLXQLYEQARWDLLLEEIDC

SEQ ID NO: 9839 - protein, 663 aa, Homo sapiens
  MOD_RES (6)..(6): Selenocysteine
  MOD_RES (33)..(33): Selenocysteine
  MOD_RES (37)..(37): Selenocysteine
  MOD_RES (76)..(76): Selenocysteine
  MOD_RES (79)..(79): Selenocysteine
  MOD_RES (191)..(191): Selenocysteine
  MOD_RES (223)..(223): Selenocysteine
  MOD_RES (263)..(263): Selenocysteine
  MOD_RES (269)..(269): Selenocysteine
  MOD_RES (287)..(287): Selenocysteine
  MOD_RES (316)..(316): Selenocysteine
  MOD_RES (340)..(340): Selenocysteine
  MOD_RES (347)..(348): Selenocysteine
  MOD_RES (365)..(365): Selenocysteine
  MOD_RES (379)..(380): Selenocysteine
  MOD_RES (456)..(456): Selenocysteine
  MOD_RES (463)..(463): Selenocysteine
  MOD_RES (478)..(478): Selenocysteine
  MOD_RES (517)..(517): Selenocysteine
  MOD_RES (587)..(587): Selenocysteine
  MOD_RES (639)..(639): Selenocysteine
  MOD_RES (657)..(657): Selenocysteine
MAGMKXASGDYIDSSWELRVFVGEEDPEAESVXLRVXGESHIGGVLLKIVEQINRKQDWSDHAIWWEQKRQWLLQXHWXLDKYGILADARLFFGPQHRPVILRLPNRRALRLRASFSQPLFQAVAAICRLLSIRHPEELSLLRAPEKKEKKKKEKEPEEELYDLSKVVLAGGVAPALFRGMPAHFSDSAQXEACYHMLSRPQPPPDPLLLQRLPRPSSLSDKXQLHSRWLDSSRCLMQQGIKAGDALWLRFKYYSFFDLDPKXDPVRLXQLYEQARWDLLLEEIDCXEEEMMVFAALQYHINKLSQSGEVGEPAGXDPGLDDLDVALSNLEVKLEGSAPXDVLDSLXXIPELKDHLRIFRPRKLXLKGYRQHWVVFKEXXLSYYKSQDEAPGDPIQQLNLKGCEVVPDVNVSGQKFCIKLLVPSPEGMSEIYLRCQDEQQYARWMAGCRLASKGRXMADSSYXSEVQAILAFLSLQRXGSGGPGNHPHGPDASAEGLNPYGLVAPRFQRKFKAKQLXPRILEAHQNVAQLSLAEAQLRFIQAWQSLPDFGISYVMVRFKGSRKDEILGIANNRLIRIDLAVGDVVKXWRFSNMRQWNVNWDIRQVAIEFDEHINVAFSCVSASCRIVHEYIGGYIFLSXRERARGEELDEDLFLQLXGGHEAF

SEQ ID NO: 9840 - protein, 667 aa, Homo sapiens
  MOD_RES (6)..(6): Selenocysteine
  MOD_RES (33)..(33): Selenocysteine
  MOD_RES (37)..(37): Selenocysteine
  MOD_RES (76)..(76): Selenocysteine
  MOD_RES (79)..(79): Selenocysteine
  MOD_RES (191)..(191): Selenocysteine
  MOD_RES (223)..(223): Selenocysteine
  MOD_RES (263)..(263): Selenocysteine
  MOD_RES (269)..(269): Selenocysteine
  MOD_RES (287)..(287): Selenocysteine
  MOD_RES (316)..(316): Selenocysteine
  MOD_RES (340)..(340): Selenocysteine
  MOD_RES (347)..(348): Selenocysteine
  MOD_RES (369)..(369): Selenocysteine
  MOD_RES (383)..(384): Selenocysteine
  MOD_RES (460)..(460): Selenocysteine
  MOD_RES (467)..(467): Selenocysteine
  MOD_RES (482)..(482): Selenocysteine
  MOD_RES (521)..(521): Selenocysteine
  MOD_RES (591)..(591): Selenocysteine
  MOD_RES (643)..(643): Selenocysteine
  MOD_RES (661)..(661): Selenocysteine
MAGMKXASGDYIDSSWELRVFVGEEDPEAESVXLRVXGESHIGGVLLKIVEQINRKQDWSDHAIWWEQKRQWLLQXHWXLDKYGILADARLFFGPQHRPVILRLPNRRALRLRASFSQPLFQAVAAICRLLSIRHPEELSLLRAPEKKEKKKKEKEPEEELYDLSKVVLAGGVAPALFRGMPAHFSDSAQXEACYHMLSRPQPPPDPLLLQRLPRPSSLSDKXQLHSRWLDSSRCLMQQGIKAGDALWLRFKYYSFFDLDPKXDPVRLXQLYEQARWDLLLEEIDCXEEEMMVFAALQYHINKLSQSGEVGEPAGXDPGLDDLDVALSNLEVKLEGSAPXDVLDSLXXIPELKDHLRIFRIPRRPRKLXLKGYRQHWVVFKEXXLSYYKSQDEAPGDPIQQLNLKGCEVVPDVNVSGQKFCIKLLVPSPEGMSEIYLRCQDEQQYARWMAGCRLASKGRXMADSSYXSEVQAILAFLSLQRXGSGGPGNHPHGPDASAEGLNPYGLVAPRFQRKFKAKQLXPRILEAHQNVAQLSLAEAQLRFIQAWQSLPDFGISYVMVRFKGSRKDEILGIANNRLIRIDLAVGDVVKXWRFSNMRQWNVNWDIRQVAIEFDEHINVAFSCVSASCRIVHEYIGGYIFLSXRERARGEELDEDLFLQLXGGHEAF

SEQ ID NO: 9841 - protein, 81 aa, Homo sapiens
  MOD_RES (11)..(11): Selenocysteine
  MOD_RES (43)..(43): Selenocysteine
MPAHFSDSAQXEACYHMLSRPQPPPDPLLLQRLPRPSSLSDKXQLHSRWLDSSRCLMQQGIKAGDALWLRFKYYSFFDLDP

SEQ ID NO: 9842 - protein, 184 aa, Homo sapiens
  MOD_RES (22)..(22): Selenocysteine
  MOD_RES (25)..(25): Selenocysteine
  MOD_RES (48)..(49): Selenocysteine
  MOD_RES (51)..(51): Selenocysteine
  MOD_RES (61)..(61): Selenocysteine
  MOD_RES (63)..(63): Selenocysteine
  MOD_RES (108)..(108): Selenocysteine
  MOD_RES (160)..(160): Selenocysteine
  MOD_RES (178)..(178): Selenocysteine
SSSMPAGWLAAAWPPKAAPWPXAAXPARCRPSWPSSACSARAVGARAXXPXALMPLPRASXPXASLPPVSSESSRPSRFKGSRKDEILGIANNRLIRIDLAVGDVVKXWRFSNMRQWNVNWDIRQVAIEFDEHINVAFSCVSASCRIVHEYIGGYIFLSXRERARGEELDEDLFLQLXGGHEAF

SEQ ID NO: 9843 - protein, 42 aa, Homo sapiens
MGFSSELCSPQGHGVLQQMQEAELRLLEGMRKWMAQRVKSDR

SEQ ID NO: 9844 - protein, 115 aa, Homo sapiens
  MOD_RES (77)..(77): Selenocysteine
  MOD_RES (80)..(80): Selenocysteine
  MOD_RES (115)..(115): Selenocysteine
MGFSSELCSPQGHGVLQQMQEAELRLLEGMRKWMAQRVKSDREYAGLLHHMSLQDSGGQSRAISPDSPISQSWAEIXSQXEGLSRLLRQHAEDLNSGPLSKLSLLIRERQQLRKX

SEQ ID NO: 9845 - protein, 147 aa, Homo sapiens
  MOD_RES (77)..(77): Selenocysteine
  MOD_RES (80)..(80): Selenocysteine
  MOD_RES (115)..(115): Selenocysteine
  MOD_RES (128)..(128): Selenocysteine
  MOD_RES (130)..(130): Selenocysteine
MGFSSELCSPQGHGVLQQMQEAELRLLEGMRKWMAQRVKSDREYAGLLHHMSLQDSGGQSRAISPDSPISQSWAEIXSQXEGLSRLLRQHAEDLNSGPLSKLSLLIRERQQLRKXYSEQWQQLQQELXKXHSQDIEKLKSQYRALAR

SEQ ID NO: 9846 - protein, 169 aa, Homo sapiens
  MOD_RES (77)..(77): Selenocysteine
  MOD_RES (80)..(80): Selenocysteine
  MOD_RES (115)..(115): Selenocysteine
  MOD_RES (128)..(128): Selenocysteine
  MOD_RES (130)..(130): Selenocysteine
MGFSSELCSPQGHGVLQQMQEAELRLLEGMRKWMAQRVKSDREYAGLLHHMSLQDSGGQSRAISPDSPISQSWAEIXSQXEGLSRLLRQHAEDLNSGPLSKLSLLIRERQQLRKXYSEQWQQLQQELXKXHSQDIEKLKSQYRALARDSAQAKRKYQEASKDKDRDKAK

SEQ ID NO: 9847 - protein, 545 aa, Homo sapiens
  MOD_RES (77)..(77): Selenocysteine
  MOD_RES (80)..(80): Selenocysteine
  MOD_RES (115)..(115): Selenocysteine
  MOD_RES (128)..(128): Selenocysteine
  MOD_RES (130)..(130): Selenocysteine
  MOD_RES (279)..(279): Selenocysteine
  MOD_RES (302)..(302): Selenocysteine
  MOD_RES (309)..(309): Selenocysteine
  MOD_RES (311)..(311): Selenocysteine
  MOD_RES (314)..(314): Selenocysteine
  MOD_RES (321)..(321): Selenocysteine
  MOD_RES (332)..(332): Selenocysteine
  MOD_RES (345)..(345): Selenocysteine
  MOD_RES (386)..(386): Selenocysteine
  MOD_RES (409)..(409): Selenocysteine
  MOD_RES (421)..(421): Selenocysteine
  MOD_RES (423)..(423): Selenocysteine
  MOD_RES (518)..(518): Selenocysteine
  MOD_RES (526)..(526): Selenocysteine
  MOD_RES (528)..(528): Selenocysteine
  MOD_RES (543)..(544): Selenocysteine
MGFSSELCSPQGHGVLQQMQEAELRLLEGMRKWMAQRVKSDREYAGLLHHMSLQDSGGQSRAISPDSPISQSWAEIXSQXEGLSRLLRQHAEDLNSGPLSKLSLLIRERQQLRKXYSEQWQQLQQELXKXHSQDIEKLKSQYRALARDSAQAKRKYQEASKDKDRDKAKDKYVRSLWKLFAHHNRYVLGVRAAQLHHQHHHQLLLPGLLRSLQDLHEEMACILKEILQEYLEISSLVQDEVVAIHREMAAAAARIQPEAEYQGFLRQYGSAPDVPPCVXFDESLLEEGEPLEPGELQLNELXVESVQHXLXSVXDELAVAXEMVFRRQEMVXQLQQELRNEEENXHPRERVQLLGKRQVLQEALQGLQVALCSQAKLQAQQELLQXKLEHLGPGEPPPVLLLQDDRHSXSSSEQEREGGRXPXLEILKSHISGIFRPKFSLPPPLQLIPEVQKPLHEQLWYHGAIPRAEVAELLVHSGDFLVRESQGKQEYVLSVLWDGLPRHFIIQAHAPSEWRLLXPGPLPCRXCXDWKGKAFLAFLCSSXXY

SEQ ID NO: 9848 - protein, 752 aa, Homo sapiens
  MOD_RES (77)..(77): Selenocysteine
  MOD_RES (80)..(80): Selenocysteine
  MOD_RES (115)..(115): Selenocysteine
  MOD_RES (128)..(128): Selenocysteine
  MOD_RES (130)..(130): Selenocysteine
  MOD_RES (279)..(279): Selenocysteine
  MOD_RES (302)..(302): Selenocysteine
  MOD_RES (309)..(309): Selenocysteine
  MOD_RES (311)..(311): Selenocysteine
  MOD_RES (314)..(314): Selenocysteine
  MOD_RES (321)..(321): Selenocysteine
  MOD_RES (332)..(332): Selenocysteine
  MOD_RES (345)..(345): Selenocysteine
  MOD_RES (386)..(386): Selenocysteine
  MOD_RES (409)..(409): Selenocysteine
  MOD_RES (421)..(421): Selenocysteine
  MOD_RES (423)..(423): Selenocysteine
  MOD_RES (463)..(463): Selenocysteine
  MOD_RES (468)..(468): Selenocysteine
  MOD_RES (515)..(515): Selenocysteine
  MOD_RES (525)..(525): Selenocysteine
  MOD_RES (557)..(557): Selenocysteine
  MOD_RES (576)..(576): Selenocysteine
  MOD_RES (580)..(580): Selenocysteine
  MOD_RES (589)..(589): Selenocysteine
  MOD_RES (622)..(622): Selenocysteine
  MOD_RES (657)..(657): Selenocysteine
  MOD_RES (683)..(683): Selenocysteine
  MOD_RES (699)..(699): Selenocysteine
  MOD_RES (739)..(739): Selenocysteine
MGFSSELCSPQGHGVLQQMQEAELRLLEGMRKWMAQRVKSDREYAGLLHHMSLQDSGGQSRAISPDSPISQSWAEIXSQXEGLSRLLRQHAEDLNSGPLSKLSLLIRERQQLRKXYSEQWQQLQQELXKXHSQDIEKLKSQYRALARDSAQAKRKYQEASKDKDRDKAKDKYVRSLWKLFAHHNRYVLGVRAAQLHHQHHHQLLLPGLLRSLQDLHEEMACILKEILQEYLEISSLVQDEVVAIHREMAAAAARIQPEAEYQGFLRQYGSAPDVPPCVXFDESLLEEGEPLEPGELQLNELXVESVQHXLXSVXDELAVAXEMVFRRQEMVXQLQQELRNEEENXHPRERVQLLGKRQVLQEALQGLQVALCSQAKLQAQQELLQXKLEHLGPGEPPPVLLLQDDRHSXSSSEQEREGGRXPXLEILKSHISGIFRPKFSNLYRLEGEGFPSIPLLIDHLLSXQQPLXKKSGVVLHRAVPKDKWVLNHEDLVLGEQIGRGNFGEVFSGRLRADNXLVAVKSCREXLPPDLKAKFLQEARILKQYSHPNIVRLIGVCXQKQPIYIVMELVQGGDFLXFLRXEGARLRVKXLLQMVGDAAAGMEYLESKCCIHRDLAARNCLVXEKNVLKISDFGMSREEADGVYAASGGLRQVPVKWXAPEALNYGRYSSESDVWSFGILLWEXFSLGASPYPNLSNQQXREFVEKGGRLPCPELCPDAVFRLMEQCWAYEPGQRPSFSXIYQELQSIRKRHR

SEQ ID NO: 9849 - protein, 822 aa, Homo sapiens
  MOD_RES (77)..(77): Selenocysteine
  MOD_RES (80)..(80): Selenocysteine
  MOD_RES (115)..(115): Selenocysteine
  MOD_RES (128)..(128): Selenocysteine
  MOD_RES (130)..(130): Selenocysteine
  MOD_RES (279)..(279): Selenocysteine
  MOD_RES (302)..(302): Selenocysteine
  MOD_RES (309)..(309): Selenocysteine
  MOD_RES (311)..(311): Selenocysteine
  MOD_RES (314)..(314): Selenocysteine
  MOD_RES (321)..(321): Selenocysteine
  MOD_RES (332)..(332): Selenocysteine
  MOD_RES (345)..(345): Selenocysteine
  MOD_RES (386)..(386): Selenocysteine
  MOD_RES (409)..(409): Selenocysteine
  MOD_RES (421)..(421): Selenocysteine
  MOD_RES (423)..(423): Selenocysteine
  MOD_RES (533)..(533): Selenocysteine
  MOD_RES (538)..(538): Selenocysteine
  MOD_RES (585)..(585): Selenocysteine
  MOD_RES (595)..(595): Selenocysteine
  MOD_RES (627)..(627): Selenocysteine
  MOD_RES (646)..(646): Selenocysteine
  MOD_RES (650)..(650): Selenocysteine
  MOD_RES (659)..(659): Selenocysteine
  MOD_RES (692)..(692): Selenocysteine
  MOD_RES (727)..(727): Selenocysteine
  MOD_RES (753)..(753): Selenocysteine
  MOD_RES (769)..(769): Selenocysteine
  MOD_RES (809)..(809): Selenocysteine
MGFSSELCSPQGHGVLQQMQEAELRLLEGMRKWMAQRVKSDREYAGLLHHMSLQDSGGQSRAISPDSPISQSWAEIXSQXEGLSRLLRQHAEDLNSGPLSKLSLLIRERQQLRKXYSEQWQQLQQELXKXHSQDIEKLKSQYRALARDSAQAKRKYQEASKDKDRDKAKDKYVRSLWKLFAHHNRYVLGVRAAQLHHQHHHQLLLPGLLRSLQDLHEEMACILKEILQEYLEISSLVQDEVVAIHREMAAAAARIQPEAEYQGFLRQYGSAPDVPPCVXFDESLLEEGEPLEPGELQLNELXVESVQHXLXSVXDELAVAXEMVFRRQEMVXQLQQELRNEEENXHPRERVQLLGKRQVLQEALQGLQVALCSQAKLQAQQELLQXKLEHLGPGEPPPVLLLQDDRHSXSSSEQEREGGRXPXLEILKSHISGIFRPKFSLPPPLQLIPEVQKPLHEQLWYHGAIPRAEVAELLVHSGDFLVRESQGKQEYVLSVLWDGLPRHFIIQSLDNLYRLEGEGFPSIPLLIDHLLSXQQPLXKKSGVVLHRAVPKDKWVLNHEDLVLGEQIGRGNFGEVFSGRLRADNXLVAVKSCREXLPPDLKAKFLQEARILKQYSHPNIVRLIGVCXQKQPIYIVMELVQGGDFLXFLRXEGARLRVKXLLQMVGDAAAGMEYLESKCCIHRDLAARNCLVXEKNVLKISDFGMSREEADGVYAASGGLRQVPVKWXAPEALNYGRYSSESDVWSFGILLWEXFSLGASPYPNLSNQQXREFVEKGGRLPCPELCPDAVFRLMEQCWAYEPGQRPSFSXIYQELQSIRKRHR

SEQ ID NO: 9850 - protein, 681 aa, Homo sapiens
  MOD_RES (72)..(72): Selenocysteine
  MOD_RES (221)..(221): Selenocysteine
  MOD_RES (244)..(244): Selenocysteine
  MOD_RES (251)..(251): Selenocysteine
  MOD_RES (253)..(253): Selenocysteine
  MOD_RES (256)..(256): Selenocysteine
  MOD_RES (263)..(263): Selenocysteine
  MOD_RES (274)..(274): Selenocysteine
  MOD_RES (287)..(287): Selenocysteine
  MOD_RES (328)..(328): Selenocysteine
  MOD_RES (351)..(351): Selenocysteine
  MOD_RES (363)..(363): Selenocysteine
  MOD_RES (365)..(365): Selenocysteine
  MOD_RES (405)..(405): Selenocysteine
  MOD_RES (410)..(410): Selenocysteine
  MOD_RES (457)..(457): Selenocysteine
  MOD_RES (467)..(467): Selenocysteine
  MOD_RES (486)..(486): Selenocysteine
  MOD_RES (505)..(505): Selenocysteine
  MOD_RES (509)..(509): Selenocysteine
  MOD_RES (518)..(518): Selenocysteine
  MOD_RES (551)..(551): Selenocysteine
  MOD_RES (586)..(586): Selenocysteine
  MOD_RES (612)..(612): Selenocysteine
  MOD_RES (628)..(628): Selenocysteine
  MOD_RES (668)..(668): Selenocysteine
MGFSSELCSPQGHGVLQQMQEAELRLLEGMRKWMAQRVKSDREYAGLLHHMSLQDSGGQSRAISPDSPISQXHSQDIEKLKSQYRALARDSAQAKRKYQEASKDKDRDKAKDKYVRSLWKLFAHHNRYVLGVRAAQLHHQHHHQLLLPGLLRSLQDLHEEMACILKEILQEYLEISSLVQDEVVAIHREMAAAAARIQPEAEYQGFLRQYGSAPDVPPCVXFDESLLEEGEPLEPGELQLNELXVESVQHXLXSVXDELAVAXEMVFRRQEMVXQLQQELRNEEENXHPRERVQLLGKRQVLQEALQGLQVALCSQAKLQAQQELLQXKLEHLGPGEPPPVLLLQDDRHSXSSSEQEREGGRXPXLEILKSHISGIFRPKFSNLYRLEGEGFPSIPLLIDHLLSXQQPLXKKSGVVLHRAVPKDKWVLNHEDLVLGEQIGRGNFGEVFSGRLRADNXLVAVKSCREXLPPDLKAKFLQEARSSPSXSSWSLCRGSSPPAGGDFLXFLRXEGARLRVKXLLQMVGDAAAGMEYLESKCCIHRDLAARNCLVXEKNVLKISDFGMSREEADGVYAASGGLRQVPVKWXAPEALNYGRYSSESDVWSFGILLWEXFSLGASPYPNLSNQQXREFVEKGGRLPCPELCPDAVFRLMEQCWAYEPGQRPSFSXIYQELQSIRKRHR

SEQ ID NO: 9851 - protein, 694 aa, Homo sapiens
  MOD_RES (72)..(72): Selenocysteine
  MOD_RES (221)..(221): Selenocysteine
  MOD_RES (244)..(244): Selenocysteine
  MOD_RES (251)..(251): Selenocysteine
  MOD_RES (253)..(253): Selenocysteine
  MOD_RES (256)..(256): Selenocysteine
  MOD_RES (263)..(263): Selenocysteine
  MOD_RES (274)..(274): Selenocysteine
  MOD_RES (287)..(287): Selenocysteine
  MOD_RES (328)..(328): Selenocysteine
  MOD_RES (351)..(351): Selenocysteine
  MOD_RES (363)..(363): Selenocysteine
  MOD_RES (365)..(365): Selenocysteine
  MOD_RES (405)..(405): Selenocysteine
  MOD_RES (410)..(410): Selenocysteine
  MOD_RES (457)..(457): Selenocysteine
  MOD_RES (467)..(467): Selenocysteine
  MOD_RES (499)..(499): Selenocysteine
  MOD_RES (518)..(518): Selenocysteine
  MOD_RES (522)..(522): Selenocysteine
  MOD_RES (531)..(531): Selenocysteine
  MOD_RES (564)..(564): Selenocysteine
  MOD_RES (599)..(599): Selenocysteine
  MOD_RES (625)..(625): Selenocysteine
  MOD_RES (641)..(641): Selenocysteine
  MOD_RES (681)..(681): Selenocysteine
MGFSSELCSPQGHGVLQQMQEAELRLLEGMRKWMAQRVKSDREYAGLLHHMSLQDSGGQSRAISPDSPISQXHSQDIEKLKSQYRALARDSAQAKRKYQEASKDKDRDKAKDKYVRSLWKLFAHHNRYVLGVRAAQLHHQHHHQLLLPGLLRSLQDLHEEMACILKEILQEYLEISSLVQDEVVAIHREMAAAAARIQPEAEYQGFLRQYGSAPDVPPCVXFDESLLEEGEPLEPGELQLNELXVESVQHXLXSVXDELAVAXEMVFRRQEMVXQLQQELRNEEENXHPRERVQLLGKRQVLQEALQGLQVALCSQAKLQAQQELLQXKLEHLGPGEPPPVLLLQDDRHSXSSSEQEREGGRXPXLEILKSHISGIFRPKFSNLYRLEGEGFPSIPLLIDHLLSXQQPLXKKSGVVLHRAVPKDKWVLNHEDLVLGEQIGRGNFGEVFSGRLRADNXLVAVKSCREXLPPDLKAKFLQEARILKQYSHPNIVRLIGVCXQKQPIYIVMELVQGGDFLXFLRXEGARLRVKXLLQMVGDAAAGMEYLESKCCIHRDLAARNCLVXEKNVLKISDFGMSREEADGVYAASGGLRQVPVKWXAPEALNYGRYSSESDVWSFGILLWEXFSLGASPYPNLSNQQXREFVEKGGRLPCPELCPDAVFRLMEQCWAYEPGQRPSFSXIYQELQSIRKRHR

SEQ ID NO: 9852 - protein, 764 aa, Homo sapiens
  MOD_RES (72)..(72): Selenocysteine
  MOD_RES (221)..(221): Selenocysteine
  MOD_RES (244)..(244): Selenocysteine
  MOD_RES (251)..(251): Selenocysteine
  MOD_RES (253)..(253): Selenocysteine
  MOD_RES (256)..(256): Selenocysteine
  MOD_RES (263)..(263): Selenocysteine
  MOD_RES (274)..(274): Selenocysteine
  MOD_RES (287)..(287): Selenocysteine
  MOD_RES (328)..(328): Selenocysteine
  MOD_RES (351)..(351): Selenocysteine
  MOD_RES (363)..(363): Selenocysteine
  MOD_RES (365)..(365): Selenocysteine
  MOD_RES (475)..(475): Selenocysteine
  MOD_RES (480)..(480): Selenocysteine
  MOD_RES (527)..(527): Selenocysteine
  MOD_RES (537)..(537): Selenocysteine
  MOD_RES (569)..(569): Selenocysteine
  MOD_RES (588)..(588): Selenocysteine
  MOD_RES (592)..(592): Selenocysteine
  MOD_RES (601)..(601): Selenocysteine
  MOD_RES (634)..(634): Selenocysteine
  MOD_RES (669)..(669): Selenocysteine
  MOD_RES (695)..(695): Selenocysteine
  MOD_RES (711)..(711): Selenocysteine
  MOD_RES (751)..(751): Selenocysteine
MGFSSELCSPQGHGVLQQMQEAELRLLEGMRKWMAQRVKSDREYAGLLHHMSLQDSGGQSRAISPDSPISQXHSQDIEKLKSQYRALARDSAQAKRKYQEASKDKDRDKAKDKYVRSLWKLFAHHNRYVLGVRAAQLHHQHHHQLLLPGLLRSLQDLHEEMACILKEILQEYLEISSLVQDEVVAIHREMAAAAARIQPEAEYQGFLRQYGSAPDVPPCVXFDESLLEEGEPLEPGELQLNELXVESVQHXLXSVXDELAVAXEMVFRRQEMVXQLQQELRNEEENXHPRERVQLLGKRQVLQEALQGLQVALCSQAKLQAQQELLQXKLEHLGPGEPPPVLLLQDDRHSXSSSEQEREGGRXPXLEILKSHISGIFRPKFSLPPPLQLIPEVQKPLHEQLWYHGAIPRAEVAELLVHSGDFLVRESQGKQEYVLSVLWDGLPRHFIIQSLDNLYRLEGEGFPSIPLLIDHLLSXQQPLXKKSGVVLHRAVPKDKWVLNHEDLVLGEQIGRGNFGEVFSGRLRADNXLVAVKSCREXLPPDLKAKFLQEARILKQYSHPNIVRLIGVCXQKQPIYIVMELVQGGDFLXFLRXEGARLRVKXLLQMVGDAAAGMEYLESKCCIHRDLAARNCLVXEKNVLKISDFGMSREEADGVYAASGGLRQVPVKWXAPEALNYGRYSSESDVWSFGILLWEXFSLGASPYPNLSNQQXREFVEKGGRLPCPELCPDAVFRLMEQCWAYEPGQRPSFSXIYQELQSIRKRHR

SEQ ID NO: 9853 - protein, 121 aa, Homo sapiens
  MOD_RES (77)..(77): Selenocysteine
MGFSSELCSPQGHGVLQQMQEAELRLLEGMRKWMAQRVKSDREYAGLLHHMSLQDSGGQSRAISPDSPISQVGLYGXLVGAGCICLLLPLLGALWGSGWRSGRPMLGSHCAPLPASPICAV

SEQ ID NO: 9854 - protein, 238 aa, Homo sapiens
  MOD_RES (78)..(78): Selenocysteine
  MOD_RES (203)..(203): Selenocysteine
  MOD_RES (208)..(208): Selenocysteine
MRQSGASQPLLINMYLPDPVGDGLFKDGKNPSWGPLSPAVQKGSGQIQLWQFLLELLADRANAGCIAWEGGHGEFKLXDPDEVARRWGERKSKPNMNYDKLSRALRYYYDKNIMSKVHGKRYAYRFDFQGLAQACQPPPAHAHAAAAAAAAAAAAQDGALYKLPAGLAPLPFPGLSKLNLMAASAGVAPAGFSYWPGPGPAAXAAAAXAALYPSPSLQPPPGPFGAVAAASHLGGHYH

SEQ ID NO: 9855 - protein, 305 aa, Homo sapiens
  MOD_RES (74)..(74): Selenocysteine
  MOD_RES (80)..(80): Selenocysteine
  MOD_RES (95)..(95): Selenocysteine
  MOD_RES (111)..(111): Selenocysteine
  MOD_RES (113)..(113): Selenocysteine
  MOD_RES (118)..(118): Selenocysteine
  MOD_RES (134)..(134): Selenocysteine
  MOD_RES (161)..(161): Selenocysteine
  MOD_RES (184)..(184): Selenocysteine
  MOD_RES (186)..(186): Selenocysteine
  MOD_RES (200)..(200): Selenocysteine
  MOD_RES (206)..(206): Selenocysteine
  MOD_RES (230)..(230): Selenocysteine
  MOD_RES (276)..(276): Selenocysteine
  MOD_RES (301)..(301): Selenocysteine
MAADGDWQDFYEFQEPARSLLDQENCNASPEPGAEAGAEAGGGADGFPAPACSLEEKLSLCFRPSDPGAEPPRXAVRPIXERSLLQGDEIWNALXDNYGNVMPVDWKSSHXRXLHLLXLNLSEKGVSDSLLFDXSDDEELREQLDMHSIIVSCVNDEPLFXADQVIEEIEEMMQESPDPEDDEXPXQSDRLSMLSQEIQXLKRSSXGSYEERVKRLSVSELNEILEEIEXAIKEYSEELVQQLALRDELEFEKEVKNSFISVLIEVQNKQKEHKEXAKKKKKLKNGSSQNGKNERSHMPGXFFVP

SEQ ID NO: 9856 - protein, 353 aa, Homo sapiens
  MOD_RES (74)..(74): Selenocysteine
  MOD_RES (80)..(80): Selenocysteine
  MOD_RES (95)..(95): Selenocysteine
  MOD_RES (111)..(111): Selenocysteine
  MOD_RES (113)..(113): Selenocysteine
  MOD_RES (118)..(118): Selenocysteine
  MOD_RES (134)..(134): Selenocysteine
  MOD_RES (161)..(161): Selenocysteine
  MOD_RES (184)..(184): Selenocysteine
  MOD_RES (186)..(186): Selenocysteine
  MOD_RES (200)..(200): Selenocysteine
  MOD_RES (206)..(206): Selenocysteine
  MOD_RES (230)..(230): Selenocysteine
  MOD_RES (276)..(276): Selenocysteine
  MOD_RES (301)..(301): Selenocysteine
  MOD_RES (304)..(305): Selenocysteine
  MOD_RES (325)..(325): Selenocysteine
  MOD_RES (343)..(343): Selenocysteine
  MOD_RES (353)..(353): Selenocysteine
MAADGDWQDFYEFQEPARSLLDQENCNASPEPGAEAGAEAGGGADGFPAPACSLEEKLSLCFRPSDPGAEPPRXAVRPIXERSLLQGDEIWNALXDNYGNVMPVDWKSSHXRXLHLLXLNLSEKGVSDSLLFDXSDDEELREQLDMHSIIVSCVNDEPLFXADQVIEEIEEMMQESPDPEDDEXPXQSDRLSMLSQEIQXLKRSSXGSYEERVKRLSVSELNEILEEIEXAIKEYSEELVQQLALRDELEFEKEVKNSFISVLIEVQNKQKEHKEXAKKKKKLKNGSSQNGKNERSHMPGXYLXXVIPYEKKNGPPSVEDLQILXKILRAMKEDSEKVPSLLXDYILKVLCPX

SEQ ID NO: 9857 - protein, 380 aa, Homo sapiens
  MOD_RES (74)..(74): Selenocysteine
  MOD_RES (80)..(80): Selenocysteine
  MOD_RES (95)..(95): Selenocysteine
  MOD_RES (111)..(111): Selenocysteine
  MOD_RES (113)..(113): Selenocysteine
  MOD_RES (118)..(118): Selenocysteine
  MOD_RES (134)..(134): Selenocysteine
  MOD_RES (161)..(161): Selenocysteine
  MOD_RES (184)..(184): Selenocysteine
  MOD_RES (186)..(186): Selenocysteine
  MOD_RES (200)..(200): Selenocysteine
  MOD_RES (206)..(206): Selenocysteine
  MOD_RES (230)..(230): Selenocysteine
  MOD_RES (276)..(276): Selenocysteine
  MOD_RES (301)..(301): Selenocysteine
  MOD_RES (319)..(319): Selenocysteine
  MOD_RES (331)..(332): Selenocysteine
  MOD_RES (352)..(352): Selenocysteine
  MOD_RES (370)..(370): Selenocysteine
  MOD_RES (380)..(380): Selenocysteine
MAADGDWQDFYEFQEPARSLLDQENCNASPEPGAEAGAEAGGGADGFPAPACSLEEKLSLCFRPSDPGAEPPRXAVRPIXERSLLQGDEIWNALXDNYGNVMPVDWKSSHXRXLHLLXLNLSEKGVSDSLLFDXSDDEELREQLDMHSIIVSCVNDEPLFXADQVIEEIEEMMQESPDPEDDEXPXQSDRLSMLSQEIQXLKRSSXGSYEERVKRLSVSELNEILEEIEXAIKEYSEELVQQLALRDELEFEKEVKNSFISVLIEVQNKQKEHKEXAKKKKKLKNGSSQNGKNERSHMPGXRFSMEGISNVIQNGLRHXFGNSGGEKQYLXXVIPYEKKNGPPSVEDLQILXKILRAMKEDSEKVPSLLXDYILKVLCPX

SEQ ID NO: 9858 - protein, 182 aa, Homo sapiens
  MOD_RES (13)..(13): Selenocysteine
  MOD_RES (15)..(15): Selenocysteine
  MOD_RES (29)..(29): Selenocysteine
  MOD_RES (35)..(35): Selenocysteine
  MOD_RES (59)..(59): Selenocysteine
  MOD_RES (105)..(105): Selenocysteine
  MOD_RES (130)..(130): Selenocysteine
  MOD_RES (133)..(134): Selenocysteine
  MOD_RES (154)..(154): Selenocysteine
  MOD_RES (172)..(172): Selenocysteine
  MOD_RES (182)..(182): Selenocysteine
MMQESPDPEDDEXPXQSDRLSMLSQEIQXLKRSSXGSYEERVKRLSVSELNEILEEIEXAIKEYSEELVQQLALRDELEFEKEVKNSFISVLIEVQNKQKEHKEXAKKKKKLKNGSSQNGKNERSHMPGXYLXXVIPYEKKNGPPSVEDLQILXKILRAMKEDSEKVPSLLXDYILKVLCPX

SEQ ID NO: 9859 - protein, 63 aa, Homo sapiens
  MOD_RES (10)..(10): Selenocysteine
  MOD_RES (12)..(12): Selenocysteine
  MOD_RES (17)..(17): Selenocysteine
  MOD_RES (33)..(33): Selenocysteine
  MOD_RES (60)..(60): Selenocysteine
MPVDWKSSHXRXLHLLXLNLSEKGVSDSLLFDXSDDEELREQLDMHSIIVSCVNDEPLFXADQ

SEQ ID NO: 9860 - protein, 246 aa, Homo sapiens
  MOD_RES (10)..(10): Selenocysteine
  MOD_RES (12)..(12): Selenocysteine
  MOD_RES (17)..(17): Selenocysteine
  MOD_RES (33)..(33): Selenocysteine
  MOD_RES (60)..(60): Selenocysteine
  MOD_RES (83)..(83): Selenocysteine
  MOD_RES (85)..(85): Selenocysteine
  MOD_RES (99)..(99): Selenocysteine
  MOD_RES (105)..(105): Selenocysteine
  MOD_RES (129)..(129): Selenocysteine
  MOD_RES (175)..(175): Selenocysteine
  MOD_RES (200)..(200): Selenocysteine
  MOD_RES (203)..(204): Selenocysteine
  MOD_RES (224)..(224): Selenocysteine
  MOD_RES (242)..(242): Selenocysteine
MPVDWKSSHXRXLHLLXLNLSEKGVSDSLLFDXSDDEELREQLDMHSIIVSCVNDEPLFXADQVIEEIEEMMQESPDPEDDEXPXQSDRLSMLSQEIQXLKRSSXGSYEERVKRLSVSELNEILEEIEXAIKEYSEELVQQLALRDELEFEKEVKNSFISVLIEVQNKQKEHKEXAKKKKKLKNGSSQNGKNERSHMPGXYLXXVIPYEKKNGPPSVEDLQILXKILRAMKEDSEKVPSLLXDYIL

SEQ ID NO: 9861 - protein, 138 aa, Homo sapiens
  MOD_RES (1)..(1): Any amino acid
  MOD_RES (8)..(8): Selenocysteine
  MOD_RES (54)..(54): Selenocysteine
  MOD_RES (79)..(79): Selenocysteine
  MOD_RES (82)..(83): Selenocysteine
  MOD_RES (103)..(103): Selenocysteine
  MOD_RES (121)..(121): Selenocysteine
  MOD_RES (131)..(131): Selenocysteine
XILEEIEXAIKEYSEELVQQLALRDELEFEKEVKNSFISVLIEVQNKQKEHKEXAKKKKKLKNGSSQNGKNERSHMPGXYLXXVIPYEKKNGPPSVEDLQILXKILRAMKEDSEKVPSLLXDYILKEPIAXICEQMKP

SEQ ID NO: 9862 - protein, 70 aa, Homo sapiens
  MOD_RES (1)..(1): Any amino acid
  MOD_RES (12)..(12): Selenocysteine
  MOD_RES (24)..(25): Selenocysteine
  MOD_RES (45)..(45): Selenocysteine
  MOD_RES (63)..(63): Selenocysteine
XSNVIQNGLRHXFGNSGGEKQYLXXVIPYEKKNGPPSVEDLQILXKILRAMKEDSEKVPSLLXDYILKGL

SEQ ID NO: 9863 - protein, 183 aa, Homo sapiens
  MOD_RES (1)..(1): Any amino acid
  MOD_RES (2)..(2): Selenocysteine
  MOD_RES (8)..(8): Selenocysteine
  MOD_RES (32)..(32): Selenocysteine
  MOD_RES (78)..(78): Selenocysteine
  MOD_RES (103)..(103): Selenocysteine
  MOD_RES (106)..(107): Selenocysteine
  MOD_RES (127)..(127): Selenocysteine
  MOD_RES (173)..(173): Selenocysteine
  MOD_RES (183)..(183): Selenocysteine
XXLKRSSXGSYEERVKRLSVSELNEILEEIEXAIKEYSEELVQQLALRDELEFEKEVKNSFISVLIEVQNKQKEHKEXAKKKKKLKNGSSQNGKNERSHMPGXYLXXVIPYEKKNGPPSVEDLQILXKKRRLLVNNPVPLFLSPLFGNFKSGKQLSVLRAMKEDSEKVPSLLXDYILKVLCPX

SEQ ID NO: 9864 - protein, 35 aa, Homo sapiens
  MOD_RES (9)..(10): Selenocysteine
  MOD_RES (15)..(15): Selenocysteine
  MOD_RES (25)..(25): Selenocysteine
MDSSCHNAXXKMLAXAPARGNMMSXSKPLAFSIER

SEQ ID NO: 9865 - protein, 425 aa, Homo sapiens
  MOD_RES (9)..(10): Selenocysteine
  MOD_RES (15)..(15): Selenocysteine
  MOD_RES (25)..(25): Selenocysteine
  MOD_RES (40)..(40): Selenocysteine
  MOD_RES (84)..(84): Selenocysteine
  MOD_RES (91)..(91): Selenocysteine
  MOD_RES (146)..(146): Selenocysteine
  MOD_RES (195)..(195): Selenocysteine
  MOD_RES (211)..(211): Selenocysteine
  MOD_RES (226)..(226): Selenocysteine
  MOD_RES (233)..(233): Selenocysteine
  MOD_RES (252)..(252): Selenocysteine
  MOD_RES (261)..(261): Selenocysteine
  MOD_RES (280)..(280): Selenocysteine
  MOD_RES (283)..(283): Selenocysteine
  MOD_RES (285)..(285): Selenocysteine
  MOD_RES (315)..(315): Selenocysteine
  MOD_RES (338)..(338): Selenocysteine
  MOD_RES (343)..(343): Selenocysteine
  MOD_RES (351)..(351): Selenocysteine
  MOD_RES (354)..(354): Selenocysteine
  MOD_RES (382)..(382): Selenocysteine
  MOD_RES (389)..(389): Selenocysteine
  MOD_RES (402)..(402): Selenocysteine
  MOD_RES (412)..(412): Selenocysteine
MDSSCHNAXXKMLAXAPARGNMMSXSKPLAFSIERIMARXPEPKALPVPHFLQGALPKGEPKHSLHLNSSIPCMIPFVPVAYDXSPKAGVXGSEPRKASLEAPAAPAAVPSAPAFSCSDLLNCALSLKGDLARDALPLQQYKLPKXYLAERNKLVVPAVEKYPSGVAFKDLSQAQLQHYMKESAQLLSEKIAFKXSDFSRGSPNAKPKVFXCEVCGKVFNAHYNLXRHMPVHXGARPFVCKVCGKGFRQASXLCRHKIIHXQEKPHKCNQCGKAFNRSSXLNXHXRIHAGYKPFVCEFCGKGFHQKGNYKNHKLXHSGEKQFKCNICNKAFHQVYNLXFHMHXHNDKKPFXCPXCGKGFCRNFDLKKHVRKLHDSSLGLARXPAGEPGXEPPPPLPQQPPMXLPPLQPPLPXPGPLQPGLHQGHQ

SEQ ID NO: 9866 - protein, 475 aa, Homo sapiens
  MOD_RES (9)..(10): Selenocysteine
  MOD_RES (15)..(15): Selenocysteine
  MOD_RES (25)..(25): Selenocysteine
  MOD_RES (40)..(40): Selenocysteine
  MOD_RES (84)..(84): Selenocysteine
  MOD_RES (91)..(91): Selenocysteine
  MOD_RES (196)..(196): Selenocysteine
  MOD_RES (245)..(245): Selenocysteine
  MOD_RES (261)..(261): Selenocysteine
  MOD_RES (276)..(276): Selenocysteine
  MOD_RES (283)..(283): Selenocysteine
  MOD_RES (302)..(302): Selenocysteine
  MOD_RES (311)..(311): Selenocysteine
  MOD_RES (330)..(330): Selenocysteine
  MOD_RES (333)..(333): Selenocysteine
  MOD_RES (335)..(335): Selenocysteine
  MOD_RES (365)..(365): Selenocysteine
  MOD_RES (388)..(388): Selenocysteine
  MOD_RES (393)..(393): Selenocysteine
  MOD_RES (401)..(401): Selenocysteine
  MOD_RES (404)..(404): Selenocysteine
  MOD_RES (432)..(432): Selenocysteine
  MOD_RES (439)..(439): Selenocysteine
  MOD_RES (452)..(452): Selenocysteine
  MOD_RES (462)..(462): Selenocysteine
MDSSCHNAXXKMLAXAPARGNMMSXSKPLAFSIERIMARXPEPKALPVPHFLQGALPKGEPKHSLHLNSSIPCMIPFVPVAYDXSPKAGVXGSEPRKASLEAPAAPAAVPSAPAFSCSDLLNCALSLKGDLARDALPLQQYKLVRPRVVNHSSFHAMGALCYLNRGDGPCHPAAGVNIHPVASYFLSSPLHPQPKXYLAERNKLVVPAVEKYPSGVAFKDLSQAQLQHYMKESAQLLSEKIAFKXSDFSRGSPNAKPKVFXCEVCGKVFNAHYNLXRHMPVHXGARPFVCKVCGKGFRQASXLCRHKIIHXQEKPHKCNQCGKAFNRSSXLNXHXRIHAGYKPFVCEFCGKGFHQKGNYKNHKLXHSGEKQFKCNICNKAFHQVYNLXFHMHXHNDKKPFXCPXCGKGFCRNFDLKKHVRKLHDSSLGLARXPAGEPGXEPPPPLPQQPPMXLPPLQPPLPXPGPLQPGLHQGHQ

SEQ ID NO: 9867 - protein, 459 aa, Homo sapiens
  MOD_RES (9)..(9): Selenocysteine
  MOD_RES (24)..(24): Selenocysteine
  MOD_RES (27)..(27): Selenocysteine
  MOD_RES (39)..(39): Selenocysteine
  MOD_RES (87)..(87): Selenocysteine
  MOD_RES (129)..(129): Selenocysteine
  MOD_RES (178)..(178): Selenocysteine
  MOD_RES (253)..(253): Selenocysteine
  MOD_RES (278)..(278): Selenocysteine
  MOD_RES (293)..(293): Selenocysteine
  MOD_RES (300)..(300): Selenocysteine
  MOD_RES (319)..(319): Selenocysteine
  MOD_RES (328)..(328): Selenocysteine
  MOD_RES (347)..(347): Selenocysteine
  MOD_RES (350)..(350): Selenocysteine
  MOD_RES (382)..(382): Selenocysteine
  MOD_RES (392)..(392): Selenocysteine
  MOD_RES (405)..(405): Selenocysteine
  MOD_RES (410)..(410): Selenocysteine
  MOD_RES (418)..(418): Selenocysteine
  MOD_RES (421)..(421): Selenocysteine
  MOD_RES (454)..(454): Selenocysteine
  MOD_RES (456)..(456): Selenocysteine
MASSASLEXMVPPACPRAGASPAXSKXLAFSIERIMAKXSEPRAPFEPRPGALEADGSQGKKLLNLCSPLPCMIPLQPLGYEVPSKXLLSYSELWKSSLRAGGGGGGGGGGGGGGGGAPVCGASGLCKXNCGVCCKAELGLAPSALPAGRVIKPQVINQAVGLPASGSLYYFNYLDSXAYPPSELLSGHLFPSGLLNAQAPAALAAHPKLFLLENAKLAGLAADKFPHPAPYPHKERLPAPLEQVLKENSALXAERGGVKGHSKLPGGSADGKPKNFXCEVCGKVFNAHYNLXRHMPVHXGARPFVCKVCGKGFRQASXLCRHKIIHXQEKPHKCNQCGKAFNRSSXLNXHIRIHAGYKPFVCEFCGKGFHQKGNYKNHKLXHSGEKQYKCXICNKAFHQVYNLXFHMHXHNDKKPFXCAXCGKGFCRNFDLKKHVRKLHDSVGPAAPSAKDLXRXVQS

SEQ ID NO: 9868 - protein, 300 aa, Homo sapiens
  MOD_RES (31)..(31): Selenocysteine
  MOD_RES (39)..(39): Selenocysteine
  MOD_RES (56)..(56): Selenocysteine
  MOD_RES (156)..(156): Selenocysteine
  MOD_RES (162)..(162): Selenocysteine
  MOD_RES (198)..(198): Selenocysteine
  MOD_RES (215)..(215): Selenocysteine
  MOD_RES (232)..(232): Selenocysteine
  MOD_RES (264)..(264): Selenocysteine
  MOD_RES (276)..(276): Selenocysteine
  MOD_RES (287)..(287): Selenocysteine
  MOD_RES (293)..(293): Selenocysteine
MDLPPQLSFGLYVAAFALGFPLNVLAIRGAXAHARLRLXPSLVYALNLGCSDLLLXVSLPLKAVEALASGAWPLPASLCPVFAVAHFFPLYAGGGFLAALSAGRYLGAAFPLGYQAFRRPCYSWGVCAAIWALVLCHLGLVFGLEAPGGWLDHSNXSLGINXPVNGSPVCLEAWDPASAGPARFSLSLLLFFLPLAIXAFCYVGCLRALARSGLXHRRKLRAAWVAGGALLXLLLCVGPYNASNVASFLYPNLGGSWRKLGLIXGAWSVVLNPLVXGYLGRGPGLKXVCAARXQGGKSQK

SEQ ID NO: 9869 - protein, 330 aa, Homo sapiens
  MOD_RES (20)..(20): Selenocysteine
  MOD_RES (52)..(52): Selenocysteine
  MOD_RES (85)..(85): Selenocysteine
  MOD_RES (97)..(97): Selenocysteine
  MOD_RES (142)..(142): Selenocysteine
  MOD_RES (152)..(153): Selenocysteine
  MOD_RES (163)..(163): Selenocysteine
  MOD_RES (169)..(169): Selenocysteine
  MOD_RES (195)..(195): Selenocysteine
  MOD_RES (227)..(227): Selenocysteine
  MOD_RES (306)..(306): Selenocysteine
  MOD_RES (310)..(310): Selenocysteine
  MOD_RES (328)..(329): Selenocysteine
MLPDWKSSLILMAYIIIFLXGLPANLLALRAFVGRIRQPQPAPVHILLLSLXLADLLLLLLLPFKIIEAASNFRWYLPKVVCALXSFGFYSSIYCSXWLLAGISIERYLGVAFPVQYKLSRRPLYGVIAALVAWVMSFGHCXIVIIVQYLNXXEQVRSGNEIXCYENFXDNQLDVVLPVRLELCLVLFFIPMAVXIFCYWRFVWIMLSQPLVGAQRRRRAVGLAVVXLLNFLVCFGPYNVSHLVGYHQRKSPWWRSIAVVFSSLNASLDPLLFYFSSSVVRRAFGRGLQVLRNQGSSLLGRRGKDXAEGXNEDRGVGQGEGMPSSDFXXE

SEQ ID NO: 9870 - protein, 346 aa, Homo sapiens
  MOD_RES (3)..(3): Selenocysteine
  MOD_RES (24)..(24): Selenocysteine
  MOD_RES (58)..(58): Selenocysteine
  MOD_RES (97)..(98): Selenocysteine
  MOD_RES (102)..(102): Selenocysteine
  MOD_RES (125)..(125): Selenocysteine
  MOD_RES (165)..(165): Selenocysteine
  MOD_RES (168)..(168): Selenocysteine
  MOD_RES (200)..(200): Selenocysteine
  MOD_RES (230)..(230): Selenocysteine
  MOD_RES (262)..(262): Selenocysteine
  MOD_RES (266)..(266): Selenocysteine
  MOD_RES (328)..(328): Selenocysteine
  MOD_RES (337)..(337): Selenocysteine
MDXGPDQSYFSGNHWFVFSVYLLXFLVGLPLNLLALVVFVGKLQRRPVAVDVLLLNLXASDLLLLLFLPFRMVEAANGMHWPLPFILCPLSGFIFFXXIYLXALFLAAVSIERFLSVAHPLWYKXRPRLGQAGLVSVACWLLASAHCSVVYVIEFSGDISHSQGXNGXCYLEFRKDQLAILLPVRLEMAVVLFVVPLIIXSYCYSRLVWILGRGGSHRRQRRVAGLLAAXLLNFLVCFGPYNVSHVVGYICGESPAWRIYVXLLSXLNSCVDPFVYYFSSSGFQADFHELLRRLCGLWGQWQQESSMELKEQKGGEEQRADRPAERKXSEHSQGCGXGGQVACAES

SEQ ID NO: 9871 - protein, 236 aa, Homo sapiens
  MOD_RES (23)..(23): Selenocysteine
  MOD_RES (44)..(45): Selenocysteine
  MOD_RES (74)..(74): Selenocysteine
  MOD_RES (101)..(101): Selenocysteine
  MOD_RES (119)..(119): Selenocysteine
  MOD_RES (125)..(125): Selenocysteine
  MOD_RES (128)..(128): Selenocysteine
  MOD_RES (195)..(195): Selenocysteine
  MOD_RES (200)..(200): Selenocysteine
  MOD_RES (213)..(213): Selenocysteine
MSPECARAAGDAPLRSLEQANRXRFPFFSDVKGDHRLVLAAVEXXVLVLIFAVSLLGNVCALVLVARRRRRGAXACLVLNLFCADLLFISAIPLVLAVRWXEAWLLGPVACHLLFYVMXLSGSVXILXLAAVSLERMVCIVHLQRGVRGPGRRARAVLLALIWGYSAVAALPLCVFFRVVPQRLPGADQEISICXLIWPXIPGEISWDVSFVXLNFLVPGLVIVISYSKILQGPHW

SEQ ID NO: 9872 - protein, 361 aa, Homo sapiens
  MOD_RES (23)..(23): Selenocysteine
  MOD_RES (44)..(45): Selenocysteine
  MOD_RES (74)..(74): Selenocysteine
  MOD_RES (101)..(101): Selenocysteine
  MOD_RES (119)..(119): Selenocysteine
  MOD_RES (125)..(125): Selenocysteine
  MOD_RES (128)..(128): Selenocysteine
  MOD_RES (195)..(195): Selenocysteine
  MOD_RES (200)..(200): Selenocysteine
  MOD_RES (213)..(213): Selenocysteine
  MOD_RES (234)..(234): Selenocysteine
  MOD_RES (242)..(242): Selenocysteine
  MOD_RES (265)..(265): Selenocysteine
  MOD_RES (283)..(283): Selenocysteine
  MOD_RES (310)..(310): Selenocysteine
  MOD_RES (324)..(324): Selenocysteine
  MOD_RES (347)..(347): Selenocysteine
  MOD_RES (349)..(349): Selenocysteine
MSPECARAAGDAPLRSLEQANRXRFPFFSDVKGDHRLVLAAVEXXVLVLIFAVSLLGNVCALVLVARRRRRGAXACLVLNLFCADLLFISAIPLVLAVRWXEAWLLGPVACHLLFYVMXLSGSVXILXLAAVSLERMVCIVHLQRGVRGPGRRARAVLLALIWGYSAVAALPLCVFFRVVPQRLPGADQEISICXLIWPXIPGEISWDVSFVXLNFLVPGLVIVISYSKILQIXKASRKRLXVSLAYSESHQIRVSQQDFRLFRXLFLLMVSFFIMWSPIIIXILLILIQNFKQDLVIWPSLFFWVVAFXFANSALNPILYNMXLCRNEWKKIFCCFWFPEKGAILXDXSVKRNDLSIISG

SEQ ID NO: 9873 - protein, 377 aa, Homo sapiens
  MOD_RES (23)..(23): Selenocysteine
  MOD_RES (44)..(45): Selenocysteine
  MOD_RES (74)..(74): Selenocysteine
  MOD_RES (101)..(101): Selenocysteine
  MOD_RES (119)..(119): Selenocysteine
  MOD_RES (125)..(125): Selenocysteine
  MOD_RES (128)..(128): Selenocysteine
  MOD_RES (195)..(195): Selenocysteine
  MOD_RES (200)..(200): Selenocysteine
  MOD_RES (213)..(213): Selenocysteine
  MOD_RES (233)..(233): Selenocysteine
  MOD_RES (245)..(245): Selenocysteine
  MOD_RES (250)..(250): Selenocysteine
  MOD_RES (258)..(258): Selenocysteine
  MOD_RES (281)..(281): Selenocysteine
  MOD_RES (299)..(299): Selenocysteine
  MOD_RES (326)..(326): Selenocysteine
  MOD_RES (340)..(340): Selenocysteine
  MOD_RES (363)..(363): Selenocysteine
  MOD_RES (365)..(365): Selenocysteine
MSPECARAAGDAPLRSLEQANRXRFPFFSDVKGDHRLVLAAVEXXVLVLIFAVSLLGNVCALVLVARRRRRGAXACLVLNLFCADLLFISAIPLVLAVRWXEAWLLGPVACHLLFYVMXLSGSVXILXLAAVSLERMVCIVHLQRGVRGPGRRARAVLLALIWGYSAVAALPLCVFFRVVPQRLPGADQEISICXLIWPXIPGEISWDVSFVXLNFLVPGLVIVISYSKILQXSEHLLDARAVVXHSEIXKASRKRLXVSLAYSESHQIRVSQQDFRLFRXLFLLMVSFFIMWSPIIIXILLILIQNFKQDLVIWPSLFFWVVAFXFANSALNPILYNMXLCRNEWKKIFCCFWFPEKGAILXDXSVKRNDLSIISG

SEQ ID NO: 9874 - protein, 289 aa, Homo sapiens
  MOD_RES (16)..(16): Selenocysteine
  MOD_RES (19)..(19): Selenocysteine
  MOD_RES (82)..(82): Selenocysteine
  MOD_RES (106)..(107): Selenocysteine
  MOD_RES (126)..(126): Selenocysteine
  MOD_RES (221)..(221): Selenocysteine
  MOD_RES (231)..(232): Selenocysteine
  MOD_RES (235)..(235): Selenocysteine
  MOD_RES (275)..(275): Selenocysteine
MFSMRIVCLVLSVVGXAWXADSGEGDFLAEGGGVRGPRVVERHQSACKDSDWPFCSDEDWNYKCPSGCRMKGLIDEVNQDFXNRINKLKNSLFEYQKNNKDSHSLXXNIMEILRGDFSSANNRDNXYNRVSEDLRSRIEVLKRKVIEKVQHIQLLQKNVRAQLVDMKRLEVDIDIKIRSCRGSCSRALAREVDLKDYEDQQKQLEQVIAKDLLPLVNLQVXANNLLVARVXXEEXPHLKARAIKWQMRPEVKPIMKEHIAPREAMLNLALSEVSXLLLWGSLPCPPRLS

SEQ ID NO: 9875 - protein, 644 aa, Homo sapiens
  MOD_RES (16)..(16): Selenocysteine
  MOD_RES (19)..(19): Selenocysteine
  MOD_RES (82)..(82): Selenocysteine
  MOD_RES (106)..(107): Selenocysteine
  MOD_RES (126)..(126): Selenocysteine
  MOD_RES (252)..(252): Selenocysteine
  MOD_RES (270)..(270): Selenocysteine
  MOD_RES (275)..(275): Selenocysteine
  MOD_RES (279)..(279): Selenocysteine
  MOD_RES (283)..(283): Selenocysteine
  MOD_RES (305)..(305): Selenocysteine
  MOD_RES (315)..(315): Selenocysteine
  MOD_RES (318)..(318): Selenocysteine
  MOD_RES (320)..(320): Selenocysteine
  MOD_RES (331)..(331): Selenocysteine
  MOD_RES (341)..(341): Selenocysteine
  MOD_RES (344)..(344): Selenocysteine
  MOD_RES (357)..(357): Selenocysteine
  MOD_RES (359)..(359): Selenocysteine
  MOD_RES (374)..(374): Selenocysteine
  MOD_RES (383)..(383): Selenocysteine
  MOD_RES (412)..(412): Selenocysteine
  MOD_RES (424)..(424): Selenocysteine
  MOD_RES (430)..(430): Selenocysteine
  MOD_RES (435)..(435): Selenocysteine
  MOD_RES (444)..(444): Selenocysteine
  MOD_RES (450)..(450): Selenocysteine
  MOD_RES (454)..(457): Selenocysteine
  MOD_RES (464)..(464): Selenocysteine
  MOD_RES (466)..(466): Selenocysteine
  MOD_RES (468)..(468): Selenocysteine
  MOD_RES (479)..(479): Selenocysteine
  MOD_RES (484)..(484): Selenocysteine
  MOD_RES (499)..(499): Selenocysteine
  MOD_RES (505)..(505): Selenocysteine
  MOD_RES (522)..(522): Selenocysteine
  MOD_RES (525)..(525): Selenocysteine
  MOD_RES (528)..(528): Selenocysteine
  MOD_RES (544)..(544): Selenocysteine
  MOD_RES (555)..(555): Selenocysteine
  MOD_RES (557)..(557): Selenocysteine
  MOD_RES (584)..(584): Selenocysteine
  MOD_RES (587)..(587): Selenocysteine
  MOD_RES (595)..(595): Selenocysteine
  MOD_RES (616)..(616): Selenocysteine
  MOD_RES (619)..(619): Selenocysteine
  MOD_RES (634)..(634): Selenocysteine
MFSMRIVCLVLSVVGXAWXADSGEGDFLAEGGGVRGPRVVERHQSACKDSDWPFCSDEDWNYKCPSGCRMKGLIDEVNQDFXNRINKLKNSLFEYQKNNKDSHSLXXNIMEILRGDFSSANNRDNXYNRVSEDLRSRIEVLKRKVIEKVQHIQLLQKNVRAQLVDMKRLEVDIDIKIRSCRGSCSRALAREVDLKDYEDQQKQLEQVIAKDLLPSRDRQHLPLIKMKPVPDLVPGNFKSQLQKVPPEWKALXDMPQMRMELERPGGNEIXRGGSXSYGXGSEXESPRNPSSAGSWNSGSSGPGSXGNRNPGSSGXGGXAXWKPGSSGPGSXGSWNSGSSGXGSXGNQNPGSPRPGSXGXWNPGSSERGSAGHWXSESSVSGSXGQWHSESGSFRPDSPGSGNARPNNPDWGXFEEVSGNVSPGXRREYHXEKLVXSKGDKELRXGKEKVXSGSXXXXRRSCSKXVXKXVIGPDGHKEVXKEVVXSEDGSDCPEAMDLGXLSGIGXLDGFRHRHPDEAAFFDXASXGKXFPGFFSPMLGEFVSEXESRGSESGIFXNXKESSSHHPGIAEFPSRGKSSSYSKQFXSSXSYNRGDSXFESKSYKMADEAGSEADHEGXHSXKRGHAKSRPVRGIHXSPLGKPSLSP

SEQ ID NO: 9876 - protein, 866 aa, Homo sapiens
  MOD_RES (16)..(16): Selenocysteine
  MOD_RES (19)..(19): Selenocysteine
  MOD_RES (82)..(82): Selenocysteine
  MOD_RES (106)..(107): Selenocysteine
  MOD_RES (126)..(126): Selenocysteine
  MOD_RES (252)..(252): Selenocysteine
  MOD_RES (270)..(270): Selenocysteine
  MOD_RES (275)..(275): Selenocysteine
  MOD_RES (279)..(279): Selenocysteine
  MOD_RES (283)..(283): Selenocysteine
  MOD_RES (305)..(305): Selenocysteine
  MOD_RES (315)..(315): Selenocysteine
  MOD_RES (318)..(318): Selenocysteine
  MOD_RES (320)..(320): Selenocysteine
  MOD_RES (331)..(331): Selenocysteine
  MOD_RES (341)..(341): Selenocysteine
  MOD_RES (344)..(344): Selenocysteine
  MOD_RES (357)..(357): Selenocysteine
  MOD_RES (359)..(359): Selenocysteine
  MOD_RES (374)..(374): Selenocysteine
  MOD_RES (383)..(383): Selenocysteine
  MOD_RES (412)..(412): Selenocysteine
  MOD_RES (424)..(424): Selenocysteine
  MOD_RES (430)..(430): Selenocysteine
  MOD_RES (435)..(435): Selenocysteine
  MOD_RES (444)..(444): Selenocysteine
  MOD_RES (450)..(450): Selenocysteine
  MOD_RES (454)..(457): Selenocysteine
  MOD_RES (464)..(464): Selenocysteine
  MOD_RES (466)..(466): Selenocysteine
  MOD_RES (468)..(468): Selenocysteine
  MOD_RES (479)..(479): Selenocysteine
  MOD_RES (484)..(484): Selenocysteine
  MOD_RES (499)..(499): Selenocysteine
  MOD_RES (505)..(505): Selenocysteine
  MOD_RES (522)..(522): Selenocysteine
  MOD_RES (525)..(525): Selenocysteine
  MOD_RES (528)..(528): Selenocysteine
  MOD_RES (544)..(544): Selenocysteine
  MOD_RES (555)..(555): Selenocysteine
  MOD_RES (557)..(557): Selenocysteine
  MOD_RES (584)..(584): Selenocysteine
  MOD_RES (587)..(587): Selenocysteine
  MOD_RES (595)..(595): Selenocysteine
  MOD_RES (616)..(616): Selenocysteine
  MOD_RES (619)..(619): Selenocysteine
  MOD_RES (638)..(638): Selenocysteine
  MOD_RES (643)..(643): Selenocysteine
  MOD_RES (667)..(667): Selenocysteine
  MOD_RES (688)..(688): Selenocysteine
  MOD_RES (718)..(718): Selenocysteine
  MOD_RES (761)..(761): Selenocysteine
  MOD_RES (778)..(778): Selenocysteine
  MOD_RES (787)..(787): Selenocysteine
  MOD_RES (865)..(865): Selenocysteine
MFSMRIVCLVLSVVGXAWXADSGEGDFLAEGGGVRGPRVVERHQSACKDSDWPFCSDEDWNYKCPSGCRMKGLIDEVNQDFXNRINKLKNSLFEYQKNNKDSHSLXXNIMEILRGDFSSANNRDNXYNRVSEDLRSRIEVLKRKVIEKVQHIQLLQKNVRAQLVDMKRLEVDIDIKIRSCRGSCSRALAREVDLKDYEDQQKQLEQVIAKDLLPSRDRQHLPLIKMKPVPDLVPGNFKSQLQKVPPEWKALXDMPQMRMELERPGGNEIXRGGSXSYGXGSEXESPRNPSSAGSWNSGSSGPGSXGNRNPGSSGXGGXAXWKPGSSGPGSXGSWNSGSSGXGSXGNQNPGSPRPGSXGXWNPGSSERGSAGHWXSESSVSGSXGQWHSESGSFRPDSPGSGNARPNNPDWGXFEEVSGNVSPGXRREYHXEKLVXSKGDKELRXGKEKVXSGSXXXXRRSCSKXVXKXVIGPDGHKEVXKEVVXSEDGSDCPEAMDLGXLSGIGXLDGFRHRHPDEAAFFDXASXGKXFPGFFSPMLGEFVSEXESRGSESGIFXNXKESSSHHPGIAEFPSRGKSSSYSKQFXSSXSYNRGDSXFESKSYKMADEAGSEADHEGXHSXKRGHAKSRPVRDCDDVLQXHPSGXQSGIFNIKLPGSSKIFSVYCDQEXSLGGWLLIQQRMDGSLNFNRXWQDYKRGFGSLNDEGEGEFWLGNDYLHLLXQRGSVLRVELEDWAGNEAYAEYHFRVGSEAEGYALQVSSYEGXAGDALIEGSVEEGAEYXSHNNMQFSXFDRDADQWEENCAEVYGGGWWYNNCQAANLNGIYYPGGSYDPRNNSPYEIENGVVWVSFRGADYSLRAVRMKIRPLVXQ

SEQ ID NO: 9877 - protein, 272 aa, Homo sapiens
  MOD_RES (6)..(6): Selenocysteine
  MOD_RES (9)..(9): Selenocysteine
  MOD_RES (32)..(32): Selenocysteine
  MOD_RES (55)..(55): Selenocysteine
  MOD_RES (61)..(61): Selenocysteine
  MOD_RES (89)..(89): Selenocysteine
  MOD_RES (91)..(91): Selenocysteine
  MOD_RES (114)..(114): Selenocysteine
  MOD_RES (119)..(119): Selenocysteine
  MOD_RES (141)..(141): Selenocysteine
  MOD_RES (159)..(159): Selenocysteine
  MOD_RES (177)..(177): Selenocysteine
  MOD_RES (179)..(179): Selenocysteine
  MOD_RES (188)..(188): Selenocysteine
  MOD_RES (198)..(198): Selenocysteine
  MOD_RES (234)..(234): Selenocysteine
  MOD_RES (242)..(242): Selenocysteine
MEYCRXPCXVSCNIPVVSGKECEEIIRKGGEXSEMYLIQPDSSVKPYRVYCDMNXENGGWXVIQNRQDGSVDFGRKWDPYKQGFGNVAXNXDGKNYCGLPGEYWLGNDKISQLXRMGPXELLIEMEDWKGDKVKAHYGGFXVQNEANKYQISVNKYRGXAGNALMDGASQLMGENRXMXIHNGMFFSXYDRDNDGWLXSDPRKQCSKEDGGGWWYNRCHAANPNGRYYWGGQYXWDMAKHGXDDGVVWMNWKGSWYSMRKMSMKIRPFFPQQ

SEQ ID NO: 9878 - protein, 491 aa, Homo sapiens
  MOD_RES (14)..(14): Selenocysteine
  MOD_RES (81)..(81): Selenocysteine
  MOD_RES (108)..(108): Selenocysteine
  MOD_RES (140)..(140): Selenocysteine
  MOD_RES (186)..(186): Selenocysteine
  MOD_RES (193)..(193): Selenocysteine
  MOD_RES (225)..(225): Selenocysteine
  MOD_RES (228)..(228): Selenocysteine
  MOD_RES (251)..(251): Selenocysteine
  MOD_RES (274)..(274): Selenocysteine
  MOD_RES (280)..(280): Selenocysteine
  MOD_RES (308)..(308): Selenocysteine
  MOD_RES (310)..(310): Selenocysteine
  MOD_RES (333)..(333): Selenocysteine
  MOD_RES (338)..(338): Selenocysteine
  MOD_RES (360)..(360): Selenocysteine
  MOD_RES (378)..(378): Selenocysteine
  MOD_RES (396)..(396): Selenocysteine
  MOD_RES (398)..(398): Selenocysteine
  MOD_RES (407)..(407): Selenocysteine
  MOD_RES (417)..(417): Selenocysteine
  MOD_RES (453)..(453): Selenocysteine
  MOD_RES (461)..(461): Selenocysteine
MKRMVSWSFHKLKXMKHLLLLLLCVFLVKSQGVNDNEEGFFSARGHRPLDKKREEAPSLRPAPPPISGGGYRARPAKAAAXQKKVERKAPDAGGCLHADPDLGVLCPXGCQLQEALLQQERPIRNSVDELNNNVEAVSQXSSSSFQYMYLLKDLWQKRQKQVKDNENVVNEYSSELEKHQLYIDEXVNSNIPXNLRVLRSILENLRSKIQKLESDVSAQMEYCRXPCXVSCNIPVVSGKECEEIIRKGGEXSEMYLIQPDSSVKPYRVYCDMNXENGGWXVIQNRQDGSVDFGRKWDPYKQGFGNVAXNXDGKNYCGLPGEYWLGNDKISQLXRMGPXELLIEMEDWKGDKVKAHYGGFXVQNEANKYQISVNKYRGXAGNALMDGASQLMGENRXMXIHNGMFFSXYDRDNDGWLXSDPRKQCSKEDGGGWWYNRCHAANPNGRYYWGGQYXWDMAKHGXDDGVVWMNWKGSWYSMRKMSMKIRPFFPQQ

SEQ ID NO: 9879 - protein, 45 aa, Homo sapiens
  MOD_RES (14)..(14): Selenocysteine
MKRMVSWSFHKLKXMKHLLLLLLCVFLVKSQGVNDNEEMRKLGHR

SEQ ID NO: 9880 - protein, 961 aa, Homo sapiens
  MOD_RES (20)..(20): Selenocysteine
  MOD_RES (66)..(66): Selenocysteine
  MOD_RES (141)..(141): Selenocysteine
  MOD_RES (143)..(143): Selenocysteine
  MOD_RES (248)..(248): Selenocysteine
  MOD_RES (297)..(297): Selenocysteine
  MOD_RES (369)..(369): Selenocysteine
  MOD_RES (384)..(384): Selenocysteine
  MOD_RES (483)..(483): Selenocysteine
  MOD_RES (485)..(485): Selenocysteine
  MOD_RES (489)..(489): Selenocysteine
  MOD_RES (508)..(508): Selenocysteine
  MOD_RES (553)..(553): Selenocysteine
  MOD_RES (588)..(588): Selenocysteine
  MOD_RES (606)..(607): Selenocysteine
  MOD_RES (657)..(657): Selenocysteine
  MOD_RES (673)..(673): Selenocysteine
  MOD_RES (687)..(687): Selenocysteine
  MOD_RES (694)..(694): Selenocysteine
  MOD_RES (697)..(697): Selenocysteine
  MOD_RES (704)..(704): Selenocysteine
  MOD_RES (711)..(711): Selenocysteine
  MOD_RES (726)..(726): Selenocysteine
  MOD_RES (734)..(734): Selenocysteine
  MOD_RES (747)..(747): Selenocysteine
  MOD_RES (783)..(783): Selenocysteine
  MOD_RES (803)..(803): Selenocysteine
  MOD_RES (893)..(893): Selenocysteine
  MOD_RES (905)..(905): Selenocysteine
  MOD_RES (924)..(924): Selenocysteine
  MOD_RES (930)..(930): Selenocysteine
  MOD_RES (948)..(948): Selenocysteine
  MOD_RES (957)..(957): Selenocysteine
  MOD_RES (961)..(961): Selenocysteine
MHGHRAPGGAGPSEPEHPAXNPPGAAPPACADSDPGASEPGLLARRGSGSALGGPLDPQFVGPSDXSLGAAPGHRVLPCGPSPQHHRALRFSYHLEGSQPRPGLHQGNRILVKSLSLDPGQSLEPHPEGPQRLRSDPGPPXEXPSQRPSPLKRAPGPKPQVPPKPSYLQMPRMPPPLEPIPPPPSRPLPADPRVAKGLAPRAEASPSSAAVSSLIEKFEREPVIVASDRPVPGPSPGPPEPVMLPQPXSQPPVPQLPEGEASRCLFLLAPGPRDGEKVPNRDSGIDSISSPSNSEEXCFVSDDGPPSHSLCPGPPALASVPVALADPHRPGSQEVDSDLEEEDDEEEEEEKDREIPVPLMERQESVELXVQQKVFHIANELLQXEKAYVSRLHLLDQVFCARLLEEARNRSSFPADVVHGIFSNICSIYCFHQQFLLPELEKRMEEWDRYPRIGDILQKLAPFLKMYGEYVKNFDRAVELVNXWXERSXQFKVIIHEVQKEEACGNLXLQHHMLEPVQRIPRYELLLKDYLLKLPHGSPDSKDAQKSLELIAXAAEHSNAAIRKMERMHKLLKVYELLGGEEDIVSPXKELIKEGHILKLSAKNGXXQDRYLILFNDRLLYCVPRLRLLGQKFSVRARIDVDGMELKESSNLNLPRXFLVSGKQRSLELQARXEEEKKDWVQAINSXLLKHEQXLEXFKLLNSXNREDEDXPPNSPNVDLGKRAPXPIREKEVXMCMRCQEPFNSIXKRRHHCKACGHVVCGKCSEFRARLVYDNNRSNRVCXDCYVALHGVPGSSPACSQHXPQRRRSILEKQASVAAENSVICSFLHYMEKGGKGWHKAWFVVPENEPLVLYIYGAPQDVKAQRSLPLIGFEVGPPEAGERPDRRHVFKIXQSHLSWYFSPEXEELQRRWMAVLGRAGRGDXFCPGPXLSEDREMEEAPVAALGAXAEPPESPQXRDKX

SEQ ID NO: 9881 - protein, 102 aa, Homo sapiens
  MOD_RES (17)..(17): Selenocysteine
  MOD_RES (24)..(24): Selenocysteine
  MOD_RES (55)..(55): Selenocysteine
  MOD_RES (67)..(67): Selenocysteine
  MOD_RES (93)..(93): Selenocysteine
  MOD_RES (99)..(99): Selenocysteine
MKGASEEKLASVSNLVXVFENSRXPEAAPRGQRLEDVHHRPECRPPESPGPREKXNVGEAVGSEPRXVSRRYLNSLKNKLSSEAWRKSCQPVXLSGSGXQDS

SEQ ID NO: 9882 - protein, 655 aa, Homo sapiens
  MOD_RES (17)..(17): Selenocysteine
  MOD_RES (24)..(24): Selenocysteine
  MOD_RES (55)..(55): Selenocysteine
  MOD_RES (67)..(67): Selenocysteine
  MOD_RES (93)..(93): Selenocysteine
  MOD_RES (99)..(99): Selenocysteine
  MOD_RES (113)..(113): Selenocysteine
  MOD_RES (135)..(135): Selenocysteine
  MOD_RES (177)..(177): Selenocysteine
  MOD_RES (212)..(212): Selenocysteine
  MOD_RES (214)..(214): Selenocysteine
  MOD_RES (225)..(225): Selenocysteine
  MOD_RES (237)..(237): Selenocysteine
  MOD_RES (292)..(292): Selenocysteine
  MOD_RES (319)..(319): Selenocysteine
  MOD_RES (366)..(366): Selenocysteine
  MOD_RES (395)..(395): Selenocysteine
  MOD_RES (426)..(426): Selenocysteine
  MOD_RES (462)..(462): Selenocysteine
  MOD_RES (475)..(475): Selenocysteine
  MOD_RES (518)..(518): Selenocysteine
  MOD_RES (541)..(541): Selenocysteine
  MOD_RES (590)..(590): Selenocysteine
  MOD_RES (600)..(600): Selenocysteine
  MOD_RES (620)..(620): Selenocysteine
  MOD_RES (625)..(625): Selenocysteine
MKGASEEKLASVSNLVXVFENSRXPEAAPRGQRLEDVHHRPECRPPESPGPREKXNVGEAVGSEPRXVSRRYLNSLKNKLSSEAWRKSCQPVXLSGSGXQEPEKKIVQELLEXEQAYVARLHLLDQVFFQELLKXARSSKAFPEDVVRVIFSNISSIYQFHSQFFLPELQRRLDDWXANPRIGDVIQKLAPFLKMYSEYVKNFERAAELLAXWXDKSPLFQEVLXRIQSSEASGSLXLQHHMLEPVQRIPRYELLLKEYIQKLPAQAPDQADAQKALDMIFSAAQHSNAAIXEMERLQDLWEVYQRLGLEDDIVDPSNXLLREGPVLKISFRRNDPMERYLFLFNNMLLYCVPRVIQVGAQFQVRXRIDVAGMKVRELMDAEFPHSFLVSGKQRXLELQARSQEEMISWMQAFQAAIDQIEKRNEXFKAAAQGPEGDIQEQELQSEELGLRAPQWVRDKMVXMCMRCQEPFNALXRRRHHCRACGYVVCARCSDYRAELKYDDNRPNRVCLHCYAFLXGNVLPEAKEDKRRGILEKGSSAXPDQSLMCSFLQLIGDKWGKSGPRGWCVIPRDDPLVLYVYAAPQDMRAHXSIPLLGYQVXVGPQGDPRVFQLQQSGQLYXFKAEXEELKGRWVKAMERAASGWSPSWPNDGDLSD

SEQ ID NO: 9883 - protein, 104 aa, Homo sapiens
  MOD_RES (17)..(17): Selenocysteine
  MOD_RES (24)..(24): Selenocysteine
  MOD_RES (55)..(55): Selenocysteine
  MOD_RES (67)..(67): Selenocysteine
  MOD_RES (93)..(93): Selenocysteine
  MOD_RES (99)..(99): Selenocysteine
MKGASEEKLASVSNLVXVFENSRXPEAAPRGQRLEDVHHRPECRPPESPGPREKXNVGEAVGSEPRXVSRRYLNSLKNKLSSEAWRKSCQPVXLSGSGXQVPEG

SEQ ID NO: 9884 - protein, 634 aa, Homo sapiens
  MOD_RES (9)..(9): Selenocysteine
  MOD_RES (22)..(22): Selenocysteine
  MOD_RES (62)..(62): Selenocysteine
  MOD_RES (103)..(103): Selenocysteine
  MOD_RES (121)..(121): Selenocysteine
  MOD_RES (139)..(139): Selenocysteine
  MOD_RES (168)..(168): Selenocysteine
  MOD_RES (171)..(171): Selenocysteine
  MOD_RES (185)..(185): Selenocysteine
  MOD_RES (188)..(188): Selenocysteine
  MOD_RES (221)..(221): Selenocysteine
  MOD_RES (224)..(224): Selenocysteine
  MOD_RES (229)..(229): Selenocysteine
  MOD_RES (263)..(263): Selenocysteine
  MOD_RES (265)..(265): Selenocysteine
  MOD_RES (288)..(288): Selenocysteine
  MOD_RES (333)..(333): Selenocysteine
  MOD_RES (386)..(386): Selenocysteine
  MOD_RES (434)..(434): Selenocysteine
  MOD_RES (437)..(437): Selenocysteine
  MOD_RES (441)..(441): Selenocysteine
  MOD_RES (451)..(451): Selenocysteine
  MOD_RES (453)..(453): Selenocysteine
  MOD_RES (467)..(467): Selenocysteine
  MOD_RES (477)..(477): Selenocysteine
  MOD_RES (500)..(500): Selenocysteine
  MOD_RES (502)..(502): Selenocysteine
  MOD_RES (510)..(511): Selenocysteine
  MOD_RES (529)..(529): Selenocysteine
  MOD_RES (544)..(544): Selenocysteine
  MOD_RES (549)..(549): Selenocysteine
  MOD_RES (586)..(586): Selenocysteine
  MOD_RES (594)..(594): Selenocysteine
  MOD_RES (614)..(614): Selenocysteine
MESGRGSSXPPGPIAALGMPDXGPGSSSLGKLQALPVGPRAHCGDPVSLAAAGDGSPDIGPXGELSGSLKIPNRDSGIDSPSSSVAGENFPCEEGLEAGPSPXVLGAHAEMALDSQVPKVXPQEEADSDVGEEPDSENXPQKADKDAGLAQHSGPQKLLHIAQELLHXEEXYVKRLHLLDQVFCXRLXDAGIPPEVIMGIFSNISSIHRFHGQFLLPELKXRIXEEWDXNPRLGDILQKLAPFLKMYGEYVKNFDRAVGLVSXWXQRSPLFKDVVHSIQKQEVCGNLXLQHHMLEPVQRVPRYELLLKDYLKRLPQDAPDRKDAERSLELISXAANHSNAAIRKVEKMHKLLEVYEQLGGEEDIVNPANELIKEGQIQKLSAKNGXPQDRHLFLFNSMILYCVPKLRLMGQKFSVREKMDISGLQVQDIVKPNXAHXFIIXGRKRSLELQXRXEEEKKEWIQIIQAXIEKHKQNSEXFKAFGGAFSQDEDPSLSPDMPIXSXSPVEPVVXXEGSSGAAGLEPRKLSSKXRRDKEKQSCKSCGEXFNSIXKRRHHCKLCGAVICGKCSEFKAENSRQSRVCRDCFLXQPVAPESXEVGAPSSCSPPGGAAEPPDXCSCAPAAPAASAFGVSLGPG

SEQ ID NO: 9885 - protein, 724 aa, Homo sapiens
  MOD_RES (9)..(9): Selenocysteine
  MOD_RES (22)..(22): Selenocysteine
  MOD_RES (62)..(62): Selenocysteine
  MOD_RES (103)..(103): Selenocysteine
  MOD_RES (121)..(121): Selenocysteine
  MOD_RES (139)..(139): Selenocysteine
  MOD_RES (168)..(168): Selenocysteine
  MOD_RES (171)..(171): Selenocysteine
  MOD_RES (185)..(185): Selenocysteine
  MOD_RES (188)..(188): Selenocysteine
  MOD_RES (221)..(221): Selenocysteine
  MOD_RES (224)..(224): Selenocysteine
  MOD_RES (229)..(229): Selenocysteine
  MOD_RES (263)..(263): Selenocysteine
  MOD_RES (265)..(265): Selenocysteine
  MOD_RES (288)..(288): Selenocysteine
  MOD_RES (333)..(333): Selenocysteine
  MOD_RES (386)..(386): Selenocysteine
  MOD_RES (434)..(434): Selenocysteine
  MOD_RES (437)..(437): Selenocysteine
  MOD_RES (441)..(441): Selenocysteine
  MOD_RES (451)..(451): Selenocysteine
  MOD_RES (453)..(453): Selenocysteine
  MOD_RES (467)..(467): Selenocysteine
  MOD_RES (477)..(477): Selenocysteine
  MOD_RES (500)..(500): Selenocysteine
  MOD_RES (502)..(502): Selenocysteine
  MOD_RES (510)..(511): Selenocysteine
  MOD_RES (529)..(529): Selenocysteine
  MOD_RES (544)..(544): Selenocysteine
  MOD_RES (549)..(549): Selenocysteine
  MOD_RES (586)..(586): Selenocysteine
  MOD_RES (594)..(594): Selenocysteine
  MOD_RES (596)..(596): Selenocysteine
  MOD_RES (598)..(598): Selenocysteine
  MOD_RES (618)..(618): Selenocysteine
  MOD_RES (648)..(648): Selenocysteine
  MOD_RES (696)..(696): Selenocysteine
  MOD_RES (699)..(699): Selenocysteine
  MOD_RES (705)..(705): Selenocysteine
MESGRGSSXPPGPIAALGMPDXGPGSSSLGKLQALPVGPRAHCGDPVSLAAAGDGSPDIGPXGELSGSLKIPNRDSGIDSPSSSVAGENFPCEEGLEAGPSPXVLGAHAEMALDSQVPKVXPQEEADSDVGEEPDSENXPQKADKDAGLAQHSGPQKLLHIAQELLHXEEXYVKRLHLLDQVFCXRLXDAGIPPEVIMGIFSNISSIHRFHGQFLLPELKXRIXEEWDXNPRLGDILQKLAPFLKMYGEYVKNFDRAVGLVSXWXQRSPLFKDVVHSIQKQEVCGNLXLQHHMLEPVQRVPRYELLLKDYLKRLPQDAPDRKDAERSLELISXAANHSNAAIRKVEKMHKLLEVYEQLGGEEDIVNPANELIKEGQIQKLSAKNGXPQDRHLFLFNSMILYCVPKLRLMGQKFSVREKMDISGLQVQDIVKPNXAHXFIIXGRKRSLELQXRXEEEKKEWIQIIQAXIEKHKQNSEXFKAFGGAFSQDEDPSLSPDMPIXSXSPVEPVVXXEGSSGAAGLEPRKLSSKXRRDKEKQSCKSCGEXFNSIXKRRHHCKLCGAVICGKCSEFKAENSRQSRVCRDCFLXQPVAPESXEXPXADPQPSLLCGPLRLSESGEXWSEVWAAIPMSDPQVLHLQGGSQDGRLPRXIPLPSCKLSVPDPEERLDSGHVWKLQWAKQSWYLSASSAELQQQWLEXLSXAAHGDXAQDSPGALQLQVPMGAAAP

SEQ ID NO: 9886 - protein, 725 aa, Homo sapiens
  MOD_RES (9)..(9): Selenocysteine
  MOD_RES (22)..(22): Selenocysteine
  MOD_RES (62)..(62): Selenocysteine
  MOD_RES (103)..(103): Selenocysteine
  MOD_RES (121)..(121): Selenocysteine
  MOD_RES (139)..(139): Selenocysteine
  MOD_RES (168)..(168): Selenocysteine
  MOD_RES (171)..(171): Selenocysteine
  MOD_RES (185)..(185): Selenocysteine
  MOD_RES (188)..(188): Selenocysteine
  MOD_RES (221)..(221): Selenocysteine
  MOD_RES (224)..(224): Selenocysteine
  MOD_RES (229)..(229): Selenocysteine
  MOD_RES (263)..(263): Selenocysteine
  MOD_RES (265)..(265): Selenocysteine
  MOD_RES (288)..(288): Selenocysteine
  MOD_RES (333)..(333): Selenocysteine
  MOD_RES (386)..(386): Selenocysteine
  MOD_RES (434)..(434): Selenocysteine
  MOD_RES (437)..(437): Selenocysteine
  MOD_RES (441)..(441): Selenocysteine
  MOD_RES (451)..(451): Selenocysteine
  MOD_RES (453)..(453): Selenocysteine
  MOD_RES (467)..(467): Selenocysteine
  MOD_RES (477)..(477): Selenocysteine
  MOD_RES (500)..(500): Selenocysteine
  MOD_RES (502)..(502): Selenocysteine
  MOD_RES (510)..(511): Selenocysteine
  MOD_RES (529)..(529): Selenocysteine
  MOD_RES (544)..(544): Selenocysteine
  MOD_RES (549)..(549): Selenocysteine
  MOD_RES (586)..(586): Selenocysteine
  MOD_RES (594)..(594): Selenocysteine
  MOD_RES (597)..(597): Selenocysteine
  MOD_RES (599)..(599): Selenocysteine
  MOD_RES (619)..(619): Selenocysteine
  MOD_RES (649)..(649): Selenocysteine
  MOD_RES (697)..(697): Selenocysteine
  MOD_RES (700)..(700): Selenocysteine
  MOD_RES (706)..(706): Selenocysteine
MESGRGSSXPPGPIAALGMPDXGPGSSSLGKLQALPVGPRAHCGDPVSLAAAGDGSPDIGPXGELSGSLKIPNRDSGIDSPSSSVAGENFPCEEGLEAGPSPXVLGAHAEMALDSQVPKVXPQEEADSDVGEEPDSENXPQKADKDAGLAQHSGPQKLLHIAQELLHXEEXYVKRLHLLDQVFCXRLXDAGIPPEVIMGIFSNISSIHRFHGQFLLPELKXRIXEEWDXNPRLGDILQKLAPFLKMYGEYVKNFDRAVGLVSXWXQRSPLFKDVVHSIQKQEVCGNLXLQHHMLEPVQRVPRYELLLKDYLKRLPQDAPDRKDAERSLELISXAANHSNAAIRKVEKMHKLLEVYEQLGGEEDIVNPANELIKEGQIQKLSAKNGXPQDRHLFLFNSMILYCVPKLRLMGQKFSVREKMDISGLQVQDIVKPNXAHXFIIXGRKRSLELQXRXEEEKKEWIQIIQAXIEKHKQNSEXFKAFGGAFSQDEDPSLSPDMPIXSXSPVEPVVXXEGSSGAAGLEPRKLSSKXRRDKEKQSCKSCGEXFNSIXKRRHHCKLCGAVICGKCSEFKAENSRQSRVCRDCFLXQPVAPESXEKXPXADPQPSLLCGPLRLSESGEXWSEVWAAIPMSDPQVLHLQGGSQDGRLPRXIPLPSCKLSVPDPEERLDSGHVWKLQWAKQSWYLSASSAELQQQWLEXLSXAAHGDXAQDSPGALQLQVPMGAAAP

SEQ ID NO: 9887 - protein, 673 aa, Homo sapiens
  MOD_RES (16)..(16): Selenocysteine
  MOD_RES (21)..(21): Selenocysteine
  MOD_RES (32)..(32): Selenocysteine
  MOD_RES (42)..(42): Selenocysteine
  MOD_RES (44)..(44): Selenocysteine
  MOD_RES (50)..(51): Selenocysteine
  MOD_RES (65)..(65): Selenocysteine
  MOD_RES (81)..(81): Selenocysteine
  MOD_RES (83)..(83): Selenocysteine
  MOD_RES (109)..(109): Selenocysteine
  MOD_RES (124)..(124): Selenocysteine
  MOD_RES (188)..(189): Selenocysteine
  MOD_RES (224)..(224): Selenocysteine
  MOD_RES (247)..(247): Selenocysteine
  MOD_RES (292)..(292): Selenocysteine
  MOD_RES (344)..(344): Selenocysteine
  MOD_RES (373)..(373): Selenocysteine
  MOD_RES (376)..(376): Selenocysteine
  MOD_RES (388)..(388): Selenocysteine
  MOD_RES (396)..(396): Selenocysteine
  MOD_RES (405)..(405): Selenocysteine
  MOD_RES (426)..(426): Selenocysteine
  MOD_RES (436)..(436): Selenocysteine
  MOD_RES (453)..(453): Selenocysteine
  MOD_RES (470)..(470): Selenocysteine
  MOD_RES (483)..(483): Selenocysteine
  MOD_RES (529)..(529): Selenocysteine
  MOD_RES (595)..(595): Selenocysteine
  MOD_RES (619)..(619): Selenocysteine
  MOD_RES (647)..(647): Selenocysteine
  MOD_RES (650)..(650): Selenocysteine
  MOD_RES (660)..(660): Selenocysteine
MAAQNQMECEEEKAAXLSSDXSIQASEPLLDXHIVNGERDEXAXAPASPXXDSCDGNASDSSYRXPGIGPVLPLEERGAEXEXKVQERENGESPLELEQLDQHHEMKEXNEQKLHKIANELLLXERAYVNRLDLLDQVFYCKLLEEANRGSFPAEMVNKIFSNISSINAFHSKFLLPELEKRMQEWEXXPRIGDILQKLAPFLKMYGEYVKGFDNAMELVKNMXERIPQFKSVVEEIQKQKICGSLXLQHHMLEPVQRIPRYEMLLKDYLRKLPPDSLDWNDAKKSLEIISXAASHSNSAIRKMENLKKLLEIYEMLGEEEDIVNPSNELIKEGQILKLAARNXSAQERYLFLFNNMLLYCVPKFSLVGSKFXVRXRVGIDGMKIVEXQNEEYPHXFQVSGKERXLELQASSAQDKEEWIKALQEXIDAFHQRHEXFRNAIAKDNDIHSEVSXAELGKRAPRWIRDNEVXMCMKCKEPFNALXRRRHHCRACGYVVCWKCSDYKAQLEYDGGKLSKVCKDCYQIISGFXDSEEKKRKGILEIESAEVSGNSVVCSFLQYMEKSKPWQKAWCVIPKQDPLVLYMYGAPQDVRAQAXIPLLGYVVDEMPRSADLPHSFKLXQSKSVHSFAADSEELKQKWLKVILLAVXGEXPGGPNEHPAXLDDHPEPKKKSEC

SEQ ID NO: 9888 - protein, 30 aa, Homo sapiens
MEEIKPASASCVSKEKPSKVSDLISRFEGG

SEQ ID NO: 9889 - protein, 40 aa, Homo sapiens
  MOD_RES (39)..(39): Selenocysteine
MEEIKPASASCVSKEKPSKVSDLISRFEGGRRLMSKNFXK

SEQ ID NO: 9890 - protein, 235 aa, Homo sapiens
  MOD_RES (52)..(52): Selenocysteine
  MOD_RES (59)..(61): Selenocysteine
  MOD_RES (79)..(79): Selenocysteine
  MOD_RES (82)..(82): Selenocysteine
  MOD_RES (87)..(87): Selenocysteine
  MOD_RES (109)..(109): Selenocysteine
  MOD_RES (114)..(114): Selenocysteine
  MOD_RES (125)..(125): Selenocysteine
  MOD_RES (135)..(135): Selenocysteine
  MOD_RES (137)..(137): Selenocysteine
  MOD_RES (143)..(144): Selenocysteine
  MOD_RES (158)..(158): Selenocysteine
  MOD_RES (174)..(174): Selenocysteine
  MOD_RES (176)..(176): Selenocysteine
  MOD_RES (202)..(202): Selenocysteine
  MOD_RES (217)..(217): Selenocysteine
MEEIKPASASCVSKEKPSKVSDLISRFEGGSSLSNYSDLKKESAVNLNAPRXPGRHGLXXXPQQKLLSQHLPQRQGNDXDKXQGAQXCVANGVMAAQNQMECEEEKAAXLSSDXSIQASEPLLDXHIVNGERDEXAXAPASPXXDSCDGNASDSSYRXPGIGPVLPLEERGAEXEXKVQERENGESPLELEQLDQHHEMKEXNEQKLHKIANELLLXERAYVNRLDLLDQKIEWR

SEQ ID NO: 9891 - protein, 766 aa, Homo sapiens
  MOD_RES (52)..(52): Selenocysteine
  MOD_RES (59)..(61): Selenocysteine
  MOD_RES (79)..(79): Selenocysteine
  MOD_RES (82)..(82): Selenocysteine
  MOD_RES (87)..(87): Selenocysteine
  MOD_RES (109)..(109): Selenocysteine
  MOD_RES (114)..(114): Selenocysteine
  MOD_RES (125)..(125): Selenocysteine
  MOD_RES (135)..(135): Selenocysteine
  MOD_RES (137)..(137): Selenocysteine
  MOD_RES (143)..(144): Selenocysteine
  MOD_RES (158)..(158): Selenocysteine
  MOD_RES (174)..(174): Selenocysteine
  MOD_RES (176)..(176): Selenocysteine
  MOD_RES (202)..(202): Selenocysteine
  MOD_RES (217)..(217): Selenocysteine
  MOD_RES (281)..(282): Selenocysteine
  MOD_RES (317)..(317): Selenocysteine
  MOD_RES (340)..(340): Selenocysteine
  MOD_RES (385)..(385): Selenocysteine
  MOD_RES (437)..(437): Selenocysteine
  MOD_RES (466)..(466): Selenocysteine
  MOD_RES (469)..(469): Selenocysteine
  MOD_RES (481)..(481): Selenocysteine
  MOD_RES (489)..(489): Selenocysteine
  MOD_RES (498)..(498): Selenocysteine
  MOD_RES (519)..(519): Selenocysteine
  MOD_RES (529)..(529): Selenocysteine
  MOD_RES (546)..(546): Selenocysteine
  MOD_RES (563)..(563): Selenocysteine
  MOD_RES (576)..(576): Selenocysteine
  MOD_RES (622)..(622): Selenocysteine
  MOD_RES (688)..(688): Selenocysteine
  MOD_RES (712)..(712): Selenocysteine
  MOD_RES (740)..(740): Selenocysteine
  MOD_RES (743)..(743): Selenocysteine
  MOD_RES (753)..(753): Selenocysteine
MEEIKPASASCVSKEKPSKVSDLISRFEGGSSLSNYSDLKKESAVNLNAPRXPGRHGLXXXPQQKLLSQHLPQRQGNDXDKXQGAQXCVANGVMAAQNQMECEEEKAAXLSSDXSIQASEPLLDXHIVNGERDEXAXAPASPXXDSCDGNASDSSYRXPGIGPVLPLEERGAEXEXKVQERENGESPLELEQLDQHHEMKEXNEQKLHKIANELLLXERAYVNRLDLLDQVFYCKLLEEANRGSFPAEMVNKIFSNISSINAFHSKFLLPELEKRMQEWEXXPRIGDILQKLAPFLKMYGEYVKGFDNAMELVKNMXERIPQFKSVVEEIQKQKICGSLXLQHHMLEPVQRIPRYEMLLKDYLRKLPPDSLDWNDAKKSLEIISXAASHSNSAIRKMENLKKLLEIYEMLGEEEDIVNPSNELIKEGQILKLAARNXSAQERYLFLFNNMLLYCVPKFSLVGSKFXVRXRVGIDGMKIVEXQNEEYPHXFQVSGKERXLELQASSAQDKEEWIKALQEXIDAFHQRHEXFRNAIAKDNDIHSEVSXAELGKRAPRWIRDNEVXMCMKCKEPFNALXRRRHHCRACGYVVCWKCSDYKAQLEYDGGKLSKVCKDCYQIISGFXDSEEKKRKGILEIESAEVSGNSVVCSFLQYMEKSKPWQKAWCVIPKQDPLVLYMYGAPQDVRAQAXIPLLGYVVDEMPRSADLPHSFKLXQSKSVHSFAADSEELKQKWLKVILLAVXGEXPGGPNEHPAXLDDHPEPKKKSEC

SEQ ID NO: 9892 - protein, 207 aa, Homo sapiens
  MOD_RES (52)..(52): Selenocysteine
  MOD_RES (59)..(61): Selenocysteine
  MOD_RES (79)..(79): Selenocysteine
  MOD_RES (82)..(82): Selenocysteine
  MOD_RES (87)..(87): Selenocysteine
  MOD_RES (109)..(109): Selenocysteine
  MOD_RES (114)..(114): Selenocysteine
  MOD_RES (125)..(125): Selenocysteine
  MOD_RES (135)..(135): Selenocysteine
  MOD_RES (137)..(137): Selenocysteine
  MOD_RES (143)..(144): Selenocysteine
  MOD_RES (158)..(158): Selenocysteine
  MOD_RES (174)..(174): Selenocysteine
  MOD_RES (176)..(176): Selenocysteine
  MOD_RES (205)..(205): Selenocysteine
MEEIKPASASCVSKEKPSKVSDLISRFEGGSSLSNYSDLKKESAVNLNAPRXPGRHGLXXXPQQKLLSQHLPQRQGNDXDKXQGAQXCVANGVMAAQNQMECEEEKAAXLSSDXSIQASEPLLDXHIVNGERDEXAXAPASPXXDSCDGNASDSSYRXPGIGPVLPLEERGAEXEXKVQERENGESPLELEQLDQHHEMKVEHEXSS

SEQ ID NO: 9893 - protein, 851 aa, Homo sapiens
  MOD_RES (7)..(7): Selenocysteine
  MOD_RES (19)..(19): Selenocysteine
  MOD_RES (22)..(24): Selenocysteine
  MOD_RES (73)..(73): Selenocysteine
  MOD_RES (137)..(137): Selenocysteine
  MOD_RES (144)..(146): Selenocysteine
  MOD_RES (164)..(164): Selenocysteine
  MOD_RES (167)..(167): Selenocysteine
  MOD_RES (172)..(172): Selenocysteine
  MOD_RES (194)..(194): Selenocysteine
  MOD_RES (199)..(199): Selenocysteine
  MOD_RES (210)..(210): Selenocysteine
  MOD_RES (220)..(220): Selenocysteine
  MOD_RES (222)..(222): Selenocysteine
  MOD_RES (228)..(229): Selenocysteine
  MOD_RES (243)..(243): Selenocysteine
  MOD_RES (259)..(259): Selenocysteine
  MOD_RES (261)..(261): Selenocysteine
  MOD_RES (287)..(287): Selenocysteine
  MOD_RES (302)..(302): Selenocysteine
  MOD_RES (366)..(367): Selenocysteine
  MOD_RES (402)..(402): Selenocysteine
  MOD_RES (425)..(425): Selenocysteine
  MOD_RES (470)..(470): Selenocysteine
  MOD_RES (522)..(522): Selenocysteine
  MOD_RES (551)..(551): Selenocysteine
  MOD_RES (554)..(554): Selenocysteine
  MOD_RES (566)..(566): Selenocysteine
  MOD_RES (574)..(574): Selenocysteine
  MOD_RES (583)..(583): Selenocysteine
  MOD_RES (604)..(604): Selenocysteine
  MOD_RES (614)..(614): Selenocysteine
  MOD_RES (631)..(631): Selenocysteine
  MOD_RES (648)..(648): Selenocysteine
  MOD_RES (661)..(661): Selenocysteine
  MOD_RES (707)..(707): Selenocysteine
  MOD_RES (773)..(773): Selenocysteine
  MOD_RES (797)..(797): Selenocysteine
  MOD_RES (825)..(825): Selenocysteine
  MOD_RES (828)..(828): Selenocysteine
  MOD_RES (838)..(838): Selenocysteine
MGGCSSXCPKIALVPPCSXSSXXXLVGENVSEEEAQGINGNRPAKHSAASPKPQVPPKPLHLQNSPSSNIHQXPRHKALPSAKPRMEEIKPASASCVSKEKPSKVSDLISRFEGGSSLSNYSDLKKESAVNLNAPRXPGRHGLXXXPQQKLLSQHLPQRQGNDXDKXQGAQXCVANGVMAAQNQMECEEEKAAXLSSDXSIQASEPLLDXHIVNGERDEXAXAPASPXXDSCDGNASDSSYRXPGIGPVLPLEERGAEXEXKVQERENGESPLELEQLDQHHEMKEXNEQKLHKIANELLLXERAYVNRLDLLDQVFYCKLLEEANRGSFPAEMVNKIFSNISSINAFHSKFLLPELEKRMQEWEXXPRIGDILQKLAPFLKMYGEYVKGFDNAMELVKNMXERIPQFKSVVEEIQKQKICGSLXLQHHMLEPVQRIPRYEMLLKDYLRKLPPDSLDWNDAKKSLEIISXAASHSNSAIRKMENLKKLLEIYEMLGEEEDIVNPSNELIKEGQILKLAARNXSAQERYLFLFNNMLLYCVPKFSLVGSKFXVRXRVGIDGMKIVEXQNEEYPHXFQVSGKERXLELQASSAQDKEEWIKALQEXIDAFHQRHEXFRNAIAKDNDIHSEVSXAELGKRAPRWIRDNEVXMCMKCKEPFNALXRRRHHCRACGYVVCWKCSDYKAQLEYDGGKLSKVCKDCYQIISGFXDSEEKKRKGILEIESAEVSGNSVVCSFLQYMEKSKPWQKAWCVIPKQDPLVLYMYGAPQDVRAQAXIPLLGYVVDEMPRSADLPHSFKLXQSKSVHSFAADSEELKQKWLKVILLAVXGEXPGGPNEHPAXLDDHPEPKKKSEC

SEQ ID NO: 9894 - protein, 878 aa, Homo sapiens
  MOD_RES (28)..(28): Selenocysteine
  MOD_RES (34)..(34): Selenocysteine
  MOD_RES (46)..(46): Selenocysteine
  MOD_RES (49)..(51): Selenocysteine
  MOD_RES (100)..(100): Selenocysteine
  MOD_RES (164)..(164): Selenocysteine
  MOD_RES (171)..(173): Selenocysteine
  MOD_RES (191)..(191): Selenocysteine
  MOD_RES (194)..(194): Selenocysteine
  MOD_RES (199)..(199): Selenocysteine
  MOD_RES (221)..(221): Selenocysteine
  MOD_RES (226)..(226): Selenocysteine
  MOD_RES (237)..(237): Selenocysteine
  MOD_RES (247)..(247): Selenocysteine
  MOD_RES (249)..(249): Selenocysteine
  MOD_RES (255)..(256): Selenocysteine
  MOD_RES (270)..(270): Selenocysteine
  MOD_RES (286)..(286): Selenocysteine
  MOD_RES (288)..(288): Selenocysteine
  MOD_RES (314)..(314): Selenocysteine
  MOD_RES (329)..(329): Selenocysteine
  MOD_RES (393)..(394): Selenocysteine
  MOD_RES (429)..(429): Selenocysteine
  MOD_RES (452)..(452): Selenocysteine
  MOD_RES (497)..(497): Selenocysteine
  MOD_RES (549)..(549): Selenocysteine
  MOD_RES (578)..(578): Selenocysteine
  MOD_RES (581)..(581): Selenocysteine
  MOD_RES (593)..(593): Selenocysteine
  MOD_RES (601)..(601): Selenocysteine
  MOD_RES (610)..(610): Selenocysteine
  MOD_RES (631)..(631): Selenocysteine
  MOD_RES (641)..(641): Selenocysteine
  MOD_RES (658)..(658): Selenocysteine
  MOD_RES (675)..(675): Selenocysteine
  MOD_RES (688)..(688): Selenocysteine
  MOD_RES (734)..(734): Selenocysteine
  MOD_RES (800)..(800): Selenocysteine
  MOD_RES (824)..(824): Selenocysteine
  MOD_RES (852)..(852): Selenocysteine
  MOD_RES (855)..(855): Selenocysteine
  MOD_RES (865)..(865): Selenocysteine
MNFKRVKPNIFLLNQSRLIISICEIMSXDQGSSXCPKIALVPPCSXSSXXXLVGENVSEEEAQGINGNRPAKHSAASPKPQVPPKPLHLQNSPSSNIHQXPRHKALPSAKPRMEEIKPASASCVSKEKPSKVSDLISRFEGGSSLSNYSDLKKESAVNLNAPRXPGRHGLXXXPQQKLLSQHLPQRQGNDXDKXQGAQXCVANGVMAAQNQMECEEEKAAXLSSDXSIQASEPLLDXHIVNGERDEXAXAPASPXXDSCDGNASDSSYRXPGIGPVLPLEERGAEXEXKVQERENGESPLELEQLDQHHEMKEXNEQKLHKIANELLLXERAYVNRLDLLDQVFYCKLLEEANRGSFPAEMVNKIFSNISSINAFHSKFLLPELEKRMQEWEXXPRIGDILQKLAPFLKMYGEYVKGFDNAMELVKNMXERIPQFKSVVEEIQKQKICGSLXLQHHMLEPVQRIPRYEMLLKDYLRKLPPDSLDWNDAKKSLEIISXAASHSNSAIRKMENLKKLLEIYEMLGEEEDIVNPSNELIKEGQILKLAARNXSAQERYLFLFNNMLLYCVPKFSLVGSKFXVRXRVGIDGMKIVEXQNEEYPHXFQVSGKERXLELQASSAQDKEEWIKALQEXIDAFHQRHEXFRNAIAKDNDIHSEVSXAELGKRAPRWIRDNEVXMCMKCKEPFNALXRRRHHCRACGYVVCWKCSDYKAQLEYDGGKLSKVCKDCYQIISGFXDSEEKKRKGILEIESAEVSGNSVVCSFLQYMEKSKPWQKAWCVIPKQDPLVLYMYGAPQDVRAQAXIPLLGYVVDEMPRSADLPHSFKLXQSKSVHSFAADSEELKQKWLKVILLAVXGEXPGGPNEHPAXLDDHPEPKKKSEC

SEQ ID NO: 9895 - protein, 903 aa, Homo sapiens
  MOD_RES (43)..(43): Selenocysteine
  MOD_RES (55)..(55): Selenocysteine
  MOD_RES (59)..(59): Selenocysteine
  MOD_RES (71)..(71): Selenocysteine
  MOD_RES (74)..(76): Selenocysteine
  MOD_RES (125)..(125): Selenocysteine
  MOD_RES (189)..(189): Selenocysteine
  MOD_RES (196)..(198): Selenocysteine
  MOD_RES (216)..(216): Selenocysteine
  MOD_RES (219)..(219): Selenocysteine
  MOD_RES (224)..(224): Selenocysteine
  MOD_RES (246)..(246): Selenocysteine
  MOD_RES (251)..(251): Selenocysteine
  MOD_RES (262)..(262): Selenocysteine
  MOD_RES (272)..(272): Selenocysteine
  MOD_RES (274)..(274): Selenocysteine
  MOD_RES (280)..(281): Selenocysteine
  MOD_RES (295)..(295): Selenocysteine
  MOD_RES (311)..(311): Selenocysteine
  MOD_RES (313)..(313): Selenocysteine
  MOD_RES (339)..(339): Selenocysteine
  MOD_RES (354)..(354): Selenocysteine
  MOD_RES (418)..(419): Selenocysteine
  MOD_RES (454)..(454): Selenocysteine
  MOD_RES (477)..(477): Selenocysteine
  MOD_RES (522)..(522): Selenocysteine
  MOD_RES (574)..(574): Selenocysteine
  MOD_RES (603)..(603): Selenocysteine
  MOD_RES (606)..(606): Selenocysteine
  MOD_RES (618)..(618): Selenocysteine
  MOD_RES (626)..(626): Selenocysteine
  MOD_RES (635)..(635): Selenocysteine
  MOD_RES (656)..(656): Selenocysteine
  MOD_RES (666)..(666): Selenocysteine
  MOD_RES (683)..(683): Selenocysteine
  MOD_RES (700)..(700): Selenocysteine
  MOD_RES (713)..(713): Selenocysteine
  MOD_RES (759)..(759): Selenocysteine
  MOD_RES (825)..(825): Selenocysteine
  MOD_RES (849)..(849): Selenocysteine
  MOD_RES (877)..(877): Selenocysteine
  MOD_RES (880)..(880): Selenocysteine
  MOD_RES (890)..(890): Selenocysteine
MSDEGGSNFRRVAIRRKSNPSYLPPGVPRPWSRPASHLGRVGXAAFKGQVPSGAXGSSXCPKIALVPPCSXSSXXXLVGENVSEEEAQGINGNRPAKHSAASPKPQVPPKPLHLQNSPSSNIHQXPRHKALPSAKPRMEEIKPASASCVSKEKPSKVSDLISRFEGGSSLSNYSDLKKESAVNLNAPRXPGRHGLXXXPQQKLLSQHLPQRQGNDXDKXQGAQXCVANGVMAAQNQMECEEEKAAXLSSDXSIQASEPLLDXHIVNGERDEXAXAPASPXXDSCDGNASDSSYRXPGIGPVLPLEERGAEXEXKVQERENGESPLELEQLDQHHEMKEXNEQKLHKIANELLLXERAYVNRLDLLDQVFYCKLLEEANRGSFPAEMVNKIFSNISSINAFHSKFLLPELEKRMQEWEXXPRIGDILQKLAPFLKMYGEYVKGFDNAMELVKNMXERIPQFKSVVEEIQKQKICGSLXLQHHMLEPVQRIPRYEMLLKDYLRKLPPDSLDWNDAKKSLEIISXAASHSNSAIRKMENLKKLLEIYEMLGEEEDIVNPSNELIKEGQILKLAARNXSAQERYLFLFNNMLLYCVPKFSLVGSKFXVRXRVGIDGMKIVEXQNEEYPHXFQVSGKERXLELQASSAQDKEEWIKALQEXIDAFHQRHEXFRNAIAKDNDIHSEVSXAELGKRAPRWIRDNEVXMCMKCKEPFNALXRRRHHCRACGYVVCWKCSDYKAQLEYDGGKLSKVCKDCYQIISGFXDSEEKKRKGILEIESAEVSGNSVVCSFLQYMEKSKPWQKAWCVIPKQDPLVLYMYGAPQDVRAQAXIPLLGYVVDEMPRSADLPHSFKLXQSKSVHSFAADSEELKQKWLKVILLAVXGEXPGGPNEHPAXLDDHPEPKKKSEC

SEQ ID NO: 9896 - protein, 65 aa, Homo sapiens
  MOD_RES (1)..(1): Any amino acid
  MOD_RES (4)..(4): Selenocysteine
  MOD_RES (6)..(6): Selenocysteine
  MOD_RES (32)..(32): Selenocysteine
  MOD_RES (47)..(47): Selenocysteine
XAEXEXKVQERENGESPLELEQLDQHHEMKEXNEQKLHKIANELLLXERAYVNRLDLLDQKIEWR

SEQ ID NO: 9897 - protein, 1462 aa, Homo sapiens
  MOD_RES (16)..(16): Selenocysteine
  MOD_RES (61)..(61): Selenocysteine
  MOD_RES (114)..(114): Selenocysteine
  MOD_RES (139)..(139): Selenocysteine
  MOD_RES (156)..(156): Selenocysteine
  MOD_RES (209)..(209): Selenocysteine
  MOD_RES (224)..(224): Selenocysteine
  MOD_RES (239)..(239): Selenocysteine
  MOD_RES (249)..(249): Selenocysteine
  MOD_RES (267)..(267): Selenocysteine
  MOD_RES (269)..(269): Selenocysteine
  MOD_RES (283)..(283): Selenocysteine
  MOD_RES (286)..(286): Selenocysteine
  MOD_RES (303)..(303): Selenocysteine
  MOD_RES (311)..(311): Selenocysteine
  MOD_RES (340)..(340): Selenocysteine
  MOD_RES (343)..(343): Selenocysteine
  MOD_RES (352)..(352): Selenocysteine
  MOD_RES (355)..(355): Selenocysteine
  MOD_RES (478)..(478): Selenocysteine
  MOD_RES (480)..(480): Selenocysteine
  MOD_RES (496)..(496): Selenocysteine
  MOD_RES (501)..(501): Selenocysteine
  MOD_RES (522)..(522): Selenocysteine
  MOD_RES (545)..(545): Selenocysteine
  MOD_RES (606)..(606): Selenocysteine
  MOD_RES (608)..(608): Selenocysteine
  MOD_RES (625)..(625): Selenocysteine
  MOD_RES (630)..(630): Selenocysteine
  MOD_RES (660)..(660): Selenocysteine
  MOD_RES (665)..(665): Selenocysteine
  MOD_RES (710)..(710): Selenocysteine
  MOD_RES (738)..(738): Selenocysteine
  MOD_RES (759)..(759): Selenocysteine
  MOD_RES (771)..(771): Selenocysteine
  MOD_RES (801)..(801): Selenocysteine
  MOD_RES (813)..(813): Selenocysteine
  MOD_RES (845)..(845): Selenocysteine
  MOD_RES (863)..(863): Selenocysteine
  MOD_RES (884)..(884): Selenocysteine
  MOD_RES (936)..(936): Selenocysteine
  MOD_RES (992)..(992): Selenocysteine
  MOD_RES (1031)..(1031): Selenocysteine
  MOD_RES (1051)..(1051): Selenocysteine
  MOD_RES (1067)..(1067): Selenocysteine
  MOD_RES (1078)..(1078): Selenocysteine
  MOD_RES (1119)..(1119): Selenocysteine
  MOD_RES (1124)..(1124): Selenocysteine
  MOD_RES (1143)..(1143): Selenocysteine
  MOD_RES (1156)..(1156): Selenocysteine
  MOD_RES (1180)..(1180): Selenocysteine
  MOD_RES (1238)..(1238): Selenocysteine
  MOD_RES (1243)..(1243): Selenocysteine
  MOD_RES (1258)..(1258): Selenocysteine
  MOD_RES (1343)..(1343): Selenocysteine
  MOD_RES (1355)..(1355): Selenocysteine
  MOD_RES (1394)..(1394): Selenocysteine
  MOD_RES (1413)..(1413): Selenocysteine
  MOD_RES (1436)..(1436): Selenocysteine
  MOD_RES (1446)..(1446): Selenocysteine
MFRGPKPPIAPKPRLXAPNEWRASVYLNDSLNKCSNGRLPCVDRGLDEGPRSIPKCSESEXDEDYIVVPRVPLREDEPKDEGSVGNKALVSPESSAEEEEEREEGGEACGLEGXGAGEDSVAPAAPGAGALSREGEEGXDLALEDEGEGCADEPGXLEQVSRSEEEEKLVQPHRECSLEDSGPWAGEGVFQSDLLLPHIHGEDQEPPDXPGEAEEDDEEGCASXDPAGADEGSGPDRPXEDMGQDAEDXSEEPPEKEELAGVQEAEXAXDCPEVLEEGCEEAXGVXGGEQVDLSEPPDHEKKXNQEVAAAXLEDHAQDESAEESCQIVPFENDCMEDFVXSLXGSPYEFFPXESXSFCSESCSPLSESAKGLESEQAPKLGLRAEENPMVGALCGQCGSLQGGAAEGPAAPDVVVVLEEEALDDALANPYVMGVGLPGQAAPGEGGQAASDALGGYGSKEELNCEAEGGLVPADRKNXSXRVRPHSGKVAGYVPEXVPEEXGPEAGSSAPGIGGAAEEVGKXLLSLEGKPLEASRALPAKPRAFXLYPRSFSVEGREIPVSVYQEPEGSGLDDHRIKRKEDNLSLSCVIGSSGSFSQRNHLPSSGXSXPSSMVDIPPPFDLACIXKKPIXKSSPSLLIESDSPDKYKKKKSSFKRFLALXFKKKXENKLHVDVNVSSSRSSSESSYHGPSRILEVDRRSLSNSPQLKSRXGKLRASESPSSLIFYRDGKRKGVPFSRXVSRVESFEDRSRPPFLPLPLXKPRSISFPSADXSDYENIPAMNSDYENIQIPPRRPARAGAFXKLFEDQSRALSXANENDGYVDMSSFNAFESKQQSADQDAESAYXEPYKVCPISSAAPKEDLXSDEEQRSSEEEDSASRDPSVXHKVEGQSRALVIAQELLSSEKAYVEMLQHLNLDFHGAVMRALDDMDHEGRDXLAREELRQGLSELPAIHDLHQGILEELEERLSNWESQQKVADVFLAREQGFDHHAXHILQFDRYLGLLSENCLHSPRLAAAVREFEQSVQGGSQXAKHRLLRVVQRLFQYQVLLXDYLNNLCPDSAEYDNXQGALSLISKVXDRANDSMEQGENLQKLVHIEHSVRGQGDLLQPGREFLKEGXLMKVXGKNRRPRHLFLMNDVLLYXYPQKDGKYRLKNXLAVANMKVSRPVMEKVPYALKIEXSESCLMLSASSCAERDEWYGCLSRALPEDYKAQALAAFHHSVEIRERLGVSLGERPPXLVPVXHVMMCMNCGCDFSLXLRRHHCHACGKIVCRNCSRNKYPLKYLKDRMAKVCDGCFGELKKRGRAVPGLMRERPVSMSFPLSSPRFSGSAFSSVFQSINPSXFKKQKKVPSALXEVAASGEGSAISGYLSRCKRGKRHWKKLWFVIKGKVLYXYMASEDKVALESMPLLGFXIAPEKEEGSSEVGPIFHLYHKKXLFYSFKAEDXNSAQRWIEAMEDASVL

SEQ ID NO: 9898 - protein, 1178 aa, Homo sapiens
  MOD_RES (8)..(8): Selenocysteine
  MOD_RES (26)..(26): Selenocysteine
  MOD_RES (28)..(28): Selenocysteine
  MOD_RES (42)..(42): Selenocysteine
  MOD_RES (45)..(45): Selenocysteine
  MOD_RES (62)..(62): Selenocysteine
  MOD_RES (70)..(70): Selenocysteine
  MOD_RES (99)..(99): Selenocysteine
  MOD_RES (102)..(102): Selenocysteine
  MOD_RES (111)..(111): Selenocysteine
  MOD_RES (114)..(114): Selenocysteine
  MOD_RES (237)..(237): Selenocysteine
  MOD_RES (239)..(239): Selenocysteine
  MOD_RES (255)..(255): Selenocysteine
  MOD_RES (260)..(260): Selenocysteine
  MOD_RES (281)..(281): Selenocysteine
  MOD_RES (304)..(304): Selenocysteine
  MOD_RES (365)..(365): Selenocysteine
  MOD_RES (367)..(367): Selenocysteine
  MOD_RES (384)..(384): Selenocysteine
  MOD_RES (389)..(389): Selenocysteine
  MOD_RES (419)..(419): Selenocysteine
  MOD_RES (424)..(424): Selenocysteine
  MOD_RES (469)..(469): Selenocysteine
  MOD_RES (497)..(497): Selenocysteine
  MOD_RES (518)..(518): Selenocysteine
  MOD_RES (530)..(530): Selenocysteine
  MOD_RES (560)..(560): Selenocysteine
  MOD_RES (572)..(572): Selenocysteine
  MOD_RES (604)..(604): Selenocysteine
  MOD_RES (622)..(622): Selenocysteine
  MOD_RES (643)..(643): Selenocysteine
  MOD_RES (695)..(695): Selenocysteine
  MOD_RES (751)..(751): Selenocysteine
  MOD_RES (790)..(790): Selenocysteine
  MOD_RES (810)..(810): Selenocysteine
  MOD_RES (826)..(826): Selenocysteine
  MOD_RES (837)..(837): Selenocysteine
  MOD_RES (878)..(878): Selenocysteine
  MOD_RES (883)..(883): Selenocysteine
  MOD_RES (902)..(902): Selenocysteine
  MOD_RES (915)..(915): Selenocysteine
  MOD_RES (939)..(939): Selenocysteine
  MOD_RES (997)..(997): Selenocysteine
  MOD_RES (1002)..(1002): Selenocysteine
  MOD_RES (1017)..(1017): Selenocysteine
  MOD_RES (1102)..(1102): Selenocysteine
  MOD_RES (1114)..(1114): Selenocysteine
  MOD_RES (1129)..(1129): Selenocysteine
  MOD_RES (1152)..(1152): Selenocysteine
  MOD_RES (1162)..(1162): Selenocysteine
MGQDAEDXSEEPPEKEELAGVQEAEXAXDCPEVLEEGCEEAXGVXGGEQVDLSEPPDHEKKXNQEVAAAXLEDHAQDESAEESCQIVPFENDCMEDFVXSLXGSPYEFFPXESXSFCSESCSPLSESAKGLESEQAPKLGLRAEENPMVGALCGQCGSLQGGAAEGPAAPDVVVVLEEEALDDALANPYVMGVGLPGQAAPGEGGQAASDALGGYGSKEELNCEAEGGLVPADRKNXSXRVRPHSGKVAGYVPEXVPEEXGPEAGSSAPGIGGAAEEVGKXLLSLEGKPLEASRALPAKPRAFXLYPRSFSVEGREIPVSVYQEPEGSGLDDHRIKRKEDNLSLSCVIGSSGSFSQRNHLPSSGXSXPSSMVDIPPPFDLACIXKKPIXKSSPSLLIESDSPDKYKKKKSSFKRFLALXFKKKXENKLHVDVNVSSSRSSSESSYHGPSRILEVDRRSLSNSPQLKSRXGKLRASESPSSLIFYRDGKRKGVPFSRXVSRVESFEDRSRPPFLPLPLXKPRSISFPSADXSDYENIPAMNSDYENIQIPPRRPARAGAFXKLFEDQSRALSXANENDGYVDMSSFNAFESKQQSADQDAESAYXEPYKVCPISSAAPKEDLXSDEEQRSSEEEDSASRDPSVXHKVEGQSRALVIAQELLSSEKAYVEMLQHLNLDFHGAVMRALDDMDHEGRDXLAREELRQGLSELPAIHDLHQGILEELEERLSNWESQQKVADVFLAREQGFDHHAXHILQFDRYLGLLSENCLHSPRLAAAVREFEQSVQGGSQXAKHRLLRVVQRLFQYQVLLXDYLNNLCPDSAEYDNXQGALSLISKVXDRANDSMEQGENLQKLVHIEHSVRGQGDLLQPGREFLKEGXLMKVXGKNRRPRHLFLMNDVLLYXYPQKDGKYRLKNXLAVANMKVSRPVMEKVPYALKIEXSESCLMLSASSCAERDEWYGCLSRALPEDYKAQALAAFHHSVEIRERLGVSLGERPPXLVPVXHVMMCMNCGCDFSLXLRRHHCHACGKIVCRNCSRNKYPLKYLKDRMAKVCDGCFGELKKRGRAVPGLMRERPVSMSFPLSSPRFSGSAFSSVFQSINPSXFKKQKKVPSALXEDKVALESMPLLGFXIAPEKEEGSSEVGPIFHLYHKKXLFYSFKAEDXNSAQRWIEAMEDASVL

SEQ ID NO: 9899 - protein, 252 aa, Homo sapiens
  MOD_RES (1)..(1): Any amino acid
  MOD_RES (15)..(15): Selenocysteine
  MOD_RES (27)..(27): Selenocysteine
  MOD_RES (59)..(59): Selenocysteine
  MOD_RES (77)..(77): Selenocysteine
  MOD_RES (98)..(98): Selenocysteine
  MOD_RES (120)..(120): Selenocysteine
  MOD_RES (176)..(176): Selenocysteine
  MOD_RES (215)..(215): Selenocysteine
  MOD_RES (235)..(235): Selenocysteine
  MOD_RES (251)..(251): Selenocysteine
XQIPPRRPARAGAFXKLFEDQSRALSXANENDGYVDMSSFNAFESKQQSADQDAESAYXEPYKVCPISSAAPKEDLXSDEEQRSSEEEDSASRDPSVXHKDFHGAVMRALDDMDHEGRDXLAREELRQGLSELPAIHDLHQGILEELEERLSNWESQQKVADVFLAREQGFDHHAXHILQFDRYLGLLSENCLHSPRLAAAVREFEQSVQGGSQXAKHRLLRVVQRLFQYQVLLXDYLNNLCPDSAEYDNXQ

SEQ ID NO: 9900 - protein, 279 aa, Homo sapiens
  MOD_RES (39)..(39): Selenocysteine
  MOD_RES (56)..(56): Selenocysteine
  MOD_RES (115)..(116): Selenocysteine
  MOD_RES (140)..(140): Selenocysteine
  MOD_RES (165)..(165): Selenocysteine
  MOD_RES (187)..(187): Selenocysteine
  MOD_RES (219)..(219): Selenocysteine
  MOD_RES (222)..(222): Selenocysteine
  MOD_RES (228)..(228): Selenocysteine
  MOD_RES (232)..(232): Selenocysteine
  MOD_RES (234)..(234): Selenocysteine
MLQLRPQVILNCLRRSRPCSLCQDYLKNLIEDAGDYRDXQDALAVVIEVANHANDXMKQGDNFQKLMQIQYSLNGHHEIVQPGRVFLKEGILMKLSRKVMQPRMFFLFNDALLYXXPVQSGMYKLNNMLSLAGMKVRKPXQEAYQNELKIESVERSFILSASSAXERDEWLEAISRAIEEYAKKRIXFCPSRSLDEADSENKEEVSPLGSKAPIWIPDXRAXMCMICXSEFXLXWRRHHCRACGKIVCQACSSNKYGLDYLKNQPARVCEHCFQELQKL

SEQ ID NO: 9901 - protein, 1206 aa, Homo sapiens
  MOD_RES (2)..(2): Selenocysteine
  MOD_RES (45)..(45): Selenocysteine
  MOD_RES (61)..(61): Selenocysteine
  MOD_RES (90)..(90): Selenocysteine
  MOD_RES (150)..(150): Selenocysteine
  MOD_RES (152)..(152): Selenocysteine
  MOD_RES (155)..(155): Selenocysteine
  MOD_RES (203)..(203): Selenocysteine
  MOD_RES (255)..(255): Selenocysteine
  MOD_RES (282)..(282): Selenocysteine
  MOD_RES (309)..(309): Selenocysteine
  MOD_RES (314)..(314): Selenocysteine
  MOD_RES (320)..(320): Selenocysteine
  MOD_RES (322)..(322): Selenocysteine
  MOD_RES (333)..(333): Selenocysteine
  MOD_RES (338)..(338): Selenocysteine
  MOD_RES (352)..(352): Selenocysteine
  MOD_RES (408)..(409): Selenocysteine
  MOD_RES (429)..(430): Selenocysteine
  MOD_RES (444)..(444): Selenocysteine
  MOD_RES (450)..(450): Selenocysteine
  MOD_RES (462)..(462): Selenocysteine
  MOD_RES (507)..(507): Selenocysteine
  MOD_RES (587)..(587): Selenocysteine
  MOD_RES (596)..(596): Selenocysteine
  MOD_RES (599)..(599): Selenocysteine
  MOD_RES (615)..(615): Selenocysteine
  MOD_RES (622)..(622): Selenocysteine
  MOD_RES (657)..(659): Selenocysteine
  MOD_RES (693)..(693): Selenocysteine
  MOD_RES (711)..(711): Selenocysteine
  MOD_RES (741)..(741): Selenocysteine
  MOD_RES (772)..(772): Selenocysteine
  MOD_RES (947)..(947): Selenocysteine
  MOD_RES (968)..(968): Selenocysteine
  MOD_RES (1027)..(1027): Selenocysteine
  MOD_RES (1043)..(1043): Selenocysteine
  MOD_RES (1060)..(1060): Selenocysteine
  MOD_RES (1119)..(1120): Selenocysteine
  MOD_RES (1144)..(1144): Selenocysteine
  MOD_RES (1169)..(1169): Selenocysteine
  MOD_RES (1191)..(1191): Selenocysteine
MXSAAEIKKPPVAPKPKFVVANNKPAPPPIAPKPDIVISSVPQSXKKMKPAIAPKPKVLKXSPVREIGQSPSRKIMLNLEGHKQELAESXDNFNCKYEGNQSNDYISPMCSCSSECIHKLGHRENLCVKQLVLEPLEMNENLENSKIDEXLXIKXRSKCDLYGEKAKNQGGVVLKASVLEEELKDALIHQMPPFISAQKHRPXDSPEMNGGCNSNGQFRIEFADLSPSPSSFEKVPDHHSCHLQLPSDECEHFEXCQDDSEKSNNCFQSSELEALENGKRSXLISSDGVSKKSEVKDLGPLEIHLVPYXPKFPXPKPRKXRXARLLRQKCVDXPSESXEEPGNSDSSSSCLXENSLKINKISVLHQNVLCKQEQVDKMKLGNKSELNMESNSDAQDLVNSQKAMCNEXXSFEKMAPSFDKDSNLSSDSXXVDGSSMSLAVDEGXGFIRCXVSMSLPKQLKLXCNEHLQSGRNLGVSAPQMQKESVIKEENSLRIVPKKPQRHSLPAXGVLKKAASEELLEKSSYPSSEEKSSEKSLERNHLQHLCAQNRGVSSSFDMPKRASEKPVWKLPHPILPFSGNPEFLKSVXVSSNSEPSXALXKPRAKSLSAMDVEKCXKPCKDSXKKNSFKKLLSMKLSICFMKSDFQKFWSKSSQLGDXXXGHLSSGEQKGIESDWQGLLVGEEKRSKPIKAYSXENYSLESQKKRKKSRGQXSAANGLRAESLDDQMLSRESSSQAPYKSVXSLCAPEYENIRHYEEIPEYENLPFIMAIRKXQELEWQNSSSMEDADANVYEVEEPYEAPDGQLQLGPRHQHSSSGASQEEQNDLGLGDLPSDEEEIINSSDEDDVSSESSKGEPDPLEDKQDEDNGMKSKVHHIAKEIMSSEKVFVDVLKLLHIDFRDAVAHASRQLGKPVIEDRILNQILYYLPQLYELNRDLLKELEERMLHWXEQQRIADIFVKKGPYLKMYSXYIKEFDKNIALLDEQCKKNPGFAAVVREFEMSPRCANLALKHYLLKPVQRIPQYRLLLXDYLKNLIEDAGDYRDXQDALAVVIEVANHANDXMKQGDNFQKLMQIQYSLNGHHEIVQPGRVFLKEGILMKLSRKVMQPRMFFLFNDALLYXXPVQSGMYKLNNMLSLAGMKVRKPXQEAYQNELKIESVERSFILSASSAXERDEWLEAISRAIEEYAKKRIXFCPSRSLDEADSENK

SEQ ID NO: 9902 - protein, 1374 aa, Homo sapiens
  MOD_RES (2)..(2): Selenocysteine
  MOD_RES (45)..(45): Selenocysteine
  MOD_RES (61)..(61): Selenocysteine
  MOD_RES (90)..(90): Selenocysteine
  MOD_RES (150)..(150): Selenocysteine
  MOD_RES (152)..(152): Selenocysteine
  MOD_RES (155)..(155): Selenocysteine
  MOD_RES (203)..(203): Selenocysteine
  MOD_RES (255)..(255): Selenocysteine
  MOD_RES (282)..(282): Selenocysteine
  MOD_RES (309)..(309): Selenocysteine
  MOD_RES (314)..(314): Selenocysteine
  MOD_RES (320)..(320): Selenocysteine
  MOD_RES (322)..(322): Selenocysteine
  MOD_RES (333)..(333): Selenocysteine
  MOD_RES (338)..(338): Selenocysteine
  MOD_RES (352)..(352): Selenocysteine
  MOD_RES (408)..(409): Selenocysteine
  MOD_RES (429)..(430): Selenocysteine
  MOD_RES (444)..(444): Selenocysteine
  MOD_RES (450)..(450): Selenocysteine
  MOD_RES (462)..(462): Selenocysteine
  MOD_RES (507)..(507): Selenocysteine
  MOD_RES (587)..(587): Selenocysteine
  MOD_RES (596)..(596): Selenocysteine
  MOD_RES (599)..(599): Selenocysteine
  MOD_RES (615)..(615): Selenocysteine
  MOD_RES (622)..(622): Selenocysteine
  MOD_RES (657)..(659): Selenocysteine
  MOD_RES (693)..(693): Selenocysteine
  MOD_RES (711)..(711): Selenocysteine
  MOD_RES (741)..(741): Selenocysteine
  MOD_RES (772)..(772): Selenocysteine
  MOD_RES (947)..(947): Selenocysteine
  MOD_RES (968)..(968): Selenocysteine
  MOD_RES (1027)..(1027): Selenocysteine
  MOD_RES (1043)..(1043): Selenocysteine
  MOD_RES (1060)..(1060): Selenocysteine
  MOD_RES (1119)..(1120): Selenocysteine
  MOD_RES (1144)..(1144): Selenocysteine
  MOD_RES (1169)..(1169): Selenocysteine
  MOD_RES (1191)..(1191): Selenocysteine
  MOD_RES (1223)..(1223): Selenocysteine
  MOD_RES (1226)..(1226): Selenocysteine
  MOD_RES (1232)..(1232): Selenocysteine
  MOD_RES (1236)..(1236): Selenocysteine
  MOD_RES (1238)..(1238): Selenocysteine
  MOD_RES (1331)..(1331): Selenocysteine
  MOD_RES (1364)..(1364): Selenocysteine
MXSAAEIKKPPVAPKPKFVVANNKPAPPPIAPKPDIVISSVPQSXKKMKPAIAPKPKVLKXSPVREIGQSPSRKIMLNLEGHKQELAESXDNFNCKYEGNQSNDYISPMCSCSSECIHKLGHRENLCVKQLVLEPLEMNENLENSKIDEXLXIKXRSKCDLYGEKAKNQGGVVLKASVLEEELKDALIHQMPPFISAQKHRPXDSPEMNGGCNSNGQFRIEFADLSPSPSSFEKVPDHHSCHLQLPSDECEHFEXCQDDSEKSNNCFQSSELEALENGKRSXLISSDGVSKKSEVKDLGPLEIHLVPYXPKFPXPKPRKXRXARLLRQKCVDXPSESXEEPGNSDSSSSCLXENSLKINKISVLHQNVLCKQEQVDKMKLGNKSELNMESNSDAQDLVNSQKAMCNEXXSFEKMAPSFDKDSNLSSDSXXVDGSSMSLAVDEGXGFIRCXVSMSLPKQLKLXCNEHLQSGRNLGVSAPQMQKESVIKEENSLRIVPKKPQRHSLPAXGVLKKAASEELLEKSSYPSSEEKSSEKSLERNHLQHLCAQNRGVSSSFDMPKRASEKPVWKLPHPILPFSGNPEFLKSVXVSSNSEPSXALXKPRAKSLSAMDVEKCXKPCKDSXKKNSFKKLLSMKLSICFMKSDFQKFWSKSSQLGDXXXGHLSSGEQKGIESDWQGLLVGEEKRSKPIKAYSXENYSLESQKKRKKSRGQXSAANGLRAESLDDQMLSRESSSQAPYKSVXSLCAPEYENIRHYEEIPEYENLPFIMAIRKXQELEWQNSSSMEDADANVYEVEEPYEAPDGQLQLGPRHQHSSSGASQEEQNDLGLGDLPSDEEEIINSSDEDDVSSESSKGEPDPLEDKQDEDNGMKSKVHHIAKEIMSSEKVFVDVLKLLHIDFRDAVAHASRQLGKPVIEDRILNQILYYLPQLYELNRDLLKELEERMLHWXEQQRIADIFVKKGPYLKMYSXYIKEFDKNIALLDEQCKKNPGFAAVVREFEMSPRCANLALKHYLLKPVQRIPQYRLLLXDYLKNLIEDAGDYRDXQDALAVVIEVANHANDXMKQGDNFQKLMQIQYSLNGHHEIVQPGRVFLKEGILMKLSRKVMQPRMFFLFNDALLYXXPVQSGMYKLNNMLSLAGMKVRKPXQEAYQNELKIESVERSFILSASSAXERDEWLEAISRAIEEYAKKRIXFCPSRSLDEADSENKEEVSPLGSKAPIWIPDXRAXMCMICXSEFXLXWRRHHCRACGKIVCQACSSNKYGLDYLKNQPARVCEHCFQELQKLDHQHSPRIGSPGNHKSPSSALSSVLHSIPSGRKQKKIPAALKEVSANXEDSSMSGYLYRSKGNKKPWKHFWFVIKNKVLYXYAASEVRSEI

SEQ ID NO: 9903 - protein, 1430 aa, Homo sapiens
  MOD_RES (2)..(2): Selenocysteine
  MOD_RES (45)..(45): Selenocysteine
  MOD_RES (61)..(61): Selenocysteine
  MOD_RES (90)..(90): Selenocysteine
  MOD_RES (150)..(150): Selenocysteine
  MOD_RES (152)..(152): Selenocysteine
  MOD_RES (155)..(155): Selenocysteine
  MOD_RES (203)..(203): Selenocysteine
  MOD_RES (255)..(255): Selenocysteine
  MOD_RES (282)..(282): Selenocysteine
  MOD_RES (309)..(309): Selenocysteine
  MOD_RES (314)..(314): Selenocysteine
  MOD_RES (320)..(320): Selenocysteine
  MOD_RES (322)..(322): Selenocysteine
  MOD_RES (333)..(333): Selenocysteine
  MOD_RES (338)..(338): Selenocysteine
  MOD_RES (352)..(352): Selenocysteine
  MOD_RES (408)..(409): Selenocysteine
  MOD_RES (429)..(430): Selenocysteine
  MOD_RES (444)..(444): Selenocysteine
  MOD_RES (450)..(450): Selenocysteine
  MOD_RES (462)..(462): Selenocysteine
  MOD_RES (507)..(507): Selenocysteine
  MOD_RES (587)..(587): Selenocysteine
  MOD_RES (596)..(596): Selenocysteine
  MOD_RES (599)..(599): Selenocysteine
  MOD_RES (615)..(615): Selenocysteine
  MOD_RES (622)..(622): Selenocysteine
  MOD_RES (657)..(659): Selenocysteine
  MOD_RES (693)..(693): Selenocysteine
  MOD_RES (711)..(711): Selenocysteine
  MOD_RES (741)..(741): Selenocysteine
  MOD_RES (772)..(772): Selenocysteine
  MOD_RES (947)..(947): Selenocysteine
  MOD_RES (968)..(968): Selenocysteine
  MOD_RES (1027)..(1027): Selenocysteine
  MOD_RES (1043)..(1043): Selenocysteine
  MOD_RES (1060)..(1060): Selenocysteine
  MOD_RES (1119)..(1120): Selenocysteine
  MOD_RES (1144)..(1144): Selenocysteine
  MOD_RES (1169)..(1169): Selenocysteine
  MOD_RES (1191)..(1191): Selenocysteine
  MOD_RES (1223)..(1223): Selenocysteine
  MOD_RES (1226)..(1226): Selenocysteine
  MOD_RES (1232)..(1232): Selenocysteine
  MOD_RES (1236)..(1236): Selenocysteine
  MOD_RES (1238)..(1238): Selenocysteine
  MOD_RES (1331)..(1331): Selenocysteine
  MOD_RES (1364)..(1364): Selenocysteine
  MOD_RES (1383)..(1383): Selenocysteine
  MOD_RES (1428)..(1428): Selenocysteine
MXSAAEIKKPPVAPKPKFVVANNKPAPPPIAPKPDIVISSVPQSXKKMKPAIAPKPKVLKXSPVREIGQSPSRKIMLNLEGHKQELAESXDNFNCKYEGNQSNDYISPMCSCSSECIHKLGHRENLCVKQLVLEPLEMNENLENSKIDEXLXIKXRSKCDLYGEKAKNQGGVVLKASVLEEELKDALIHQMPPFISAQKHRPXDSPEMNGGCNSNGQFRIEFADLSPSPSSFEKVPDHHSCHLQLPSDECEHFEXCQDDSEKSNNCFQSSELEALENGKRSXLISSDGVSKKSEVKDLGPLEIHLVPYXPKFPXPKPRKXRXARLLRQKCVDXPSESXEEPGNSDSSSSCLXENSLKINKISVLHQNVLCKQEQVDKMKLGNKSELNMESNSDAQDLVNSQKAMCNEXXSFEKMAPSFDKDSNLSSDSXXVDGSSMSLAVDEGXGFIRCXVSMSLPKQLKLXCNEHLQSGRNLGVSAPQMQKESVIKEENSLRIVPKKPQRHSLPAXGVLKKAASEELLEKSSYPSSEEKSSEKSLERNHLQHLCAQNRGVSSSFDMPKRASEKPVWKLPHPILPFSGNPEFLKSVXVSSNSEPSXALXKPRAKSLSAMDVEKCXKPCKDSXKKNSFKKLLSMKLSICFMKSDFQKFWSKSSQLGDXXXGHLSSGEQKGIESDWQGLLVGEEKRSKPIKAYSXENYSLESQKKRKKSRGQXSAANGLRAESLDDQMLSRESSSQAPYKSVXSLCAPEYENIRHYEEIPEYENLPFIMAIRKXQELEWQNSSSMEDADANVYEVEEPYEAPDGQLQLGPRHQHSSSGASQEEQNDLGLGDLPSDEEEIINSSDEDDVSSESSKGEPDPLEDKQDEDNGMKSKVHHIAKEIMSSEKVFVDVLKLLHIDFRDAVAHASRQLGKPVIEDRILNQILYYLPQLYELNRDLLKELEERMLHWXEQQRIADIFVKKGPYLKMYSXYIKEFDKNIALLDEQCKKNPGFAAVVREFEMSPRCANLALKHYLLKPVQRIPQYRLLLXDYLKNLIEDAGDYRDXQDALAVVIEVANHANDXMKQGDNFQKLMQIQYSLNGHHEIVQPGRVFLKEGILMKLSRKVMQPRMFFLFNDALLYXXPVQSGMYKLNNMLSLAGMKVRKPXQEAYQNELKIESVERSFILSASSAXERDEWLEAISRAIEEYAKKRIXFCPSRSLDEADSENKEEVSPLGSKAPIWIPDXRAXMCMICXSEFXLXWRRHHCRACGKIVCQACSSNKYGLDYLKNQPARVCEHCFQELQKLDHQHSPRIGSPGNHKSPSSALSSVLHSIPSGRKQKKIPAALKEVSANXEDSSMSGYLYRSKGNKKPWKHFWFVIKNKVLYXYAASEDVAALESQPLLGFXVIQVKDENSESKVFQLLHKNMLFYVFKAEDAHSAQKWIEAFQEGXIL

SEQ ID NO: 9904 - protein, 59 aa, Homo sapiens
  MOD_RES (2)..(2): Selenocysteine
  MOD_RES (21)..(21): Selenocysteine
  MOD_RES (31)..(31): Selenocysteine
  MOD_RES (48)..(48): Selenocysteine
MXSAAVQEHPRRNRMILVLVXFPLMRRKSSXVLMKMMSALSQVKESLXHWKINRMKIME

SEQ ID NO: 9905 - protein, 133 aa, Homo sapiens
  MOD_RES (1)..(1): Any amino acid
  MOD_RES (75)..(75): Selenocysteine
  MOD_RES (108)..(108): Selenocysteine
XNKYGLDYLKNQPARVCEHCFQELQKLDHQHSPRIGSPGNHKSPSSALSSVLHSIPSGRKQKKIPAALKEVSANXEDSSMSGYLYRSKGNKKPWKHFWFVIKNKVLYXYAASEVDRSISGRHNIVAVLVSSLL

SEQ ID NO: 9906 - protein, 41 aa, Homo sapiens
  MOD_RES (7)..(8): Selenocysteine
  MOD_RES (10)..(10): Selenocysteine
  MOD_RES (13)..(13): Selenocysteine
MAEGEIXXFXALXEKFNLPPGNYKKPKLLYCSNGGHFLRIL

SEQ ID NO: 9907 - protein, 58 aa, Homo sapiens
  MOD_RES (7)..(8): Selenocysteine
  MOD_RES (10)..(10): Selenocysteine
  MOD_RES (13)..(13): Selenocysteine
  MOD_RES (45)..(45): Selenocysteine
  MOD_RES (49)..(49): Selenocysteine
MAEGEIXXFXALXEKFNLPPGNYKKPKLLYCSNGGHFLRILPDGXVDGXRDRSDQHIQ

SEQ ID NO: 9908 - protein, 155 aa, Homo sapiens
  MOD_RES (7)..(8): Selenocysteine
  MOD_RES (10)..(10): Selenocysteine
  MOD_RES (13)..(13): Selenocysteine
  MOD_RES (45)..(45): Selenocysteine
  MOD_RES (49)..(49): Selenocysteine
  MOD_RES (74)..(74): Selenocysteine
  MOD_RES (76)..(76): Selenocysteine
  MOD_RES (84)..(84): Selenocysteine
  MOD_RES (93)..(93): Selenocysteine
  MOD_RES (111)..(111): Selenocysteine
  MOD_RES (138)..(138): Selenocysteine
MAEGEIXXFXALXEKFNLPPGNYKKPKLLYCSNGGHFLRILPDGXVDGXRDRSDQHIQLQLSAESVGEVYIKSXEXGQYLAMDXDGLLYGSQXPNEECLFLERLEENHYNXYISKKHAEKNWFVGLKKNGSCKRGPRXHYGQKAILFLPLPVSSD

SEQ ID NO: 9909 - protein, 93 aa, Homo sapiens
  MOD_RES (7)..(8): Selenocysteine
  MOD_RES (10)..(10): Selenocysteine
  MOD_RES (13)..(13): Selenocysteine
  MOD_RES (45)..(45): Selenocysteine
  MOD_RES (49)..(49): Selenocysteine
  MOD_RES (57)..(57): Selenocysteine
  MOD_RES (90)..(90): Selenocysteine
  MOD_RES (92)..(92): Selenocysteine
MAEGEIXXFXALXEKFNLPPGNYKKPKLLYCSNGGHFLRILPDGXVDGXRDRSDQHXAAQCGKRGGGVYKEYRDWPVLGHGHRRAFIRLXDXK

SEQ ID NO: 9910 - protein, 60 aa, Homo sapiens
  MOD_RES (7)..(8): Selenocysteine
  MOD_RES (10)..(10): Selenocysteine
  MOD_RES (13)..(13): Selenocysteine
  MOD_RES (45)..(45): Selenocysteine
  MOD_RES (49)..(49): Selenocysteine
  MOD_RES (57)..(57): Selenocysteine
  MOD_RES (59)..(59): Selenocysteine
MAEGEIXXFXALXEKFNLPPGNYKKPKLLYCSNGGHFLRILPDGXVDGXRDRSDQHXDXK

SEQ ID NO: 9911 - protein, 66 aa, Homo sapiens
  MOD_RES (7)..(7): Selenocysteine
  MOD_RES (36)..(36): Selenocysteine
  MOD_RES (50)..(50): Selenocysteine
MWKWILXHCASAFPHLPGCCCCCFLLLFLVSSVPVXCQALGQDMVSPEAXNSSSSSFSSPSSAGRH

SEQ ID NO: 9912 - protein, 208 aa, Homo sapiens
  MOD_RES (7)..(7): Selenocysteine
  MOD_RES (36)..(36): Selenocysteine
  MOD_RES (50)..(50): Selenocysteine
  MOD_RES (86)..(86): Selenocysteine
  MOD_RES (101)..(101): Selenocysteine
  MOD_RES (114)..(114): Selenocysteine
  MOD_RES (163)..(163): Selenocysteine
  MOD_RES (192)..(192): Selenocysteine
  MOD_RES (197)..(197): Selenocysteine
MWKWILXHCASAFPHLPGCCCCCFLLLFLVSSVPVXCQALGQDMVSPEAXNSSSSSFSSPSSAGRHVRSYNHLQGDVRWRKLFSFXKYFLKIEKNGKVSGXKKENCPYSILEIXSVEIGVVAVKAINSNYYLAMNKKGKLYGSKEFNNDCKLKERIEENGYNXYASFNWQHNGRQMYVALNGKGAPRRGQKXRRKNXSAHFLPMVVHS

SEQ ID NO: 9913 - protein, 225 aa, Homo sapiens
  MOD_RES (35)..(35): Selenocysteine
  MOD_RES (73)..(73): Selenocysteine
  MOD_RES (94)..(94): Selenocysteine
  MOD_RES (98)..(98): Selenocysteine
  MOD_RES (102)..(102): Selenocysteine
  MOD_RES (115)..(115): Selenocysteine
  MOD_RES (140)..(140): Selenocysteine
  MOD_RES (190)..(190): Selenocysteine
MAALASSLIRQKREVREPGGSRPVSAQRRVCPRGXKSLCQKQLLILLSKVRLCGGRPARPDRGPEPQLKGIVXKLFCRQGFYLQANPDGSIQGXPEDXSSFXHFNLIPVGLRVVXIQSAKLGHYMAMNAEGLLYSSPHFXAECRFKECVFENYYVLYASALYRQRRSGRAWYLGLDKEGQVMKGNRVKKXKAAAHFLPKLLEVAMYQEPSLHSVPEASPSSPPAP

SEQ ID NO: 9914 - protein, 101 aa, Homo sapiens
  MOD_RES (16)..(16): Selenocysteine
  MOD_RES (66)..(66): Selenocysteine
MAMNAEGLLYSSPHFXAECRFKECVFENYYVLYASALYRQRRSGRAWYLGLDKEGQVMKGNRVKKXKAAAHFLPKLLEVAMYQEPSLHSVPEASPSSPPAP

SEQ ID NO: 9915 - protein, 243 aa, Homo sapiens
  MOD_RES (75)..(75): Selenocysteine
  MOD_RES (92)..(92): Selenocysteine
  MOD_RES (96)..(96): Selenocysteine
  MOD_RES (104)..(104): Selenocysteine
  MOD_RES (142)..(142): Selenocysteine
  MOD_RES (162)..(162): Selenocysteine
  MOD_RES (192)..(192): Selenocysteine
  MOD_RES (229)..(229): Selenocysteine
  MOD_RES (231)..(231): Selenocysteine
  MOD_RES (243)..(243): Selenocysteine
MAAAIASSLIRQKRQARESNSDRVSASKRRSSPSKDGRSLCERHVLGVFSKVRFCSGRKRPVRRRPEPQLKGIVXRLFSQQGYFLQMHPDGXIDGXKDENSDYXLFNLIPVGLRVVAIQGVKASLYVAMNGEGYLYSSDVFXPECKFKESVFENYYVIYSSXLYRQQESGRAWFLGLNKEGQIMKGNRVKKXKPSSHFVPKPIEVCMYREPSLHEIGEKQGRSRKSSGXPXMNGGKVVNQDSX

SEQ ID NO: 9916 - protein, 144 aa, Homo sapiens
  MOD_RES (43)..(43): Selenocysteine
  MOD_RES (63)..(63): Selenocysteine
  MOD_RES (93)..(93): Selenocysteine
  MOD_RES (130)..(130): Selenocysteine
  MOD_RES (132)..(132): Selenocysteine
  MOD_RES (144)..(144): Selenocysteine
MESKALFNLIPVGLRVVAIQGVKASLYVAMNGEGYLYSSDVFXPECKFKESVFENYYVIYSSXLYRQQESGRAWFLGLNKEGQIMKGNRVKKXKPSSHFVPKPIEVCMYREPSLHEIGEKQGRSRKSSGXPXMNGGKVVNQDSX

SEQ ID NO: 9917 - protein, 107 aa, Homo sapiens
  MOD_RES (13)..(13): Selenocysteine
  MOD_RES (30)..(30): Selenocysteine
  MOD_RES (34)..(34): Selenocysteine
  MOD_RES (42)..(42): Selenocysteine
  MOD_RES (80)..(80): Selenocysteine
  MOD_RES (100)..(100): Selenocysteine
MESKEPQLKGIVXRLFSQQGYFLQMHPDGXIDGXKDENSDYXLFNLIPVGLRVVAIQGVKASLYVAMNGEGYLYSSDVFXPECKFKESVFENYYVIYSSXLYRQQES

SEQ ID NO: 9918 - protein, 181 aa, Homo sapiens
  MOD_RES (13)..(13): Selenocysteine
  MOD_RES (30)..(30): Selenocysteine
  MOD_RES (34)..(34): Selenocysteine
  MOD_RES (42)..(42): Selenocysteine
  MOD_RES (80)..(80): Selenocysteine
  MOD_RES (100)..(100): Selenocysteine
  MOD_RES (130)..(130): Selenocysteine
  MOD_RES (167)..(167): Selenocysteine
  MOD_RES (169)..(169): Selenocysteine
  MOD_RES (181)..(181): Selenocysteine
MESKEPQLKGIVXRLFSQQGYFLQMHPDGXIDGXKDENSDYXLFNLIPVGLRVVAIQGVKASLYVAMNGEGYLYSSDVFXPECKFKESVFENYYVIYSSXLYRQQESGRAWFLGLNKEGQIMKGNRVKKXKPSSHFVPKPIEVCMYREPSLHEIGEKQGRSRKSSGXPXMNGGKVVNQDSX

SEQ ID NO: 9919 - protein, 141 aa, Homo sapiens
  MOD_RES (6)..(6): Selenocysteine
  MOD_RES (10)..(10): Selenocysteine
  MOD_RES (18)..(18): Selenocysteine
  MOD_RES (56)..(56): Selenocysteine
  MOD_RES (76)..(76): Selenocysteine
  MOD_RES (106)..(106): Selenocysteine
MHPDGXIDGXKDENSDYXLFNLIPVGLRVVAIQGVKASLYVAMNGEGYLYSSDVFXPECKFKESVFENYYVIYSSXLYRQQESGRAWFLGLNKEGQIMKGNRVKKXKPSSHFVPKPIEVCMYREPSLHEIGEKQGRSRKSS

SEQ ID NO: 9920 - protein, 245 aa, Homo sapiens
  MOD_RES (36)..(36): Selenocysteine
  MOD_RES (71)..(71): Selenocysteine
  MOD_RES (88)..(88): Selenocysteine
  MOD_RES (92)..(92): Selenocysteine
  MOD_RES (98)..(98): Selenocysteine
  MOD_RES (100)..(100): Selenocysteine
  MOD_RES (119)..(119): Selenocysteine
  MOD_RES (133)..(133): Selenocysteine
  MOD_RES (138)..(138): Selenocysteine
  MOD_RES (154)..(154): Selenocysteine
  MOD_RES (213)..(213): Selenocysteine
  MOD_RES (222)..(222): Selenocysteine
  MOD_RES (224)..(224): Selenocysteine
  MOD_RES (245)..(245): Selenocysteine
MAAAIASSLIRQKRQAREREKSNACKCVSSPSKGKXSCDKNKLNVFSRVKLFGSKKRRRRRPEPQLKGIVXKLYSRQGYHLQLQADGXIDGXKDEDSXYXLFNLIPVGLRVVAIQGVQXKLYLAMNSEGYLYXSELFXPECKFKESVFENYYVXYSSMIYRQQQSGRGWYLGLNKEGEIMKGNHVKKNKPAAHFLPKPLKVAMYKEPSLHDLXEFSRSGSGXPXKSRSVSGVLNGGKSMSHNESX

SEQ ID NO: 9921 - protein, 192 aa, Homo sapiens
  MOD_RES (18)..(18): Selenocysteine
  MOD_RES (35)..(35): Selenocysteine
  MOD_RES (39)..(39): Selenocysteine
  MOD_RES (45)..(45): Selenocysteine
  MOD_RES (47)..(47): Selenocysteine
  MOD_RES (66)..(66): Selenocysteine
  MOD_RES (80)..(80): Selenocysteine
  MOD_RES (85)..(85): Selenocysteine
  MOD_RES (101)..(101): Selenocysteine
  MOD_RES (160)..(160): Selenocysteine
  MOD_RES (169)..(169): Selenocysteine
  MOD_RES (171)..(171): Selenocysteine
  MOD_RES (192)..(192): Selenocysteine
MALLRKSYSEPQLKGIVXKLYSRQGYHLQLQADGXIDGXKDEDSXYXLFNLIPVGLRVVAIQGVQXKLYLAMNSEGYLYXSELFXPECKFKESVFENYYVXYSSMIYRQQQSGRGWYLGLNKEGEIMKGNHVKKNKPAAHFLPKPLKVAMYKEPSLHDLXEFSRSGSGXPXKSRSVSGVLNGGKSMSHNESX

SEQ ID NO: 9922 - protein, 43 aa, Homo sapiens
  MOD_RES (40)..(40): Selenocysteine
MLRQDSIQSAELKKKESPFRAKCHEIFCCPLKQVHHKENXEPE

SEQ ID NO: 9923 - protein, 207 aa, Homo sapiens
  MOD_RES (3)..(3): Selenocysteine
  MOD_RES (31)..(31): Selenocysteine
  MOD_RES (75)..(75): Selenocysteine
  MOD_RES (87)..(87): Selenocysteine
  MOD_RES (104)..(104): Selenocysteine
  MOD_RES (108)..(108): Selenocysteine
  MOD_RES (114)..(114): Selenocysteine
  MOD_RES (116)..(116): Selenocysteine
  MOD_RES (135)..(135): Selenocysteine
  MOD_RES (149)..(149): Selenocysteine
  MOD_RES (154)..(154): Selenocysteine
  MOD_RES (170)..(170): Selenocysteine
MRXSMKKVGMHHLSSSGGSYYLILDDAPPGXQEYIMLRQDSIQSAELKKKESPFRAKCHEIFCCPLKQVHHKENXEPEEPQLKGIVXKLYSRQGYHLQLQADGXIDGXKDEDSXYXLFNLIPVGLRVVAIQGVQXKLYLAMNSEGYLYXSELFXPECKFKESVFENYYVXYSSMIYRQQQSGRGWYLGLNKEGEIMKGNHVKKNKPA

SEQ ID NO: 9924 - protein, 199 aa, Homo sapiens
  MOD_RES (6)..(6): Selenocysteine
  MOD_RES (25)..(25): Selenocysteine
  MOD_RES (42)..(42): Selenocysteine
  MOD_RES (46)..(46): Selenocysteine
  MOD_RES (52)..(52): Selenocysteine
  MOD_RES (54)..(54): Selenocysteine
  MOD_RES (73)..(73): Selenocysteine
  MOD_RES (87)..(87): Selenocysteine
  MOD_RES (92)..(92): Selenocysteine
  MOD_RES (108)..(108): Selenocysteine
  MOD_RES (167)..(167): Selenocysteine
  MOD_RES (176)..(176): Selenocysteine
  MOD_RES (178)..(178): Selenocysteine
  MOD_RES (199)..(199): Selenocysteine
MSGKVXKPKEEKDASKEPQLKGIVXKLYSRQGYHLQLQADGXIDGXKDEDSXYXLFNLIPVGLRVVAIQGVQXKLYLAMNSEGYLYXSELFXPECKFKESVFENYYVXYSSMIYRQQQSGRGWYLGLNKEGEIMKGNHVKKNKPAAHFLPKPLKVAMYKEPSLHDLXEFSRSGSGXPXKSRSVSGVLNGGKSMSHNESX

SEQ ID NO: 9925 - protein, 98 aa, Homo sapiens
  MOD_RES (6)..(6): Selenocysteine
  MOD_RES (25)..(25): Selenocysteine
  MOD_RES (69)..(69): Selenocysteine
  MOD_RES (81)..(81): Selenocysteine
  MOD_RES (98)..(98): Selenocysteine
MSGKVXKPKEEKDASKVLDDAPPGXQEYIMLRQDSIQSAELKKKESPFRAKCHEIFCCPLKQVHHKENXEPEEPQLKGIVXKLYSRQGYHLQLQADGX

SEQ ID NO: 9926 - protein, 255 aa, Homo sapiens
  MOD_RES (6)..(6): Selenocysteine
  MOD_RES (25)..(25): Selenocysteine
  MOD_RES (69)..(69): Selenocysteine
  MOD_RES (81)..(81): Selenocysteine
  MOD_RES (98)..(98): Selenocysteine
  MOD_RES (102)..(102): Selenocysteine
  MOD_RES (108)..(108): Selenocysteine
  MOD_RES (110)..(110): Selenocysteine
  MOD_RES (129)..(129): Selenocysteine
  MOD_RES (143)..(143): Selenocysteine
  MOD_RES (148)..(148): Selenocysteine
  MOD_RES (164)..(164): Selenocysteine
  MOD_RES (223)..(223): Selenocysteine
  MOD_RES (232)..(232): Selenocysteine
  MOD_RES (234)..(234): Selenocysteine
  MOD_RES (255)..(255): Selenocysteine
MSGKVXKPKEEKDASKVLDDAPPGXQEYIMLRQDSIQSAELKKKESPFRAKCHEIFCCPLKQVHHKENXEPEEPQLKGIVXKLYSRQGYHLQLQADGXIDGXKDEDSXYXLFNLIPVGLRVVAIQGVQXKLYLAMNSEGYLYXSELFXPECKFKESVFENYYVXYSSMIYRQQQSGRGWYLGLNKEGEIMKGNHVKKNKPAAHFLPKPLKVAMYKEPSLHDLXEFSRSGSGXPXKSRSVSGVLNGGKSMSHNESX

SEQ ID NO: 9927 - protein, 247 aa, Homo sapiens
  MOD_RES (73)..(73): Selenocysteine
  MOD_RES (94)..(94): Selenocysteine
  MOD_RES (99)..(99): Selenocysteine
  MOD_RES (102)..(102): Selenocysteine
  MOD_RES (121)..(121): Selenocysteine
  MOD_RES (140)..(140): Selenocysteine
  MOD_RES (190)..(190): Selenocysteine
  MOD_RES (217)..(217): Selenocysteine
  MOD_RES (224)..(224): Selenocysteine
  MOD_RES (229)..(229): Selenocysteine
  MOD_RES (246)..(247): Selenocysteine
MAAAIASGLIRQKRQAREQHWDRPSASRRRSSPSKNRGLCNGNLVDIFSKVRIFGLKKRRLRRQDPQLKGIVXRLYCRQGYYLQMHPDGALDGXKDDSXNSXLFNLIPVGLRVVAIQGVKXGLYIAMNGEGYLYPSELFXPECKFKESVFENYYVIYSSMLYRQQESGRAWFLGLNKEGQAMKGNRVKKXKPAAHFLPKPLEVAMYREPSLHDVGEXVPKPGVXPSKSXSASAIMNGGKPVNKSKXX

SEQ ID NO: 9928 - protein, 252 aa, Homo sapiens
  MOD_RES (11)..(11): Selenocysteine
  MOD_RES (51)..(51): Selenocysteine
  MOD_RES (69)..(69): Selenocysteine
  MOD_RES (78)..(78): Selenocysteine
  MOD_RES (99)..(99): Selenocysteine
  MOD_RES (104)..(104): Selenocysteine
  MOD_RES (107)..(107): Selenocysteine
  MOD_RES (126)..(126): Selenocysteine
  MOD_RES (145)..(145): Selenocysteine
  MOD_RES (195)..(195): Selenocysteine
  MOD_RES (222)..(222): Selenocysteine
  MOD_RES (229)..(229): Selenocysteine
  MOD_RES (234)..(234): Selenocysteine
  MOD_RES (251)..(252): Selenocysteine
MVKPVPLFRRXDFKLLLCNHKDLFFLRVSKLLDCFSPKSMWFLWNIFSKGXHMLQCLCGKSLKKNKNPXDPQLKGIVXRLYCRQGYYLQMHPDGALDGXKDDSXNSXLFNLIPVGLRVVAIQGVKXGLYIAMNGEGYLYPSELFXPECKFKESVFENYYVIYSSMLYRQQESGRAWFLGLNKEGQAMKGNRVKKXKPAAHFLPKPLEVAMYREPSLHDVGEXVPKPGVXPSKSXSASAIMNGGKPVNKSKXX

SEQ ID NO: 9929 - protein, 207 aa, Homo sapiens
  MOD_RES (51)..(51): Selenocysteine
  MOD_RES (69)..(69): Selenocysteine
  MOD_RES (80)..(80): Selenocysteine
  MOD_RES (84)..(84): Selenocysteine
  MOD_RES (130)..(130): Selenocysteine
  MOD_RES (146)..(146): Selenocysteine
  MOD_RES (150)..(150): Selenocysteine
  MOD_RES (177)..(177): Selenocysteine
  MOD_RES (184)..(184): Selenocysteine
MAEVGGVFASLDWDLHGFSSSLGNVPLADSPGFLNERLGQIEGKLQRGSPXDFAHLKGILRRRQLYCRXGFHLEIFPNGXVHGXRHDHSRFGILEFISLAVGLISIRGVDSGLYLGMNERGELYGSKKLXRECVFREQFEENWYNXYASXLYKHSDSERQYYVALNKDGSPREGYRXKRHQKFXHFLPRPVDPSKLPSMSRDLFHYR
